United States Patent Application Publication US 2019/0348154 A1 - sequence listing, part 28

SEQ ID NO: 104678 - DNA, 1875 bp, Enterobacter aerogenes
atgtatcttgcagagctcacgataaagaattttcgcaaactgcgtgaagccacgctgaaatttcaacccggtttaaatgttctggtaggcccaaacaacgtagggaaaagtgcagcaatcgatgcactccggacgcttcttgcaggtcatgaagagaattatcctcgcctcgatggttctgatagacaccgtccgcatgaggacgacccaactggagatataagtttccattttgtcttccgagatcttagccttgaagatgaagcggactttattgctgccctcaagccaaatggggacaagacaatggaggcgcatatccatgtccagtataccgatatggataagacgggacgattcaaagtccggcgttggtgcggtgatcacccagaaatttcgcttacctcagatatgatggagaaccttcggggggtctatctccagcctctccgcgatgccgcgcagggccttcgtcctaaccgtaacagccagctggctcgattacttcatttgctcaccgatgatgcaggtcgtgacacaataaatacggctttaaagcaacttgatgaaacacttaaacaagacaaatccattcagagtacccataaagcgatatcaaccagacatgattccatgatgggtactcagctagcgcaggagcttgccgtcggactcagtgtgactgattttcagcgcctctcttcccgactgaccctgacggctgaagccatggagattgagaagaatggattgggcttcaataatctgatcttcatggcggtagtacttagtgaattggccaaaaatactgattctgctttcaggagtttgattattgaggaacctgaagcgcatttgcatccccaactgcagcgcgtattgctgcagtaccttgcagggattccaacgggtgaaggcgaaaagcctgtacaactatttgtcaccagccattccccaaattttgccagtaattcaaagctggactctcttgtatgcctgatcgaaaacgaagctggcgttgaaactttctttccacgtgatatcaagtttgaaaagggaaaacgtgaaaagttagagcgatatctggacgtaacaagggctgaactattttttgctcgccgggtgatttttgttgagggcgcagcagaacttatattgattgacgcgcttgctaagaagatgaactttgatctcaagggatatggggtcagtctcattagcgttgagggacttaattttgactccttcctcccgctttttggagagcaggggctgcgaatccccgtcgctgtagtaaccgatgcagatccatttgaagaagaagaagttgaagccgtggcagagggtgaacaggctgaagaggaaattgatgacttactttctgaggctgcctaccaggaagaaacagatgctcctgatgatggagagcccgctggcaatgctgagaaaaagaaaaaagttaaaaggaaagaggtgtacccagcgttgggagatcaggtgcggctatcggcaaataccatcaagatgaagaatctggaggatgatttcgtgaaggtttttcatggattgaagacccttgaatatgatctggctctcattgaggcgaaccgcgacccaatgcttactgcattagccgactcacatccaaaaatctctaaagctctacgtaatatagttgatgcacagccagacaataccgcaaaaaccaaagcgttgttctgcggaatgtttgagcgaaaaggtaatggcaatattcagaaaggtcgattcgcccaagcattagcagaacagatttcgaaagaaaatggttttgaagtccctgagtacctccaaaaagctattcaacacgtctgtcagggagtggtcaagccttga

SEQ ID NO: 104679 - DNA, 1728 bp, Enterobacter aerogenes
ttgaaactatcaaaggaacagatagatatcatagaagcaccgttagggccaattgcggtcacagcgtgcgcaggaagtgggaagacagctacagccattaggcgtctgatcgccattcggcagaaaatgcaaaacagtcgcggccgcgttgtgctgttgtctttctccaatgttgctgtcaataccttcaatgcagggtatgcggaactcgctgctggcctaccagacgatgctaatcgtcgaagggtggaagtcgatacacttgacggattttttaccaaacatgttttacgtccccatgcttacaggactatgaccgcacctcaggctgcatacttggtgtcaggttcggagccttttcttgccaggtttaaatattggcgtgaaggtcaccctcctttgccattaaaagacataaaaataagcttactggatggggactttgtcttttattccgatgtaagaaattaccttgaacatcttgataaaaataaggttttaaagatcattgatgacctaggccgtttaggtgcttacactcatgagataggtcggtactgggtgtataggaccctagattctcaacctgcagtattgagggcactggcagcccgctacccacaaatacttgtcgatgagtctcaggatttgggaacactgcatgaggaaatcttaaagctactcattgctgctggggttcaggttacgcttatcggggatgttaatcaggggatttatggcttcgctggtgctgacggtgagttcctgaatagctacgaggagcgtgcagaggtgaccggctacaagcttactcgcaattatcgttccctgcctccaatcataaatatcgccaacattcttagtggccgccaagacgcaccataccgcccaagggaacaaggtggagcttattttattggatacaaggattcggaacttcccaaattaattgatgcattcaaggcccgtgttgatgaattaggcatgcaacatcaggatgctgtgctcctctgtcggggagcagatagagccgcagtaattgcgggtaggactgcccctccaggacaaggtatggtcaaggtgttagcagaagcatcattgttaagggatcagcatagtaactaccacggatgctttaacttggtctgtcgggctattctcagcttattggaggatataccctatggcctcagttctagacttcagggggtatcacatgatgctgagatgaagggactaaagcgattactatggtgtttcagtcgcaacgctgatttgggactcccttcgtctgctcttgtggctaagaccgactggcactccaagcttttaacgaatgttaaagtgcttctcgcagagattgaaaggcactacggatataaagttgctggcaatataggtactaaactcactaagaaattattaacagatcatgcactaactagtgcagtgtcggctcaaggacacgggctaagagtcgagacggttcatcaggttaaaggggagtctatcggtgcggttatgtatgtggctaagaaatccaatatcaaagcactactttcaggtacaggtgatgaagaaggacgtatcgggtatgtcgcaataactcgggccaagaacttgttttggctggctgtaccacaatcatgtcttaaagaattaaaagaagatctcattaaagccggttttcaggaatggatcaaagttgccatcattgctcctgcctga

SEQ ID NO: 104680 - DNA, 672 bp, Enterobacter aerogenes
atggctatgtcaccacctcctatttttgaaggctacgactattacagcgtctctgaagaattttttagcaaattaccagctgatctaagagcgccttttgaacaaataatgaagaaaggggcggagattattagcagttgcgataaagagattgaaagtctgattagacttataaaggtaatacctactacaacaagccttagttacatttatcgtcggcttcgtacgaccaagtttgaaatcactactgaatcgatgatggaacaggagatgttaacaaccgcttttgtggttagctacgcacgtttgttctccaaaagcaatggcacttgcgttctccaacggaatgatctccctgcccacttacgggctgttcatgatgagctgtataaaattcgcaacgaacgttatgcccataacggaggtcataaatcgattgatactctagtagggtttgcgttcagcgacacacaattttatatacatgcgcaaatgagtttagggctccatataggtggaagaaacgagtgggaagacctaatcaaattcatcgacgcttcaatgtacgaacggctttataaaatacttgcgcgtttgaaggagcaaacgggttacgagtggttatttccagacggcccgacaccaagttgggtgggcgattacggcgattga

SEQ ID NO: 104681 - DNA, 657 bp, Enterobacter aerogenes
atgtatcaaaaatttatgagcatgattagaaatcaaacccctgaatctattgatgaattttacacgtcagttgatgagctaaaggcatgttcaagcgacaaaaggtttatagacacaatcaatagaattagcattaccaaaaatgaaattgatgacattctagaagatgttgaaaaaaatacactagatccttccataccctctctcttcaagcactgtatagaatggggtaaattatatcccaacggtttttatattaagcatgacgattccaaagcgattacagaacaacaagatatttttaataaatttatggatatgtcaaaaatcacggaggtatatggatatgatagaaggacttttgagctaccaattaaagctcgctctttgacattccattcatcgcaagaatatcctcaactacaaatcgcagatatagtagcaagtgcggcagcttattatgttaattgtttaaaacgaaatgaattagatgattatctctttaaagagctcaaaagaattaaaatagataactattttaaagatatggttatatggcctacaacatatgttacgcctcaagaactaggaacagtctataccggtggactaaatccggcgaatggagttgcagagtatctttctcaatatcaatag

SEQ ID NO: 104682 - DNA, 984 bp, Enterobacter aerogenes
atgagtaataccgcctccattacccttttgagcgcttgcacatttgcaagtcaggtggcaggaccggtaacttttaccgaaactctcctggatgctccagggccaaaaggccctttgaaaggtacgttactcaccccaaactcaaaaccaaccgccgttgttcttattgttcctggctccgggccgaccgatcgggatggaaacaacccgcttggtgtgaatgcatcaccttaccgacttcttgctgaaggcctgaccgcaaaaggttttacaacgcttcgtatcgacaaacgtggaatgttcgccagcgcaagggccgtagaggatgctaatgcggtgatgattgctgactatgttgaggatgttcgctcctgggcaaaagtgcttaggggtcatatgcacactccctgtatttgggttttgggacacagtgaaggaggcttagtcgcacttgcctcggctcaagaagaggatgtgtgtggcgtggttcttatcgcaacgcccgggaggccgatgggtgaggtgttgaggaggcaacttaccgctaatccggaaaacgaaatgttattaaagtctgcattgccgataattgatgctctggaacaccagcggcgggtcgatactacgaatatgcatccagcactgcaaaatctctttaatcctgcggttcagggatttttgatcaattcgttttcatataatcctagtcagctcatttcgaccatttccaaacccgtgttagtgctacaaggtcaacgcgatctccaggtggaagaaacggatgcaagactacttaaagccgctaatcctcaagcgtccctggttctcctgcccaatatgaaccatgttatgaaagaggtggcttcggatgatcgcaaggcgaatattgcttcatacattgaaccagaaagccccttagcacccggtttaatcgattcgattgagcatttcttgctccacaacttaaattttcccgaaatgtaa

SEQ ID NO: 104683 - DNA, 537 bp, Enterobacter aerogenes
ttgctgcttaacacaaagcgtttacaccttcgcccggtactagcatcagatgtaaccgacctcttcaaaatttatggtgaccctgctacaaatacctttaacccagcaggaccgtatgtggatattgactacgcaaaaacaattttgcatcgttggctcgatcattggcaaattcatggcttcggaaactgggcaatatcacagcaagataaccctgggaagattattgggtttggtggtttaagtattcgcagctacaacgatgtaactattaacaatcttggatatcgtttttctacagatgtctggggaaaaggtctcgccactgaattttcaatgtatacaataagatatggattcgatgatatcaaactaacagaggtttcagctgttgtaagagaaaaccacatggcctcacgaagaattctcgagaagacgggactaaggtacgtaaaagatatccacgatgttaaagatgccccaccaagtctcctctattcactcactatgaatgaatggctcagtagatcaaagtaa

SEQ ID NO: 104684 - DNA, 552 bp, Enterobacter aerogenes
atgattaaagaagctcttaattccggaataccaatcgaaaaattaagtctggcgctcaacatttcggtagatgctattagaggtaaaataagagtgcttaatggtatttctcctgacgttattcatatattcgctaatcaccacgtccctaaagctacattctatattctaaaaaaaatgaagccaatgaggcagattgagtgctcaaaattaatgatgaatgttgaaaactttagtagtaattttgcactttctttgcttcacaatacaccgcctaatttgttagtgagaaaatcggaaaatttagaggctgatactgctggtcgcagaaagatgttagacaggcttgaaagagaaatggctcaaattcatgttgatacccagaagctaaaggaaacttatggtgtgaatacactcaaattagtaattgtaaaaacacatattactagcctgctcgataacccaaaaatcctacagtggcttctaaagcataagccagaatttttgacagagttgaataaaatttctaatattaattctcttgatgattag

SEQ ID NO: 104685 - DNA, 789 bp, Enterobacter aerogenes
atgaaaaccagtgtattgtatttatttatcatagctatatatttgcattctgtcccggtgcaggctacgagtaatagcctgcaagctctgaatataattcggagagctgatgatgttcgctcaccaaatgagccttttcgctataacgtgactgtacttgagtataaagagggtggcaaagtgcctgaaaacatgcagtcgctggatatatcgatgcgctttattaaaccagaaaacggtttgaaagctgatgctcgttcacttatccgttttacctatcctccgcgagataaaggcaagatcatgttatctgattggtatgacttatggttttatacgccagaattacgcaggcctattcctatttcgcgctcacaacgattaatcggtcagatctctaatggcgatgttatagtgacgaacttcgagtatgcttatgattcgaccctggaaggggaagagccttgtggagataaaatttgctatcgactgtctctcactcggaaatctgaggccgttacttatcctaaagtgatttacctggtggaaaaaagtgcggaatatcggccatttaaagcatcatattattctcttgataatcaacttctcaaaagtgtcttgtataaaaactatcagatagtattagggaagaatcgtccaacagagattattgtgcagaatgctcgctatgaaaaaggttattctgtcatgaagtatagtgatgttcgccttgaatcgttgcctgaattccacttcactaaagagtttattcagcgaggcgcgaagtga

SEQ ID NO: 104686 - DNA, 597 bp, Enterobacter aerogenes
  misc_feature (568)..(577): n is a, c, g, or t
ttgcgttgtggtaagtgtggtttaccgatgaccaaaaatagtgcagctaaagcaagatttagatatgtatgcacctcaaagaatacaaacgggaaatcatgcggaaatgcaggctttaccggacaaccgttagaacatgttattcttcaattaatagctgatcatatctggacaacagcgaaagaagataaaacagaatggttcgtttccgagatagccaagttagaccaacaaattaaaaagttggtaagacttgcatcattaaccgatgattctgatattgatgaactcgcaaccgaaatcaacagttatcgaaaacaaaagcgtgaactcgaattcaagttcaacgaatacaaagttgaacgttcagaacaggttagtacaggttgggacgaattcagaaaatttgataccgaagatgttacgaacccagaacgcaaacggattagattacgtattaaacaagcaatcagaagcatcgattgcactacgttcaacaagcggttcggattgttcatgataaaatacatagacaattctgaacagcgggttgtattgaagtacaacnnnnnnnnnncaattctgaacagcgggtag

SEQ ID NO: 104687 - DNA, 339 bp, Enterobacter aerogenes
atgaagctggttaccgtggtaatcaaaccattcaaactggaagacgttcgcgaagcgttgtcctccatcggcattcagggcctgacggtcacggaagtgaaaggcttcggccgccagaaaggccatgccgagctctatcgcggcgccgaatacagcgtcaatttcctgccaaaagtaaaaattgatattgcgattgccgacgatcagctggatgaggttgtcgaggtgataggcaaggccgcctggaccggaaaaattggcgacggcaaaattgttgtcgccgaactgcagcgcgtgattcgtattcgtaccggcgaatccgacgaagcggcactgtaa

SEQ ID NO: 104688 - DNA, 3153 bp, Enterobacter aerogenes
atggacttttcccgcttttttatcgacaggccgatttttgccgccgtgctgtcgattctgatttttatcaccggcttgatcgccattccgctgttgccggtcagcgaatatcctgatgtcgtaccgcctagcgtgcaggtgcgggcggaatatcccggcgccaacccgaaagtgatcgccgaaaccgtggcgacgccattggaagaagccatcaacggcgtcgaaaatatgatgtacatgaagtccgtcgcaggctctgacggcgtattggttactaccgtcactttccgtccgggaaccgaccccgatcaggcgcaggttcaggtgcaaaaccgggtctcgcaggccgaggcgcgtctcccggaagatgtccgccgtttaggcatcaccacccagaagcaatcgccaacgctgacgttggtggtgcatctgttttcacccagcggtaagtacgattcactgtatatgcgtaactacgccacgttgaaagtcaaagatgaactcgcgcgtttgcccggcgtcggacagatccagatttttggctcgggtgaatatgcgatgcgcatctggctggatcccaataaggttgcggcgcgcgggttaaccgcatcggatgtggtgactgcgatgcaggagcaaaacgttcaggtttccgccggacagctgggcgccgagccgctgccgaaagagagcgattttttgatctctattaacgcccaggggcgtctgcatacggaagaagagtttggcaatattattctgaaaacggcgcaagacggttcgctggtgcgcctgcgcgacgtggcgcgtatcgaaatgggctcgggtagctatgcgttacgttcccagcttaacaataaagacgcggtcgggattggtattttccagtcgccgggggcgaatgctatcgatttgtctaacgccgtacgcgcgaaaatgaacgaactctccacccgtttcccggaagatatgaaatgggcggcgccgtacgatccgacagtgtttgtgcgcgattcgattcgcgcggtggtgcaaacgctgctggaagcggtagtgttggtggtgctggtggtgattttgttcctgcagacgtggcgtgcgtcgattattccgcttatcgcggtgccggtatcggtggtgggtaccttcagcattctttatctgctgggcttttcgctgaataccctgagtctgttcgggctggtactggcgatcggtatcgtcgtggatgatgccatcgtggtggtggaaaacgtcgaacgaaacatcgaagaggggctggcgccactagcggcggcgcatcaggcgatgcgcgaagtctccgggccgattatcgctatcgcgctggtgttgtgcgcggtgtttgtgccgatggcgttcctctccggggtaacggggcagttttataagcagtttgcggtgacgattgcgatatcgacggtgatctccgccatcaactccctgacgctctcgccagcgctggctgcgctgctgttaaaaccgcacggcgcggcgaaagacttcccgacccggcttatcgatcgcttgttcggctggattttccgtccgtttaaccgttttttccatcgtagctcaaacggctatcaggggctggtaggcaaaacgctcgggcgacgcggcgcggtgtttgtggtctacgtcctgctactctgcgccgctggcgtgatgtttaaagtcgtacccggcgggtttattccgacgcaggataaactgtatttaattggcggcgtgaaaatgcccgaaggctcttcactggcgcgcaccgacgccgtgatccgcaaaatgagcgaaatcggtatgaataccgaaggcgtggattatgcggtggcttttccggggcttaatgcgctgcagttcaccaatacgccgaacaccgggacggtcttttttggtctgaaaccgttcgatcagcgaaaacacaccgcagcggaaattaatgccgagattaatgccaaaatcgcgcaaattcagcagggctttggtttctcgattctgccgccgccgattttagggctgggtcagggttccggctattcactgtatattcaggatcgcgccggtctgggttatggcgcgttgcaaaacgcggtgaacgcgatgtcgggttcgattatgcagacgccggggatgcatttcccgatatcgacctatcaggcgaacgtgccgcagctggatgtgcaggtcgatcgagataaagcgaaagcgcagggcgtgtcgttgaccgaccttttcgggacgctgcaaacttatctggggtcatcgtatgtgaatgactttaaccagtttgggcgtacctggcgcgtaatggcgcaggctgacgggccgttccgcgacagcgtggaagatattgctaatttacgcacccgcaataatcagggcgaaatggtgccgattggcagtatggtgaatattaataccacctacggaccggatccggtgattcgctacaatggttatccggcggcggatttgattggcgatgccgatccccgcgtgctctcgtccacgcaggcgatgacgcagctggcaggcatgtctaagcaaatactgccgaatgggatgaatattgagtggacggatctcagcttccagcaggctacgcagggcaatacggcgctgatcgtcttcccggtcgcggtattgttggcattcctggtgctggcggcgctatatgaaagctggacgctaccgctggcggtgatccttatcgtcccgatgaccatgctctccgcgctgtttggcgtctggctgaccggcggcgacaataacgtatttgtgcaggtagggctggtggtgctgatggggctggcgtgtaaaaacgcgattctgattgtcgagtttgcccgcgaactggaaattcagggcaaagggattatggaagcggcgctggaagcctgtcgtctgcgtttacgtccgattatcatgacctcgattgcctttattgccgggacgattccgctgattcttggccatggcgcgggggcggaagtgcgcggcgtcaccgggatcacggtgttctccggtatgctcggcgtgacgctgtttgggctgttcctgacgccggtgttttacgtgacgctgcgaaaactggtgacgcgcggcgaaccggttagggacgtcctgcctgagtag

SEQ ID NO: 104689 - DNA, 258 bp, Enterobacter aerogenes
atgcggctgcagcatgcgcattccaatatcaacaatacggtaaacaacgcctttaatagtaaccagttcactgattccaaacgaattcaggaattctttaacctgatccgcccggcgctcatcatagtcatttgccgccaacagcgcgcgaacttcaccgacatgttgcccgccggcagtaattgttggcatgggttcatcgctgcgttggccatcacggcaggtaccgcgaagtttcaccagatgagaggtaattaa

SEQ ID NO: 104690 - DNA, 156 bp, Enterobacter aerogenes
atgatgatcgactgtggtaacagaatgagctggctcatcaagaccaacgcccggcccgttatagttcccgccgtagtgtttcgccaaaaacgccgttgttacggcaaatttattgccaccagcgacaacggttcccaatggcttacccagatttag

SEQ ID NO: 104691 - DNA, 474 bp, Enterobacter aerogenes
atggtacacgaaactctgggcggacaggaacttcgggacaaaatttttgctggacttaaagtctatgaaggaaaagcctttatcgagcggtttggtctgtttatgggcaaggcgcagttgcttgagtttgggctgaaaaaaatcttagtttctctacctggctatagtcttcccgaagaaacattagagaggttgactttaggccaaactcgcgttgagcttgagaaactggggttacgtactgattataatgaaaacctaaagtcatttaaagataagagaaattcgatggcccatgaattcctggccaattatgcgattactcagcaactattagacggacctgtacttattggtccctttgagagggagttaactcatgcaatctatgaattggaacaattgatcattgtctttgactttattaatagtgccggtgacgttactgcttggttggaaccgaaagccctttga

SEQ ID NO: 104692 - DNA, 1059 bp, Enterobacter aerogenes
atgcgcatgaaccgtcttcccggatatggcctcccggagcttgctttctggcctcatccttattacgaaacaaatgcttggcagatgtacagcctgaaacttcgaaccgatggaacccttcactggtttcgtcattacgttgatcgaggtatgccagatcgtgcatttgctgacgtctatgatgattacacagaagcgagaaaaacggcagtagagatgaataaaaaaatcgagtttgatattgataaactccctttatctcttcccgaaaaagagtcattgcgtttaaaagtggataaggccatcactgccaaaatacggttgatagatgaagagcaaatgatgctcaatgaagccacaatgaaacacactaacactccgcgttttttgcctgatgatttaattctcaagcctaagttagagaatttacgggagcctctgctcgatgctctcaatgagaggccttatctgcatatcatttacctacctaagtaccaaatttgctttgaattagttgaacataatacttgggagcgatccaatcttattagttcaagagcggcaaaaatctactatcaagaacgcattgctagaggctttggattgtctggaggagcacattggggcaaaacaaaatcagctatacgctcaatgctccttccacgtgccaaccaactgttacagctagccagtgtaaaacggatgttagatgaagccataagaaacggaaacaaagtactcgttttcagtaattacgttttctggtacgaggacaaaaaccaggtcgggtggagcgttaaggaggtaagcgagagagaggttacgtcaaggggtaatacaatctggacagcaggaaccattatttccaaaaatcatggtcggattgttgtgcttccttacactaaggaaaacggcgaacacgttaaaggctataccaaaaacgcaccgaatgacggcaaagcgctgcctaggcatagagacgaatatgttgagcttcccttcaaaattctgaatggtgatttgatgttcagtttattcggtgagcttaaatatgaataa

SEQ ID NO: 104693 - DNA, 258 bp, Enterobacter aerogenes
atggcggtaatttatacaaaaaatgcctacccgccccacatttttacatcgagtttacagactataaccgaaagctcaaaaaacgccctgccgcgccggcggcaccacagaacagggatcctgatggatgatgacatccgatcccgggaaacggcgcaaaatagcctgctccacctagtcggcgatcacgtgcgcctgtaccagcgggaggttatcttccatttccaaatgtatttgaataaagcgagtcggccctga

SEQ ID NO: 104694 - DNA, 699 bp, Enterobacter aerogenes
atgggttggcgctggccagcgtacgctttcaccgtcgcagcgcatgaccataaagaagcgtttgcggattgttggcgccccgaagtcgcatgcgcgcaactcgcggtaatcaatgttgtatcccagcccttgaatcaaagaccgggcttgctcgctatcgggctgaatggaaagaaactcgcatacctcggccagcgccggatgattcgcattaatgccagtcgaaagcattccgacaaatgcagcaaatgtttcacctgtacgcgctggatccgggcgcatctcattttccagcagcggcccccaggttttaaattcctcgacgttttcaagcatcatgacgcgcggacgcttcgccagcgcccagcgaatgactacccacgccagccctcgaatctctttttttacgggcttagcacccttggctttggagaagtgccggcaatcagggctaaaccatgcgagaccaacagggttgccgccagtcgccgccgcaggatcgacatcaaatacggactcgcagtagtgcagcgtatccgggtgattcgtcttgtgcatggcaatggcgttttcatcgtggttgatggcaatatcaacactgcgaccaatcgccagttcgatcccggtagaggcaccgccgccaccagcaaagttatcaacgataatttcacgcatggaccgccccctgcatactgctga

SEQ ID NO: 104695 - DNA, 345 bp, Enterobacter aerogenes
atgagcaagtcgcttaacgcacgttgtatccgccgctgggaagttgaatttaaaccactctgcgactcaaagcgcaatccgtactggcgcaagcgtgaccttcgtgggtatatccgcgaagcggcgctcactactgcttatagcatggttgagagcatggctgaacgtaacgccaaggttgactatgacggctccctgaagggttggactcctgaattctcggagtggtaccggaatcgtcgtgaagagtatctcaaagaagcgcgcgacttcctgaatgaagatgcgaccaatgacgatatcgacgaagagattcagaacgagctggaggccgggaatgactga

SEQ ID NO: 104696 - DNA, 702 bp, Enterobacter aerogenes
atgactgagcgcggaatgatttttaacggtgagatggttcgcgccattatcgacggcaggaagactcagacccggcggattgttaaagggactgacggcgccgtgaagttctgcaaggaatgggacatcaacggagaagagattttcgttgtgctcggcgaaaaagaccacacaggaatgaaccctgttttgggtgctatctcatgcccgttcggaggcatcggcgatcgcatctgggtgcgtgaaacatggtctgacgtgaatctcgaaggtattccagctgtggcataccgcgcagatggcgatgtttactctctaatggatgatgaatcgtttttagatgaggacggagcatttaattacgatgaaccccgcgtcactaaatatcattttgctgcttggtattcagaccttattggaggaatagagggtgattggcgaccttcaatccacatgccgcgctgggccagccgcattctgctggaaataactgatattcgcgtcgagcgcctcgctagcgtgagtgacgaagatgctggcaaagagggttacccagcggacccctccccgtttggtgggccaatggataaatggctgtggtttcgtcagttgtgggacggcatctatcaaaaacatagctttaaacacaacccttgggtgtgggttatcgagtttaaacggattaagggggccggcaaatga

SEQ ID NO: 104697 - DNA, 228 bp, Enterobacter aerogenes
atgaccaaatcaaccataaccagagagcgcctggaaaaaattaaatcctggcgtgaaacctacggcgccggaagcaacgtaatgctgccagcagaagaagcggcagagctggccagtatcgcactggattcgattgacgctgaagtaatgcattgttatcacggtgccgtcgataacgaggatggggtgattacctgtcgacactgcggaaaggagtggagcatatga

SEQ ID NO: 104698 - DNA, 585 bp, Enterobacter aerogenes
atgatcaataaccagttaaccagagaacagctaatcgaaaagcttaagcaccgcatttcagtaacagaaaaatatcctgaagtagaagaggcacaactcgaagctattatttacaagcttgcactggccgtcatagtcagcgcgccggaagaacaaaaagtgacgtgctggtcttgccgaaataaggttgagatttcggctatcggtgattgtgatgggtactgtccggaatgcgactcaccgatcgatcttgatgaagaaccatacactgccccccagccagcgccaacgattcaggtaacagatgccatggcttacgcttaccatcatgcgctaaccgatggtcccttatgcgatgaagatgtggaggatattaagactggattgcgctctgctttcgccaatgcaaccacaaatcagccaaggccggtattgcctgatgaattcgaccgcgacaaagctttcgatctgttcaactcgttccctgatggcgatgtagtggactgtgttcagtacacttggaacgcctgtcgcgcagccatgcttgcggtcgcaccaccagcaccaaaaagcacagttaaatag

SEQ ID NO: 104699 - DNA, 426 bp, Enterobacter aerogenes
atgacaactcagccattcactcacgtgaatgaagtccttgcttttgctccgttggaagaaggtgaacgaagccttttctctaagcaaaacgtttatctaattggcaatgaacttgttgaaaatagcgaaattcagtgggatttcgttttgccatgtggaaaggattggcacttccgacagaaggttagcctactcagtgatgaatcaaggctgagcgcatttaaagattatattcggcgtatcctgaaggatgcttctcgtgaaaccatgctggtcatgatcgatgggaaagaggtttctgtacctttccattatgaagttgaaacgggaggaaggatgattaaggttcctgaattagatggaaattttcacgacgccacacaacttggtgaatctataccgtcatttttcagcgcccgccgctaa

SEQ ID NO: 104700 - DNA, 597 bp, Enterobacter aerogenes
atggtccaacccttcggtataaacagtaatggtgtaatttttgctgaggggtatggcgctatgttactggaaagtcaacagcaccgattagggcgagggaaaagccatggaataagcattacttcggcttacaagcagattaatgctgggcgtagtaatgattcctactggcaaagtactagtattctaaagttgattaatgcaatgttaaatgataagggtataaaaaaagaagacctttgtgcatttattccccatggtaatggcacttcatcaagtgataatgttgaggcaaaatccatcagcatgtatgccggtgaaaatgatcttccagtattggcctataagggacaaattggctataccgcaacaggttctggattaatcgatttagttattgggcatcatatactgcttaatagagaattaattttccctgtcgttaacgatcagattcgagaggatgtcgcacatcatatctccttagaggggggcgtaagtaaacatactaaaaaacacctcctgaaaactggcttaggggtcgacggttccgtcgttgcacttttgatgactaatttgcataataatactgactaa

SEQ ID NO: 104701 - DNA, 1188 bp, Enterobacter aerogenes
atgattattgccaccgccggacatgtggaccacggcaaaaccacgctgctgcaggcgattaccggcgtcaacgccgatcgtctgccggaagagaaatcacgcggtatgactatcgatctcggctacgcctattggccgcagcctgatggccgggtgttgggttttatcgatgtgccggggcatgaaaagtttttgtccaacatgttggccggcgtgggcgggatcgatcacgcgctgctggtggtggcctgcgatgacggcgtgatggcgcaaacccgcgagcacctggcaattctgcagttaacgggaaaaccgacgttaaccgttgcgttgaccaaaacggaccgcgtggacgcggcgcgggttgccgaagtccgggcacaggtggaatccacgctgagcgagctggggttcgacgacgtggctttcttcgccaccgcggcgacggaaaacctcggcattaccgaactgcgcagccatttgctccagctgaccgagcgcgcgcatccgcaacagcagcgttttcgtctggcgctggatcgcgcctttaccgttaagggcgcggggctggtggtgaccgggacggcgttatccggcgaggtaaaaatcggcgataccctctggctgaccggggccaataaaccgatgcgtgtccgcgggctgcatgcgcagaatcagccggttgaacaggcgcaggccgggcagcgtatcgcgctgaacatcgttggcgacgcgcaaaaagaggatctcagccgcggcgactggctactctcggcgcagcccgcagaaccttgcgagcgggcgatcgtcgaactcatctgtcacgcgccgctcagccagtggcagtcgctgcatatccaccatgccgccagccatatcaccggccgcgtttcgttactggaaggcaatctggccgagctggtgctggatacgccgctgtggctggcggataacgatcgcctggtgttgcgcgatatctccgcccgtttgacgctggccggcgcgcgggtggtgacgctgaatccgccgcgccgcggtaaacgcaagccggagtatctgcagtggctttacgcgctggcggcagcgcagggcgacgatgcgcaggcgttggatattcatctgcagcgcgatgcggtgcgtcttgacgaggcggcagctgagcgccgacggcctgacggcattaattaa

SEQ ID NO: 104702 - DNA, 720 bp, Enterobacter aerogenes
atgcggtgcgtcttgacgaggcggcagctgagcgccgacggcctgacggcattaattaaccgtccggactacctgcaggccgggaatagcctgcttagtgcgccgctggccgcccgctggcagaaaaaactgctcgacgcgctggcccgttatcacgaccagcatcgcgatgagccggggccggggcgtgaacgtctgcggcggattgcgctgccgatggaagatgaagcgctggtgctgttattgattgaacagatgcgcagcagcggcgtcattcaaagccatcacggctggctgcacctgccggaacataaagccgggtttaccgatgagcagcaggccatctggcagcgtgcggaatcgctcttcgccgatgagccatggtgggtgcgcgatctggcgcgcgatctgaacgtcgaagagtcgttgatgcgcgcggtgctgcgccaggcggcgcagcaggggatgattacggcgatcgtgaaagatcgttattatcgcaacgatcggattgttgaatttgcgcaattgatccgccgcctggatctgcagcgtggttccacctgcgcggcggattttcgcgatacgctgaatattggccgtaaactggcgattcaaattctcgaatatttcgaccgcattggctttacccgccgtcggggcaacgatcatctacttcgcgatgcgctgttattccctgaaaataaaaacggcgaataa

SEQ ID NO: 104703 - DNA, 1521 bp, Enterobacter aerogenes
atgtcctcaaaatggcgtaacgtcctatgctacatttatttgccggtctggatttacaccggactattattattgcttgctttagcttttgtactgttttacgaagcgattaacggttttcatgataccgcaaacgcagttgcaacggtgatttacactcgcgcaatgcggtcgcagcttgctgttgcgatggcggcactcttcaactttttcggcgttctgctgggcggtctcagcgtagcctatgccatcgtgcatatgctgccaacggacctgctgcttaacatgggttccgcacatggcctcgccatggtgttctctatgctgctggcggcaatcatctggaacctcggaacctggtatttcggcctaccggcctccagttctcacaccctgattggcgctatcatcggtattggtttaaccaatgcgctgatgaccggtacttcagtggtggatgcgctgaatatcccgaaagtcatcggcatttttgcctcacttatcgtctcgccgatcgttggcctggtggtagcgggcggcctgattttcattctgcgtcgttactggagcggtaccaaaaaacgcgctcgtatacacctgaccccagcggaacgcgaaaagaaagacggtaagaaaaaaccgccgttctggacccgtatcgcgctgatcctgtccgctatcggcgtgtcgttctcgcacggcgccaacgatgggcagaaaggcattggtctggtcatgctggtcttgattggcgtcgcgccggcgggcttcgtggtcaacatgaacgcatctggttacgaaatcactcgtacccgcgatgcggtcaacaacgtggaaaccttcttccaacagcgccctgagctgctgaagaaagccaccggcgttgatcaactggttccgtcaccggaaaccaataccgcggccaacggcgagtttcactgccatccggcgaacaccatcaacgcgcttgaccgcgtgaagacaatgctcaccggtacggaaagctacgatacactgtcagtggatcagcgcggccagctgcgtcgcattatgctctgcatctccgacaccaccgacaaagtggccaaactgccggatgtgagcactgacgaccagcgcctgctgaagaaactgaaaaccgatatgctgagcaccatcgagtacgcgccaatctggatcattatggcggtcgcgctggcgctgggtattggcaccatgatcggctggcgccgcgtggcgaccactatcggcgagaagattggtaagaagggtatgacctacgcgcaaggtatgtccgcccagatgaccgccgcggtttctatcggccttgccagctacaccggcatgccggtttccaccacccacgtgctctcttcctcggttgcggggacgatgctcgttgatggcggcggtctgcagaagaaaaccgtcaccagcatcctgatggcatgggtactcaccctgccggcagccattttgctgtcaggcgtgctgtactggctggctctgaagcttatctaa

SEQ ID NO: 104704 - DNA, 396 bp, Enterobacter aerogenes
atgtccgtcccaaaaattacctttatcggcgccggttcgacggtgtttgttaaaaatattctcggtgatgttttccagcgcccggcgttgaaatcggcgcatatcgcgctgatggatatcgacgaaacccggctggaagagtcgcataccgtggtgcgaaagctgatggattccgtcggtgcgaatggcgaaattagctgccatcgcgatcgtaaaaccgccttgcgcgacgccgattttgtcgtcgtcgccttccagattggcggctatgaaccctgtactgtcaccgatttcgaagtctgtaaacgccacggccttgagcagaccattgccgatacgctgggaccgggaggcattgcactatcccgcacctgtgggctatctgcgacgacatga

SEQ ID NO: 104705 - DNA, 189 bp, Enterobacter aerogenes
gtgcaaagtgttgatgttgccattgttggcggcggaatggtgggactggcggtagcctgtggtttacagggcagtggcctgcgcgtcgcggtgttggaacaagcggcgccgcagcctcttgacgccgatgcgccgccggcgctgcgcgtttcggctattaatgcccgccagcgaaaagttactggataa

SEQ ID NO: 104706 - DNA, 2874 bp, Enterobacter aerogenes
atgactcagactttaagtcagcttgaaaaccgcgacgcctttattgaacgtcacattggctcggacgctcagcagcagcaagagatgctgaagaccgtcggcgcggattcgcttaacgccctgatcggccagattgtgccgcaggatatccagctggcgaccccaccacaggtgggcgacgcgactaccgaattcgccgcgctggcggagctgaaggcgatcgccggtcgcaacaagcgcttcaagtcttacatcggcatgggctacaccgccgtgcaactgccgccggtcattcagcgcaacatgctggaaaacccgggctggtacaccgcctacaccccttaccaaccggaagtatcccagggccgtctggaatcgctgctcaacttccagcaggtcactctggatctgaccgggttggatatcgcttccgcttcgctgcttgatgaagccaccgccgccgccgaagcgatggcgatggccaaacgcgtgagcaaactgaagaacgccaaccgcttcttcgttgccgccgacgttcatccacaaaccctggatgtggttcgcacccgtgcggaaacctttggcttcgacgtgattgtcgatgacgccgacaaagtgctcgatcaccaggatgtttttggcgtgctgctgcagcaggttggcaccaccggtgaaatccacgattacagtaaacttatcgccgagctgaaagcgcgcaaagtgattgtcagcgtcgccgccgactttatggcgctggtgctgctgacggcgccgggcaagcagggcgccgatattgtcttcggttccgctcaacgtttcggcgtgccgatgggctatggcggcccgcacgcggccttcttcgcggcgaaagatgaattcaaacgctccatgccgggccgtattatcggcgtatcgaaagatgcggcgggtaataccgcgctgcgcatggcgatgcagactcgcgagcagcatatccgccgcgagaaagcgaactccaacatttgtacctcgcaggtcctgctggccaacatcgccagcctgtacgcggttttccacggcccggcgggcctgaaacgtatcgctggccgcattcatcgcctgaccgacattctggccgacggcctgcagaagaaagggctgaagctgcgccatgcgcactacttcgacaccctttgcgtcgaagtggcggataaagccgcggtgctggcgcgtgccgaagcgctgcagattaacctgcgtagcgatattcacggcgcggttggcattacgctcgatgaagcgaccacccgcgaagatgtgctgaacctgttccgcgccatcgtcggcgacgatcacggtctggatatcgataccctggataaagacgtggcgctggatagccgttcgatcccggcggcgatgctgcgcgacgatgcgatcctcacccatccggtgtttaaccgctaccatagcgaaaccgagatgatgcgctacatgcacgcgctggagcgtaaagatctggcgctgaaccaggcgatgatcccgctgggctcctgcaccatgaaactgaacgccgcggcggagatgatcccgatcacctggccggaatttgccgagctgcacccgttctgcccggtcgagcaggcggaaggttatcatcagatgatcgcccagctttcagactggctggtgaaactgaccggctatgacgccgtctgtatgcagccgaactccggcgcgcagggcgagtatgctggcctgctggcgattcgccactatcacgaaagccgcaacgaaggccatcgcgatatctgcctgatcccaagctccgcgcacggcaccaacccggcttccgcgcagatggcgggtatgcaggtggtggtggttgcctgcgacaaaaacggcaacatcgatcttgccgatctgcgtgaaaaagcagagcaggcgggggcgaatctttcctgcatcatggtcacctacccgtcgacccacggcgtgtatgaagagaccatccgtgaagtatgtgagatagtgcatcagttcggcggccaggtttacctcgatggcgccaacatgaacgcccaggtcgggatcacttctccgggctttatcggcgctgacgtttcgcacctcaacctgcataaaaccttctgcattccgcacggcggtggcggtccgggtatgggccctatcggcgtgaaagcgcacctggcgccgtttgtaccgggccacagcgtggtacagattgaaggcatgctgacccgtcagggcgcggtttccgccgcgcctttcggcagcgcttccattctgccgatcagttggatgtatatccgcatgatgggcgcggaagggctgaaacaggcgagccagaacgcgattctcaacgccaactatatcgctacccggctgaaagatgcttacccggtgctctataccggtcgcgatggtcgcgtggcgcacgaatgtattcttgatattcgtccgctgaaagaagagaccggcattagcgagctggatattgctaaacgcctgatcgactttggtttccatgcgccgaccatgtccttcccggtcgccgggacgttgatggttgagccgacggaatcggaaagcaaggtagagctggaccgctttattgacgccatgctggcgatccgcgcggaaatcgatcgcgttaaagccggtgaatggccgctggaagataacccgctggtgaacgcgccgcacacccagggcgagctggtgagcgagtggaaccatccgtacagccgtgagctggcggtattcccggctgggttgcataacaagtactggccaacggtgaaacgcctggatgacgtgtatggcgaccgtaacctgttctgctcctgcgtaccgatgagcgaataccagtaa

SEQ ID NO: 104707 - DNA, 1932 bp, Enterobacter aerogenes
atgacagctcagactcagggtgcggaaaatgaagtttcagccgttatcagccagtcgtggcatcgctgcagcaaatttatgcagcgggaaacctggcaggcgccgcatcaggcgcaggggctgacctttgaatcgatctgccgtcgcaaaaccgcgctgctgaccatcggccaggcggcgctggaagatgcgtgggagtttatggccaaccgttcctgcgcgctgttcatccttgatgagtcggcctgtattctgagccgctgtggcaatccgcagaccctggaacagctggcggaactgggatttcgcgacggcagctactgcgcggagagcattatcggcacctgcgcgctgtcgctggcttcgatgctcggacagccggtcaacaccgcgggcgacgagcactttaagcaggcgctgcggcgctggtcgttcagttcgacgccggtgttcgataaccatggccgcctgtttggatctatttcgctatgctgcctgcgcgaagagtgggccccggcggatctgtcgctgacgttggccatcgcccgcgaagtgggtaactcgctgcttaccgacagcctgctggcggaatctaaccgccaccttaatcaaatgtacggcctgctggaaagtatggacgacggggtgatggcgtggaacgagcagggagtgctgcagtttctcaacgtgcaggcggccacgctgctgcatctcgatacccaggccagccaggggcggaatatcaatgagctgttgaccctgccggcgttgctgcgccgcgcgattaaacaggcccgcgggcttaatcatgtggaagtgaccttcgagagccagcatcagtttatcgacgcggtgatcaccctgaagcctatcgtggaagagcagggcaatagcttcattttactgctccacccggtggagcagatgcgtcaattaatgaccagccaattgggcaaagtgagccataccttcgaacagatgtcggcggatgacccggaaacccgcaggctgatccactttggtcgccaggcggcgcgcggcgctttcccggtgctgctgtgcggcgaggaaggggtgggtaaagaattactgagccaggcgatccataacgaaagcgagcgggcgccgggcccatatatttcggttaactgccagctgtacgccgacagcgtactgggccaggattttatgggcagcgcgccaaccgacgatgaaaatggccgcctcagccgccttgagctggccaacggcggcacgctgttcctggaaaaaatagagtatctggcccccgagctgcagtcagcgctgctgcaggtgataaaacagggcgtgctgacgcgtcttgatgcccggcggctgattccggtggatgtgaaagtgatcgccaccaccaccgtcgacctcgcgaacctggtggagcagaaccgctttagccgccagctgtactatgcgctacattcgtttgagatagtcattccgccgctgcgggcgcgacgcggcagtattccttcgctggtgcatagccgtctgcgtcggctggagaaacgcttttcatcgcggctgaaggtcgatgacgacgcgctggcccaactgaccgcctactcgtggccgggcaacgattttgagcttaatagcattattgagaatatcgcgatgagcagcgataacgggcatattcgcttaagcaatctccccgaacatctcttctcaacccggccgggtagcgaggcgtcctcatcgctactgccatcaagtctctccttcagcgccatcgagaaagaggcgattatccaggcggcgcgagtgaccagcggccgggtacaggagatgtcgcagttgctgaatattggccgtaccacgctgtggcgcaagatgaagcagtacgatatcgacgccgggcagtttaaacgccgggtgcaggataagagttaa

SEQ ID NO: 104708 - DNA, 1968 bp, Enterobacter aerogenes
  misc_feature (854)..(863): n is a, c, g, or t
atgcgcatacctcattttacccgcatagccggggcgctaatgctattgacgctgagcggctatgttgcggctcaggaaagaatcaccctgcgaattgccgatcaaaaaggcggcatgcggtcgcaactggaagctgctaacgccttgcaaaacctcgcttacgatattaaatgggccgagtttcctgccgccgcgccgctggctgaagcgctcaacgccggcgcggttgacgtggggattatcggcgatgcgccgctgctgttcgcgctggcgaacggcgcgccggtaaaagcgattgccgtcgataagagcaacccggcggggaccgccgtgctggtgccgcccggcagcgcgttaaaaagcgcgtcggatctaaaaggtaaacgcattgccaccggtaaaggatcgattggccattttgtggcgctgaaagcgctggagcaggcgggtgtttcgccgaaggatgtgcagtgggtattccttggcccggtggatgcgaaagtcgcgctgcttaacggttcggtggatgcctgggcgacctgggagccctataccacgcagttggtgaaaaccgccgaagggcagattctggtgagcggcaaagggctgctgccgggtaataccttcctggccgccaccgataatgcgttgaaggatccgcaaaagcgcgcggcgcttcaggattatctcacccgactggccggcgccgagcgttgggcttatgccaatctcgatagctatggcaaaacgctgggggagatcattcgcttcccggcggagatcgcccgcgcgcagtttgccaaccgccagtcgcagtggcagcggctggacgcgccgacggtcgcccagcagcnnnnnnnnnngttttttttttttcaagcagaagacggcatacgagatttctgcctgtctcgtgggctcggagatgtgtataagagacagcgttttacccgtcgtcgtttcttacagtttaccggtggcctggcgctggccgggacgtctgtgccgctatgggctcacgatatggcggagatggcgagcggcgatgaacatccggcgctgcgtctggcgcagccttacaaaatcaagctggcgattaacaaaagcgcggtgtgcctggcgccggtcgccgtcgcggagcagcagaagattttcagtaaatataatctcgacgtggagtttgttaacttcggtaactcgacggatgtcctgctggaagcgattgccaccggcaaggccgacgccggggtaggcatggcgctacgctggctgaaggcgctggagcagggctttgacgtcaaacttaccgccggaacgcacggcggttgcctgaatctgctgacagccaaaaactcgccttttggcgcgctggagagtctgaaagggcaaaccattggcgttaccgatatggccgggccggataaaaacttcttcgccatcttgctgaaacgccacggcatcgacccgataagcgatgtgcagtggaaagtctatccggcagacctgctcagcgtggcgttggataagcgcgaaatcgccgccattagcggcagcgagccctttagctatcgcctgctggaaaccgggaaatatcagctaatcgccagcaatatgaccggcgattacgccaatctgagctgctgcgtgctgggcgtcagcggcacccttgcgcgcgatcataaaccggcggccgccgcgcttacccaggcgattctggaagcgcacagctatgccgccgcgcatccggaaagcgtggcgcaatcttttctcgcccatgcgctaaataccaacgaagcggaggtgagcggcattcttcacggccaggggcacggccatcatgcggtgggcgaggcttttgttaaagagctgacgcagtatgccgtggatcttcagcgggtacaggtcatcaaaccgggaaccgatcctcatcagtttgcggagagtatttatgtcaacgttttcgcctga

SEQ ID NO: 104709 - DNA, 717 bp, Enterobacter aerogenes
ttgcgcgagaaccgccgccgggccgccgatactaccgagatagaaaccgccgtgtttatggcaggcatcggtcacctgctggctacggttacccttagccagcatgattttactcgccccgtgcgattgcagcagatcgacatacgagtccatgcggccagcggtcgtcggccccagagaaccggaggcgtaaccatccggcgtcttcgccgggccggcgtagtaaatcggatgatctttgacatactgcggcagcgcttcgccgttatcgataagctctttcagcttggcatgggcaatatcgcgggccacgatgatcgtgccgctcagcgacagacgagtcgacaccggatactgcgacagcagcgccagaatctcgctcatcggctgattgaggttcacctttgccgcttcgccttcaccggcctgacgcaggtgctcagggatatatttgcctgggttgctctccagtttttccagccagatcccctgacggttaattttggctttaatgttacggtcggcggaacaggagacccccatccccaccggacaggaagcgccgtgacgcggcaggcggactacgcggatatcgtgggcgaagtatttcccgccgaactgcgcgccgaggccgaggttctgcgcttccagcagcagctcttgctccagttgcacatcgcggaacgcctggccatgttcgttaccttcggtcggtag

SEQ ID NO: 104710 - DNA, 1647 bp, Enterobacter aerogenes
atgccgaagttaagccagtaccggggcgggttgtttggttttatttcttcatccgtcgagctgtaccgcagcgggaataaaactaacgtccgtaaccaggtccatttccgggacttcacccgcattggtcgtaatggcgcggtttctgatgtactggtgaaaaatatcccggcgggcaccatcacggaagcctggatccagccgaaagaaaatgcctggcttaactttgagcccccggcgttctttgaagcaggcaacggtcgcaagttcgtgaacattcaggttgagcgctcgcaggtcaacattgaaaatctggtgatggataactgggcgactggcgatatcgagtcccgcgtggcgatcggctcgtatggcgtgaccgatattcactgccgtaacgcagcagctgaatgtatcccgaacacttccggcggcgcgtatgtagtttgcttccgtaacagcatcgatattcacatcagtggatattacggcctctacggctggggattccaggggcatcatggtctgaagcgggtatttattaccgagtcggtcatgaaccggttcgattttcactcgttcggctatgacatctacatcagcaggacgaaattcaagggacgccagatattcctgcagggcggtggccagttcgcgcttcgtgactgtgacttcaatatcacgcagtacagcctgggacagacagggcatatcgaagaccgactgaatttctttatcaatatgcgcgaagattacgccggggattgcgagtgtaacctggctatcgacgggctggtggtgcgtttcgaccgcaatatcacgaatgcctgggcgtctgatgtgctgtcgtttgatattgtccgtatgaacagcggggcatcggttgattatggtgtgtcgaccaaaaacccgcatgtgatttccgggaaagatattgtctttgatctggatggtgtaccggcttccctgcctgataattttgcgttcaccttctgccgtccgttccgtaacctctacaactccgcccagaaaacctatctgccggatatggtgaaagtgcagggcatgaccgcaattaacgtgcctgacggcaagaatgcggtgatggcggtgtttcgttgcggggccgacatggcacagaacccgtttgccagccggactaaactccgcccgaacgggacgaacgcagagatcatcgccgaggacgtcatcagcatcatcaataatccggtcatcgcgcagaacgcgtgcccgacggtgtacatgccaggcgcggcctcttcctgggataccgttgtcggcggcacgacgtaccgcaccagcgaatactcttaccgtccgaaagtgacgctgcgtaactgctatccgtcgattatcaacgcagccggggtaaaagctgaattcgatattgccggcggcttactggcgcgctacagcgtcggcgataccgggaaccgctgccgggtaaccggcgcagatattcagcttatccctgactcaacaggggctctttatttcgatacatccaatgtccgggcgacgggctgtgactggttcgacccgatgaacggagcgacctataccggcaccctgaacggttccggcaacgaaaaccgcggcaccccggaacactcacccaatatttaa

SEQ ID NO: 104711 - DNA, 1251 bp, Enterobacter aerogenes
atggcacaattaccaaccccgacgcaaaagccggtaccgagtgatgatatccgggaccacgtttatgcaggcggcatgctggacaaggtcgtaacaagccggggactgacatacaccgatcgacttggtggtcagcattacaccgttgatggaatcaaggcagaagcagataaggccgtaaaggaggctcaggatagcattaccattctgggcttaccttttgccaccctagaggatgctcaggcggcgacggatgcaggtaaaatacctgatggtgctgtaacgtgggtgagaaatagcggcgataactctctcgctgatgaatacatcaataacggcggaacgctggtcgccaccgggcgaaaaatgccgtcctccgcactggttgatgagatcgacaagcgtacccggtcattacaggaatcacctgattcactgtttgatatcgtgtccagcaatggtattcgccctttccgtatcagaagcacagacggcgtcattgagtttgagtcagtcgcgcagttggtgaccggcgactcaggtctcaacttcaacgggagcgtgattgacaacaacgcgccggacggttggctgttcctgatttattcgcgtaacggtctggtgattgccggggttaaggaagacggaacgaaagtcggctggggcgggagcgacagcggcggcgggcaggctggcgggattacccccggtgatacggcggtgggttatgacgatatccgtaattacactggcgacgccactgtacgcgatgttgtgggcgagcgtatcaatggccggtttgtagtcgacgcttccgatacgacgtcgccagatgatggcggtggagtgctggtcggtactgatgggcgccgctggatccgccagtgtgactttgtctcttatgacatgtttggcgcgccccggatccctgagtcggtttatcagaattatgccacgctgtctgcgcagggtaatgagtccgcggcgcaggcgttactggctgatattgagccggcggatcaggccattgcccgttgccatgcctttgcggcaaagcatgctatcccggttgttcagaatgtcgggcggttcctgtgggtgagcggcgaaattgtggtgaggacatccgcttatctgagcggctctacgatcgtcacctgcaatcgcagcggaacggatgaaacccgctgggggaaagtggatggtgtggatgatggcgccccagacccgatgtatatgttccgcatctag

SEQ ID NO: 104712 - DNA, 1359 bp, Enterobacter aerogenes; identical to SEQ ID NO: 91594

SEQ ID NO: 104713 - DNA, 477 bp, Enterobacter aerogenes; identical to SEQ ID NO: 99178

SEQ ID NO: 104714 - DNA, 1257 bp, Enterobacter aerogenes; identical to SEQ ID NO: 99112

SEQ ID NO: 104715 - DNA, 984 bp, Enterobacter aerogenes; identical to SEQ ID NO: 99111

SEQ ID NO: 104716 - DNA, 255 bp, Enterobacter aerogenes; identical to SEQ ID NO: 99110

SEQ ID NO: 104717 - DNA, 195 bp, Enterobacter aerogenes; identical to SEQ ID NO: 99109

SEQ ID NO: 104718 - DNA, 780 bp, Enterobacter aerogenes
ttgcccggtatcctcctctccggccttatcgccgccaaattcaccctttttctcctgctgttcgccggtgccgcaggaggcgtaaaagtgctcagattattcgacttccccggcagccccccgctacagtattatctaccgatcgtaccggtctgcgttatcgcttttggatttcatggcagcgttccctctctgacaagaatgtaccggggggataatcatcgtgcggtcctccgctctctctattacggtttcgccatttcgttaactgtctacgccttctggctgacgctcacgatgggcgcgctcacgcctcaggctatccggaatgtcagcgatgaaggcgggaatattggcgcctttattacggccctcaatatccaccggaccacctcagctaccagtctgatactggtcgcatttggctgtattgccgttttagcttcactgatgtcggcttcaatcggcttaagtgattatcttgaggatacactgaacaaaattaactgtcagtgctcacgcccgctggcaatatttctgacttattttcctcctgcattggcctgtattattgctccgcaaggttttttgtctgccttgtcctatgcaggtatatcactggtattatggagtattatactccccccttatttactcatcaaagccaggcgttccactctacctctggtatacaacttcccgggaaataatttcctcctgaaaataattattgtgatcggagtcatagtctggctattaattatttactcttttctttaa

SEQ ID NO: 104719 - DNA, 369 bp, Enterobacter aerogenes
atgtatctctttaccgatacgaatatcaagtgcttcagccagtggcagtgctttaaccattacatccaaaggaacaatcgacaatacgcgaacaatgctgaagcccagcattttagcaagtttgatatcacttctaagacgctcagcacattcatcatggttcataacgtgtgtgcgaaactgcaacacgtccatactaacatccatagcaacaggcttaaggccatgaatgtcaatcaggcgataccagcgctgcatgaatgccttatcaggtacaggatatttgatcgacatttcatcgatgagttcaataccatcagcaccatacaaattattcgcaacttcattgagctgcgactcaaggtttga

SEQ ID NO: 104720 - DNA, 153 bp, Enterobacter aerogenes
atggagacggagccaataaaaatctttatggtccgggtagccaggcacaaaaggatgctgaagctgcaaacgaagcacgccgccttgcagcacaaaatcatatgtcaaaaagcgctactggaattacagaaccagagatgcaggcagcattag

SEQ ID NO: 104721 - DNA, 312 bp, Enterobacter aerogenes
atgcaattgcttaatcgtcaacaagaactcaatattgcaaaatcgagtgctataggcaatgtgagaataattgatgatggcatcacgcaaccaaaacctgtaaaacctaataagatcttggttgtgctgctagggattattctcggcggtatggtttcagtagccattgtactaatccgggtgttcttacgacgtggtattgaaactccagagcagttggaagagcttggcattaatgtatatgcaagtattcctgtcgcagaaaggaatattaaaagcgccagatacaataaagggattttcgatagctag

SEQ ID NO: 104722 - DNA, 585 bp, Enterobacter aerogenes
atgtcggctaacgcctcatccgggctacggttgggtatccggtcggtagccccggtaagcgtaagcgctaccggggaagagtcccggatatcggctaacgcctcatccgggccacggttgggcattcggccggtagccccggtaagcgtaagcgctaccggggaagagtcccggatgtcggctaacgcctcatccgggctacggttgggcattcggccggttgccccggtaagcgtaagcgctaccggcgaagagtcccggatatcggctaacgcctcatccgggccacggttgggcattcggccggtagccccggtaagcgtaagcgctaccggggaagagtcccggatgtcggctaacgcctcatccgggctacggttgggcattcggtcggtagccccggtaagcgtaagcgctaccggcgaagagtcccggatatcggctaacgcctcatccgggccacggttgggcattcggccggtagccccggtaagcgtaagcgctaccggggaagagtcccggatgtcggctaacgcctcatccgggctacggttgggcattcggtcggtagccccggtaagctaa

SEQ ID NO: 104723 - DNA, 582 bp, Enterobacter aerogenes
ttgcaaatcgataacagtatctacggacctattcagttggtagccccggtaagcgcaagcgcaaccggggagagttcaatggcggcgccattattttgtcggatgacgctacgcttatccgacccacggtccgggattcagttggtagccccggtaagcgtaagcgcaaccggggagagttcaatggcggcgccattattttgtcggatgacgctacgcttatccgacccacggtccgggattcagttggtagccccggtaagcgtaagcgcaaccggggagagttcaatggcggcgccattattttgtcggatgacgctacgcttatccgacccacggtccgggattcagttggtagccccggtaagcgtaagcgcaaccggggagagttcaatggcggcgccattattttgtcggatgacgctacgcttatccgacccacggtccgggattcagttggtagccccggtaagcgtaagcgcaaccggggagagttcaatggcggcgccattattttgtcggatgacgctacgcttatccgacctttcaaacacagcggtagtcactgtcgttacagcgtga

SEQ ID NO: 104724 - DNA, 372 bp, Enterobacter aerogenes
atgatggaactgcaggagcaactagccagcctgttggcgctgggatacactagccgcagacagctcaggacgctgcttcactatttattgcaggcaggaaatgccgccgatccggtcgcctttttacgtaatcttgcgcaaaatgtccccagacggccgcataaggagacgctaatgaacattgcccagtttctggaacaacgcggccatcagcagggccttgagcagggcctgcagcaaggccttgaacagggagaacaattggctgcgcaacgtattgcccaggcgatgctggaaaacgggcttgacctggcgctggtggcgaagctgacggggcttgcgccggagcgtctggccctgctcgcccattaa

SEQ ID NO: 104725 - DNA, 711 bp, Enterobacter aerogenes; identical to SEQ ID NO: 93227

SEQ ID NO: 104726 - DNA, 324 bp, Enterobacter aerogenes
atggaagcgcttaccatccccgtaaagctatacatccactacacaaccaacacgttttcatctgaaaagttcatgatttttacttgtgacatgtcacaaaactatcctgatgcttacgtattgctggaaacacgcgaaataaatatcgaagtaaatcaaccagagcctttcgacattatcgcattgcaggttgaccaactgcgcgcccagaaagaaatcattgcagccgatgcgaaaagacaaatcgccgcggtcgatgacaagatccagcagctgctgtgcatcgaccactctccgattgaagaaaacgacgtaccgttttaa

SEQ ID NO: 104727 - DNA, 2379 bp, Enterobacter aerogenes
atgtcggtacctaaccagaccccctataacatttatactgcgaatggtcttacgactgttttcacgtatgagttttatatcatcagcgccagcgacctgcaggtgagcataaacggagacgttgttaccagtgggtacaccgttgcaggtgtaggcaataaggacggcggcgatattacctttctgacaccaccggcaaacggtgccgtcgtcatgcttgaacgtgtggtgccaacgtaccgactcactgattaccaggacaacggcgatctgctggcggataccgttaacaaggattttgaccgtatctggatggctatccagagagcttttatcgatcttggtttcgcactgacgcgtccgatttttggcgggccgttcaatgcaaaaggttaccgtattgctaatcttggcgacccggtagacccgcaggatgcagttacaaaaaaatggtatcaggaacaaaattctttaagtctcacaaggacgcttcgggtaccaaaaaatgaggcgctaacccagctcccgccggctcatctgcgtaaaggtaaagtacaggcatacgatgcggcaacgggtgatagcttgcctgtgttcccgggtagcattgactggcaaacggcgcttaatttgcaaagcgctgacggcttaaaatatatcggtcgctgtccatctattgaggctcttcgtggtatcgaaccgacgaagatacagcagaaaattgatgtagctgaatacttccccggcttaggttgtggcggtgggtattttgagtatgaccatctggacgaggaaagtatcgacgatggcggaagtgttattgtcaccagcggcggtgcccgatggaaacgagtaacagatcagttactgccggttcattttggtgctaagccaggaaacacagatgactctacagacgccatactgcgttacgctgcagcttcggaaggtaagaccgtagatttccgtggcagctactggacaatttcctcaaccctcgatttaacgaaggttgccagaattatcagcgatacatcagggatttttaaagtaaacccggttggctttaatggcgactacgcaatcactataggtaatccaaatttaccttatggtgaaggcagagctaatcgcgtcgtagttgtcggcagtctttatgttgatgcactcaaccgtgatgcagcgctgcacggtgtttatttaaaagggcagtggcttaatattggtcatattcgtgccagtggttttaatggaataggtattcacagggaagcaatatgggattctaccttcctgcgcttgcagactgaactttgcggcaatacatctaactatgcctattattctacgggaggcggtgacaccgataatacaaaccatgttgtgtctatgcaggtagaacagtcatacgacaaagcgatttatgcatctggtatcagggatgttattcataacattcactgtgaaagaacttatatcacgactacagaggcgggtgacactacgatcgccggtttaaattatattacttgtcgctttaatctaggtaactccgttatcggtcaggctgtcattgatgcatcaccgaaagcaactgcaccagacggaacaccgacggtttcgacagtaccctcagtagtgatgacgatggatttttctgacgtcagaacaattgctgcgccgggtgcggtggtctcctgtgactttgggcgttcgactacatacggcggcctggttgccggggatatcattattgcagaacctgcgtctaaaattacgctggaatccccgagggcaacaggcacgttgcaggtagggtctgaaattatcgttaataacccggatgtggcgacattcagaccgcgcgcgaatgcgcttggcgttcagatcaatagtggcgtaataggcacattgctgtttaataataactatcgtggaaatattacttttaataacgtcacggtaactaatccagtaggggatttacgcgcaccggcgggttcaggttcagcaacatccattggggctttatatgcccctgtgacttttaacgaatgcaccttatcaacagtgaacggtgcttttgggtcgagggcggtatttaaaggcgggaggattggtacggttgcgctgagttcgcaagctgctttcgaattttacgatattaatatcggtgtctttggcttttctgaaaacagagcatttataacccgtggtgtaaaagccgatgtagtgaatagctggaattatccagcgcattatcaatggcctgccggcgcgatatcagaacgaattgggaaaattaattccggagatggtgttgtatatctgagtaaagatagcgcaacaatcaactgggcacctgtagtgtctgcatga

SEQ ID NO: 104728 - DNA, 213 bp, Enterobacter aerogenes
atggaaattgtaaaatctgagaatggttacgttgtgcgtgaaaacggtcagtggaaggaggggtgttacgaaactgaagaggtagcagaattagcggtaacaaatttatccgacatggatctatcccagctttggatgcttgttcttatggataacagaaaagccataacgatggctgattatgaaagttatatcagcaccatgcagcagtaa

SEQ ID NO: 104729 - DNA, 297 bp, Enterobacter aerogenes
atgtccgtcccctttaattttcaaataactgacgtctattactacctgagtgagcaaatgatagtctccaggtggaataaagatcacggcccccggcttcccgccatcattaacatctgtgtcagtctgccgttttttaatatcagcaataatctgttacatcataataattattactcgacatgcgttatttctccctacattattaggataggtagatattatggttctagtgaccgtctggacattataataagtaacacctcccctgatttctttcagaaaaattttaactaa

SEQ ID NO: 104730 - DNA, 1014 bp, Enterobacter aerogenes
atgaacaaaatcagagccgccgtggtcggcgcgggtatctacggcaaacaccatatgaacgcgtaccgccataatccggatacggtgctggtcgccatctgcgataccgatacagagcgctgcgacgacctcgccatggcctacggcgtaatcggctatacccggcttgacgttctgctgcaggaggaggccatcgacgtggtctcggtggcgacgccggacccgtaccataccgaatccatcctcaccgccctgcgccacggcaagcacgtgctggcggagaaaccgctcgccacctcggtacgcgagtgcgagcttatcgtggagatggcgcagcagcgggacctgctggtcggcgtcgatttccacaagcgctgggacccggcagtgatgcgcattaaggctgaactggagaagccggaagccgggcgcatcctgcgcggccatatcagcatggacgatgtcatcagcgtgccgacggagtggctggactgggcgggcgcaagctccccggtgtggtttctcggctcacactgctttgacctggtgcgccacctttccggccaggaagtggtgtcagtgtacgccgtcgggcagaagcggctgatggttgaatacggcctcgacaccttcgacagcgtgcagagcctgctgacgatgaccgacggcagttcgtgggtggtggaaaactcgtgggtgctgccggaaggctttccgaaggacaacgacgggcgcatcgatattctctgcgaggcaacctatatccgcagttcctcacagcatcgcgggctggaaatcaccacgccgggcatgacgctcacgcccaacagctatttcatcaactaccgcaacggcatcgccagcggttttggtatcgaccctatcaatgactttgtgcactcagtcagacataaagcaccgtacccggtcaccgccgaagacgggctggcggtgagccggatttgtgaggcggtacaccgcagtctggagagcgggaaacctgaaaatgtttaa

SEQ ID NO: 104731 - DNA, 522 bp, Enterobacter aerogenes
atgtggacagtcagcctcgctgaggcgtttattcatgtattccatgccgcaggcaaaatcttcctcgacatgatgaccgggcttatcccgatgctcatctgtctgctgctggccatcaactttctgatgaaactggtcggcaccgtcagaatggagaaggtcgccgccctgctcggccgctcgcgtatcctcacctacggcgtgctgccggtgctcggctggttctttatgagcagccccggcgcgctgacgctcgggaaacttttacccgagaagagcaagcccggctatgaggatgcgctcggcaccaccgcccatccgctcaccagcctgtttccccacgtggtgccgtcggagctgtttgtctggctcggcgtcgctgccggggttaaggcgctcggcctgcccgtcacttcactggcgctgcgttatatcgctgccgccatgctgattggtttaatccgcgggattatcaccgagtacctgttcctgcggctcagcaggcgggggaatgcaccatga

SEQ ID NO: 104732 - DNA, 2070 bp, Enterobacter aerogenes
atgaaacgcgccccttttctctgtaagcagtctccggaccgcacgctcgaagtggtgatccttgccggaagcctggcatgggagacctcacgcgcctggcgaaaagatcccggccgggaagatgatgttcctccggtagttctcggcccggatgaactggccgatctggacaacctgaccataatcagacccgacacgctctacgtccgggtgcttcgcaccggcgatatccgcgaagaggagttgctgaaaatcgccgtaaaactggcacatgcggatgtgcagatggcccggctgatgacccctgacggtgagttagtggagaactggaccggacagcttgaacgcctgcgacaggaaaggccctctgacatcctgccggatcacttccgcctcgatgaagatgcgctgtggtttgacaagctcaccgaacggcgcgacggcgaaagcgacgtccagccccagcgcatctgctcccctctgcgcgtcaccgccatcacctgcgacagccatgacggcagctatggccgcctgctggaatggcacaccaccaccgggcagttgcggcgctgggccatgccgatggcaatgctcagcggcaacggtgaggagctgcggcgcattctgctggagaacggcctgacctacatctccacccgtcccgccctgcgcagcctgctgtgcgaatacatctcgcggtcactccccggacgccgggtcgcctgcgtggagaaaaccggctggcacaacggcgtgtacgtgctgccggatgaggttattggtccgggtggcgacaatgtcatccttcagggcagccactacctgactggcggctttgcgcagggcggtactctggcggagtggcaggagcaggtcgccgcactctgtgcaggcaactcgcggctggtctttgccgtctgctgtgcactggccgccccgctgctgcgcctgaccggaacgggcggtgggggtttccacctgcgcggtgagtccaccgacggcaagaccacggtgatgaaggtggccgcctccgtctgtggcggcacggattactggcactcctggcgggccaccgggaatgcgctggagggaattgccagccgacacaacgatgccctgctgccgctcgatgaactgcgcgaagtggatccgcgtgaggccggaatgattgcctatatgctggcgaacggccagggcaaggggcgcgcccgcaccgacggcgaagtgcgtaaccgcaggcactggacgctgctgctgttctccaccggggagctgtcgctggcggaacataccgaacgcgccggagagcgcctctacgccgggatggacgtgcgcatggtacaaatccccagcgataccgggcagcatggcgcgtttgagcagctaaaaggctttgccagcggccagcagttcgccgatgccctctgcgaccgggtggcccgctttcacggcaccgcctttcgtgcctggctgaccttcctcacctgcgacctggacgccagcaccgccctggcaagagagttacttcgccgctaccagaccgccctgatgccggacaacgccggaaaccaggtacagcgtatcgtggcccgatttgccctgctggcggtggccggagagatggcaacgctgcacggcgtcacgggctggcaggaaggcgcggcgtatgaggcggtgcagatctgcctgcactcctggctgaacgagcgcggacatatcgccaaccaggaagatgaaggcgtgctggcgcagatcaagcggttcatcaccgcgcaccagtacagccgctttgcctcgtgggatggcccggaccgcccgctgaatatggcaggctttcgccgggtggaaaaagatccgctgacgggtgaagaatacacactgtttcacatcctgccggagggctggcgggagatgtgccggggattcagtcccgccagagcggccagattatgtctggaagcggaatgcctgctgcccggcagtgacgggaaatatcagtcgcaggtccgcctgccggagatcggcaaagccagggtctaccggctcacctcccgcatcctcagtatctga

SEQ ID NO: 104733 - DNA, 216 bp, Enterobacter aerogenes; identical to SEQ ID NO: 93537

SEQ ID NO: 104734 - DNA, 645 bp, Enterobacter aerogenes
gtgaccagtcccattcgtcagaatctgtttgaacgggaatgtgatatgccgctgctggaagcgcggcaactcgcccttctgcttctcggcctcgacgcttcccaaccagcaaacaccctgccggaagaacatcaggagaattatcgtattctgcacgacgccatcagccgcaccatcaaagcaacgggcatggtcagcgccccagcgaacaaacgcatgttctatgccgatgagatgttcgccctggcctggcggcttattgatgacgaactcactccgccagaaattaaggcccgcagcctgaaggcggtgatgaaactgtcgcgtaacagccgtggccgcaagtggctgaagacactcggcgacgacgcgctgccggatctcactgcttccacacaaccttcccagcgagggatgcataaacgcgacaaggctcgggagaatactgccaggctctgctggttactggttcaacttctggttgaggagactgatgggcgttatggtacttcggataaaccaacttcggatcggatacttcggaagctgaagacactggctcaggaacaggaattgccgtcggatgggcttggacgggggacgttttatgatgtgatgaagatggggcgggagaagggaacgtag

SEQ ID NO: 104735 - DNA, 2070 bp, Enterobacter aerogenes
atgaaacgcgccccttttctctgtaagcagtctccggaccgcacgctcgaagtggtgatccttgccggaagcctggcatgggagacctcacgcgactggcgaaaagatcctgaccgggaagatgatattcctccggtggtactcggcccggatgaactggccgatctggacaacctgaccataatcaggcccgacacgctttacgtccgggtacttcgcaccggcgatatccgcgaagaggagttgctgaaaatcgccgtaaaactggcgcacgcgggtgtgcagatggcccggctgatgagccctgacggtgagttactggagaactggaccgggcagcttgaacgcctgcgacaggaaaggccttccgatatcctgccggatcacttccgcctcgatgaagaggcgctgtggtttgacaagctcaccgaacgccgcgacggggaaagcgacgtccagccccagcgcatctgttccccgctgcacgtcaccgccatcacctgcgacagccatgacggcagctatggccgactgctggaatggcataccaccaccgggcagttgcggcgctgggccatgccgatggcaatgctcagcggcaacggcgaggagctgcggcgcattctactggaaaacggcctgacctacatctccacccgccccgccctgcgcagcctgttatgcgaatacatctcgcggtcactccccggacgcagggtcacctgcgtggagaaaaccggctggcacaacggcgtgtatgtgctgccggatgaagttatcggtcccggtggcagcaatgtcattcttcagggcagccactacctgactggcggctttgcacaatccggtacgctggcggaatggcaggagcaggtcgccgcactctgtgcgggtaattcacggctgatctttgccgtctgctgtgcactggccgccccgttgctgcgcctgaccggaacgggcggcggaggctttcatctgcgcggtgagtccaccgacggcaaaaccacggtgatgaaggtggccgcttccgtctgtggcggcacggattactggcactcctggcgggccaccgggaatgcgctggaaggaattgccagccgccacaacgatgccctgctgccgctcgatgaactgcgcgaagtggacccgcgtgaagccgggatgattgcctatatgctggcgaacggccagggcaaggggcgcgcccgcaccgacggcgaagtgcgtaaccgcaggcactggacgctgctgctgttctccaccggggagctgtcgctggcggaacacaccgaacgcgccggggagcgcctctacgccggaatggatgtgcgcatggtacaaatccccagcgacaccggacagcatggtgcgtttgagcagctacacggctttgccagcggccagcagttcgccgataccctctgcgaccgggtggcccgcttccacggcaccgcctttcgtgcctggctgaccttcctcacccacgacctggacgccagcaccacgctggcaagagaattacttcaccgctaccaaaccgccctgatgccggagaatgccggaaaccaggtgcagcgcatcgtggcccgttttgccctactggcagtggccggagagatggcaacgttgcacggcatcacgggctggcaggaaggcacggcgtatgaagcggtccgggtctgcctgcacgcctggctgaacgagcgcggacatatcgccaaccaggaggatgaaggcgtgctggcgcagatcaagcggttcatcaccgcgcaccagttcagccgctttgcctcgtgggatggcccggaccgcccgctgaatatggcaggctttcgccgggtggaaaaagatccgctgacgggtgaagaatacacactgtttcacatcctgccggagggctggcgggaaatgtgccggggattcagtcccgccagagcggccagattatgtctggaagcgaaatgcctgctgcccggcagcgaagggaaatatcagtcacaggttcgcctgccggagatcggcaaagccagggtgtatcggcttacctcccgcattctcagtatctga

SEQ ID NO: 104736 - DNA, 825 bp, Enterobacter aerogenes
  misc_feature (808)..(817): n is a, c, g, or t
atgacatcggtaattgataaaaaagtaacaccacaagaaaataatgagattgattttggacgtttgttcggtgaattaattgaccatcgcaaactcattatttctataaccactggctttacagttatagcagttttatatgctctgtttgccaccccaatttatgaagctaatgcattaatacaggttgaacaaaagcagggtaacgcattaatagatagcctcagccaaatgttgccggatagtcaacctcaatctgcgccagaaatagcattactgcagtcacgtatgattctaggaaagactgttgatgatcttaatcttcaggctcttgttgaacagaaacattttccactattaggaaagggggttgctagattattaggtgagaaagaaggtaatctggagattaatcgcctttatttgccgaaagatgctgggggaaaagtacctgaaattttggtaacagtaaaagatgataaacattacactgtcgattttgacggtatcgttttacaggggaccgttggtgtaccactggatgagaaaggtattgctctcgatataaaatcgattgatgcaaaacctggaacgcaatttgaggttaaatattattctcgactgaaagcaatcacgaatctgcaggagtcatttagcgctttagatcagggcaaagatacgggaatgcttaacttaactttgaccggtgaagaccctgatttcatttcacgagtattaaacagtatcagtcaaaattatctggctcaaaacgttgcgcgtcaagccgcgcaggatgctaaaagcctgnnnnnnnnnnttccttaa

SEQ ID NO: 104737 - DNA, 141 bp, Enterobacter aerogenes
atgaaatggctggggatgatttatttcctcgtgactttatttatgctctttctccgccaacaaactatattggtgcaaaagaaatatttggggatgaagaagagatacctgcccaatacaaggatgtgcttaatcctatag

SEQ ID NO: 104738 - DNA, 1062 bp, Enterobacter aerogenes
atgatttatgttaatggtcgttttcttactcaaaaacttaccggtgtgcagcgatttgcttatgaaatgactcttcggttatcgaaattgagacataatgttgtggtcttggtacccaacatgtccgccattgataaaaactataacatttcaggttttaatattaaagaaatctcaggggggagaggccatttctgggaacaattcacattacctctttttttaaaaaaacagaaagattgcatgctaatcaacttatgcaacactggtcctttgcttttcaaaaggcagattattacgcaacatgatattacttatattcgttacccagaaagcttttcatttggcttcagatggttatattcattaataacccctattttactcaagaactctaaattaatagtgacggttagtgatttttctaaaagtgagctagtaaattattataattgtgatgccagtaagattcatatcattccgaatgctgtgagtaataatttttttaaaccacatgacagtatggttaagactaatgagattcgtggatgcgactacttcctgactgtatcttcggttaatcatcataaaaatattcatggtcttattgaaactatactatctgcagatttaaatataaacttgaagataataggtgacaggaacacagtgtttaattgtgtaaatataaaaactaatgatccaagaatagattttttagggcgtgtatctgatgatgaacttatttcattatataaaggtgcgaaagcttttatatttccatccttttatgaaggatttggtatacccccactggaagctcaatcatgctcttgcccagttatttcttcaaatagagcctccctcaaagaaaccttaggtgatagtgcattgtactttgatccagactcaaaatatgagcttatcaaagctatcataaaattaaacaatagcgctgaagaccgtaacttgttgattaataaaggtagagaaaatgtgctgagatactcctgggagcgttccgctgaaacactgaatatgcttattactaaagttgaatag

SEQ ID NO: 104739 - DNA, 249 bp, Enterobacter aerogenes
gtgggtagagcttgtgttgtctatgataatggtgggtgcaattcactaattaaagacggctataatggttatatagttgaacgcaaaaatgtcaaagaactggccgcgagaattaaagcattgataaatgaagatgatgacagacaaaaaatgggtatcaatgccagggaaaatattgtcaatcattatacatcagaaattgttattgataaaacattacaagtatatgaagagctgtttcagcgctga

SEQ ID NO: 104740 - DNA, 1152 bp, Enterobacter aerogenes; identical to SEQ ID NO: 93504

SEQ ID NO: 104741 - DNA, 354 bp, Enterobacter aerogenes
atgcagccgcgttggctgccgcggccactggttgacaacgtaccccagatgatcgttgcagaatttgtcaagcgcgcttttacggttgaacttctgggtcagccgcgagaagggccagacggtggccatactgttccggtatccggtcagttcgctgtcttctatcctttcctttttcaccgcatagcagatgctgctgtaggttttaagcagcgcctggttgatacggtcctcaccgccgttggcaaacagctcgccgtccagcgagtagtgctcttcaccaatctccggaaagcgcgctccgcagccgggaaagtaataactgaagtaaccatcatcctccgccttatctaa

SEQ ID NO: 104742 - DNA, 207 bp, Enterobacter aerogenes
atgcacataaccttttctgaggtcagcatctataaagagaactttcttcccagtcagagcaatgatcgcagccaagttagtacttatgaatgtcttaccagcatttgggcttgcctctaccgcaaggtctgcagggttttctacagccagcagtctatccgattgatttttgtttcgtatattgttcttcgcagaatgtttagttaa

SEQ ID NO: 104743 - DNA, 177 bp, Enterobacter aerogenes
atggtcaccaacaagcagtattttacggccaacttgcatggcgatagccaattcacttgctggagaacgagcagcttcatcgatcacaacaaggtcatatatattttcttggataccgtaatgatagcgcccaattcctacacaggtaccgcttacaagcgtccgagttttggctag

SEQ ID NO: 104744 - DNA, 576 bp, Enterobacter aerogenes
atgtccaccgaacgcataattgtcgatgagagcatcgcggatgagttcgtcgcattaatcagccaacgcgccgccgcgctgccttctacgcttctcggcccggtggtcgatatgaaaacggtacaacgctgcaacgcgttgattgatgatgcactgaacaagggagctcgtttgctctgcggtggaaaggcggaatcaacgcaaatgcgtgccaccctgctggatggcgtgacgcgtgagatgcgaatatggcatgaagaatcttttggcccggtcaaatcggtgattcgggtcaacggcgaggaagaggctctggccgtcgctaacgagagcgaatacggcctggcggcagcggtttatagccgcgataccgctcgcgcctggaatgtggcgcagaacctgcaaaccggtatttgccatattaacggccctaccgtacatgatgaagcacagatgcctttcggcggctgtaaatcgtccggctatggccgcttcggcggacgcgcagggatcgctgaattcaccgaacttcgctggataaccatgcaaactcgcccgcgcgaattaccgttctga

SEQ ID NO: 104745 - DNA, 204 bp, Enterobacter aerogenes
atgccatacctgaacatcattctcgggaagcctttttacgatctcctgcagcatggccgggagatagaccgcgctattgcgcgccgggacggcacctcactgaatcactccacgccagaacttgaacgcacttttcgcgtccacctggcgaacgtccccggcaaaacccatttccggtcgccgcgctattcccacagttcttag

SEQ ID NO: 104746 - DNA, 525 bp, Enterobacter aerogenes
atgattatagaactgcttataatattgaaaaatcagagggtgggaatgagtaaaattcgatgctttgaaactggttggtctttactgttagatgcttcactgtgggtaaaatggttaggaattttgtccaatgctgcaacatgtattgctgcaatctttgctgttgtagctgttattgttgcatacagtcaattaaaatcaggaagagatgaagggagaaaaaatactgcttatggaatttatcagcaatatctatccctttgtattgctaatccacattttgcagatggaatggccaaaccgaaagagaaaacatcagtgtatgggcaatatagatggttcgtttcgtctatgcttttctcatttgaacaaatactagatacacaaaaaaacgatatacaatggattgatacaattaaatctcaattaagtcttcacaaggaaattttaagaatatcgagaacagtaaaaaataaagaatggtcaactgaattaaataaaattattgaggaagttattaattaa

SEQ ID NO: 104747 - DNA, 978 bp, Enterobacter aerogenes
atggccctccgtggcgctaagataactaggcatcataagtttttaaattcaaatgaagagcacaatatatatacaatcccatattatagaaagaataaggttaatgtagcacttacaagttttgagacaagctccgagatatataaaatggttttgctaggtaaccctgatagaagtcttagacgctatgagaagttgaatgctctaattaatagagttcttaaatcaaaggagagaattgattatattatattccctgagtgttcaattccgcgaaaatgggcaattgatattgctaataaacttgccttgcaaggaatttcttttttagctgggttggaatactataaaaaaaatggagacgaaagatatagaaatgattcattaatatcgttaacaacacaatggcctggttacccggttaatttgatgctgactcaaccaaaatttaatccatcatatgaagaaactaaggaactaagaaaattctctaaaagcttatatgttcctagcgtaggtacatatccgtcaatttataaacatggggattttttctttggtgttttaatctgtagtgatttaacaaaccctagaaatcgtgtccattttcaaggcaaaatagatactttgtttgttttggaatggaatgctgatgttaatacatttagctatttggttgagggagccgctcatgatattcacgcatttattgttcaggttaataataggctttatggggatagcagacttcgaagtccttacagaaaaagttataaaagagacttggtccgattaaaaggtggtattgatgattattatgttattgctgaaatagactatctacctcttaggtactatcaattacacggagatatgacagatcaaaaggctgagtttaaaccaatgccaataggttttgaataccatgattatagaactgcttataatattgaaaaatcagagggtgggaatgagtaa

SEQ ID NO: 104748 - DNA, 216 bp, Enterobacter aerogenes
atggcggcgcgctgcgccttatccgggctacccgcggcgccgtttgtttaccgggtggcggctacgccttacccgacctacggcctgtaccgttgtgagctgaagctctcaactctacctctctccccatggctactgaaactgccggtgttggtggcctcaaaatcgctgagacgttcccggcaggccggggcagcccgcatggatgcgggctga

SEQ ID NO: 104749 - DNA, 1014 bp, Enterobacter aerogenes
atgcatataccacgtgtaatggactgggaaactttgctcgaagagtattttttctcaaaggcgttacgtccagaaactgaaaaaagttatcgtcgcgtagtcgccgttttcaggaaatttattggatatgacacgttaccggatgaagttacgaaccgagagctgattttgtggcgtagagatatgctgggaagggggattaccacgagtacctggaataataaggctcgccatttgcgtgcgatttacaatcagggaataaagaaaaaatggttaaatatagaggagaaccccttaaacgaaacgcaagtaccaccgggtagtaagcgtaaaaaaatattgaatcgtgatcagttggtcaggattaatctggtgttagagcaatttgaagagcgcgaaaaacgtcaagtgggcaaaagccgctcatgtgctctctttcctgtttggtattggcggacagttatcgatattttgcgttcgacggggatgagacaaaaccagttattgcatatacgactgatggacgttgatcttgaggaaaactcgatgttgctgtgtaaagaagggagtaaaacgcatcgcgagtggttagttcctatcgtcacttttgtccgggaccgcatgcgaatacttgttgagcgcgcaatagaacagggggccgaaccagctgattacctgttcgatgtggcgcgattcttggctccattgggtgaggttgactccgagccggcaatacaacctgttcgctcgtttttcaccagactaacaaaagagtgtggttttaaggttagcccacatcggttcaggcataccctggcgactgagatgatgaagtcacctgatcgtaatttggcaatggttaaaggtctgctgggacaccggagtgtcagtacaacgatggagtatgttgagctggatttgaagattacaggtcaagcacttgagaatgaattgtcactgtatatggatgtcgcgcccaacggtaaagaagggcgcagacacgccttgacataa

SEQ ID NO: 104750 - DNA, 1710 bp, Enterobacter aerogenes
atgctgaaggctatcaaagaactgctggttggaacccgggttatgtcggcaaatccaacggcaagcatttcagcctctcaatgtcctgtaggttactttatgccggtatccgcagagcagcttttgagcacggcctctcgtcagcagtgtttacagcagctgtgggagaacagcgcactgcccaaagatctctatgaacatttctatctgcaacccttgaagcagcttgtttcgctgatgcaggtacttccggctgcatcccagggggagtatgccagggaaggagggctgctcgatgttaccctgcagacgacgacgtatgcggttcgactggccaaggggcacatgttgcccccaggagccgcgcctgaagaacaatccgcccagaatgtgcagtggaatgtcgtggtgttttatgcagcgctctggcactacctgccgctgttgagccagctgcagggtgagctccaaagtggccgagcctggttacctggtttgacggtgccgggtgaaccttaccgttttcgcttcagagccaccccgtcagccccgactctggccagcagtcagagcgcaatgattgcggcacgactgctgcctgaagaacttattgaatggttgtcaacactaccggcggcgatacattcgttgatgacgataacgtccaggcaaccgagcacattacctgcaattgacgacattactctggaggcggccaaactggctcgtggcgatggtttgtccgtatcgcatttgccgatatccaactccgacacattggcaatagccttaccgtcagtggcgccggcgacagaaagtatcacttcttcagtacccgagactgatttgcaaagcgcagtcagcagtatccgtcccactctcgctcaggagcaagtgtcggcagagacattagatcagcccaacgaaaatgcaccgttagtcacggaagtgttacttagctcggccctggatgcgccggccaacaacaagcccttggctgagattgttctggcaccagaaacggtggttggtgtggaagaagatatgcaggctctgttgtctttaatggcggttgagatgtctgctccggggaaccggtctgaacaggaactcggggacgcccctcacgaagatgaaggcccacttcttgccgataatcctgcgcttactgctgaagtgactcaggcagttgaagctgcagaactaaaccaggagtcagacgccattgatgatatcgctccggaagcggcattttcaactcccgaattttgtgtccctcaaactacagatctcgcttcttcgcaatcacagaaactgagtattgaaggcgatgaggggataactcgcggagaagtcttttggcgttggttagtcgatgggctcaattctaatcagatcctcatcaacactgtagaggcgagggttcatcttgtttctggttttgtttttatcactgtgcctggaattttttatttgtatttgaagcagtttggtttggatggttctaaacgagaggctctccaggaggattttgaacgtctggatatacatcgacgaataaagggtaagcgattttattttgctcacctgtatgaaacatcagaacatacaggagcatttaaacgaaccaaaggttacctcgttaaagcaagtttgctctatcgaggggggaacctacctgacgacagtccggtgctggtgatcccttaa

SEQ ID NO: 104751 - DNA, 1041 bp, Enterobacter aerogenes
atgtacaaaatagatgaattgcgtatcgacagtttagtgactcccgataaattagcgggacaattaccggcttccgccgacattatcgataatgttattgcggcgcgtaaacgtatcgaacgtattctttacggggaagataaaaggctgttggtcgtgattggcccctgttcgatccacgatcggagcgctgcgctggaatatgccgggctgctggcgagccagcgcgagctttatcaggatcggctggaaattgtcatgcgcacctatttcgaaaaaccacgtacggtagtggggtggaaggggttaatctccgatccggcattggacggcagctgccaggttagccgcggcattgaaatggcgcgtcggctgttactggatatcaatcagcttgggctgcctaccggcaccgaatatttggatgtagtagtggggcgttatatcgccgatttgatcagttggggggctataggtgcgcgaacgacagaaagccaggtgcaccgggaaatggcttcagcgatgtcttgcccaataggatttaaaaatggtaccgacggcaatatcgctatcgctattgacgccatgcgtgctgcccgcaacagccatacgttcttttcgcaggatcaacatgggcggatgacggtttatcagacccgtggtaacgctaacgggcatatcattctgcgtggggggaaaaaaccgaattaccatgcggcggatgttgcagccgcgtgtgacagcttgcacgcatgcaacctgccggcacatctgatgatcgatttcagccacggcaactgccagaaaatagcgcgcaaccaattgacggttgctgcggaggtttgccgacaaattcgcacggggtcgagggcggtagtcggcatcatggcggaaagttttctgatagaaggttcgcagccggtcgttgcggggcaggccctgaactatgggcagtcaattaccgatccttgtctcagttggacggacagcttgcagttgctggctatgctggcggaagccgttgactcgcgtttctcttaa

SEQ ID NO: 104752 - DNA, 1413 bp, Enterobacter aerogenes
atgaaaaaaaaacatatcgcgattatcggtggtggcgcagcgggcaccgtagcagcctggctgttgcgcgatcggcatcatgtgaccctgtttgaagccagccattatatcggcgggcacgtatatacgtgctcggttgacgccggtgaagaaaggcgtattcccgtggatatgggggtggagtactttaatgaacgggttgcgcctaacgtatttaatttgctgcgttatttaggcatcgaaaattatgtggcgccctcgtcgtttcatgctcgctttcccggagaggcgcaatactggagcaatgttcactacgatggtcccatgcgtcaggccatgcaggacgagtttagccgctttcaactgggcatgtcggaggtgatgagttccggcgatacgcgctataaaacgatgtcgatctcggattacctggatgaaaacggctattcgctcaggtttatttatcaggcgctctatcccatgatcagtatttctaccggctgcaatgtggatttgcgcagttatccgctgatgtttttcgcgctgtcgttcaacgccaatctggtgtcgttctttgctcccggctattggcgcaaggtagacggcggtatgaatcgctacctgcaaagcctggccgacacgttaggggagcgtttgcggttgaatacgccggtacagtgggtaaaacctcgtggcaaaggcgttgcattgtgccatgcgggaaaagaggagatgttcgatgcggcgattttcgccacctctgcagaggtggctttggctctgttggccgaagcgacggtgcagcagagggagattttgtctcatttcgcctatcacgatatcgaaagcgtggcccaccatgatacgcgttatctgggggagcagacggtgccgcactacttcaattttcgtcagttcaccgactcgcctgcgggagcgccggtgggtagcgttacccgtgtgattaacgcgctatcaccgtatcggcatctcactacgccgctgttggtgactctcgatcccaaagtgcccatcgatccgcaaaaacggatcgccacctgccgctggcgcgtggcccagcagcagcctggcgattttttgcataagacgcgtctgagggaaatacagggcggcgctaacatgtggttttgcggcgttgacaccagtttgggggggcatgagggggcggtggtgtcaggtatggtgatcgccgatcggctgggggcaccttatccttataagcatgacttgctagcctatattcaattcaaagtaaccaaagatattatgggggtcaaaacacgcggtgaagcgttaaaagacaggctgtccgatctgctattcatcaccgccaaaaaatgcgctcttcataaaagcctttcttacaagttcattaaagatttcatcgtataa

SEQ ID NO: 104753 - DNA, 459 bp, Enterobacter aerogenes
atgaataacgaacagcaattacgtgaaatctgccagtttattaatcaggagcgcgtattaacgctcagtgtcgctgcggaaggtgccgtgtggtcggcaagttgtttttatcaattccaaaaggatcagatggtgttgtatttgatgagcgatattaattcacgccattcacagttaatgctcaaggcgccaaccgtttccggaactattatttcatcagctaagtcaatgatgtctatgaaaggattgcaatatcaggctcacatcaccccattgtctgcggagcatgaggagcaggcgcgaaatttctattgtgagcgctatccaattagccgcgtaatggctttgaaaatatggcggctgcaattaatggaaataaaactcacacaaaggcgaatgggtgtgaaacggtgtctgcattggttgcgggcacagaagcgggaggtgttgccgcaatga

SEQ ID NO: 104754 - DNA, 1770 bp, Enterobacter aerogenes
atgccagacctgatgacaggaaactgcagtgtgaatattagcgaaaccggcaacgcggccgagttgattctacagtcaatcgtgcagcatccagagaaaaccgcgctaatcaacggcgaaagccgcatggattacaccgaattcgaacggcacgtggttgccgtacagcgccaactgacgcaagtcggtgttgggcagaatgatgtcgtcggattgctgctgcatcgcgatcggtggctgattccggcgatggtggctacattggctctcggggcgacctttgtcccgctggatcccacctatccgctgtccagactggagcgttatctcgacgtcgccaagccgaaagtgctgctcgctcatccggacgagagcgttctggcgcggcggttgcatcataatgtgacgtatcccgtacctggcgcggcagggaaggtggcttgcgtggcaaggcggtgcgatgacatcgcgtacatcctgtttaccagcggttcgaccgggcaacccaagggggtcagcatcagccacctggcgctgagcaacttcttaaccgccattgccgaacggttggacgtgagttcgtcccatgtctttttggcgcacaccacggtagcgttcgatatttccattcttgaactgttgctgccgctgagcgttggcgggacggtcctgttggcgaacaatgatgaagtgagcgccattgaaggcattctcccgctgattgagcaaagccatttcgttcaggcgactccgagcctatggaaaattttgtgggcgaccggctggcgtcccgatgcctcagtgacgttgctggccggcggggagtcgctgccgttggcgttggcgaaaaaattgagccaggcctgcggcaaattatggaatatgtatggccctacggaagcgacagtctggacctcgtgcgaatgcgttgagtgggatgcggattatatttccatcggcgaaccgctggcgaatacccagctgcacgtgctgaatgaagcgcttgagccgtgcgagcagggggagctctatatttccggacacggcctggcgcaaggctattacggcaaccgcgaaggtacggaaaaggtctttatcactcatccgcaaaccggtatgaggctgtatcgttcgggagatcgcgttcacctgcgcgagccgggaaaaatcgaatggttggggcgcggggaaggagaaattaaaatccgcggcaatcgcatcggcgtgagtgagattgagcaagagctggaaaatatccccggcgtcgcgggcgcggtggtcgccgccagaccgtttgaaggacagggcgacgatatgctcaccgcttatatcgtcagccgggcgtcattgagcaaagcatcgctggaggccaggctggcgaataagctacccgcttatatggtgccggatctgttcgtgatgctgtccgattttcctctccagccgaacggcaagctcgacaaaaagtccctgccggatccttgttggaacaacacgttgcaccaccatgtcgacagcgcgccgcccgcgcaggattgtgcccaacggcgagccatcgcggaaacggtctgtcaggttttcgctaccacgctgggccgcaaagcgtttgactccacatcaagctttttcgatctcggcggcaattcggcgctggccgtgatttcggcaggtattatcagcgcgaagttgcagcgcaaaatcccggtagcgctgatcttcagtggcgaaaatcccaacgtcattgcggagcagatattgcaacacacctga

SEQ ID NO: 104755 - DNA, 936 bp, Enterobacter aerogenes
atggtgaccactccgtatgcgctgatctttggacctgcagatgtatcccacatgatgaaagacatgcagcgtctttacgcgacccaccctcaggttcgcgcccgcttcgggcaggttgcgcgctctgccggtatggacgtcgacacgatcctgcgtaagacaccgctgcctgatgacgcttcatgcatgcagatggtttcgctgggattgctcgccggcatgctgggcatagccgacgacatcattgaacaacgcggtgcaccgagctgcgtaggcggcatcagtcttggggaggtggccgcactctgtgtggcgggcggcttgactctggacgatgccacggcgctgatccgccagcgggtcgatatgccagaggccgaagatgaaacggtgggatttgtcatggtgatggaggaaggggggcgcgctttctaccatcagccgccggaaatgcgcatcgctgtcgattatggcccgattcatcaaggcattggctcgctgttaatggttgctggattgcgtcgggtgctggaggggcgtgggcaggaaggttccggcgtactggaggtgctgccgccggcgctgtgcaactcggcgtaccacaccccttaccgccggcggatcgccgagcaggtcgacgcgtatttgcaagggtgcgcgctgcctgagcctcgttatccggtagtgacctgtttgccggaaatcggcgttgttaacgatccgcacgggatcagacagatgtgcgtacgcggcgaaacggaaatgctgtcggtgccgacgatgatccggcagatgcaaagcttcggtgtggcagacgtcatctgcatcgggccgttcttacgcagtctcaatatggatttcggcggcgtatcggcttcctttcgcgacgaacagtgggtcgacgatctctcgtcgtctctgtcgacgcttgaataa

SEQ ID NO: 104756 - DNA, 1371 bp, Enterobacter aerogenes
atgaactctcctcttgattctgccgcggtagggcggattgaggccgtcgtgcaggggcgcgagtatgcgacccgacggcgcgtcgcgatccacgatctgctcgccgctccggtagcggacatggcggtcgccccgccggtttatatccatagcactatcggcgtgatgagagccgcccccgcgctctctctggcggaaattcatgccgcgatggcgcgtgcggcggatagctttcagtatgaaacggtcgcggggctgtcgcccgaggcatattgtcaacgggtgcgccgcaccacaggcttaccggcggcggtgacgcagaacgccctggtcgcgatcgcgcaggcgttacgcgagatgccgcagatcatcgaggcgggcagaccgcaaggcgcctgctggtcgcggcacgatgcgcaggcgcaggccgggtgcagtttatttagtcgaaaaggcgatattttcgccgtgttggccgccggcaatgggccgggcattcatgcgctgtggccgcaagcggtggcgctgggctaccgtgcgctcgtcaggccttctacgcgcgaacccttcacggcgcaacgcgtggtctgcgcgatggcgcaagccggcctggcgcattatgtggcgctgatccccacagactatcgcggggcggacgagctggtggcgtcggccgatctgactttggcgtacggcggtcaggatatcgtggataaataccgtctccatccccgggttcgcgtgcaggggccggggcgcgccaagattgtcgtcggcgccgacgcttgcctggatgaagcggccgcgttggtggcgaggtcaatgaccaatcttggcggtgccgcctgcgtgtcggccagcgcggtgttagtagagggcgacgtgcatgacttttgtcggcgcttgaggctggcgctgcaacagctgccgccggagacgttgccgcacgcatcgcggcaaacggtggattggctgagcagcgcactcggctcacccgttgcggctgatgcgacgccggaaggctacgtgctgcatccgctggtgacagaagttactgaacctgacgatccgcgggtacaacgcgagttgcctttcccttgcgtaacggtcgcgccgtatcaggcgatgcgcagtgcccccatgctgtctggctccctggccgtgacggtattttcccgacaatcccgactgctggcgccgattctggccgacgccagtatcagcaatatttatgtcggtgatattcccacgacctggatggccccctcggtgccccacgatgcctatctaagtgatttcctgatgtgcaatcggggatttcgcgtcgcgccatcttgggcggaaaataaaattcaaggagaaacatggtga

SEQ ID NO: 104757 - DNA, 1059 bp, Enterobacter aerogenes
atgaccttacctgactttacttcccacctgacgggaatgatgaaatggcatttctcaccgcaaaccggcgcgccgttctggttggatatgcgccaatcgctcgattttgatccgctgcatgaggttaataccttctccgatctggcgcgttttcctgatgtcgccgatcgtatgcgtgacgttccgatagaagcgcttatcccgcgtggtttgcagggttcggcgctggcgggcgtctttgaaagcggcggcacgaccggtaagccgaaacgcatcgtggtgtttgaacagtggctggatgagttggtgagctggcgtttatccggtccgcggcccggcgctgatgaacagcccggcaatacattggcgctggtcccgaccggcccgcatatcgtcggcgcgataaacgctcgacgcgcgagggctaaaggcgggttgtgttttaccgtcgatctggatccgcgttgggtaaaaaagtgcattcagcacaatgacatggccggaatgcaagcctatgccgcgcatatcgtcaaacaggccgaggatatcctgtacagccagtctatccagtacctgatcgccacaccgccaattctggagcgaatggcgcggcgcccggcgctggtggcacatatgaaccggacgctgaaggagatcacctggggcggcacccagatggatcccgataccctggcgtttctgcaaacggaggtgtatccggcggtgccgatcaacgccagctatggcagtacgatgatccttggggaagccaaggcgcgttgcccggcgagcaccgacgactcggtgattttcgacagttttgccccttatatcctgctggaggtagtcgatccgcaaacgctgcgccccgtgcagtttggagagtgcgggcgagtgatcatgcatcatctcagccgttacgctttcttccccaatatcctggaacgtgacactgcggtgcgccgaccgcgcaacgacgatttcccaggcgcgtcggtcagcgacgtcggcccgttggcggctattgacgggcgcgcggtcatcgagggggtttattaa

SEQ ID NO: 104758 - DNA, 636 bp, Enterobacter aerogenes
atgggaagtagtgcgtttgaaagtgtcagcggcaaggtggatactgactttttgcctttccatgcgcggcttaaccagccgattgagctcgcctgcgcctgggtgcaggaagcgatacgcgaacaggttagagaaccgcgcgcgatggtactgacgaccgccaatgcgcagggagaaatgagttcccgcgttatggcgatcctcgactttgccgagaccggtattttgttcgccacccacagctgtagccgcaaggctcaggatatcgacagccatccccacgcctgtgctcatttctactggaaagaattggggcggcagctctcggtcagcggcagggtagtcaagctgccgcaggccacggccaaggcggtttgggaaaaacgaccgattccgttgcatgcaatgtcgacagtctctcaccaaagtgaaccattgttggacagcgaggcgctgcgccgggcggcctcgactcttgagggcgtgggggcattgcaatgtcccgaccgtttcgccgtttaccaactggtaccgcaaacggtggaattttgggccgccagttcggatcgcctgcaccggcgcctgcgggccgaatatcaccggaacgaatggcgaagcgcctggctacagccgtaa

SEQ ID NO: 104759 - DNA, 846 bp, Enterobacter aerogenes
atgcaccaatatgtcatcgtaaatgcgttcagtgatcgcgtgctggccggcaatccggtcgccgtatttttcgactgcgacgatcttgagccagaaaccatgcagcgcatagcggcggaaatgcggctctcggaatccacgttcgtgtcgcgccctcgtcacggtggcgatgcccatgtccgcatttttacaccagtgaatgaactggggttcgccggccacccgctgctgggcacggcgctggcgctgtctctccggttacgaaaaaccatcctgaatattgaaaccgcgaagggcgtcttccccttcacgctggaagatgccaagttgcgcagcgatctcccggttgcccatgtcgatatgcttcagccgtcaccgataatccaaccctatgcgcaagctgaagcgctgctgctcgcactggggatgacgcacagtactttgccgattgaacagtacgacgtcgggccacgtcacgtctttgtcggcgtcgccgacatgcctatgctggcttcgctgaatcccgatcagcgcgcgttggcgcaacatgaaaacatggctgcgctctgtttctgccgcgacggcgatcgctggcgcctgcgcatgttctcaccggcctacggcgtagtagaggatgcggcgaccggctcggccgccgggcccttggcgctgcatttggcgcggcatgggtggagcgactacggccaatcgttggaaatctggcagggggtggaaatagggcacccgtcaaaaatgtacggcatggcgcaaatggatgaaggggcgtaccggctgtatgccggggggcacgctatccaggtagcgcagggcacctacgcgatttga

SEQ ID NO: 104760 - DNA, 354 bp, Enterobacter aerogenes
atgatcatggaatgtgtgtggtgggagctggcgccgggcgagccggatatcgggcaactgcaggcgcagcttgagcaagtcgatctggctgcctggcagcgaatcgacgcgctgcaggccaaatactggatgatgaatgagatgccgtctcgctggggggcggtgatggtgtggcgggatgataaacccgatctcgcggcgttgccgctgaatgcggccgcggaggcgatcggccggccgccggatgtgcggctgcggttcaccgtcaccgcatcttgcctgaatgagtcgattatcacgcccctggcgtctttgctgaatcgggaggaaacatgcaccaatatgtcatcgtaa

SEQ ID NO: 104761 - DNA, 1866 bp, Enterobacter aerogenes
atgaacacagagccgacaatcacctctttgctgcgctatggcagcaaccatgaatcgtttgcgctgttattcagatacgggcgcagcgcggttcccgaaatcgaagtgatcacgggggaagaacggcatctgaacagtttgcaagatttggcggatgtaccggcgaaggccgacggcggcgatgggcagcaaacgctgctggtcgcgccttatcgccagattgctgaacggggttatgccgttaatgacgacgctaaaccgctcattgcgttcgtcaatgcgcgcagccataaagtgccgctccatgaagcactggccctgctgcccgacgtgccgttgaaggtgagccgcgccgcgttcgaaccttccgacgatgagtatgcgcacacggtcgctcaagtcattcaaagggagatcggcaccggccagggggctaatttcgttatccgccgcgcctttaccgccgccttggcagattatggctgcgaaacggggttaactctttttaaaaaactgctgctgcaagaaagcggcgcttactggacctttttcattcagtgtcgcgatgtcaccttgataggcgcatcgccggagcggcatatcactctgcagcaacagaaggtctccatgacgccgatcagcggtacctatcgctatcccgccactgggccgacccgggaagggctgatcgatttcttatccaatgaaaaggagaaggatgagctgtcgatggtactggatgaagagctgaagatgatgacccgcatctgcgactccgatgtcaaaacgtttggccccttcttaacgccgatgtcgtgtttggtgcataccggctatcggctcgaggggcattcatcgttgccgatgccggagattttgcgagcttccatgtttgcgccgacagttaccggcagtccgctggaaaacgcgacgcgcgttatcgccaaatatgagtcatctggacgaggctactacagcggttttgccgccttgctggggtctgagggtggtgagccgacgatcgattcggcgatcctgatcaggacgagtgaaattgattcgacgggcgcgctgaccatagggttgggagcaacgttggttcgaacctcggatcctgccgccgaagcggcggagacgcgggcgaaggccgccgctttacagtgcgccttggggttgaatggcgagtcgacgtctatttttcaggatgaacaggtctccgtcgcgctgcaaaagcacaatcatcgtctggcagccttttggcgtgatgccgctggcacgaatgcgaagtgctgccggggcgaggtgctgctgattgataacgaagatgcctttacctcgatgatggagtatcagctgcgcgcgatgggattcaacgttcggcttgcgcattacgcttcccctctgcaacctaatccgcatgagctgctggtcatcggccccgggccgggcgatccgcgtgatttgaacgacaagcgagtgatccgcagccgcaagctgattcagacagctatgcaacaaggccaaccctttatcgcgatctgtttcggtcatcagatcctgtgcgctgccctgggatatccgatagtcgcgctggcgtcgccaaatcaggggatacaaaaagagatcgccttctttgacaaggtcgaacgcgtgggcttttacaacacgttcaccgggctggcggccagcaatgcattggccagcgagtatggcgagattcgcgtcgcacgagatgaaacgaccggccagatttatggcctgcgcggaccgcatttctcgtccatgcagttccatccagagtcggtgctgaccatcgatgggccgcggatcctttatgaatcaatccaacagatggtgacctcatga

SEQ ID NO: 104762 - DNA, 621 bp, Enterobacter aerogenes
atggctatacctgatattgaagactatgatctcggctcgctgacatcgtcaataccaaataaagtggattggcgtctgactcccgccaggagtttgcttttagttcatgacatgcaaaatttcttccttaacccgttgcctgaatcattacgcaagaccctgttggcaaattgctcgcagttgttagcctgggcgaggaaacatgccgtccctgtagtttacaccggccagaaaggcagcatgagcgcgaaggaacgcggattgctttatgatttttggggcgcaggaatgaatgccgatccgttgcacacggcaatcacgccgttattatcgcctcaaccgggagagccggtgttaaaaaaatggcgatatagcgcgttcttctcttcggaactcgccaatatattttctgaccagcagcgtgatcaaataattatatgtggcgtctatgcgcaaattggcattttaaccaccgctctggatgcttattccagagatattgaggtctttttggcgcgggacgcgatagccgatttttcgttggcggctcaccaacgcatgctaacttacgccgcatcatgttgtgcgtcgatattatcggtggacgaggtaatggcatga

SEQ ID NO: 104763 - DNA, 459 bp, Enterobacter aerogenes
atgatggaaagtaatgcgcgcgcgagcaatcgcaatattgtcgaacagtatatgaatacttacgggcaagcccgtttatccaggcatgaattgtttgacgaggaggggtgcggagggctttggactacggatagcggtgaaccggtcgttatcaaaagcaaaaagcagttggctaaacatgcggtatggtcgttagcctgctttcccgattggcgctggtacaacgtgcagatttttgatacgcaggacccggatattttctgggttgaatgtgacggtaaaggagagattaattttaagggctacccaaaaggattttatcagaatcacttcattcattacttccagttcaaaaatggaaaaatcatccttcaacgtgagtttatgaatccttgtcagcaattccgcgcattgggtattgatgtgccggaaataatcagagaaggcattccgtcctaa

SEQ ID NO: 104764 - DNA, 828 bp, Enterobacter aerogenes
atgtgcattggccatgagctcgtcatggcacgcaaggagaggcatgtgagaaaaatatggttgatcacaggtgcggcgcgcggttttggccgcgtttggaccgaggcggcgctaaaaaggggggatggcgttatcgctacggcgcgtgcaccggagaaattggccgatctggccgctgagtacggcgaaaacctcttgccggtgaagatggatgtgtgcgatcgcgccgccgtggccgctgcggtggaaatcggttttcacgccttcgggcgcatcgacgctgtggtgaacaatgccggttacggtctgttttgcccgttggaagacgtgccggaaaaggaagccaggcagattgtcgaaaccaatctgttggggtctttgtgggtgattcaggcggtgttgccgtatttaaggcgacaagggcatgggcatatgatccagatctccagcattgccggtttgctggcattgcccggcatggcgatgtacaacgccacaaaatgggcggtggaaggcatggtcgaaaccctggctcaggaggtcaaggcgtttggagtcaatgtcacgctggtggagccgggtccccaccttaccgattggattggcagctcggccgtgcgtccggaacgcgggcaggcctatccctctcatgagcagatgatgcagcagagctggccgcgtttgccattggccgctcccgatgccgccgtggcgccgatgatggcgctggtggattcggacgcaccgccgttgcggctgctgttgggggagtcgttaaatgacttgatcgttcaggatgggcaacaacgcctggctggcatcgcataa

SEQ ID NO: 104765 - DNA, 387 bp, Enterobacter aerogenes
atgttcaagcctaatagtgtgattttgtacgttgacaacgtagaagccagcaccgcgttttacaaagctatttttggcgagggtccgatcgaggctttccccggtttttccgtgttctcgttaaaagatggttttattttagggctgcaaaccaagcacgatatcgagccgaagccccaaccggcattcggcggatttgagctgtgcctgagtgatatctcgatcgaagaggtcgacgccatttatcgcgactttaaggcgcgcaatgttccaatggcgttgccgccgagcaggctggagtttggctacacctttgtggcgctggatccggacgggcaccgcatccgcctgtgcgcgacagacaccagcgggatcgagaagctgtaa

SEQ ID NO: 104766 - DNA, 252 bp, Enterobacter aerogenes
atgagtgggcaagttattaattatcatggtgaaatattcagactcgacgttcacgataacgtcattcattgttcggtttcttcttacggggcatcatttaccggtgggaatagcaaggctccgcttttttctctgcagtttttcctctgcttggctcatcgtcctctgtcttttttctcagtttccttctttcttgtggtgattaatttcatgtttaatcatttctattcgaaatacatcgaacgctattga

SEQ ID NO: 104767 - DNA, 708 bp, Enterobacter aerogenes
atggatggtatcgcggcgccgcacggtcagttcagcagagaaagcatcgccttcttaagcgaagtaaaacgacaaaacagtaaagagtggtatgataataataagcctgcttataaaacgtatttgctggaaccttttcaacatcttgttgaatcactcaccccgacaatgcaaagcatcgatcctcacattgaagttagccccacaataggtaagaccgtatcccgcatatatcgggatacgcgcttttccaaagataagtcccgttttcgcgatcgaatgtggctgacgtttaaacgcgataaaaagcattggattgattctccggtttatttctttgaaatcaggcctgatgcttttttttacggtttgggctattatgctgcgacgcgagccacgatggatcgcgtccgagaaaatattctccgccgagaaaagggattccgacgcgccacggcacaccttttaccgatgttcgagttgacaggcgaagcatacaaacaccccctgcagtccgatcagcccgaagagatcgccacctggtataatcgaaaatccttctcggtcatgaaagaaagccatgatattgccgaactgttcaagccacagttagtgaatacgctagcagacgcttttacccagttagcaccactttatatcttcctgattcgtgttgaagatgaaggtctcgaattggaaatacactaa

SEQ ID NO: 104768 - DNA, 171 bp, Enterobacter aerogenes
atgctgacgtttactgaagcacaaaaccaattcatcggcctctttggccaaacggcacgctaccatcacaggtacaaagtcttttctgactttgttcagtgctatagcgtaatccggctgtcttcgcttggtattcggaagatggatgagattagttgcgggtcaagttaa

SEQ ID NO: 104769 - DNA, 273 bp, Enterobacter aerogenes
atgactaaagccaccaacaaggggctacaggtaaccgttgaccctgagattgccagcgaactggcctacatgctgaagcttcagcagacctgtggcgccgctgttcagcttgagaatgtcgagggcctgatccattacattctggcgagtatcgccgatggtagccgacggccgggctcgtgggagcgcggaatattggtacagctgggattggtcgctaatggcgacgaacatcaggtataccgggctcactatggcgagcaagcccactaa

SEQ ID NO: 104770 - DNA, 789 bp, Enterobacter aerogenes
gtggctgaggataaaaatgaaacaactcaagcattaggtgtaattactttgctggatagattgtggcgatttaacaaagtaatgacgctgggttattgttttttattccttgatgcttttttatcatatggtaagggatatggtgtatttgctttgtcatcatcaaagttatcagattttaatcttggtgatatttgtttgtttttgcttttatttggtttgatatcctctctgggattgttttttctcgagggggtcgtatttgctgttttgactgagctgaaagcctatcgcttatttccttatgagggaagtgataaaaggaaaaagtccggttatgtctatattggtgatttacgagaatatgccatgcgggaacaatctgagttggcgtataaggagtataaagaggccttcggtaagtggtatgatgagctggtaaatttacacgaagcaaggcgtgtctcttttggttgtttgttcctatttgtctttgggtggatattgtcggcatttaacggttcaaaaggagtgtttttggatggggtttactcttttcttgatttaagtatgtctcattttcttctagggtgtattgttttcttggttttgcttgtggtttatcttgttttttacgggagggaggttgatagttccctttgggtttattacccacctttatatgatataaaagtaaaagaagagaagaaaagacgagagagagaacgcgaaattgaaagggaatatgaaatgaataaaagaaagctaaaggataaacaggactggtaa

SEQ ID NO: 104771 - DNA, 936 bp, Enterobacter aerogenes
atggagtacgagttagatattaaagagaacgccatggacagtttgaacgaggcgttagcaaagtacgagcttggcgaacaaggtgaactccgtcagtacaaattcgcaatattgcatttttcccatttcttagaactcattctgaagctttacatctcatcagttgacgaagcgctactgtttagcaagtgctttcggtatgtcgaaaagcgtgtaaagcaggatcgttcgaacctacttcaggcctatgaagccttatgcgacgaagggaaagagttaagcgaactgttaaaggatgtcccttatccgcatacaatcaccctcgatcaggccctggaatttgcaaagtgtgaaaaatgcagcatcacaggggtagatttcgttgatattgatttttgtaaggatatcgaatggataaaagggttaaggaacaacattgagcactaccagttcaggctatcgccaaaggaagcaaggctttgcattgggcggttagtacgaagtgttatcgagtttcttgatgtttttgatttgtttgatcttgaagatgaggtagggaaagggaattataaaacattcaatatccttgcggatgaatatactcatatgcttaaagaggcagaaatggacgtcgcggaaagaaaagccgccgtgttcagaggtgttcgtccaaaacattatgcattgattgaatggaatgtctatgagtgcccagaatgctcaaatgatacgctgatacctgctgacgattcacctacgggctatagatgtacattttgctcaaatgaagacagtgatgagctggatgtatattgtgactgttgtggagtgccagctcctgctgaggatatggctgtctggcctatggatgatggttcacttgagtatcgatgttattattgttcggggcgacatgcagctgataaagatgattaa

SEQ ID NO: 104772 - DNA, 642 bp, Enterobacter aerogenes
atggctacgcaagaaagtgaaacggaaatcaccttgtcagcgttgagcaacctggcattttgcgcgcttgttgcgttaggtatcgctcgccaggatggcagcgccggtaatccactggcggagcatctgtttcttgtccgctggctggccaccgcccaaaaacaaaagcgtttccccaaatgtgttgccattgatattgcatacttactcgaagaaggacggaaaaagggaccgaccagtcagcttcgagaaaaactgcaatccctgtggcaatcctgcacagcccccttgaccatgcagtcagacttgtttcgacttacctatgttaccgagaaactacgagagcatggctggaaaaacttcaccctggacagtaaatcctggagggataagcgttttccggcatcatgcccatccaatggattttacactgaagaaagcgcgctacatgtcgcctattctgatgatggccgcttaatcagccagctggatctgcggattgtgggcgatgtcgacttactcctggcgctcatggagcaatccgcgatctacgcagaactgattgagcgaagcgaactctttcatcgggtggtgatatatccggctcccccaataacactttcagtgcctcatcacgggtag

SEQ ID NO: 104773 - DNA, 375 bp, Enterobacter aerogenes
atgagccaaaccagagatcagcaggcctaccaacgaggtatctgggctgcccgtaagtggagtcgtctgaaaaatgtgattatgagatgggataggttctgtgtgtcaaaggctcgcaaatacaacctaccaacttggttgggtcatgtgcctatcacatgcttagttgccatatcagctgttagttgtctaacggggggattactggtagccgttataattctgtttgtttgggcatttttactgctcccatcggttatggagtttctcagacctacagtgaatgtaaaggttactaactgggaagaaaagagccataaatatagttatggctctaatggttccaacggctcggatggctcaacaggttcctaa

SEQ ID NO: 104774 - DNA, 1518 bp, Enterobacter aerogenes
atgatgaccaacagctatctggagtatttcctgacgctgctcggctggctgattaacaacggcctgtgggagctgctggtcagtacggggctgtttgtgctgccgctgctgttcaaagtagcggccatctggctgaaggtccgggaggaaggtgaggatgagggcaacaaagggatgctgtccctgccgcgcatcgagaacctgctctacggcgcgtttttcgtgatgcttgcctgttgcctgccgctgatgaatgtcagcctggataccatcaaatatgacagcagtcgggcggcaacctgcggtacctggacacccaaaaagccggatgaaacgggctacgccaatatcatgtcgagcatgaacggccagacggcgaaggtaccggtgtggtggttggtagtgcataagctgtcgaaggggatctcgtcggcggccgtggccaccattccgtgcaggcctgatctgcggcaggtccgttttgaagtccagcacagtcgggtcaacaacccggcgctggcgaaggagctgcaggacttcaccaacgactgctacgcgctggcattgtatgcctggcagaaccgcgaccagggccagacgacggacaaagccaccctgcgtgacatcgagtggctggggtcgaagaccttcctgaatggtgggtactataacaacctgcagtctaaaacgccgcgtaccaatttcccctggaatgaggggcgggacagcggccggccaaacaccgggcggggtgggtacccgacctgcagcgagtggtggtcagccggcgaaacgggccttgaggcgagggtagtgaagcaggttgacccgggcgtgatgctgcggatgtccgctgcgctgaagatgatgggccaaccggatgcggactataaagaggcggtggtacgtcgcctggtcagcccggataacctgacggtctcccagggcggacgcgcttatgccggctacggcggcaatgcagactttaccctggacaactcggttaaccggctcgcgtcactgggcggaaccgcgctggggagcctggcggcctatccggcatttgatgccatgcgtcaggcgttgccgatggtacaggcggtactgctgatggcggtctatatcatggtgccgctcatcctggcttttgcggcctacgagtacaagacggtgataaccgtgacgttcgtggtgtttgcgctcaatttcctgacattctggtgggaactggcgcgctggctggacagctggttactggaggcattgtacagttcggactcgcacagccgctggaatgtagccgggttccagaatagtgcagatgacctgattatgaacctggtgatgggctgtatgtttcttgtacttccagctgtttggcttgctgcattttcatgggctggtgtacgtattggtgaactgtcccgcatgatgacagatggcacgtctaagtcccaacaaacaggtggacttgtaggtgatgcagctgctgcaaaaattgcatccggaggcaaatag

SEQ ID NO: 104775 - DNA, 372 bp, Enterobacter aerogenes
atgaccggaacagagaaacaaggtgtgtcgccccgcaggggcggccggctcggtcaccgggcaaagcgtgtcctgcagatgctgggcatgctggtgattgcgatgatagtggcgctgggcgtggcccactggggtgtcaatcacccaggagagagtgccgcgctgcgtgactgggtgcactgcacccggtatggctggctgagctggcgcctggcgctttatgtgacgctggcctggggattctggaaaatctggcgcgcgccgggctgcaaaccggaataccggcagcccctcaagcgcatggccatcgcctgcgcggtatttgccctggcatgtgaatacagcctcttcggcggagggctgaccttatga

SEQ ID NO: 104776 - DNA, 1008 bp, Enterobacter aerogenes
atgcaacgctctcctttgcagttggcatcacccggacaaccccggctgacccttaaatccctcggtgtagccatgatgctgtctgcggccggcgtgccggcggcgaatgccgcgctcaacagcgcacagattgttgccagtgcggtgtcgcagtcctgcatcagctggcgcgtcagcggtatttgctactggttgttctgcagttggggcggctgcactgtccgaacttcggtcaaagttagccatttcatcccggaggcggtggtgtcggcgtataacaccccgggaggcaatccgtggcgtgagatgtcgatggtcagtcaggccgccggcggactcgagagcagtatcaccagcgcactgggcggtgttgctgccggcggcggcaacaatgagctgaaaacgcctgggcagcgcaaaaccaaccttcacttcaagtatgccgatgccattggccatccggcgacgaccctgattggcggcagcattgccggctattcgtgccgcagtgcggcgacccccttcgtgccgtatttcctcagcacgctggacagcctggcatggcgtactggcatgccggaatccctctatcccgaagcattggtgcctggccagcgtgaggtcggcagtcaggcggtcgcgaatatgtggggcaacgtctatccacgttcgggatttgtgactcaggtcgatgatgacaaggctggcgccctggtggcgcagcgggtggcagacattatcacccgttctggccagccccatgtctatcagcccctgatgggccagcgctcagaagggtactggcctcctgggccggttaaggagaactccggcaccagcaaccataaatggcaacgcctggcgccgcagctcagccagtcctgcgccgtgttcccggacggtgagcatccgccggccgcggatgcgaacgctgcctttgccctgtggcaaccctacagctgctgccagcgccgcgggcagcgtttcctctacagcacggatttctga

SEQ ID NO: 104777 - DNA, 405 bp, Enterobacter aerogenes
atgaaaatcagcacgttgctgacgttgtttcctctgttgatgccggcatcggtacttgccggcacggtactctataccgattcccaccatcccccgacgaataatgatgcctccgtgaccgtgatttatcttgacggtccggagcagttgcagacgcagctgtttggcgcactgtcgtcgaacccggatgaagcgcagcggcaggcgcaagccgtactgcagtcaccacaatggcaggcgcatgaagaggagctggccacggtttaccgcgcggtggtgcgcgcgtgggaactgggcgtcaaaaaagtccccgcggtcgtgtttgacgatcgggatgtggtgtatggcaccgccgatatcgcccgggccaccgcgttgcgcgtgaagtcattggagggccagtga

SEQ ID NO: 104778 - DNA, 396 bp, Enterobacter aerogenes
atgaaaaacccattgaaatttaatgtctccgcgctggaatgttatgaagagaatgatgtacttaccgttgctttgggggatgatacgaaatcacctgaaaattatctaatcattactcggttggatgatgacgataatgactctattgatgaggggatcggcctgcaaacatctcagtcagcctatgaacaatcagctgcgattgagaaagttattttacaatcaggtagtttagaagtggttatcacccctgattcataccagcatttcggttgctctagtctggttggtgagttttctgacactctgcgtaacaactctgaaaagctagcactgttgaaaaagtatcttgaggcgattttcaatggtactcagacaaccctcattttttcatga

SEQ ID NO: 104779 - DNA, 2697 bp, Enterobacter aerogenes
atgagtgaacggaaaaatctggggttccggcgtagaacccctatctatgagcgcgatgagctgtgcggtgtggtgctcccgggcggcgcgcagcgccagagcgagtgggaccgttacggccgtctgctgagcgagacggaccccctggggcgtaccatcacttaccagtattcccgcaacagcggacgcctgttttcggtcacctatccggacggcagccaggtgttccagcactgggataccctgggacgcccgacacagcagattgatgcgttgggtaacatcacccgttaccggtattccgacgatgaagaaagcctgccggagaccattattgatgcacggggcggtgaggtgaaactggcatggaacgcacaggggttgctgacgcgttacacagactgctccggcagcgtgaccgcctatgcttatgatgcattgggccagctgacgcaccgcaccgacgcggaaggaaacctgacccgatatggctgggaccgcgccggccggttacaaacgttgctccatccggacggcagtgaagagcgctttgcctggaatgtgcaggggcaactggtcgtacaccaagacccgctcggcagcgagacgcactggcagtacaacctgctgggacagccggtcagcatcaccgaccgcatcaagcgtacgcgccggtaccactacaactgccgcggctggttgaccaacattgagaacggcaacggtggggaatatcacttcagtcacgatgccgttggccggctgacggccgagcgccgcccggacaataccgatcatttttaccgttatggccccgatggccaactgaccgtacaccgggaaaccgggccgcaggatcccactgcaccgcctgcgcagcgcctgcaccgattccgttatgacgaagccggtcaattagcctggcgcagcaacgccagtgcggaatggcagtaccattatgatgctgtgggtcgtatgagccgtctgacgcgcacgccgaccgttgccggcgccgagctgggcatcgagccggacagcgtgcagctgcgctacgacaaagccggcaatctgctggccgaacaaggggtcaacggcgagctacagtaccaatgggatgcgttgaccaacctgcaggcgctgacgctgccgcagggcgaccaactgcagtggctgtactatggttccggccacgccagcgccatcaagttcaatcaacaactggtgagcgagttcacccgtgatcgcctgcaccgggaaaccggccgtacgcagggcgcgctgcatcagcagcgtcagtacgatgcgctggggcgtcgcagctggcaaagcagtgccttcagccacgggcagataaccaaaccggaagacggcgtgttgtggcgcacgtttcgctataccggccgtggtgaacttgagtcggtctgcgatgcgctgcgcggcgaggtgcactacggctacgacgcggaagggcgcctgttgcagcaccgggaaaaccgacttggcaaggccggtaaccgtctgatgtatgacggtgccgataacctgctgggctggcgaagcccaaatgacgatgtcgacaggcatttaccgctggcgccgatcgccggcaatcgcctgacgcactggcaacagctattttaccgttacgacgcctggggcaacctggtcagccggcggaacgggatgtatgaacagcattactgttacgatgccgataaccgcctgatacaggcgcgcggccgcgggccagagggcgagttcgaggcggagtatcactacgatgcgcttgggcgccgcacgcgcaagacggtaagctacaaaggtaaagcgccggaaacgacgcgttttctgtgggaaggctaccggctgctgcaggagcagcgggacaacggcacgcgcagaacctggagctacgacccggccagcacgtggacgccgctggcggcgctcgaacaggcgggtgatggcaaacaggccgacatctactggctgcacaccgacctcaacagcgcgccgctggaagtcaccgacgtcgagggtagcctgcgctggtcgggcaactacgacaccttcggcaagctgcaggggcagacggtcgccggcgtcgaacaacgcaatggggccgtctacgatcagccgctgagatatgcagggcaataccaagataaggaaagcgggctgcactacaacctgttccgttactatgaacctgaagtggggcgttttaccacgcaggatccgatcgggttgcgtggcgggttgaacttgtatcagtatgcgccgaatccactgggatggattgatccgttggggttggcttttggttcgggtaaaggtactcataacgctaaagcaactttgtttgatagcaatggtaatgttaaagcgactggcgtttggcaaagtgggaatatgacaccagatgaagctgctttaggattcccacagagtacacttgccacgcacacggaggcgagaatcactcgtgagctacatccgcaggcatcccctggagatcgacttgttattgatggggaatatccaccttgtaatagttgcaaagggaaaatgaatgcctttaaaactgctacaggtgctgaggtagaatataagtggccagcagaccatggtgatggaactaaggtctggaatgctaaatcgaagggaaccaggaaaataccaggtgcagattgctaa

SEQ ID NO: 104780 - DNA, 1941 bp, Enterobacter aerogenes
atgccggttactattaaacagactcaaggaaattcccttaccgcctatcatggcgttaaatttggggatgtagatactgtcttaagtggaattaaacgtccagatggatcagcaggtaactttgacaatgagtggaaaggtttctatgtcgcagatcagcagcgtggggcaataggatatgccacggtttctgatgaatatgcaaatgcagccatggcaaaaggggattacagcgcatatgaaaaagcaggggccttattaaaagttgatttccctgggcctgtcactgtagtagaagtaaattcagaagctgaggcggttggaataaaaaatgcacttggtcttgatgcaaataaaccactaattgaccaaatgggagaccctgccactatccgttctaaatggccaggctcaaaattagtggttcttaaaagggaagttgagacacttccaggaacttacgaaataattattccgtggagtctcgccgaatcaggaaagccagaagtagttgaacgttttgataaattaaaatacggggaagatgctcgacaggctttagactccaagcttagctgtggcgtaagtactcgctccttgatatcagtttctaccggagacagaatatgtggtctgaactggggcagcataagagaaaaagccgtcgataaagccaaatcagtcacatccgacaaaaaatttatcaactctttgcccgagagaggaaaaaacagccctgccaataaaaatgacataaacacaatctacgaatcatcagcgaatcactccaccctaaaaggaggaagtgaagttatccataaggcatcattattactgtgggtcgctaatactgccgatgttttaactagtaattcgtcatcaactctggataaagctactgccattatcgggattgtacctggcattggggatgctttttcactggctgattctattgagcatgatgatgttgaaggcattatcaccagttcgattgccttagcggcatttaccgttgcgcaagctgtacccgtggtaggcgaactcgtcgatttagccttacttacagaagcagctatttcatcgctcgttaacgtaatatctaattatatccagtcgacgcaaagacctgccgtaacactgccagggactatttctccggtaactgttaacggtataacactaaaatggcgttcagaggcagatcagacaatttcattaactccagattatggccgcaaagttcagattttagaaatttctgcagaacagggtaaaagtgcccctctggttgctattgtagggcatcagaatgacggctatttcaatcttgagccagagcgggtgattatcatccaagacgataaaataacaaccgttaacacatcatttgtatctcagaagtcaacttacgtggccttcccgacttcaccaataacagtagcatacggacgtcccgtttctctacgtctctcatatgcgactaaaaatactggtgaccagacggtcagagccccattcataaatatcgcaattggtaataatggccaatcagcgccacctgcaccacttgacgtaccgcagggcgttaatgatctcctcgaaaaaaatttctgggtgtcaacgcgattttatgtccacagtaccaaagagagcttctcgaaagtcagctatttcaaccagggcggctatgtggccagtctagaaatttctatcgggagtacagttttatcgacgagcaagctagctgtgggacaaacagaagttatagatctcacagggcataatatacccgatggctcaatattaagcacaagaatcaatattagtgctggtccatacaaagatggaccccaaataaaatatggaataggaagtggcgagacagccaatctgaaatcatggggaacaatattcagcccacagcttgattttggctaa

SEQ ID NO: 104781 - DNA, 522 bp, Enterobacter aerogenes
atggtagttatccataaagcgttggatgaatgcagtaccgggtatccggtcttttatgagagtgatgtggatattcacctcccccccaaaattggcgtagactggcaacttagcggacagcaaaagcgggtcgtcacgccgggacagaatgaagaatactatctggccgaggtgttgcatacacagcagcagaggaaaatttcggcgttgtttatcagcctatttaagcttctaaaggtgagttacccccgggcaaaaaacatcacgctgattatctataactacatcatacacaagagtcgtaaaactcaacccggcctgaaggcgaacccgaagctcagtttactcgctggggtgaactatgttgtacgattttggctggaattttactacataataacgtgtaaccatcagtgctattcaattaggcagttgctgagaaaagttcatcattttatgggaaccgtcagtccatccacggaggaaaaaattggctggcgaaaatgtagcgatattaagtga

SEQ ID NO: 104782 - DNA, 1485 bp, Enterobacter aerogenes
gtgctggctgacatgaaaattccctttctacagaaaccgataaaaacgcagctcaaagcgctggagtccgagctgcaccggcagtggaaagccttcaaccgcgagctgaagcaggggaagctgaaacatctggaatacgatgcagtaacgcagaaactgacctggcataagtccgtggttagccgtcataaggcgcaggagaagcgattttatgagcagctgccattctgcgatgtaaccgacgtcttccggtttgttaacgggcagtgccggtttcttcatgccatgaagccgctgcagccccgctatgccaaaaagaatgccgatgcagacggcctgatggcggtcatcgttgcccaggcgatgaatcacggtaatcatgtgatggcacgaaccagcgatatcccgttccatgtgctggaaaccacgtacgaacagtacctccgcctggcgtcactggtcacggccaatgactgcatcaccgatgccacagaggctctgccgattttcccgcactattcgtttgatccggaaacgctttatggtgccgttgacgggcagaagtttggcattgaacggccgacagtaaaggcccgacattcacgtaaatacttcggccgcggtaaaggcatggtggcctacacgctgctgtgtaaccacaccccgatcaacggttacctgattggcacgaacgactatgaagcccaccatgtctttgatatctggtaccgcaacacctcagaggtgaaacccacggccatcaccggcgatatgcacagtataaataaagccaactttgcgatcctgcactggttcggcctgcgctttgagcctcattttacggacctgaaccggcagttacaggagctgtactgcatcagagatccgtcggtctataaaaaatgcctgatccagcccgccggacagattgaccgggaccttatcatccgcgaaaaaagcaatctcgatcgcatcgtcgccacgctggggctgaaagaaatgacgcaggggacgctggtccgcaaactgtgcacgtacaccacgaccaatccgacccgccaggcattattcgaatatgaccggctggtccgtagcatctatacgctgaagtatctgcgcgatccgcagctggaacgtaacatccgacgttcccagaaccggattgaatcttatcaccagctgcgagccgcagtggccaaagtcggcggaaagaaagagttaaccgggaaaaatgacattgaaacagacatcagtaaccagtgcgggcggctgatttccaacgcgatcgtgcattacaactcggcaatcctgtcgcgattgctggaacgactggaagcggaaggcgatgccaagggcattgaagctctgacccgaatatcaccggttgcctggcagcacattttgctgaatggacattatacctttcagagcagcaatgaacttatcgatctgaatgtgctggttgccgggctgaaactgggataa

SEQ ID NO: 104783 - DNA, 1428 bp, Enterobacter aerogenes
atggccaacaaaaataaactcctcagcattctttcggacgccgagcaggaggcgctttatggccttcctgacttcgatgatgctcagcgactggagtttctggcgctggatgaatctgaactggcgctggtctgcagccgtcgggggcttcacgctcaaatgtattgcatcctccagatcgcttactttaaagccaagcacctgtttttccgttttgggtgggatgatgttccggacgactgcagctttgtcctgagccgttattttcccggagagtcactgccggacaaacagccctataagcaggaacgctatgctcagcgggaaaaaatctgtgcgctctatggttaccgcccgtggtcatcggcactgtcttcaccgcttgaacaacaggccgcccgcattgttcaccgtgatgtcactcccgtctttgtcgccacggagttgatcatctggctcaatgagcacaaaatcatcagacccggctataccacgcttcaggagctggtaagccggacgctttctgatgaaaggcagcggctggggcgtatcctgatggagcggcttgatgacgccaccatcgatagtctgaacacgctgattaaacgcgatgataccctttcccggctggcgatcctcaggcaggatgctcgtgatttcggctggcgccagatggtccaggagcgggaaaaacgggccatactggcgccattgcaccgcaaagcctgcgacatcctgccggcactgaatatttctcagcagaatctgctttactacgccagcctggcaaacttctataccgtttatgatctccgagaactgaagcccgatcagacccgcctttacctgctgtgctatgcatgggttcgttaccgccagttcagcgataacctggtggatgcgatgtttttccatatgaaacagctcgaggatgagagccgcagcgtggccaaacagcttctggccgacgtccaggaaaaacaccggcgtgagacgtctaaaatcggacggctgttatcgctttacgttgatgacagcgtcccggacccgaccacttttggcgaagtccgccggcgtgcatggaaaatcatgccgcgggaggcgctgcaaaccaccgcacagcgcatgagtgtaaaacccgtcagtaaactggcgctgcagtggcaggcggtggacggtatgacggcattaatccggcgtcacctgcggccattatttttgtcactcgacctcaccagcgtgatccacgacagcccgtgggctgaagcgctgagctggctcaaaatggtgttcagcaaaaagcagacgttttcacagcgggtcactggcggaatgcccaccgggcacattaccggagcggctgcgcccgtatctgctggagttcggcgaggatggcgagcccacaggtctgaacgccgggcgctatga

SEQ ID NO: 104784 - DNA, 615 bp, Enterobacter aerogenes
atgttaattggttatatgcgggtatcaaaagcagatggttctcaggcgaatgatttacagcgtgatgcgctgatcgctgccggcgttgacgctgcccatctttatgaagaccgggcatcgggcaagcgagaagatcgccctggacttattgcctgtctgaaggccctacggccagatgacaccctgattgtatggaaactggatcgactcgggcgcgaccttcgtcatctcatcaatacggtgcatgaccttaccggacgcgggatcggcctgaaggtactgaccggtcacggagcgactatcgataccacgacagctgccggcaagcttgtttttgggatctttgccgcactggccgagtttgagcgcgaactgattgccgagcgaacgactgcaggtcttgcctcagcaagagcccgcgggaggaacggcggacggccttacaaaatgacgccaataaaattgcgactggcaatggcatcaatggggcggccagagacgaaagtcagtacgttatgccaggagctggggataacccgacaaacgctgtaccgccacatatccccggatggtcaactgcgcgctgacggcataaagctgctcaaccggggataa

SEQ ID NO: 104785 - DNA, 1665 bp, Enterobacter aerogenes
atgaccgaagcggctcgcgtcggcgataccatcgggcattcccatgccctggccggcatgattgccggcacccttgtcggcggcctgatcgccgccgccggtgcggtggcggcgggtgcgctattcgtcgccggcctggcggcttcctgtatcggcgtcggcgtgttgctcatcggcgccagcctggcggtggggtatctcaccggcgaggcggccaccgcggcgcgtgacggcattgccgacgccggtgccggtagcctgacccccaaaggcaatatcgtcaccggctcctccaacgtcttcatcaacggcaaacccgccgcgctcgccacccacagccaggtggcctgcagtgacgacggcccaagcatgcagatggcgcagggctccgacaaggtcagcatcaacggccagcccgcctcgcgcgtgggggacaaaaccaactgcgacgcgcaggtgatggaaggttcgcccaacgtgtttatcggcggcggcaccgtcaccaccttgccgatcaagcccgaagtgccggattggctgtacaaagtctctgacctgacgctgctgttcgccggcctggtaggcggcgtgggcggcggcgccggcaaactgggcgccttgggcaagatgttcggcaagctgcccggcatcaataagctgggacgcattgcctgccgttttggcaccttgatgactgccaccgccgccgccggcattatcgcccggccggtggatatcgtcagcggccaaaaattcctgtccggtgacgatgagctggactttgtactgccctcgcgcctgccggtcgcctggcaacgttactggcgcagcggcaacccggcagagagcgtgctggggcgcggctggagtctgttctgggagagcagcctgcagccgtatcaggacggcctggtgtggcgcgcgccgtccggcgacttcgtcgctttccccagggtgccgcgcggccacaaaacctactgcgaagccgaaaaatgctggttgatgcacaacgccgacggcagctggcaggtattcgacgtcagcgagcagagctggcactacccggcgttgagtgatgagccgagccggctgcagatgatgactgacctcatcggcaacgtgatctctctgttccacgacgaccatggccggctgagcgagctggtcgacagcgccggccagcgactggtgtgccgctacctgactaccaccaatgggctgtcccggctgagcaccgtgctgctgtataccccggacggcgagctgccgctggtgcactatggttacgatgatgaagggcaactggttaccgtcagcaaccgcgccggcgaagttacccggcgttttacctggcgtgatggactcatggccagccatcaggatcgccagggtttgttgaatgaatatctgtggcaggaaattgagggattgccccgggtgattgcctggcgccacagcgccggcgaagaactgtcgttgcactatgattttgctggcggcgtgcgccgggctgtacgtgatgacggcaaacaggcgctgtggcaactggatgacgacaacaacgtggcgcagtttacggattttgacggtagaaaaacggcgtttatctgggattctacgccggaaccccagatttttccgtccgccaaaattatccccggttga

SEQ ID NO: 104786 - DNA, 432 bp, Enterobacter aerogenes
atgcctgatttctcccgttgtgcctttaccgaaggcagcattgccttgccggaaggctatgccgatcgcaccgtcaacgtgctgttggccggcgatgacgtttccccctcaatcaatatttcccgcgatgcgctgcagccggcggagaacctggagaactacgtcacccgccagctcgatgcgctggcgcaggggctgaaaggctgggcgttcaaaagccgcgaaccggcgatgctgggcggcgacctgctgaccggagaatgggtgcgcgccagctacctgcgcgacggcaaacgcatctggcaaagccaggcggtatttgcgctggcggatggccgggtgctggtgtttaccctggcgatggcgcgcaagctgacgccgcaggacgacgcgctgctgttgcaggtgctgagcagctaccggacggcctag

SEQ ID NO: 104787 - DNA, 291 bp, Enterobacter aerogenes
atgaaacttgaccagctagctgagccaaaacctatgcttgatgaagaaattttggccaccataacaaaaggttcgcaagtcaaaattcagcttaccgacgggattagcgataaatttaatgagaccattattatggaagtggttaaccgggacagccatgtcattgaggctaaatttatcaggcgtcaaacgggcagatttgacgatgctcactcggcattcgtatctccatttttaacagacacggtggtgtttatcaaagaagccgtttttgcagtactgaacgactaa

SEQ ID NO: 104788 - DNA, 405 bp, Enterobacter aerogenes
atgatgaccctgaaatatcctgaaccggttgttcgttctcaagaccaggtcattagagaaccggcgttgtttacccttcccccgcagggggtagctaccctgagcgcaacagatgcgctgggactcgacacgttctgtacggctattcgggctcggttgtcagggccagttcggcttaccgcccacccacatcgcatcgggagtcgtaccagtgtggcgctgcatctcgaggggcgccttgggcgttgcatcgatgttcttatcaccgtgaccggtaacacgctatggccgcagccggacgaatatagccaccctcgctggtatgtcacggtgccggacgcggcggatgtggtgttcctgcttctccacctgagcgacctgtgcgagcggtttagggtcaattag

SEQ ID NO: 104789 - DNA, 426 bp, Enterobacter aerogenes
atgcggaaaaatctgtttaaccgggtcctggcgaccgctgtcattgtcagcgccatggcgttggccggctgttcgacgtcgaaagaagaaatgctgccgccaggcgacagctcgatgctggaattgtggcagggtgaagacggtggcggttcagcgcgtaatgcggtggcggcacgcgacagcctgcgccggccgctcaccgagaacgaaagccaggcaacagccgcaagcgatcgcagctacagccgcacacaggaaagcgaaatcagccagcagttcccacggttgccgaatcccgacctggtgatgtatgtgtatccgcacctggcggacggcaacgcgccggtgccgggctacagcaccgtgttcccgttctacagtcaggtgcagtatgcgatgccgggtgaacggacggaggcctactga

SEQ ID NO: 104790 - DNA, 366 bp, Enterobacter aerogenes
atgcagactatccgattcttacctgaccgtcttaacgccgagcctgtcgtcttccgggggtttaccaccccggagatgggactggcggcgttggcgggcgtagggctgggtctgctcgtgtcgttgccgtttcttcctcttgccggttgggtcgtgatacccaccggcatgctggtgacgccgcttctcgtcatctggtttggaggcagccggctgacgcgccttaagcgcggtaaaccggagaattatatctggcagcgcctcgaggcgcgtaaacgtcgcatggggtggggggatcccaccctgattatcgacaaacagggctggtcgttgcgtcgcagccgcgttgttaagaggtccaaatga

SEQ ID NO: 104791 - DNA, 366 bp, Enterobacter aerogenes
atgaatgctgtagctcgtttcttccgtcatttttctgcgcgtgtcgcggtagcgacttctctggcttatgccgccagtcaaccggcgcaggctgcactgccgagcgttgagccgccgtcttccggtggtggcggtggactgatggataccctcaaaggttacattcaggacggtatcgtcatcctggggctggtcgctgccgccgtggcgtttcttgtggtagcaaactctgcaatctccaccttccatgaggtgcgcgaaggtaaatccaactggggtaagttcggcgccatcatcgtggtcggtattgtgctgctggttgcggttatctggctggttggcaagtccgccgagatcctgttctaa

SEQ ID NO: 104792 - DNA, 243 bp, Enterobacter aerogenes
atggccatgaccggtgcgcaggagcaggccttcaaggcggccagcggcggtgttgaagtcaatatcctgtcgctgatttgcatcggtgggttgctcgcggtgctgtttgtctgggccgcctgggcactgaccgatatctggaagggatggagcaacgaaaagcttcgcaacgcagcgatggtgcagtttgccgtcaggctcgtgttgttgctgctcgttgttacctggatgtttgccagctga

SEQ ID NO: 104793 - DNA, 330 bp, Enterobacter aerogenes
atgcctatccccgttgttcgtggtctcggcgccggctgtgtgctggggctgactttgctgaccgcactgcctgcctttgctgctgaaaaagatgagctggcttctgcccagcgcatgctgatccaggtgcaggcagcgcttgaacgtgcccgtgttgccgccgtgcaggcggacccgtcggagcgcggtcgtttcttcttcgactatgcccgcgctaccgccgatctcaagaccatcaatgccggcattgaccgttacctggaaccctcgcgcgcacaaccacgagatggcagtgcggtggccggcaattaccgtcgggagcgcccctga

SEQ ID NO: 104794 - DNA, 294 bp, Enterobacter aerogenes
atggaattggaaatgtacattgttattgcttttgagactctgataatgggcgctctgctgaagcctgtcttggctatcctggatgaaggcgattcgaaaacacgtgctcaacgttggtttcgcgccctgctattatttggggttctgtgtattgtcgtttctctgttcgctttcagtatggcaatgtatatcagcgattttcgtgatgtcgggctgattctgacactggtattgctgccgttggggggcattgtgatgattatttcatattgctggtcgttgaaagctaactga

SEQ ID NO: 104795 - DNA, 576 bp, Enterobacter aerogenes
atgatgtctccgcagcatgtcggtatcgcgctgatggcgaatccggtgctggccgtcctgctgacagggctgtttattgcggtgatggccgggttgaatctgcgtggccgtgagtcggcctccgtacgccgccaccggcgttaccgtgcgactgctgcccgtgttctgcagcgactgccccagttgggcggcaatggtcagcgtctggcctatctgcgcaaaatcaatccctacgtttttgaagagctgctgctcctggcgttcgagcgtcaggggtatgcggttatccgcaatacctcctacagcggcgacggcggcctggacggtcaggtcattattgaaggcaagaccttccttatccaggccaaacgatacggccgggcaatcacaccgtctcatatcaagagttttggtgcattgctgagacatcaccattgcgacggttttttcattcataccggccgtaccggccaactgagccatgctttgctgcagaaccatccccacgtccacctggtcagtggccaaaagctgctggcgttacttgccggcaatacagagtggatgtttttttaa

SEQ ID NO: 104796 - DNA, 525 bp, Enterobacter aerogenes
atgaaaaaagtgaatttcctgctgttcggcctgagtctggtgaccaccactgcgctggccaacctgaacgtgatcgccgatatcggtggtgaagatgcttcgccatattttgaaggtatcaaccgtcaggagggagcgcaatcgtctccggtcgtgccgccggcgccggcatcgcccgctgaggccgaggcggccgcgttgcctgtggcaacgccagagctgacacccggcgatgtggctgacagaccgctgcagttaccggggattggttcgttgtttattgtgggggatgacgatgccagtcgtctctggctgcaggcgaatgcggaacaactcaaatcccggcatgctgcgggtctcgtcgttaacgtcagtaacctgcctgccctgcaggcgctgcgtgagctggcgccgggggtaccgatggcgccagcctccggcagtgagttggcgcgccggctgcagctgtcgaattacccggtactcatcaccgataccggtttgtcccagcaggttacaccatga

SEQ ID NO: 104797 - DNA, 228 bp, Enterobacter aerogenes
atgaaaacgcttgagatgattaaaaacctggcagaacgcaacaccgttgttgccagtgctgacgtactcgctgtgtttgcagcgctggaaaaatcgcatcagcgcatcggagagctggagtctcagctgcaatcggggtttacgccggaggcactggctcaggaagaacgagcggaaaatgccgagcagcgcgtagcagagttggaattcatgctgaggaacacataa

SEQ ID NO: 104798 - DNA, 183 bp, Enterobacter aerogenes
atgatgaacgttagtttgacgaagcaactggaagaactgaaagaccaattgccggcggcgctggctacatggcagcagtcgaaaggcgggaaaatcaccgttggatggatgcatgccgctaaccctgaagtcatcggcgctttgcttgagctgctcgatggccatgagcaggaggacgcatga

SEQ ID NO: 104799 - DNA, 693 bp, Enterobacter aerogenes
atggacactcgccgcattctgacccgggggctgttgcccctgcttgccctcttcaccgttgtgagcggtggcgtcgttcatgctgctacccaacaggtgccttccggttaccgggaggtggcgctacgtcacggggtgccgccggagtccctgtattcggtggcgctggccgagacatcgatggcgccgaaaagcatcatctcggtgacctgcggggctggcccggccccggatgtggagcgtccctggccctggaccattaacgtggccggcaaagggtatcgttacgccagccgcctgcaggcctgggaagcactgcagcgctttttgaaaacacatcctcgcaagcgcatcgatgtcgggattgcccaggtcaatctgggctggaacggccatcacttcacgtcgacctgggaggcgtttgacccttacaccaacctcaacgcggcagcggccatcctgcgggaatgctatgaccgcaatcccggaagttggctggttgccgccgggtgttatcaccatcccgccggcggcgcaccggcagcccggtataaatccatcgtgagtggcaagctggcacgcctgaacggcaggggttccgctccgaatcggaaggtcagtacaacccccacgcccacggcgttaccggcacaaacggcggcgctgacgtgggttgaaccacggagccagtaa

SEQ ID NO: 104800 - DNA, 711 bp, Enterobacter aerogenes
atgaaactgaaatacagcatgatttccctgatgctgctgagcccgttatcacaggcagcgcagcagtcggccattgagaacaaccaggctaccctgagtgagattcagcagagccaggcgaacaagacggcgcagcagggcaggcagtgggggctcagtggggaagagtaccagcgttatcagcagttgatggatggccctcgtgggacgcagtctccggggcttgatccgctaactgcccttggcatcgaggcacagagcgatgccgagcgtaaaaagtacgcgcagctgtgggtaaagcaggagttcgcccgtacagagaaagaactcaagttccagcgtgaggtggatgcggcctggcagcgccttggtgtgttgccggtgaacatggggaatgcggccggtatcgcacatgacaccggcgggcgactggcgctgttcgtgaaagcgaaggactgcgggcagtgcgatgcacgcctggcggcggtgctggcagataaccggccggtcgacatttacctggttgacagcaagggtaatgacagtctgctgcgcgagtgggcccgggcgcatcacattcccgtcgacaaggtacgcgcacgtcaaatcacgctgaatcatgacggtggccgctggatgaaattcggcaacggcctgatgccggtggtgctgcaacaaggggagaacggatggacactcgccgcattctga

SEQ ID NO: 104801 - DNA, 744 bp, Enterobacter aerogenes
atgactgagcataatgacgaaatggtgccgatgacaccggcaaaaaaagggttgctacgcagcaagaccttccggggggcaacggccgtcgtcgttgttgtcctgatggctggcctcgtcggttcaggggctatcaggcatgtcgaccagcgtattgccctgcttgagcaggcacagaaagcactggcgccgcaggatggcatgaactctatggccgatgagctgcaggcgcaggctaaacagcttaaaagcctagctgagcgccaggactcgctcatgcggcagattggtgcgctgacgctaaccaatgggttaccggaaaaacttgcgcagcagttgcaggcgcaacaggttgagttgaatgcgctgaaagacagcattgagtccgtgaaaaagtcagcgactgaaaagcttgtaccgactgtagccccctcaacggacgtccccgctgcaccttcagcgaccgccaaaatcaccccaaagcacaagcccacgccaactaaaccctccccgcgtaatgcggtacctcgtgttgcgcgcaaagcgccattcgtgctgaccggggtggagcagcgcgggacgtcggcctttgcggctgtggcgccgctggggttcagcgatttgtcgcaggtgcggttaatcggggaaggggagtcggtcgccggctggatcctggtcagtgccggctacgggcaggcgacgtttcgtgtgaacggccgcctgcagaccgtcagcgcccaataa

SEQ ID NO: 104802 - DNA, 645 bp, Enterobacter aerogenes
atgaaaaaaacaattctcgtctcttccctggcagcactcatgctgaccgggtgcgttactcagcagccactgcagcagcgcgatatttcccctgtcacgccttcggttaccgtcacccgcaacgttcaaccggtgagcccggatgcttacgggcaggtgcctgaggtcgtgcgctacgaccgttatttactggtcagcaccgacccggcggccgttcagcgtgatccgctctcgcaaatcatcgatatccgtattccggcatcagtaaaaccgacggtggctgacgcgttgcgttatgcgctgcgccagtcgggctattcactgtgcgcgaccggacctgctaacggcgtgctttaccgccaggcgctgccggcggtgcagtaccaactggggccgatgcgtttgcgtaccgcgctgcaggtactggcaggccccgcgtggcagctcgaggtagacgacgtgcaacgtgttgtctgccacagcctgcgtgacgggtatcagttgccggcgacacagctgccgccggtgacggtggcgccggccagggcggtttcagcaccggtttcagcgcatcctgctgcaacggtcattgcacctcagcccgttaacgcggtaccggcaaccggcgggtggctgaaaaaatga

SEQ ID NO: 104803 - DNA, 441 bp, Enterobacter aerogenes
atgggaactcgttacgataccgacgtggtcgcctgggcgaatgaacaggcggcgttactgcgtgcaggtaaacttagccaactggatattgaaaacattgccgaggagattgaggacgtgggcaagagtgaaaagcgcgaactggccagccggatggcggttttactggctcaccttctgaagtggcaatttcaacctactcaccgtggtacaagttgggaactgacgatcaaggggcaacgcggtttgatagagcgccgtttaaagaaaacccccagtctgaaagttgctatggtcgatcgggagtggttggaagatacctggtttgatgctttggctatagcatcaaaagaaacggggatcggtctggataaattacccgcttcttgcatttggactgcagaacagatcctgaaccaggattattacccagaaccctaa

SEQ ID NO: 104804 - DNA, 486 bp, Enterobacter aerogenes
atggcgtctcgcggcgtaaacaaagtcatacttgtcggtcatctcggccaggatcctgaagtccgttacatgccaaatggcggtgcggtggctaacattaccctggcgacctctgaaagctggcgcgataaggcaaccggtgagcagaaagaaaaaaccgaatggcaccgtatcgtgctgttcggcaagctcgctgaaattgccggcgaatacttacgcaaaggttcgcaggtctacattgaaggcgctttgcgcactcgcaaatgggcagatcagagtggccaggatcgctacactaccgaggtagtcgttaacgtgggcggcacgatgcagatgctgggtggtcgtagtcagaccgataacccggggccctcagcgtctggtagttgggggcaacctcagcaaccgacccacagtggcacacccactcaggcgtctgccggcaatgaaccgccgatggactttgatgatgacatcccattttga

SEQ ID NO: 104805 - DNA, 468 bp, Enterobacter aerogenes
atgtctacccaatctcagcaagcatctaccaaaactgaatacttcaacctgactatcaagggcatggggtacctcagcaacattcgtcaagtcaatggcccgaatggcaccttcatcagttgtgtcgttaatggactctcgggtcctaccgataacgccagttacacgcgtttcgatgtaacggtcgccggtaaagaagccagcagcctgatcaaccgctgtcaaaaatcggttgatgaagacaaaaaggtcctgattggttttgtgctcagcaatcccaaaacggacatcttcacgcttaacagcggcgaacatgccggtgaacagcgcgtcagtctcaaagcccgccttatcaaggtcgattggatcaaaatcggtcaggaaaaggtatatcaggctgagaaatccgactctacgccgcctcagcagggttccgcacagcaacaatacgcggaaaactctttctga

SEQ ID NO: 104806 - DNA, 2040 bp, Enterobacter aerogenes
atgcagctctacctgtgtgagaaacccagccaaggtaaagatatcggcgccattctcggggcgacccagcgtaagcagggctatctggcgggcgccggcgtcatcgttacttgggctatcgggcacctgctggagcaggctcagccggagacctacggtgaacaattcggtaacccctggcgggagtctgtgctgcctatcgtgcctgctcagtggaaaatgacggtaaaaaaagacactgccgatcagtttgcggtcatccgtgggttgctcaagcaggttgattctgtagtgattgcgaccgatgcggatcgtgagggggaagtgatcgcacgcgaattactggagcattgccactttaccggcccggttcaacggctctggttgtctgcgctggacgaggccagtatccggcatgctctggcaaacaaactccctggcgagaagactgcacccctgtatgaggccggcctggcacgcgcccgggctgactggatgacggggatgaacctgacccgactttatactctaaaggcgcgggaacagggatacggcgaggtgttgtcgatcgggcgggtacagacccccacgctggcgctggtcgtgaaccgtgaccgcgaaatcgccaactttatttccaagccgtactggcaagtcagggcgaacctgcaagaggctggcattacttttcctgcgaactgggtgccggctgccaactactgcgatgaagagaagcgctgtattcagcagaatgtggcgcaggccgtggtgcagctgtgtcagcaaacaggtcatgctattgtgcttgaggtagggaccgagcgtaagaaagagtccgcgccgctggcctttgacctggggacgctgcagcaggcttgctcacgcaagtgggggatgagcgcaaaccaggtgctgagtatcgcgcagtcgctgtatgaaacgcacaaagcgaccacatatccccggacggattgcggctatctgccgacatcgatgcgggaagaggttgccgatgtgctgagtgcggttacccgcacggatccaacgcagagcgaaaacgtggccaggctcgacagggcctttgtttcccgcatctggaacgacaaaaaaatcacggcgcaccatgggattatcccgaccaagcagccgttcgatttgagcaagctgtctgccgatgagctgaaggtctatcagctgatccgtcagcattacctggcacagttcctgccgttacatgaagtggatgtaactgaggctacctttaatatcggcggacaattgttccgcacccgcggcaaagtcgaggccgtggtaggttggaaagccctgttccagcatgacgtgagcgaggcgaaagatgagtcggccgacacggatgatgtccggctgccggcgctggtaaaagatgaatccgtcgcggttgccggcgcggagcttaaaacgctgcagacgaagcccccggggcattttactgacgggacactgatcgccgccatgaaaaatgctgcggcgttcgtcagtgacccgcaactgaagaaggtgctgaaagagaacgcgggactgggtactgaagcgacacgcgcaggtatcctggaaacgctgtttaaacgcggctatctggagaagaagggaaaaatcctgctctccacgccgattgccggcgaactgatagatgcgttaccgacagcgctgaccaaccccgggatgacggcgctgtgggagcaggcactggacgagattgctcagggccagatgacactcgagacgttcatgagtcgccaggcacagtggacgggccatctggtggagaaagggaagacgcaggcggtgaagttcactgcgcctccttcaccgccgtgcccgacatgcggtgggacgatgcgccggcgtgcaggcaagaaaggtggcggtgccttctggggctgcagtaattatcccacttgccagggtatcatcaacattgatgcaaaaggtggtcgtaaggccaagcgctataaaacaaaatcaccggctaaaaataaaacaaccggagcggcgtaa

SEQ ID NO: 104807 - DNA, 573 bp, Enterobacter aerogenes
atgattatgaatcgacaggtaaagtcttttttgatgccaggtgttctttgcgccgcgttgttgttaacggggtgtgcaggcactgcgttgggcgagtggaaccagaaaatcagtgacgctgcacattcgctggccagcggtggtagcggtagttccagtgagggtagcatgccctggatgacccgtgccggtatttccgggccccggcagggtgtgcatcatacttatagcctcccggtggacgttgataccgcggcggcgcgcctgaaaagtcattatcagttcatctcctccgaggagcttgaaagtctgcgccagcgtgatcagcacggtgactggagtgcgagctccattgatgaagcacgtccggtctggtcagcaaatcggggcagttattacaagatggggcaggaatggaaaggcaatgatcgccttgagctcgaagtggtcaagtccggcgttggcagccgtctgaaagtgacatacagctcaccggatgcgtcacacctgaccgatgcttaccttgggagactgatgacgcagttgcagcaggttgccaaaggtcagggctga

SEQ ID NO: 104808 - DNA, 744 bp, Enterobacter aerogenes
atggttgattcatcaagcaataaagaaaacaaaccctcttcaactcgcgcaggagcgctcaaatcgacgttaaccgtccaattgcatacacaatatgcaatattgttatgggagggacggcagcgtgagaaagagtcaaataaaccacaaatagtcagcatgcctcaggtcatcgcccgagcagggaaaattaatgctgattcaaacgctgacaacccttatgccgatggcgcgatgttgtcgttggagcaggctattgaacgtggcaccgcgcgattgcagagcgcagtcgcagaacttgataccgtcttatccagcttgccaggtcaggtctcgatgtcagaagtctcatcagtatcaccgctgaatatcggtgtatttagtcgtactccgctcgggtatcgttgtgtctggttactcgttggatttgatcaactggcgatgaaagcatttcaggcatggcactatgggttgatctctcgtcaaaagcgggatgacttgctgagccagggggggcattgggtacggcaggtttatggggttgtgcagcagtaccgatctgtagctgtaacgcgtgatgatattcgccttcaaacgccggttggtatggaggcggtcaagcgtctgggggaacctgacgcagacattatgtctggcacatcgcgttccgctttttcgcccccactcaataaaacttctgtgccaacattgcccacctcttcaaaaaaaggagctaaatcatga

SEQ ID NO: 104809 - DNA, 1281 bp, Enterobacter aerogenes
atgagcataaataaaacacctgatgacagcctgatcacctttacgctcgaacaaatgaatgcccgcctggcggaacgaataggcgcggaaaagcacgcggggagtcccgatgtcacgaatctgcgcagcggtctcctgtacatgggcaatgtgcatgattccatcccccgccggttgctcctggacacccgtctgtcaccgcttgataaaaccgcgtggataatgatccgcctgtacgcgcaacagaaccagggcgccgtgttcccgacctatgacgaactgcaactgcagctcgcctcgccgtttaacggtaaggcgtcccgcgagaccgtcagccgcgtgctgctgatgttacgcctgaccggttggctcagtttgtgccggcgtgtgcgtgacgacaaggggcgagtgagggggaatatctatgcccaacatgatgaaccactctcggcccgtgatgcagagacattggatccgacctggctggatacggttgccatgggctgcgcgcataaaaaccgcaccgtcagccagacggcctggtcggtactgaccgatattcaacatgacccgacaatgcgtcatcagcattcccagatggcggcgattgctgaacggctggggtcgccacaaaccccgcaacagatggccgtcagagtgtctcaacgacaggaaaatatccccagttcagacgccggactcagtaaaaaatccccgggttcggataccgaactgagtcaaattaagcccggttcggataccgaactcagtgtaaaacagggaggcaaaacaccgagttcgttttccgaactcatggtgaaatcagttacttacggtgcatcaacgaaaccgaactgtaacgtacgttctttcacacagagtgtgaataaaacaacgtacgtacctgagttgccggccgaactgcagaacatcatcgcgacggatgatcagcggcagattggtgtccagcttaaggcactgcctgcagaggtttcccgtcaggtgctggagagtcttgagcaggcgatggccaaaggcaccctgaataaccccacaggctggctgctggcggtgatcaagcgcgcccgaaacggtgagctgtatgcgagtgccaaatcaccagagcctgccaggcctgtaccgcgacgccaaataccttgctctgcggcgccagcaaaaccaacagatacggtccgccaacacctggcgtcgcgggagcatgtcagcgacatagttgcgaagctacgtttgggaatggcacgcgcaaaaaataagtcataa

SEQ ID NO: 104810 - DNA, 264 bp, Enterobacter aerogenes
atgaagcctgtgatgttaatgccggggttgcatgtcccccgttcggcgccaccgtcctgtcagaaaaaggcgaaggagcaggtcaggcgcttccgccgcggggagcgcaactacaagcaccttcatgttaaaggcaagcacgcccccgggcgtgcctggatgaagattgatatcggtaccagctggcgactgctcagccgaaacagtggtgatgactgggagctgttgacccatgaacgctacaacaacgaactgtggaagtga

SEQ ID NO: 104811 - DNA, 630 bp, Enterobacter aerogenes
atgagtaatagcttgtctcaggcgacgaacagcctgctcacccagctcgtgatggaacttaaatcaggctatatccgccgctgtgaatctctggggctgaccacggaggagatgcaactgctgcacggtttgaccattgaagacctgcattacctgatgaacagctctgtatcggtgctgaccttccaaatacatcacgagaatttctctctgatgctgcaacatgcgcgccgtgagcagcaacgtatgcagcggattgaccgtgcactggcgttggggggctctatcgaaatgatgcagcactattttggcctctcgaccgttgaagttgccgcccgccgacgcatgaccggtatcaacattcgccaggggcgctgtgcagcgctcagcgacgacgagaatgcggcattgtggcgccagtggcaaaaagccgacatcgatgacgcctccagtgccgatggactggacgtcatgatgctggccgccgaacagatggatgtttctctgacggctgtctggcacgccgtccgcagcttcgatgcccctcagactgcgacggccagaaaagccattcaggccgtgcgtacgccacgcgctacgccgggaggaaatacaaggaggctggcatga

SEQ ID NO: 104812 - DNA, 216 bp, Enterobacter aerogenes
atgaacctttatctattccttatcacaatgctgtccttcattttttggttcctgtttatgcgcgacgttcctgatcccagaacgtggtttaaggacaagggcaaaaacttcatttcagcgttgccattcctgttcgtttccatggtgttgctggcatgcttgtttgctgttttttcgagatatttttcagaaatcggggggcttcactatgagtaa

SEQ ID NO: 104813 - DNA, 723 bp, Enterobacter aerogenes
atgagccattcacaacgacaggcacgcctggtgaaactggtgcgcaaactgcttgagttggcccgtagcaacagtaatgcgcatgaggctggactggcgttagcccgggcgcaaaaactgatggagaaatacggtatcagcgagctggaagccagcctgtcatctattcagacggcaccgagccggggagcgccttccgaagcgaaacaaaaactgcctgaatggatgtccgggctggcgtgggcgattgcccgcgcctttggatgccgtttgtatttttcctggcgggataccgcgtcgggcccgcgccgcaacgtgacgttctacggcttcagtgagcggccggccgttgcggcttatgcgttcgatgtgctgagccgacagttgaaagatgcgactgcagactacctgaaaacccagaataagcgcctgaaaatgagcacgcggcgtgcccgagctgagcagtttcgtgccggctgggttgccggcgtccggagagtaatcacgacgtttaccgttactgaacaggaatgcgagctgatgggaacctggctggaaagccaaaagatgggggagttgcagacgcgcgccccgaaaacctgccgcggtgatgacattgcccgtttacgtggattcgaagcaggccagaatgcccgtttacaccagggtgttcagggggctgtgaccactggcattggttatcagggaggacgcaattcatga

SEQ ID NO: 104814 - DNA, 1737 bp, Enterobacter aerogenes
atggcgcgtactaaaaccaagatcctcgatctgaacagtgctttgctccagcagggcaagactgcagcaggcacgcaacctttagcccctgtgctggcggaaacccctgtcagtgaaatgccgttggtattgaccctggatgaagtgaacccgaatccggataacccacgaacctcgcgtaatccgagatatgaggaaattaagtcatcaattctagctcgaggtctcgatacggtaccgaaggtgactcgtgatccggaacgtccagagctggggtattttttcagtgatggaggcaatacgcgttatgccattctttccgagctctggcaggaaacgggagaagaacggttttatcgcttctcttgtgtattcaagccctggccaggacgattatcctgcgtgattggtcatcttgccgagaatgaggtacgtggtgatctgagcttcattgaaaaagcgtttggcattcgacaggcccgggctttatatgaagcggagttggggaaagccgtctcactgcgtgaactttcgacacttcttaccgctcaaggttaccccgtccataattccagtatcagtcgaatggaggatgcggtgcagtacctgtatccctatatgcctcacttattggagacaggcctgggacgtccacaaattctgcagttgctggctatgcgatcccatgcagaaaccacgtggcagaagcactgtattacccaagaaccaaagcagccatttgataccgttttcggtgatgtatgcagccattttgattctcccgaggactactctctggatatgtttcgtgatgagttgattggtgcgctcatcaacgcgttgccacacccgttgctcaattatgaccgctggctactggagctcgatcccaaagagcaaaaccggcgcaagcacctcggtgagcctgagccggcattaacgcctgagctgtcaggcgaaggcaatacagtcgaactggcgccagcactgcagcagggaaataccggcggaccgacggtacctgaagtacagggagaaagctcttctttggtgctggacagcgcgtcgcatgaatcaacgggagacgccgatgatgaatcacaaaacgctcaggaagaggaaacgcctacaactcaaactgaacgccgtgttgaaactcagccagatttatacggtgcgccttctgtgttgtcgggtgacgttgaaacggttttagatggtgagaataccactgtccccctgccggacccttatgagtcgatagtccctcgcagcaataccgtgacacagccaaagcaaggtgtaacccctgttgcagaggtgccttttgccgaggtaggacttgagccggtctcctccatttgggttatttctgccctgcaggatgatatcgagcacctgcaggtgatcaccttccgattggcattcgaactggccgaagtggcgggctgcgaggcggaaatcaaagctgataaagccgacttgcaggctgccggctacgcattgactgccgaacgtccctctcgctttaccgcgttactcctgacccttgccggcaacagcccggacggtgcctcatccagctcgctcaatgaagccctcatcgggtcggaaaatgcggctgactggcctttgcttgacgatattcatgccgtgaaattgatgcgccttattcgcgtcttacgccgtctgcgtgaactgcagcgtgacttatctgcaacagaggagacagcctga

SEQ ID NO: 104815 - DNA, 1350 bp, Enterobacter aerogenes
atggttgatatgcatattccttattcttcggatgccgagcaggccgttctcggtggcttgatgttggataacgagcgttgggatgacattcttccattagttggagatcgtgatttttatctggcggtacatcgtcgcattttccaggcgatggctcgtctgatggctgttcagcagccgatcgatctgattacgctccatgagtcactggaacaaaacggtgagctcgagcaggtcggcggttttgcctatctggctgagttgtctaaaaacacaccgagcgcagccaatattgtcgcctatgccgggattgtcgctgaacgcagtcgactgcgtagcctgttgcagctcgggcgtgaattgagcgctgatgctgctcatccccgcgcagattctgccgccctgaccgaaagggcagaacagcaattgttccagctctctgagcaaactcactcacagcagaatgtcagcctgaccgatgggctgaatgctgtcgtgacttatctggagacggtgaatggcggtaatgggatcacaggcaccccgaccggcttctcagagcttgatgtgatgacgtgtggtttgcagccgggagatttggttttgcttgccgcacggccgtcgatgggtaaaaccgcctttgcgttgagcgcttacactggcgcgcttcgtggcacggagaaacctgcatttttcttcagcctggaaatgccgcgcgagcagttgctccaacgcctgattgctgttgacgggcgggttgaactttcaaggctgcgcagcggccagttggatgatgaagattgggcgcgtatttccaaagcgatggagcggttgttgccattggaaaaccgactgattattgacgatgaatcgtatttgacccccgcactactgcgttccaaggcacggcgctatacccggttgtatggtaatccgggtttaatcatggtcgattacctgcagctgatgcgttgccctggccaggaaaatcgcacccaggaaatttcagaaatttcccgcagtctgaaagcgctggccaaagaacttgattgtcccgttgtggcgctatctcagttgaaccgtcagttggaaagccgtgctgacaaacgtccctttaatggtgacctgcgagactccggtgcgctggagcaggatgccgatgtgatcgccttcatctaccgggatgaggtctattacgctgactctgatgatgccggcacggcagaaattatcattggtaagcagcgtcagggggcaacgggcaccgttcgcgtcaagtttgaagggcaattcaccgcgttcagtgacttccgcgatggtcagtatgaccaatattcggggagggtgtaa

SEQ ID NO: 104816 - DNA, 666 bp, Enterobacter aerogenes
atgaatattgaacagctagtgacctttcttaatgaacagcgcgagttagccgcacctgcaccctggcaggttcttgaactctatagcgatggcgtcactgtcgtggatgtcaacggcttcgagcatgtggaaatccctaatgtcgcgattgttccagactgggaaaaacttgggcttgagcactggtcggataacggtgggagccgtgatgtgagtcttgaggagcaacgggctaatggttatctggccgctgcagcaccacagctactggcttacgtcaatgtgcttaaccgaaatttggaaaccacggagaatgcgctgcgccgcatgttgaaaatgcatgcgttgatgatggcaaaaaccaatcatgctgccagcttctatgatgccgaatgtcttcacgaaatggccgaggctccgtatgaggccaccgcggttcttgagcacatctgtggcgccgatgccgagaatactcacctaaaagaggcaacttgcgtagggtgcggttgtacagatggtcatgcttgcctggataaaaacagcaaaccatgcagttggctcaaggtcaatcgtgaaactgggctgggtgtctgttcttgctgcccgacttttcttgggcacccgttaacaactgacggtgaaggatcggaggtgcgccatggttga

SEQ ID NO: 104817 - DNA, 918 bp, Enterobacter aerogenes
atggaaaatatcgtcacaaaagccgctactgtttctaacagtactaagcctcgtgttatccctatggtctcaaccaaagggggcgaaggtaaatctactcaaagcgccaaccttgccggcttccttgccgatgcaggtaaaaagactctcctcatcgatggtgatcactcccaacccaccgcaagcagcattttctccctggaatatgaagcccccaacggtttgtatgaactgttgatgaagactgtcgatctcaaccaacccgaagaaatcatctcccgttctgttatccctaatctcgatgtcatcgtttccaacgatccccacgaccgtttatcttccgccatgttgcatgcccctgatggtcgtatgcggctgaagaatgttctgcagcaccctttgttcaacgagtatgacgttatcgtcattgattccaaaggtgcggcgtctgtgatgctcgaactgattctggttgccagtacggagttcgctgtcggtgttatcaagcctatattgccggatacgcgtgagtttctgcgtggcacattggggttgatggaaggattattgccgctgaccagctacggtattgcgttaccgcgtatccgtattctgacgaattgcatggagtacacgaatctggattggcagaccctgaacagtctgcgcggcattatcgcaaacaggcagtatctgcgtgcagataccttcgacgtctcccttctcgacaccatcattcccaagcttgaaatttacaaaatggggcatgcttccggccaacctgttcatcgtcttgaaagaaccaccacacgcacatcaacgctcgctgctgcggacactatgtatgagctggcctgcgagttgttccctcactgggttgccgactttgacgttctgcgtcaggaggcaaatcaatga

SEQ ID NO: 104818 - DNA, 228 bp, Enterobacter aerogenes
atgcttctggacgggaaaccggttcccgacaaccgtgccgatgtcacccgtcgtctcgacgaccatatccatgagaacaggcacagcaatcgttacgaggatgagatatttgtgattaagtattttcagaaaggaacggcacacgtcacctttaagcggccagtactggtcgataagcttaatgacatcatagttaagcactatccgggaatgttggcggcaaggtaa

SEQ ID NO: 104819 - DNA, 390 bp, Enterobacter aerogenes
atgaaccacactttgataacccgggtaattgccctgatggtatttatgctacctgcgctatcggctgtcgcgcaaagtgaactgaccggctgtgcagccaaacgtgcggagatacagaaccagattaactatgcacaacagcacgagaatacctatcgcctggaaggcctgaaaaaagcactcagggaaacatcggcgcattgtacagaccgttcccttcagcaggagcgggaagcggttatccggaaacaggaacggaaagtggctgcgcgggaggacgcgctgcaggaagcccgtcgtgatggacggatggacaaggtgcgtaaggcgacccgtaagctggaagaggcgcagcaggagctggccgatgcccgggtggaattacactga

SEQ ID NO: 104820 - DNA, 663 bp, Enterobacter aerogenes
atgaggcagtatcgtcagtggtgttctgttttcgtgatggcgctggttatggcgaaaacagggatagtatggggtcagcaggggttcgacattaaggtcacgggcacgatccagcctgcggcgtgtgaagccgtcattaccggcggagacactttcgattttggcactatccctgcaggcacacttgaacaggatacctttacttacctggggatgcgccagacgggtttccgtattcattgcctgacccccacccgtctgatgcttcagtccagggataaccgggagggaacaacgggaagcctgatgcccggagatgacagccgggagacctattttggtctaggaatggatagtcgcaacagcccgataggcggctggatggcatccattggatcgttgcttgtcgatggaggaaacgatctggccgtcatcagcactcgcgataatggtcgtacatggcgtccctcattgacgatcgacgtacctaataatgttatccccttctggagatataaggccgaggtgcccgacctgtacagtattgcaaaagccggtgagacgacacctcgtgcattcagcctgctgtcgggtaccgctgacagcggaggtttatattacctccgcctcaacattaaatacgtccggccaccttccgtttaa

SEQ ID NO: 104821 - DNA, 297 bp, Enterobacter aerogenes
atgcacaaaaaaatgactttcatccttctcacgctttgccttgtttattccggcatgacgcaggcggggagttcatctgcccgtattcagtttaaagggagtattactgagcccacctgcagacatcagcgaattgacggtgtggatattcattaccactgctcacacccgacacttaaggctgaggcaaaccataaagggcatatttcccggtttcctgaaaaaatggggtcagccacgcatgaagccataaataatgatccacggacgatcaatcacaccattacctataagtaa

SEQ ID NO: 104822 - DNA, 327 bp, Enterobacter aerogenes
atgttcagagtactggtcattatgtatctggcgtttctgggggggcttggctatttattgctgagtgaaacgaaccctcccgttcaacgcgtggtccgggaggtggagacggaatacgggaaatacacccgtacatttcgggaaaccgcattacaggcctcgcagcgggaagaatttcagacactgaatgcgcagattgccggccaacagcaggaactggaaaacgcccgacaatccggcaatctgaaaagactccggaatgccaaaaataggctggataccctgcttgtacgcttaaaaaccgcaaagggaggaacgtcgatgtaa

SEQ ID NO: 104823 - DNA, 699 bp, Enterobacter aerogenes
atgcgtctgttttatcagtatttagtgtgggcggcgatggtatgcatcgcgggcggcggcgctgcccgggctgcggacagtttcagtattaacgtgacgggaaaaattgtgccttccgcctgcgaggtcctcatcgaggggggcgggaactttgattacggtctcatcgataaaaaatcgattgccggctccaccaataagattttagccgttaaaagcgccgggctgaccatcgcctgtccggccccgatgaaggtggggctacgcggtacggataaccggaatggaacgcagatggagcccaacgttgcggtaatgctgtttcccggggcaatgtttggtaggtattcgtggcaaaacgccttcgggctgggtctcgatccctccggaaatccggtggggctgtggacggcgcacctggcgtcgctgtccacggagtctgaaccgacggtcaaacatatcaatcgcagggcttcgggtgactggagcgacttatcgccggaatttactttttttagcggggaatacaccacggtggtccacagtgtttccagaccggatgaaaagaccccgctggcgtttaccacgctgcaggccacgttagaggtccgggcggccattaatcgtccccacaatctggatttatcccggccggttgcgcttgacggctccatgaccgtggaactggtttatttataa

SEQ ID NO: 104824 - DNA, 513 bp, Enterobacter aerogenes
atggtccgtacaggtttactcagcatgctgctgatggtgagcggcgcggcgctggccgtgccttcggctccacctctgttaccccaggaatgtcaggtgacgggatcgcagagcgacatcgatttcggggagctgaataaggccaccacggtgacgagaaaaatcagcatggtcgtgaactgccgctatccggaacggatgagactgcggcttgacggtggcctgtcgggacgcgggtttgtgctggaggaggccggaaagatcagccttaccctgagcaacgcccggctggataaccgcacggtttcgctgcgccaggatctggcgccagcaggcgccggccagccggttctgacagccgtccccggcatgcgttttttaccggatggcgggcgggaaagtggccggctgctgacgttcgatgtgaccgtcacggtggaaagaggcgccggggtggccgcgccgcgacaacgggctgaaccccggctgccgctgacgatgaccctggactga

SEQ ID NO: 104825 - DNA, 2394 bp, Enterobacter aerogenes
atgcgaagcctctcctgcggcaggtttgctttatcgggactctggctggcgctggccgcctgcctgccggcgcaggccgacaccaccgaggtggagtttgataccgataccctgcaggcccgggggctagacccgcgtattgccgaagagttccgtcggggggcccgctttccggcgggggtgaaccgggtaaaactgatggtgaatggtcaggaccgggggaaagccagcgtgcgtttcatcccggaagggggcgcctgtctgaccgaagccctggcccggcagggacaactgacctggcccggagggggatccgcggcgaccgaggagcactgtgtgaccgccgggagcctgtggccacaggcggaagtccgggcgcttcccggtgacggtacgctggagctgattgtgcccgaagacgccatcctgaacggggaggattatctttcctgggagcacggcggacacggtgtcctgctgaactacagcgcgcagtatatgaaaagccgttccgcgttcagcgatttcagctaccggcaggtccagacggaggccggattcaatgtggctgactggatcgtccgcagcacgcagaactggagcgacttcagcgagggaagcgaattccgccaccagaatgcctgggtgcagaaaaccctctatgaccagaaatcggtgctgcaggccgggcggatcaacctggcgatcggtgcgaccggtggaggacgggtgctggggatgcaggtgaccccggaaacggccctgtacgggaaagcaggtgccgccgtggtgaccggcattgcggacgatacctctgtcgtggaaatccgccagcagaacgtcctgctgcaccgcacctcggtgccccaggggccgtttgcgctccgggggtttacgctgctcaatctcaccagtgatctggcggtcacggtggtcaacagtgatggcagccgccgtgagtacagcgtgccgccggccgtgtaccggactggcgaaagtaccgtccgccccggcctgagctgggggttcggccgatgggatcaggagggctaccgggagcacccctgggtgggggcgttctcgaaaggctggcagctgatgcccagactggcggtgcagagtgatgccttcgtggcgaaagcgtatcaggcggtgaacctcagtaccgacagcctgctgcctggcgggcaggggctctctgtcggggtgaccgcctcgcgggcgaaggggaaaaacggcctgctggcttcggcctccgtgtcgcagcccctccccggagaggtcagcctgagcctgaacggttcgtggcagtcggatacctaccgggagtttacggaaacgctgtcggaaagccaggaggcggtccgtaaccgtgcccagttcgggcccgccgtcagctggtcgcatccgtgggtgggtagcacctcgctgtcatgggtcagaagcctgacgagcgacggccagcacagcgattatgcccagctcggctggacccgccgtatcggcggcgcgtacctgagcgtcaccgccgggcggagtaccgacagcgtgaacggccagcgggacgacagggtgtatgcctccctgcagatcccgttgggcaaaaacagcagcctgaccgggtatgtgcataacagcggtaaccagacccgttacggcagccggtatacctggagccagagccagcgcacgaactggagtgtgtcggccgagcagtcccgtcctgacggcaaacggtcgttttccgggacggtgaatacggtcacgccgtggacccagctgagcggtaacgtcagcaccaactcggacaagacgcgcagtatgtctctccagggcagtggcggcatgctgctgagcgatggcgacctgctgttctcaccttaccggatcacggaaacgttcggcacggtgagcgtggacggcatgtcaggagtccgggtggagacgccggcggggccggtctggaccaaccggaaagggaaggcggtcctgccgtcactgtcaggctggcagacctcgacggtgagcctggatgcgacgtcgctgaataagggcagcgacgtggtgaacggcaatgaagaggtccgcatggcccgcggtgccgtcagccgggtgggctttgcggtggtctccacccggcgggtgctgatcagggtgaccgacgcccgaggaggacggttaccgccccgcgccacggtttacaacgatcaggggcagtttatgtccgtgaccagcgaggacgggacggtgtttatcagcgatgcccatccgggcatggtgctggaaatcgaagcgccgtcaggcagctgtcgcctgtccttatcaggattgcccgcgcagcgtccggaaaataccggtttatatgaagaactcaccgcggtctgccggccatag

SEQ ID NO: 104826 - DNA, 696 bp, Enterobacter aerogenes
atgaaacgttatttatttcgcatgcttgcgctgacggctgttatgactccgctgttctgccaggcctccggtattctgccgtcctcctcggtggtggtggtagaagaggaaaccggggaggccacgatgaccgtgcgtaacaccgacagcaaaccgctgctgctggtcaccaccctgaaagaggtggacggggaccggggcaatattctgcaggtttctccgccggctgtccgggtagagggcggtaaaacccagacggtgcgcttcttcctgaccaacaaaaccccgctgaaaaccgagcatctccgccgcgtcatctttgaaggcgtgtcaccgaaaaacaagggccagaacgtggtgcaggtgaacatcagccagaacctgccggtggtcgtccgcccggcggggctggcccgtgacaacgcgccgtggaaaagactgagctggtcatttcgcaacggggcgctgacggtcgccaacaacagcccttacgtggtgcggctgtcgcagtcggtacagtctctgccggacaagcggaactgggagatgggacagagctacatcctgccgtcccagacgctgacgctgaaagcggacgggaaaggtcgtccggccacgccggagaaagtgcgtctgtcgccggccaccacctggggattttccgtggagacctttgacgccccggtcacccgctga

SEQ ID NO: 104827 - DNA, 690 bp, Enterobacter aerogenes
atggaattcaaacgcaccattctggcctccctggtaccgattgcatccgctctgtccctgtcggcccacgcagcggacagctttaatattaacgtgaccggcgttatcagcccggccgcctgcgaggcgaatataaccggcggcgagaccattgattacggcaccatccatgtcagcaaactgtctgccgatgccgtgaccgtattaccgggtaagcagaccgccttttccattacctgtgatgcgccggccaaagtcggcttccggaccgtggataatcgtgctggctcaaaaatgacctctggagagagtattatgctggattccggtatcgcctgggccctgtcgaatatgaatggattaggcagcgatgcgaagggcaatcatatcggcgggggggcctcaaaccttatgcaacttaattcagatatcagcgcttctccagaagtattagtctccaatgattccgggcaaacctggggggcatttccggatccaaccgcagtattcttttttaatgacaacaggatttataccatccgggagccgggaactactgttccgggtgcatttactactctcaccggaaccctggcggttcaggcggtgattaacccggcctccacgctcgacctgtcgcagcctgtcacccttgatggttcggtcacagttgaaatggtttatctgtaa

SEQ ID NO: 104828 - DNA, 696 bp, Enterobacter aerogenes
atggaattcaaacgcaccattctggcctccctggtaccgattgcatccgctctgtccctgtcggcccacgcagcggacagctttaatattaacgtcaccggtgtgatcagcccggccgcctgcgaggcgaatataaccggcggcgagaccatagattacggcaccatccatgtcagcaaactgtctgccgatgctgtgaccgtattaccgggtaagcagaccgccttttccattacctgtgatgcgccggctaaagtcggcttccggaccgtggataatcgtgctggctcaaagatgctaattagtgagctcgttacgatggattcgggggttaaatgggctctgaacaatctgaacggattggggttggatggtaagggtaaccgtatcggcggctggagctctgggcttagtcaactaacttcagacactatttctgttccggatgtaatatattccgacaatggagccaactgggccaaaagcattagcaccggccaaagccgttatgttcctttatttagtaatgccagggtttactccatgtccactccggaaacgttaacgccggccgcctttaccacgctcactggtatgctggatgtccaggcggtgattaacccggcctccacgctggatctgtcgcagcccgtcaccctcgatggttcggtgacggtcgagatggtctatttataa

SEQ ID NO: 104829 - DNA, 708 bp, Enterobacter aerogenes
atggaactcaaacgcaataccctggcctctctcgtcctgattgtatcaggcctgtccctgtcggcccatgcggcagacagttttaatattaacatcaccggcgttatcagtccggctgcctgcgaggcgaatattaccggcggcgagaccatagattacggcaccattcatgccagtaaactgtctgccgatgccgtgactttattaccggcaaaacagaccgcgtttaccattacctgcgatgcaccggccaaactgggggttcggaccatagataaccgttcgacatcaaaaattacaacgcctggaaatattacgatggactcgggggccgtgtggggaaagaccagaatgaacggtctggggatggatggccagggaaatactattggcgggtggagtgctgagcttaataccataactgctgacaccgtttccgatccggaaattattgtttctgtcgatgaggggacaagctgggcaaaaagcggcaaccccaacggaaaaaacatctatttccatgtggatagcaatagtgagaatgagattagcactatttcaactgccggaacgttaaccccggcggccttcagcacgctcaccggcaccctggaggtccaggcgctgattaacccgtcctccacgctggacctgtcgcagcccgtcaccctcgatggttcggtgacggtcgagatggtctatttataa

SEQ ID NO: 104830 - DNA, 558 bp, Enterobacter aerogenes
atgatatacgtgatgtccgatgaccattactttgcactgggggtccgggcggtttttgccggtgccggtcatgccatcggagtcctcccgccccccggagaaaagacgcaggcccggatacgcgagctgggcgacgccgatattctgctgctggcggtggagaatatgatgatgctacgactgttgttatgtcagttgtcagcgaaaaaaacccgcattgcgttatttctgaaaacagtgcatggctgtgagcactataccgggtataacggggtcatccgccggcaagtccctgttccgctgctcatcagcgaggtggcgaaatcggtacgccataaccgcgtcaggaaagtggtgaattacctgaccttcccgcagcgttttgtgctggagggactcgtccggggcggctcgctctcccggattgccggcgccctgcatattacggaaaagcgggtgtatggtcataaaacggaaggactcgcccggctgggattaaccggcagaatgaactgtcggaatttattaatctattcctgtctggctcaactgggatga

SEQ ID NO: 104831 - DNA, 510 bp, Enterobacter aerogenes
atgtatatacccagaaataaacgtgttctgacgggggtgtcgctctgcctgctggccggcgggatcctgtttagcctgggggggtattttgcgcgcaaggcggctacggcagaaaaatcctgccgctcggattatgtcatcagcctggataccgccacgaatccggtggcgtctgaaggggtgttctatctctttaccgagaagaatggcctgctcattctctcggtgaacgggaaactgaccacggagcagggtacctataatatcgcccggcgtatcgtgtatgccatgaagcgcaccccgcgggggaatactcaggaagtgcagtcgacctttctgcgcagtgaaaaataccccggagataacgcccccgacaggatcgttgaccagcgtctgttcgggacgctgaagaaaaatggcacccgctataaagtggaacagctgaccccggatacgctggtgatcggctcctatttttcgccactgtacgtctgtcagtttgacagctga

SEQ ID NO: 104832 - DNA, 780 bp, Enterobacter aerogenes
atgatgtttctgattgacaacaatatagcgttcctggttgaacgccaggtgctgaaaaataccgacaccggcgcggaggtggcgctgaatctagtggccacgcagctgctggcctttttgctgcagcacgcggacgtagtctgcgaacgcaatgaactgctggacacggtattcacacggaataatttttcagccaccgacggcaacctcaatcgccatattatggtgctccgccgggcatttgaagaactgcactgtgacgccgacgtgattattacggtgcccaaagccggatttaaaatcggcagcgtggcgatccgccagcctgcgcccagaacggaaacggaattcgtccccgaaaataatgccacaccggaacaaccgctggcgccggaaataaacgaggccccggtacggcaggcggaaaagacattatcacgcggatatgtggttttcgccctgctgtcattgtgtttttttctggccgcggcgggatattattttttggccccggccacccgtatttcccggccggacgtgagcgtctttaaaaccgaacagtaccggagctgtgagatcacctataccagcggcacccggtattttccacccgccgcggtgataaatgagctggcgaaccagggggaggaaattacctgtcgtgaacccatgaagattattctctggcgaagtaacaccccaacgcagacctggagttttaccaccctctgcgattcactgaataaatgccgagggcgatatgtatatacccagaaataa

SEQ ID NO: 104833 - DNA, 198 bp, Enterobacter aerogenes
atggacagacatctcaccccggcatctttaatcgacatggcctacatgaccaatgattccggttttactgcgaaatatttctatgagcaaatcaagttgggtaagctgccaccaccgataaaatttggccgctcttcacgttggctactaggtgactacatgcagtggagaaattcacatcaacgaatttatctataa

SEQ ID NO: 104834 - DNA, 678 bp, Enterobacter aerogenes
atgaacctatggggaaggccatcatttcgtcactacacgcatgatctgcctcacctcggcgggagggagcttaagaggctactgaccctcactgatactgggtggcgctggataagctccagaggccgacctattgagttccaccctgttgaatctggaggcaatcactatcagtatcgcgtcgttttgaagcgtggctctgacaggatggtgagcatcactccgacagctacacagtttaatgggctgcgctggtggtttgtctgtccgcactgtcagcgccggaagggaaagctgtactggtcggatgaagatatcggatgccgtaaatgttttggccttcactacgctagccagagtgagggtaagatggacagaatgcgggagatgattagaaagcggcgtgccgatatctggggcgatgcgccttacatcaatgacctgtttgaaagctcatgctggtttcccaagccaaaagggatgcggcaaacaacgttccagacaaagcgtaagcagctgctggtattggagtcagcgtactggggggtgtgtagtgattttgtgtcgaagattacgggcaaacaaaataaatccaccgacgatatcggaagccatctactgaccacattatcagaggtacgcaaccaggtacgcagtgaaacagaaaatcccggatga

SEQ ID NO: 104835 - DNA, 225 bp, Enterobacter aerogenes
atgaaaaagatagctctggttcttcccctttttctggcagcatgcgcgcaatcaacccaaatcaaccgcagtgatggcaagaaacaatatctcattgagtgcggagcaggatctgcctggtctgtctgctatgaggaagctaacaacgtttgcccgtcagggtataatgatgtgtccaaatcatccgggttcaaccgtaaagaaatgacggttgaatgcaaatag

SEQ ID NO: 104836 - DNA, 2718 bp, Enterobacter aerogenes
atggcgcagatgacagaaagacagacagcctattcccgccgcctcgatgaaaaatacgggttcccattcggcacgatggaaacgttagtgggcaatgaatccagtggtaacggtggcgcagagtcaccgaaaggtgccagagggtacgctcaactgatgccgtcggcaatgagtgatgcgggttatcgtgggacggatccccgttcactgccctttgaaaagcaaatggacatagctgcaaatcacctcaacaaagggatgaagcgctttggtgatatcggtatggcgctggccggatacaattccggcaatgggcgcgttaatgcggtcaggaatggcaaagctacactgcctgcggaaacagcggattacgtcagtaaatttgcagatgcagggattgtccctggtgatagcgaaatcctgcagtatatccaggctgggcagcgtcgtactcctcagcagccagactacacagacctcgataaggcaatctcacaggtgggtgatacctctgcttgggatgcaaaacgacagcagtttaagaatcaggaggcagggcagccaaccgccagctcgtgggaacagaaacgagcccagtttcttgccaatgagggtgccggtgaaccgcaacagcaggtagccaagtcaaaccttaaccctgagatggagtatctttctcctggtctgaaagcagcgccagaacaggcagtgagggggattgccaatatcccgtttgatgtaatggacgccggggttggtgtagtcaacgcggctcagtcagcaggggcatgggcaggccagcagctcggcatgggggatggcacttataacccgatgtcaccagtatctcgccccgttgatcgtcccacagacccatacgcgcaggctggtgaacaactggccccttacttcattccaggggtgggcgcggaaaggacagccgccgcggcagcttctgtcgccaatgctccgcgcgctgagcgtacggccactcaggtagctggtatgttggcggaaaacctgccgggcacactggtgaatgcccaaaagaacggacagatcagcccggaggacttagcaaaagagactggtattggtctggctgggtcgctgggagctcgtgctttgataaagggcggccaagcggccaccggggcggcgcgtgatttaatgcgcggtaacgcaaaccctgcagggcctgctggtggagcagtgaatggtctggaaaccgccaatgatgtatcaaaagcggcgcgttctgctgccggtcgtgaaaatatcgcatccctggcatcaagcgtcagtgatgatgttgcgagagctgcgggaagcacaggtgtaaatgtcgacgccctgacaccgggcatgcgctcaggtagtcgtggcattgctcaagccgaaggtgttctcgcctctacgccgggtcacgttcaggatgcgcatctgacagcctttaatgaaatctcttcaaagctgaacaagcagctttctgatttcggtgctgaatctggtagcgcatcggaaaagagcgcagcgattaaagatcgtatcagtgcgagtttggccgacatgaaaaccgccgagaatacggcatgggcggatctgcgcagcacgatgccgcgcgacagaatgaaaatgagtaatggaatggctgttgttcagtctgagaaatcggctggggtaccactgagcccagaaatgaagcagtttcaggcagctaacggccaaggtgacggcataacctttgacgggatgaaggcatggcgcgctaagtttgctgatgctgaacaggcaaacattcgcgccggtaaggccaatgccgccaggacagccggggagatgcgtcgcgctatcactgatgatatgcgcaccatggctgaaaaaggcaatttcctccctgagtggcagaaagctaacgatctctcgaagggatacattaccgccaaacaaaatgctgagtctgtttttggtcgggatctggcgtcagacgcaatggtcagaaaaggcgtcgatatgcttaaggcttctgcagatagcgggcctggggcattccatcgtcttatatcctcactgccggaagcagagcgccagccagcaatagcttctattctccaacatgctgcggcgcagggagagaagggtggcatcggtgaaggcgcaggcctccagtattttgccaaaatcatgactccgcagaatgtaaaagccatcagtcgccatgcaccagatctggggaaaatcatgaaggagtttggcgttctcgctaaagccggaaccagaccgcaacgatacatagagcgcacaggcagaacgacagaagccctcaaaacgcttgataccgggcttccgaaaattgtcggcgtgattatgaatggcattcagcagtctggcgcaattgcgggcggttttggcggtggtgtgttgggctcaattagtggccttgtcgctggtggcgcgctgaggaattctgtagcgaagattggcgcaacgcgaagtggacggtatgccatcgagaaggcgattcaggaagccgcaaaggcagtaaacgcgggagcatcaccggcagcgatagcagcagctgagaagcgatttgccgctaataagattgccatgaaagcgatccgggatgctgtgggatctgaggcattcatgcaactgacaaaggccggaattgtcgcaactctcagcggtatgaaagatgatattgaaggggaatag

SEQ ID NO: 104837 - DNA, 1320 bp, Enterobacter aerogenes
atggctacatggcaacttggtgggcttcagagcttggccccgcaaaatacaaatgctccagatgctgatgttcctcagcctatacagtatcaacagcagccgaatgtaggggtaatgggattgcagggattgcttggggtggctcaaataaatcagcaagctcaggcagctcaacagctcaaggaatatcagacgcaattgggaagaatggtagccaataatgatcgcgctggtgtgcagaaattaatggctcaatacccacagtttatggctgactctcaaaagcagatggggtttatcgatgctgagcagaatcggcagaccgctgacgccgctatgaacctccggcttgcctcgcagactggggacccgctggtcatgcagaaagccattcagcaggcgagaccagtattacagcgatttggtctgccttcggaagaggtttatcagtcctggcagaacgacccgcagggattcgacagaactactgacctgattcaccttcacgctgatccgaatagttactttaacgttcaggataaacagcaggggcagggcattgcgcagcagaacgcaaacacctcagcctataacgctcaggttaatgcggagcagggtgatcgacggctcgatcttgaacagttcaaagcccagtctgataaccaactgcgtacccgggaaatggctctggaagcgcggcttggtcgtgctcaaaatgatatcgagcgtgacaagttgaacgttgagcttggcaaggtacagcaggcgaaaatggagaagcagagcgataaaattaatactgtcgcaggcaatatcgactccctgaactctgcgcttggggtgggtcatgagctggcgggtattgtcggacagcatccaacggcggtcacccgctcgcaaaattacaacccgctgactggtgggcttggattcctacctgacatggctgaggatacgcgaagcctgcgcgccaaagctgatgaatacaacctcaaagttattctgccgagccttaaaggtacatttggcgggaacccaactgagggggagagggcggcgcttatgcagtctcaaaatggtatccagtccgccaccagcaacgaggcgtttttgcgtgaattgaacaaagctcaggacgtcattgttcgcatgcagaagcgtcagatttccgggctcggcattcctgtaaccaaatcacaggatgaggagacagataccaaaatgctgctccatgatccctcactggttaaggactatgtgaccgcacatggctacctgccggaaagttactatcaggcaaagcttaaggggggactgtga

SEQ ID NO: 104838 - DNA, 675 bp, Enterobacter aerogenes
atgttaatttttcagatagcaaataagcatcttgctcaagtggtatacgccaaaggtggtgatggtggcgctggcgcccaagcgaaggctcagaagcaggcaattgatttgcaacgagaccagtggaatacggtgatgaataaccttaagccgtatgccgatgttggcttgcctgcattacagcagcttcaggggttaatgactttggacggacagaacaaggcagcgaacgacttctttgggtcggaattatataaaactcaggctgctcaggcccgctaccagaatctgaatgcggcagaagcaactggcggtctgggttcaacagcaacggcgaaccagctaagtgcgattggcccacagctatttaacagttggctgggtgggcaaatgcaaaattacgggaatctgctcaatgtaggtatgaatgcggcatcaggacaggctacagctggtcagaacttcgcaaacaatacagggcaacttttacaggggcttgggtctattcgagctgggcaagcgcagcaaccatcctccctgtcccgtggaataagtggcgctgctaccggagcaatgacaggagcggcattaggtagtgttgtccctgtcatcggaactgctgctggtgctattggtggtggtctggttggcctgcttggagggatgagctactaa

SEQ ID NO: 104839 - DNA, 171 bp, Enterobacter aerogenes
atgtcaaaacagtcagtaaagcctgtgttgcttagtgaagaacagatacaggcgattcgaaaaattcaggatcagcaacgcaagcagtcaggaattggtgtggctcccacaatccatgaaatcgctcgcggtttgatggagaaggcactggcgagctgtatgtggaaatga

SEQ ID NO: 104840 - DNA, 171 bp, Enterobacter aerogenes
atgatacaaggctacctgacggcgattgccgcttggccagtaacgctgacgttaattggtctctctgcaggagtggcattctatatgagacgcagggggctgggtgtagtcctcgtcgttctgttcatgctggtggccatcgctgcgtggcagtttgaatgtgacatgtga

SEQ ID NO: 104841 - DNA, 1395 bp, Enterobacter aerogenes
atgatcacagaattctcgttaaacaactttaaatcatttaagcatttggatggattcaagattaacaatttgaccatcattgctggaaagaatagctgtggaaaatcctcaatacttcaaagcttattactcttaaagcaaactttgactgggcgaggcattgaggctgttgaattggatggggaacatcttacttattctaacctcaaggaaattgcatattcactgccaccaataaacagagctaagataaaatattcattcgaaataaagagtaatgatgaagtttgttatattgatttttccattgtaaacaggaaatatgataatcattacactcctgatgttgattattttaaaacccgtattgttaaggggagaggtcgctctcggactgttaatttctccaaacctgttttggatgtgaagaaactcgcatttctctttcctgaaaagataattaatcaatttgcttcacctgttaaaataagtgcatcttttgttaatttcataccttattcattaagtgctgagctaaatttggttagcccgaagagcggaaaaaaaagcaaaaaaaatataccaatacctatgcaattggtgtatccgaatgaggtaccatatctggaggagtttaatagatttctaagagatataaaataccttggacctgtaagggctactccaaaaagagcatatgtgcattttactgaagctgcaacagatttgctaccatcaggagaaaatgcagctcatgtactatgggcaaggcagaatgaaattgtaagctttgagaagcgtgaagaaacactaattgatgcattaaatagatgtatagaaatagttggtttaagtcaagtaattagcccatcccgcattggtgatctgatttataaaattaatctttcacaaaaggattgtaagagtgaggtcacaatctctgatgtgggttttggatactctcaattaatacctataatactgttgtgtctgctgagtgaaaaaaatgatttaattatcctcgagcaacctgaaatacatttgcatccatccagtgcggcaaatttagctgacttgtttttaaggtttattcaggacggtcggagaatcctcattgaaacacacagttcggagcttattagtcgattgcgtcttcgtgttattgagtcaccagagcttaaagataaaattacgatttctttcgttgatgcagatgatataaataatgaaggtgcaaaagttagacaatttaatatagatgaaaaagggatgttcccggtctacccggatggtttcttggacgaatcagataagcttgcagaagctataattagagctagagtgaagaagaataaagaaaagaaaatgatacaggcaggtaaatgtgatgaataa

SEQ ID NO: 104842 - DNA, 720 bp, Enterobacter aerogenes
atgaataaaattacattttgcccacacattataatggatgtgcctgaaagcacgattgaagatattgatgattatattgtgagtcattttctgaattttatgtctgcaattaatcctgataaactgtcggtgactttttctagcgagttaatggatagatttcatgaacattacccatgggggaaatccaaagatgacgaatggaggcaatatgttactcaatggcatggtttaataatgtcaaaaatgggtaaggtcaatctgatagaacatgaagtaattgaatgtagtcacgagcataactgtagcgcaataagtcaaacgacaaaagaaattttcaactcttttctcgaaactattgcgtcacacacacttcccgatgggtataatgaggaggctatttttgctcctatagataattgtaatgctcgcagcgattttatagttataaccaactttgaggacttaaagcctgcagagtatacttggtatcagctttatccacgtgaactcccatgtgagggggagtctccatttattcctcctaccgattggagaatgcattcacagcccaaaaaaggtactggtcacggttttattgatataaataatcgtgagtggaagcgtgatactcttcataaaaatcattgggatgtgcaaaatgtccggcaaggaacagggcgctataacaatgtaaatgacgatggtaagatactataa

SEQ ID NO: 104843 - DNA, 393 bp, Enterobacter aerogenes
atgaaagaacaaaacgaagtgctatcgagccacgccgattacgcgatcagctcacagctggcagaacgcattgcaagggtttgtggtgcggtgtgggttcacaatctggcttcatctggtaccgagtcgatgacaatcactacgccagaggggcggtcagtggatacgccactgaaaccctcagatatcggcgcgctgattgatgcctacctgttgccggtgatgaagttagtacacaaagagtcatggaaactgacaactttttccgagcttgagttatggattgatcaggatggccaactctctgattacggcattgccaagtggaacatgctggtgaattacattgctacacatatcgacaacgtggggtatggcgatgcgaaacattga

SEQ ID NO: 104844 - DNA, 297 bp, Enterobacter aerogenes
atgagtatttacaacgatctggtgagagcggatttttctggcaaaaccaaagaagatcttaacgctatcaacaaccataccagcgatgccctagacgacattctgatggggatggagtctgttggaaaacttatgttctgggcctctgacagcgagaactacacagagaatctggccgctgaagatctgcgcaatatcggcggaatgctctctagcctaatgccaatctgccgcgcgctgcgtgataccactgacaacgcgagtgtggctgctcagttaaaacgctcgaaggattga

SEQ ID NO: 104845 - DNA, 264 bp, Enterobacter aerogenes
atgagcctgaatctactgaatcgtcatccggcagatgtggaagccgaagcgatgcttagccatccgcaaccataccctgaaggtttcacttttaatgagcgcacctctgcatgcatggaacgcgcgcgccttggtctggttcacgtcatggtcaacttgcttcctgctgtagaagacgaacgtaaagaagatattcattactggctggatgccgttttaacgattgttgatgtcaccaaaattgatgcggagagcagagcatga

SEQ ID NO: 104846 - DNA, 960 bp, Enterobacter aerogenes
atgattaccgccaaccagggtaaaggcctctctctggctggcctgatgttttcatactcagggtttaaaatatttgcaaaacttagctttcgatttgctgataaggggaatttttttccccatatcgctggtgagatgaattgtattgcagcctctgacagtcgcgctgcatggactttcgcgaccagtacgcgcgagcttcatcacaccttcagtaatgagtttttagagtccataaaaaagggcttgatgttacacgccatcccggtctatggttatagcgcaccagcaaaatctggtgtcaggattggcgtcctggtaaagtacaaggcgacacatgacgcgcctagcgtctttttttgtgtcctcgcatcttcacaccattttttcagtgatatggctatagcccgtgtcgctaataaaataatggtgggctggatgggggcggagcaatccgcgccggttaccttgtacgccggttacgccaaccctgttcagctcaccaccagtgaaattggcgtttccggtggtgggattaaatcccagtacaaggaggctgccgcatgttggctactacccctacccaaaatccgcaattcatttggattatctccgctgttcgccgcgattgtccgaaaatcaagcctgttcttcaccatgttgctgctgcgactgagcgtgacgctcgtcgctctctggtgcgtgatcacgtctgtttcttcgctggacgcgtttatgtgcgggaggtgcgccatgattaagacctacgatctccctatagatccggccggtcattcggccaacctcatttcactggcattactgatgggcgaagtgctgaaagggaaagctgacaaccgggatgaatacttagccgctcttatctctcttttcgaagtatatgcccgagacttgcacagcttgctggaaggtcacgcattgccggaggttgcccaatga

SEQ ID NO: 104847 - DNA, 435 bp, Enterobacter aerogenes
atgcaaaaagaaaaccgcctcgggctgcaggcggctaacacagatattcacgaatctgatgttacgccactagcctgcaccgttcaagctcccaagcgcacaccgaaaaagcaccgtgcccgtgcttatatgctacgtaccggcgttgagggatggacagagaacgatattctgcgctactgccgcctttcgtctggacggaattacgccagtgagttagagcgccgtcttgatatcctgcttgagcgcacggatgaaaagaaccccgacggtatcggctcacatctccggtatcgcttcaccgggcgcggtgacgttctaaaagttattcaactggtgaacagcaatgctgccgctggtggttattacggcctttctaagcaggatatcgccgacattctgaatctctacccagacaacttcaccgccgcataa

SEQ ID NO: 104848 - DNA, 783 bp, Enterobacter aerogenes
atgtttcagaaaataaatcatgaaaaaaatgagttagtccatttcgaaactcttatctcccagatatcacagcaggaagggattagtttttcagatgcgtgtgctgttatcgctcgggaagcctcgtggcatcttgaaggaataccatttgatgagcctttttatttatatgactatgatgttgtaaatgggtttactagaaatgatagcttttctaagcaatcccttgattttttgaaagccatggccctgggagctgactttgcagaagaagccaaccctgagatgaaaggcgtgtattctcggattgatggagaaagtggatggtatcgggagttcttttttaaggggatagagataaccatttcattccttgatactggagtgaccctcccaccttgtttagagaagtttcgtacggtatctgaagtccggctgaaagcgaaaagagatagagcagccaaagaaagagcaaaagaaggccaaaaagaggttactcgagaagatctcgaaaaggagattgtgcgactccaggctgaggttgcaaagctgtcagctaataccccttgcttattgggagagtttcgtgatgatgacccactgctgatcgcgattcaggtgcgaaactctgaatggtcaaaatataatgagaatgatcgtaaaaccatcccatctcaagaggcactggttacggaccttctgacacgttataaagattttgatatgccagcgatccaagcaagagcaatcgagaaggtcgcttgtccgataaagagaaaataa

SEQ ID NO: 104849 - DNA, 1215 bp, Enterobacter aerogenes
atgaagctcacagcccgccaggtcgacacatccaagcccaaggacaaaccctataagctgtctgatggcggtggtctttacctgttggtgaactccaatggttcgcgatactggcgcctgaagtaccgcatcgctggtaaagagaagttactggctttgggggtctatcctgatatttcactggccgatgctcgccagaaacgatcggaagcaaagaaaatactttctgctggtggggatccggggcaagagaaactggaagaaaagcaggcaagggtattggctgcctcgaatagttttgaacatatggcgagggaatggcatgaacataagctcccttcatggtcagctggttacgcagaagacatccttgaataccttaagaaagacattttcccttatatcggatctcgggctatcacagacattaagccggtggacatgctgggcgttctgcgcaagatggaacagaggggggttcttgataagctcaaaaaaactcgtcaggcctgccggcagatcttcacctacgctgtcgttacgggtagggccgagcataaccctgtggttgatcttgccagtgcgctgaaagcaccaaagcaaaagcattttccgcatcttcttaccgatcagataccagactttcttcgtgcgctgaacgactacaccggcagcatagtcacacgcaacgccactcgcctgctgatgcttaccggtttgcgcacaatcgaactccgggcttctgaatgggctgatatcgattttgacaaaggtatctggaatataccggcagagcgaatgaagatgcgcagaccacatatcgtaccgataacccgccaggtaaaaaagttgttggaagaagtccaccagcttaccggaaggggaaagtatgtattccctggacggaatgatgccggtaagccaatgagcgaggccagcattaaccaggtgattaagcgtattggctatgacggtaaagcaactggccacggctttcgccacaccatgagcaccatcctccacgaacagggttataacaccgcttggattgaaacgcagttggcccacgtcgataagaactcaatccgtgggacatacaaccacgctcagtatctggacggccgccgggaaatgctccaatggtatgccgactatatggtggcgcttgagaacggtgaaaatgtggtgcatggctcgttcgggagacgttcttga

SEQ ID NO: 104850 - DNA, 1212 bp, Enterobacter aerogenes
atgacatggcaacaattcaaacaagcctggttaatcaaattttgggcgcctgcgcccgcggtgatcgccgccggtattctttctacttactattttggcattaccggtactttctgggcagtcaccggcgaatttacccgctggggcggccaactgctgcagttgatgggcatcccggccgaaaactggggttactatcaattaatccatctcgaaggcacgccgttaacgcgtattgacggtatgatgatccttggcatgtttggcggctgcctggccgccgcgctgtgggctaataacgtcaagctgcggatgccgcgtagccgcatccgcattttccaggccctggccggcgggattattgccggcttcggcgcccggctggcaatgggctgtaatctggcggccttctttaccgggatcccgcagttttccctgcacgcatggttcttcgccatcgccaccgccattgggacctggttcggcgcgcgctttacgctgctgcctgttttccgtatcccggttaaaattgagaaagtctccgcagcctcaccgttaactcaaaaacccgcgcaggcgcgtcgccgctttcggctgggaatgctggtatttttcgctatgatcggttgggggctactgaccgccgccaatcagcctaaattgggtctggccctgctgttcggcgttgcttttggcctgctcatcgaacgggcgcaaatctgtttcacctccgcctttcgcgatatgtgggtgaccgggcgtacctatatggcgaaagcgatcatcttcgggatggcggccagcgccatcggtatctttagctatgtacagctcggcatggagcccaaaatcatgtgggccgggccgaacgcggtgattggcggcctgctgttcggtttcggcatcgtgctggccggtggctgtgaaaccggctggatgtatcgcgccgttgaaggtcaggttcattattggtgggtcgggttaggcaacgttatcggctccaccctgctggcttacttctgggatgatttatcgccggcgcttgccacccactgggataagattaacctgctgacgacctttggtccgttcggcggcctgcttatcacctacctgctgctatttatcgcgctgatgttggtcatcgcctgggaaaaacacttctgtcgccagaaaaacacttcggcgacccgtattaaggaaaccgcatga

SEQ ID NO: 104851 - DNA, 663 bp, Enterobacter aerogenes
atgaatacaactgacaaatttattaatatcaatgaggatttaaacacttattggaaacactctacaaacgcattaaccgtttactgctgggcattacgattctacaaaaacttagaaggtaaaagcttacaacttacttccccaaaagcagcaacacttgttagagctagtcatggtactggagataaaatcatcaaggaacttgttgatgctgggttgttaattcttcttggaaaagatgaaacggctgccaatgtctttcgtgtcgttgactgggagcaacatcctgaattggctctcaagactgaagaagaatatgcagtttatctacaacagtttgaaaagagaacgaagcgaaacaaagaaaggcgtgagagatatcactctgtgcagaaggaaattcttcctgatgttcaagatatcccagaagttattgaacttccactacctatcgagcaaacgagcgagcctgtcaaggcgagcgaagaactccccattccagcgaaagtagttcaagaggctcctttctcaatctgggaaacagaatcaactacggcaaccaatgcagttaatctgatagatgccctacgtaatgacaattatcgacaagagctagacgagtttggctctgcaattcaaaggactgaatatgaaccattctga

SEQ ID NO: 104852 - DNA, 222 bp, Enterobacter aerogenes
atgaaccattctgaaatcaaaaatcaatacatcaaggagattcgtctcctgatgcttagcaactatcgaaatattaaatcagcttgtgaagcatctgatatcacctactcatactttcgaaaagtgatgaacggtgctgcaacaccaagctatgaaatgttattcgatatgtttaacaaattcggaaaaaccgtaactattactatcaaggaagataaataa

SEQ ID NO: 104853 - DNA, 735 bp, Enterobacter aerogenes
atgactaagaaacataattacactctcaacctcaacactgtcactgaagccctcatggtatgcaagctggatatgaatatagaagaatcacaattcctcctgcattatcgagataaattcaaactgctagaaggtgacggtagtgctctagtaaatctagaagagctttgggaggcattagattgccctcgatttactcactctgttcatgtcggtaaaactgccgacaaatataaacgagcaaaatcacaagcatttagtgaatggtttaatgaagtagctcttccaacacttgatcgtttaaaaacacaaatttgtgtcattgaacaaaagactcccggtcgaggggctaacaagaaaattcgttcgattgatactgaaactgctaaggcactagcaatgatggcaaacaatgaagctggtgatacagttcgtcgatacttcatcctcattgagaaactgttcaaacgtatttgtgaatataacgatttgcgaatctccattgagcaatcacgtaaagattcatgtagtaattggtatcagtctggaaatattttcaaaggtcaagaagaaagcaagcgatacaactggattatgaaagaggtgattggtaagcgtaatgacctatcgacagacctcgaagaatatgaatttgttggcaagacagtagcacggatgatgagaaatggtgcatcggatgatgtaatattttctgctgtctcttacgttaagtaa

SEQ ID NO: 104854 - DNA, 444 bp, Enterobacter aerogenes
atggcgcataacgattatcacctgctgacggcggaaaatagcgcgccgatcaaaatgtggacccgcggcgtgccggtagagccggaagcacgcgtccagttgctgaatacggcaaaaatgccgtttgtctttaagcatctggcggtgatgccggacgtgcatctcgggaaaggctcgactattggcagcgtgatcccgacaaaaggggcaatcattccggcggccgtcggcgtggatattggctgcggtatgatggcggtgcgtacttcgcttattgccagcgatctgccggataacctgggcgggttgcgcagcgcgatcgagcaggcggtaccgcacgggcgaactaacacgcgctcccggcgcgataaaggcgcctgggagacgccgccgcaggaagtcgatcaacagtggtcgctactggctcgcgctttaagcgcctga

SEQ ID NO: 104855 - DNA, 507 bp, Enterobacter aerogenes
atgaaacgtctacttattgaaataataattattattggtgccatgtattggatgatcagccatggctgggtttattctgccctggtcttttctgctgtttggtttctcatattgggatatgggcattattctctaagcaaagaacttgtagcggctgcaaaagatcgaaatcagtatgctcgtgcttaccatgctactcaaatgttgctgggaaacattcgttataggattcagaatgctgaacatgttgatgtcgacgagctcataactattgccaatgaaaaaatggatggggcaaaaaagataaatgcctatcatttcctagagtttgatgatggaactaaactgccttactgggagccgagtgatagcgagcgtgggaagcatattttagctacgctcaggaatgcagcgagagcaactgattcaatgcctgatggtgacatctactcaaatagtatcatggaagtgtattggaaaatatcttcagaacttggagagcgttag

SEQ ID NO: 104856 - DNA, 420 bp, Enterobacter aerogenes
atgaatgatgaaatgttatacgccagaattgcgtatattatcccatttcaaaaaggccccggtgcaagtagagagccggttttattaattcgcgcgcaacagcatgaagaaatagcattcgatatatctttattttttatagggttaaagcctagccaagtctatctcgcgtcttattctatccgcccagccaaagaagatgagttatatcctcaatttttctttcaaaaaaaattcagagttgatgatattgaggctattggcggatttttgccagtttctttcgacgctccaattaccctaccccacggtattccaaccggccaatatcgcatcgatgccacactgaatgttgagggcgggaatgaagctgaaactagggcggcggtgtctttcattgatgtaaggattgaaggctaa

SEQ ID NO: 104857 - DNA, 249 bp, Enterobacter aerogenes
atggaatcgcgaatcgctaagcttgaatctgatgttgagtacatcaagcgtgatatagctgaactaaaaacagacatcaggtctgtagatagcaggctggccaatatcgaaaccggtatctcatccatgaaaacaacgtttaaagcaacgggcgtcgttgtagctggagttttctcattctgcgtttacattttcggtagctacgtatccaagattattgatgctttgaatgaattagttcttaagtga

SEQ ID NO: 104858 - DNA, 1233 bp, Enterobacter aerogenes
atgaatattccccacacttcgtacacgattagagcaggctacgtgttccgtaaacgagcatcagggggcactatctcagtcagcttacaaaccagagatgtcatggtagctgttcgtcgttcaacggctatgtcaatccgcctactggaactcacccctctatctcttccttttaaggcactctctatcaccatgaaaaactatcgtgacgaaatggttagaaacgataccatagctcaattgtcagcacagatggctcaattgcccgtcacggctcctgcaagtgtccctaaggccataacatcagtaacaatgcataatcaccctatagcaagacagagcgtagcagaggctgttacaggccgcatattaaaggaagcaaaggatgaatacttcagcgagaagaaacgtgactggacagagcaaacactgaaagaaaaagactatggcttagatatgttcatctccttctgcgccactcagaacatcttcaccatagaggacgtggataaacagaccatctctgatttcaagctgttccttgatgctaaatatccatctgctgtttcatctcgtaagaagcgtttggacaatgtaaatgccctgttcactttctgttgtgaccagcgtgactatctgacacgtaatcctgtaaagggcatgggttataaaaacgtcaagacagtgaacaagaaggaagctgtaaccaaagaacactatgaaaccctgttagcccttcccctcatacagagcaatcaacagaacaaatttattctggctttgttctatcacacagggatgcgacttaacgagattgcacaacttacctcttctgacttccgtgagattgaaggaataaaatgcatctctattaatgatgagaacggtaagacagttaagaacgaaagcagcattagaaacattcccttgaatgatgccctgttgaaaatgggagtgtgggaggaaaagccagcattaggaatgaccagtcaacaaattgatgtggcacttcgtaagatgttcaagatgattagtatcaaacgtacatctcactgcttcagatacagcctctctgaccgtttacgtgatgcaggagcagcagacagtattagagcatggatattaggccacactcagaaaatgataacagacagggtttatatcactcgtacaccactgatgcagatgaaggatgctctagataaggcctgtcagccattaggagaagtttaa

SEQ ID NO: 104859 - DNA, 123 bp, Enterobacter aerogenes
atggatgatgttattcttgaagaaggtgtagagatgatttggaatggtaagtttattcatcagatactgatacctgaggatgatgaagaaattgaacaattgttaaatgaattggggatgtag

SEQ ID NO: 104860 - DNA, 264 bp, Enterobacter aerogenes
atggttctcgccagcgctgatttcaccttcctgacggttatccagcttcgccgcatagagattgagcgcccggccggcgctgataaccccctgattaatcagccccagcccggaaagattccactgcaggttgccgttggcgatgaccctcccggcgttatgaaacgcctgacgcaacgtgagcgacatatcgccctgagagagcgcctcgccatcgccgctgagggaatcggcatcgaggctaagtttgctcgcggcaagtaa

SEQ ID NO: 104861 - DNA, 1746 bp, Enterobacter aerogenes
atggcggtggaaaaactgattgtcgaccatatcgacacctggaccacggcgctgcaaacccgctccaccgccgggcgcggcagctcggggaagattgacctgtacggtattaagaagctgcgcgagctgatcctggagctggcggtgcgcggcaagctggtgccgcaggatccgaacgatgaaccggcgtcggtgctgctggagcgtattgcggcggaaaaagccgagctggtgaagcaggggaaaattaaaaagcagaagccgctgccggagattagcgaggaagagaaaccttttgagctgccggcggggtgggaatgggtgcggctgggaaccttatttaactcaatccagagcggaggaactccaagcaaaatcaaccctgcattttggggaggggagataccttgggccagcgtaaaagacctaggctcttcgcaatatatttcgaaaacccaggactatattacagaggcaggtttgttatctggtagtaaattagctgattctggagatgtattaatttgcactcgtatgggattaggaaagattgctattgcttcttgcccaatagcattcaatcaagatttaaaagcagtaaagctcacaagtcatattattcctgattttttctttaatacctattccactgtaaaaataaaaggtacaggcacaacagtagaaggaatcaagcaagaacaattggtgaattacatcacgggattccctccatttaatgaacaaaataaaattgttgttaaagttaaggagttgatgtctctctgtgaccaactggaacagcactccctgaccagtctggacgcccatcaacagctggttgaaaccctgctaaccacgctaaccgacagccagaacgccgatgaactggccgaaaactgggcgcgtatcagcgagcatttcgatacgctgtttaccaccgaagccagcattgacgccttaaaacagaccattctgcaactggcggtgatgggcaaactggtgccgcaggatccgaacgacgaaccggcttctgaactgctcaaacgtattgcgcaggaaaaagtgcaactggtgaaagacgggaaaatgaaaaagcaaaaaccactgccgccgattagcgatgaggaaataccgtttgaactgccggaggggtggaaatggtgcctattcgaagacgtcgttgatattcaaagcggtataactaaaggaagaaatttagccaaccgaaaactaattactattccttatctacgcgtagctaacgttcagcgtggttatcttgatctgtcagaggttaaagaaattgatattcctgaggaagagcaagataaatatcatgttattaaaggtgatcttttaataacagaaggtggtgactgggacactgttggtagaacaactgtgtggtgtcatgaatggtatatagctaatcaaaaccatgtttttaaaggaagaattataggaaaggagattgatccatactggcttgagacatacatgaatagtccttattcaagagattattttgctagtgccagcaagcaaacaaccaacttagcatccattaataagactcaattaagaggatgtcctgtagcgatccctccaagtagtgaagcaaacaaaatcatgctcaaattaaatgattttaatgaatcatgtgaaaaacttaaattacagctccaatccgcccaacaaacccagctccacctggccgacgccctcaccgacgccgccataaattaa

SEQ ID NO: 104862 - DNA, 339 bp, Enterobacter aerogenes
atgactaccccgcattctattgcagaattcaacgatccagaagtctccccggaaaataaccgtaaaggcaccgtcagttacgcgagccgctttgaagatcatcagcgtatcccggcgattatcatgaaaggccagtggctggaagccgccggttttgccaccggcactaaaattgatatcaaagtaatggaaggctgtatcgtgattaccgcgaagcagcctgagcccgaactggtggagtctatgcgccagctgcataagctgtcggcgcgcaaacagaagcaggtgcatgagtttattgccgtcatcgccaacaagccccgcaggcagaaacattaa

SEQ ID NO: 104863 - DNA, 2100 bp, Enterobacter aerogenes
atgaaagccacagaagcccgattacttgattttctcaaacgctcacagcaatttgttatcccgatctaccaacgtacctattcatggtctgagcaacaatgtcgccaactttgggacgatattattcgtgccgggcagcgcgatgatatttctgcgcattttattggctccgttgtttatatcgagcaggggctgtatcaggtgtcggggatttctccgttgctggttattgatggtcagcagcgtctgaccaccgcaatgttgctgcttgaagcgctatcccgtcaccttggcgatgaagagctgattgacggcttttctgctatgaaattacgcaattactatttgctcaacccttatgaatccggggagagaggctataagctgctgctgacggagaccgataaagacagcctgctggcgctgataaaacaaaaaccgctgcctgaaaacggttcgcagcgtattgcggccaattttgaattcttcgatgagcaaatcagtaaattaggcgatgacctgatttcgctgtgtcgtggattatcaaagctattgattgtcgacgtggcgctcaatcgcgggcaggacaatccgcagctgatttttgaaagcatgaactccacagggaaagcgctcagccaggccgatttagtgcgtaactttattctgatggggctggagccggagcatcagacgcggctgtatgatgaccactggcggccgatggaaattgccttcgggcagaaaggctacagtgaatatttcgacagctttatgcgccattatctgacggtcaaaacgggggatattccccgtaccgatgaagtttatgaagcctttaagctgcatgcgcgtagcctgcctgtcgccgaagcgggggtcgatgcgctggtggcggatattcaacgctatgcggaatatttttgtgcgatggcgttgggcaaagagagcgataaatctctcgcgactgcgtttcaggatttgcgcgagttaaaggtcgatgttgcctatccattcctgctggcgatgtatcacgattaccgtgagggtgatttattgcccgacgatttcctgagtgcaataaggctgattgagtcgtatgttttccgccgcgcggtttgcgccattcccactaactcgctaaacaaaaccttcgccacgttttataaggtattaaataaagaaaactatctggatagtattcaggcgcatttactggaactgccgagctaccgacgttttccggatgatgatgaattcagccttaaattaaaagagcgcgatctgtataacttccgcagccgcagttactggctgcgtcgtctggaaaattatcagcgtaaagagcgcgtggcggtggatgaatatacgattgaacacattatgccgcagaatgaaaatctgccggcaaaatggcgtgaagagttgggcagcgactggcagcggatacataaagaacggctgcatacgctggggaatctgacgttaaccggctataactcgcgttacagtgataaagcctttgtggaaaaacgcgatattgctggcggtttcaaggaaagcccgctgcatttaaacgccgggttagggcagtgcgagaaatgggatgaagcggcaatggatgcgcgggccgagcgcctggcgaagcgtgccgttcaggtctggcgcgcgcctgcgctgagtgaagaggtgctgagccagtatcgccagcagcctgaaaaaaccatgaactacagtctgtcggactttcatcaactggacgttggttcgcacagccggatgctgtttgaccagctggcgccggaaattttaaagctggatgcaagcatcacccaggaggtgctgaagctgtatattgccttcaaggcggagaccaattttgtcgacgtggtaccgcagaaaagccgactgcgcctgtcgctgaatatgccgttccatgagctggttgacccgaaaggaatggcgaaagacgtaacggatcttggtcgctggggcaatggtgatgtggaggtcggtttcagcgatattgcccaactgccgtatgtgatgggactgatccgccaggcgtttgaaaaacagatggatagcgcggcggtttag

SEQ ID NO: 104864 - DNA, 552 bp, Enterobacter aerogenes
atgaaaatgaataaactgaacaaaaccattctggctgcggctatcatttttggtgcttcctcaatgtctcacgccgatcaagggcacggtaaagtgaccttcaccggctctattattgatgcaccatgctcaattactcctgattcaattgaacaaactgtcgatatgggacagatttctaatgtcgctttgaaagatggcgggaaatccactccacgtaattttagtatcgatcttgaaaactgtactttcgttgatgatggtagcggcaacctcagcaagaataaagttacggtaacctttactggtatggagtccgccgctaataacggtctgctggctattaccggaacagctaaaggtgccagcattgcgattgctgatggtgatggccagattattgaattaggtaaagcgaccaaaccgcatgccttacaaaatggtaaaaatacgctctcttacgctgcgtatatgcagggtgacggtggtactgccgcggtgaccgaaggtgaattccaggctgttgctgattttacgcttgcttataactaa

SEQ ID NO: 104865 - DNA, 537 bp, Enterobacter aerogenes
gtgaggattaatatcgttattttaatagcatgctttttattattgactcaggaaggcatggcggctcagttatctgattcccttcaaggggaaggccgcgttaatatgcaaggttcgattattgatacagcgtgtgcgattgcggtagagagtcgcgagcagactatcgatatgggaatcactcccttgtcagaaattattcgtgatggccatgggcgcactaaaaaattttccattgagttagtgaactgtgttttagaaagagcgggtaaagaagactggaagcaatttagtgtgacttttgatggagagtctgatggtggccttttcggcgtgagtggtgatgcgtccggtattgctttgcagctaatagatagctcaggcaacgttgttgtcccaggtgagtcgttaccactacagaatatcattccgggagatttgcagctgaattataccatgcggctagtagctaataaaaatacgctcaaatctggtgactatttttcatcaatacgtttcaagttggattatttctga

SEQ ID NO: 104866 - DNA, 2559 bp, Enterobacter aerogenes
atgaatgtgtcgcctacagggaaatggtttcgccggcagacgttgggtagttttatctcgttcacgctgagcgcaccgatagcggtggtttatgccgccgaagagattcagttcaacactgacgtactggatgtgcacgacagacaaaatatcgatctgagccagttttctcgcggtggctatattatgccaggcacctacggcatggttgtgcaaatcaataaaaacgatttgccggaacaacaagtgccattttatgaaccggaaaatgatcgcggtggcagccgggcgtgcatctcccgggtattaacggaccaattggggtttaaagagaatgtattaaaaaacctgaattggtggcgccagggggaatgtcttgatgaaagcagcgtggaaggtatggaggtgcgcggcgatctggccacgtcgacactgtatttaaatattccacaagcctttctggaatacaccgatgagaactgggatccgccatcacgttgggatgaggggattcctggattattgctcgattacaacttaaatgcgcgtacgcaaaagaatcaaaaaaacggtaccagtaactacaacctcagcggcaacggtacggtgggggctaacctgagcgcctggcgcgtgcgggccgactggcaggcaaatgtcaaccatcagacaggcagcggtaaggcaacagataaaacgctggactggactcgttattacgtctatcgcgcggtggcggcgctgcgttcgaaattaacgctgggagaaaattatctcgactccagtatgttcgacagcttccgcttcaccggagcgagtcttgtttcagacgataacatgttgccgccaaacctgcgcgggtatgccccagaggtcactggcgtagccaaaacgaatgccaaagtgacgattagccagcaggggcgggtgttatatgaaaccacggtggcttccgggccgttccgcatacaggatattaatgatgcggtaagcggggagctaaacgttcgggttgaagaacaggatggtagcgtgcaggaattcaccatgaatacctccaatattccgtatctgactcgtccgggttcagtccgcttcaagctagctgcaggtaagccttctgactggcagcatcattcgcgagggccgctatttggcaccggagagttctcctggggagtgagtaatggctggtcgttgtatggcggcgcgttggcgggcggcgactataacgccttatcgttgggcatcggtcgcgacttaatgttattcggcgctttgtcattcgacgctacggagtcgcgcgcgcgtctaccgcaggcggaaaagacattaagcggcggttcgtatcgtcttagctattcgaaaaattttgatgaatacgatagtcaggtcacctttgcgggttatcgcttctcggaacaggatttcatgagtatgagcgactacctggacgcgcgttattacggtaaccgcaatggtaacggtaaggagatgtataccatcagttttaataagcattttcgtgactgggggctgagtagttacctcaattatagccacgaaacttactgggaccgccccgccaacgatcggtacaacttaacgttatcgcgttatttcgattggggaagtgtgcgcaacctgagcctgtcgctttccgcctaccgtaatcagtacaacggtagcacagatgatggcgcttatttgtcactgtctatgccatggggtaaaggttcaaccttgagctacaacacgacggtaaaccgcggtgataacacgcatcgtattggtttctacgatcgtattgacgagcgaaacaactatcagttgaacgccggtagttcgcgcagcggggtcaacctgagcggttatttcaaccaccacggagatactgcgcgaatgagcgccaacgccagctatcagcaagggcgttacagcgcctttggtttatcagcgcaaggcggtatgaccatgacatctgaagggggggcattccatcgcgcggggagcgcggggggaacccgtatgctgatcgatacaggcggtgttccagatgtgccggttcgtggttatggcaacacgagccgaactaatgcctggggtaaggctgtgataggcgatatgaatagctattaccgtaataaagccagtatcgatctcaatcagcttggcgataacgccgaagcaacccgttcggtagtgcaggcaacgcttaccgagggggctattggatatcggcgtttcgatgttatcgccggtgaaaaagcgatggcggtaatcaaattggtggatgggagtgaaccgccatttggcgcaacggtgataaacgcgcgcaaacaagagaccggtattgtcaatgatggcggcagtgtttacctcagcggtatcaatgccggggaaagcatgaaggtgtactggagcggcgtagaacaatgcgaagtccagatgcctgcgccattaccgtcggacatgctgacaaacagtttactgctgccttgtgtggcgcttagcgccgacaaggggagtgataaggacagaactaaggagtttttataa

SEQ ID NO: 104867 - DNA, 753 bp, Enterobacter aerogenes
atgaccgttattcgtcagccgattgcctttttggcctccatcgctgtgttggggagtgctttattgccaacggcggaggccgccatcgcccttgatcggacccgagttatctttgatggtagccagaagtcaatcagtctgaatgtcagcaatcaaaataagcaactgccgtatctggcccagggttggatagaagatgagaagggaaataagatccagagcccgctgacggtcctgccgccggtgcagcgaattgagccaggcaaaccgagccaggtaaaaatccaggcattgccggcggcaaaaatgctgccacaggaccgtgagaccctttactacttcaacttacgcgagatcccgccgcgaagcagtaaacccaatacgctgcagatagcgctgcagacacgtatcaagctgttctatcgcccaactgcgatagcgattgataccaatgcgccgccgcctcaggagcagctaaccctgagcaagcaaggggacaaatatatggtgaataacccgacgccgtattacgtcactctggtggatgcgggaagtaaaaagggcgccagcgtcaaagaatttgaacctgtgatgctaccaccgaagagcacacttccgctgacggtaagcgctgccagtttgggtaacacgcctgtgttgacctacgtgaatgactatggcggccgcccgcagttgagcttcaactgctccgggacccgctgcgagctggtaccgcagaaaaaaggaacttga

SEQ ID NO: 104868 - DNA, 645 bp, Enterobacter aerogenes
atgaaaaaaacgaagaatgtcctgcagagaccgagcctgtggcgacatgaatttcgtggtggtgtgctgacagaggtgctgaagccgctgggactcatgctgatattactgtccactgcgcaagcaactgtcgacaactgggatgtcgagggggccaacggcactttgtatgtgtatggcgcgctaactgagagcgcgtgccgtctggaaatgaccagcgcctggcaggatgtggcactaggggaaattggtacaggacgtctgcaaactattggcgcgagaggagaacctgcgcatttggaattgcgcttgacggactgcctgcgtagcccggctggtagccgcgatctacgtaccggtaacgtgaaatgggctaataatcagcctgcagtcacggtaagttttagcgcgccacgtgatagggataacccgcagttagttaaattagatggggtagaaggaatagggctgcgggtagttgatgaaaaaggtaacgatgtccaggtaggtagccgcggcatgccgctattgctgacgccggggcaaaatactctgagctacatggttgcgccggagcggactcctgccgcattgatggctggcagctatcatgcggtcgtgggatttcaacttagttatgactga

SEQ ID NO: 104869 - DNA, 480 bp, Enterobacter aerogenes
gtgagcgaaagattaaggtatttactactcgccgcactgatgctgtcgccatatctggcaacagcttctgttccggtgagcgttaaagtcacagtggttccggttccatgcgttattaacgacggtaatccgatagttgtggattttgaggaggtgatgaccaccagaattgatggcaaaaactatcgtaagccggtggattacaccctcagctgtacaggaatgagttctgttttaatcaagctcaaagtcgctggaaccagcgccagttttgataacactgtgcttgggacatctgttgatggcctgggtattgaattctggcagggcagtaatctcaagcttccactgaatagctggattaatttcatgtacatgagaccgccagcattatgggcagtacccgttaaacagccgggagcgtcgttaaaagggggagagttttatgcagcagcgacgatggaattaaactatcagtaa

SEQ ID NO: 104870 - DNA, 492 bp, Enterobacter aerogenes
atgaataaattcaggtggatacagattctgctaatggctggaataatgaatgggactgcctttagtaaagaaggagatatgctttttcacggtatcctggttgaaccgcccccttgtactgttaatgacaataatcttattgaagtggattttggcgagcgggtgggcataaaaaaagtggatggcgtgaattaccgtcagccgctgaattatcaaatcagatgtgaggatggcggtaatcgaaattgggcgcttactctgacccttagcggcggggtgtctgcattcgatacggcggcattgcaaacaaataaagagaatctgggtgttcgcatatatctggatgataaaccctttgagccgggaagctcggtcaatattgtgttggcgagtccgcctcgccttgaagccgtaccggtgcagagcatcggagccgttctcactgaagggacattcgagtcgtgggcaacactgcgcgccgactaccaatga

SEQ ID NO: 104871 - DNA, 513 bp, Enterobacter aerogenes
ttgataatctcgctgtcattgggacaggctgccagtgctgaaggcgtaacggacaataacgttcgtttgtacggggctctggtcgccgagccatgcatcattctgccgggggaggaagagatccagttggattttggaaccgtcattgataagtatctttatctgaataagcgcactttagggcaacggttcgaggttcatcttgcagagtgcgatctgagcctggggaatacggtgaaaatcacttttgtcggcccggaaaatagcgctttgccgggattgctggccattgacaatagctggggagcaagtggtattgcgataggccttgaaacgatgaaatcggcttttttgccactaaacaaagccagtcagttctatccattacaggctggtagtacgcgaattgcgctaaaagcttatgtgcagggggaacccgaagccatcgcgacaaaacgtattgggcgcgggccatttcgcgcgacggctacttttcgtctggagtatgagtaa

SEQ ID NO: 104872 - DNA, 819 bp, Enterobacter aerogenes
atgaaaacctggttatatcttgttgctggtttaattttatatccaatggttacacttgctggtatgtatccagtaccgacatcaattaaatacaaatggacatttgaaaatcagaatgagtttgaggttgagtgggcgatggttgatatccctggggtggatgtaccaccaccgtccgactatgacaccatcattctcgcctcacgtgctgctggctttaagggaggaatgatatttggtggtgggcgaacgaattcagcgcatgcatctggtaattactgggcgatttcaagtcttcaaccgggggaaaccatggcatcggcagcgcaaagatttgctcctggtttgccgacagctttcgattcaatgaattactttacacagtatatttcagatggctgtgtaggaatcgtttttatggagagaagtaatggttcatggaataatgttttcagcccgccaggttcctgcgtagtcatacctccgcccagtgagcccattgtgagttgtgatattctcaccccgtcaatcgcgctgaatcatggtgaagtaggcgttggtaaaaccgtatcgtctattgcctcagccgatctgagtatagactgtcgtaacgcggtatcggcgaatattaagtttgaatcctccgcactaaagttggggtcgatggtggctacattatcagtaccgaatgctgttaacggtaaccttcagctaaatcaaggtggcaataccttatcggtgatgagtatgttaaacgggaccgcgctggcggtagggacgtttaccgcatctacggtaatgacaatcacctttaactga

SEQ ID NO: 104873 - DNA, 246 bp, Enterobacter aerogenes
atgatcatgataaaggatgggaacatggccttcgctgcaggcttgcactattatcttaatcaggagatatcaggatgtattgaagctgaaataaaatgcaatcgttggcgaaaaagacaagttgtcgatctctgttttctggccgttgagtcttctatagatttttttttgccttgtcgcttatcgggaaaaaaagtaacagcatcattttctttattatggagcggcccgaggatggcgttctga

SEQ ID NO: 104874 - DNA, 303 bp, Enterobacter aerogenes
ttggcgataataagaagaaaaatattgtcgcagattaaaagttggggcggagtggggtattacgaaagtgctattagtacgtgtgccgcgtacgggcgttctactttaactgaaagtgagataaacgttctggagctgatggccagagagtattccattaacgaagccgccagcgagttggggaaaagtattaaaactatctatacgcaaaaaagatcggccatgctgaagctgcggttaaaaaatagtcatgagctacgtttgtttatcatcaggcaccggcggatgttgactctgttttga

SEQ ID NO: 104875 - DNA, 837 bp, Enterobacter aerogenes
atgagtaacaaagttatcttaaatcaatgtattgtctacgacaaaagcgccgcttctttgtccgatatcaccaggccgaatgaagcgatcgttttgacaacaccagccaataactgcttacaaattctgctgaaaaatcgcgcggaaattacaactcagaaggaattgttttccgaggtttgggaaaaacatggcataccaatcaatgccaatacgctgtatcaaaacattgctatgattcgcaaagctttccggcaactcggggtaaaagaagatatcatcgttacggttccccggcgtggcgtgctggtggctgaaaatgtgcagattgttgattttatctctgatgaatatccgccaccagaatgttcgctttcagcatcggtgattcggcagaacgacgaacggcaacctgatgagggaaataaaagtgggcaaagtgttcaaatgcagtcaatcggtgctccaccccgttctaatttaaaaaaacggctaataatgatagcgttttattttctattaatggctgtaacagcgttattttcatcatttttatatcttcagtatttgaatactcaaagtcgtttctacagttatcattattttgatgattatcagggttgtcaaatctatgttgactctaggggagataatcaaaatagaaaatccatagaggaatcgctcaatgtggcgcagataagttgtgataacaaggaacgagtctatgcctcatttttccctggcgcgcctcgtgagtcatttattttttgtgatggtgatattttaaaagcatctacacagtgccgttctaactatcaagttttttcggagaagtaa

SEQ ID NO: 104876 - DNA, 489 bp, Enterobacter aerogenes
ttgaagctaaaaatgttttttatcgtttcgctggtgcttacggggacatcatcaataatttatagtgagtattcaagggggaaccgaattaccaaaggggttaactgttttgctcaggttcaatataactatgatcaggatggtgaacgtgcagtaatgaaaactggaatactcttcgccctgacaaatggccatggtattgtttcttatggcggaagattatatcacgctggtaaggcctacactattaaacgttatgttgaagttaactatacggtaaagagtcactatacggtattgttacgtaccagtaatctaaaaatagccaatagcgatgatatccctgagttttttgcaaataagtatctttatagttacttgcgtgatgaaaccggctggatgaatatggtgatttatcctaatggccagaatggatttcttatgtccacaacaccagttccacaattcttatgtaagcgggttacttaa

SEQ ID NO: 104877 - DNA, 342 bp, Enterobacter aerogenes
atgaatactttacctgcaataaaccagtgggctgttcagttatgcccatcgcccgtaactatctggcaaacgttgctaactcgtttactggaacaacactacgggctggcgctgaacgacacaccgttcggtgatgaaagcgtcattcaggaacatatcgatgccggtattacactcgttgatactgttaacttcttggtggaaaagtacgagctggttcgtatcgaccgcagggcgtttggctggttggaaccatctccatacttgcgagctgtagacattctgcgaatgcgtcgggacatggggctgttgcgaggctgcaaccacactgcagcaatgtga

SEQ ID NO: 104878 - DNA, 306 bp, Enterobacter aerogenes
atgaaacagccagagaacatgatcgcggtaaaagtggcggaataccgtttacacatcacccggctaagggtctgccaggatagcctggctggatgttgcagtgatgccgagcggcgtggctggcgcttgagagcccttgggcagttaagtaaagcctcatcgctttactgccaacgggcaagttctgccgatacctgcaagtttcaacaggcctgtgaaggtctccagcaacacatcagcagagttttaccagaaggccagtggtgcggtgatttgcttgggcaggggatgcaggcaaaattttga

SEQ ID NO: 104879 - DNA, 1257 bp, Enterobacter aerogenes
atgctattttatggtcaggtcatgagcactaaaaccaccacgagtgacaatcatttaacggaacctcacgaggcgggattttgtttctatgagtttttcgcgggtggcggtatggccagggtcgggctgggaaaacagtggcaatgcctgtttgccaacgacatggacccgataaaagtatcgacctatatcgacaactggggagatgaacatttcgacacacgcgatgtacgcgaaattgcccccagtgatctgccgcaccatgctgatttaagctgggcatcgttcccctgtcaggatttatcgctggccggtaatggcctggggatcggcgaaaaagattccagtatagataaaaccacgcgttccggcgcggtatggccgttcctcgatttaataagcaggctcggcgaggaaaaccgtaagccgccgattcttgttcttgaaaatgttcttgggttgctgacgttggatcaagggagccacttcgccgcgatatgccatcagttaagtaaaacaggttaccgctatggcgcaataatcattgatgcaaagcactttcttccacaatctaggccccgcgtatttcttgtggcgattagtcgtcatgtttccattcctgcatgtttagtttcagaagaacctttatcgcaatggcattcgtcgtcacttcttcgcgcctgcgatgcgctggcggaagatgcccgtaatgactggatctggtggtcgccaggcaatatgccagacgccagaacgaaggagctggaagacttaatcgattttgaagacgaaaacgcgttatggaattctgccgatgaaacacgacgtctcatcagtatgatggcaccggcgaacctagcgcgtctggcgaacgcacaggcatccggcgagacaataacaggcagcctttatttacgtatgcgtaaggaaaaaggcatcaacaggcaacggaccgaaattacgttctccgcagttcttggttgtctgagaacaccgaaaggtggcgcttctcgtcctcgcattatcgtcgtcaagggcaaccaggtgaaaacgcgtttgttgtcggtcaaagaagcggcggcgttaatggggttgccggatgatttcatcctcccgacagcgtatcaatcggcatttaaagtgattggcgacggacttgcagttccttccgttcgttttctggccgaacgtattctggagccacttgcgatgatcgcccaaaacaatacccacaggacgggggatacacgcgaatga

SEQ ID NO: 104880 - DNA, 2559 bp, Enterobacter aerogenes
atgaactggacgttgcttgttacgcccgactgctgggaaaagaaactgattgattattttctccgattcggtgccaacggcgacgcgcaggatattcgctggtttgaagttacaccggtgacgctcgctgaggcattcgccgacagcggcgttagcggggatgaagttgaagaggcatttcgaacctacatgtcgaaaataccggacctgccgcagcgccttgaaggcgggatgatggaaaagtcgactcgtcgatcgcctggatattttacgtatctggtcatgacgttgcttattagcagtcaattcgacgtacaggaagaacgcaatgactttcgactgaaactacagagctggttgcagaccacgcatagttttcagaacttatccggcgtcaacaagatgtgggaggcattagccgaatggcttaaacaacgcatccacgaaggcgaaccctacaggcgtcttatcttgccgccgcgggatggctgggtccagatcggtcacacactgcgattggcattcccgaataaagccgatctacgcctgatgagcgaatgtcttgaaagctatccacaagccgccgcgaacccacgccagttaattgaatactttcaaatcgttattcagagacacggtgtttctcatcctctgaaggaggcttttgccgaattcagagacgcgtggttgttgggacgtcgcgcgctgttcgatatgcctttttggcgcttgcgccaacgagcgatccagatatcgtcatgtgtaacaccacatcagaccatcattgatatgtacgttgatttcgatggctcgcgatgctatttcagcgtcgctggcgagagcgacgaaagtgtctttcatcctacattatctgaagcccttagagccagcgacgcagggagcagcgaaaatctggggaaggcgatgcagatcggcttactctttttttatgagatcggacacggacgctggagaactaagccatcacccgatgtagactcgcaacggtttcatatcgctttatccagtaaacactctgtacagacgagcaagcgccttaacgaatatatcgcagaggacgagtggattttaacggcacaaccgatgaacagggtttcagcggtcgatatattccgctcagtaagatcctcttcggttattcaggatgatgacgttacgcgccctcaactatacggtggaatacgcgtccccggaggatggctgggattaccggcgtttttgccttctgttgagtcagatacgcgacgctacaaaatatattcattcgggaatgatgaagctggaaccaatatttctgtaatagatggtcggctgaattcttctgtgccgcttaacggtgaatttttcatcgagccagccctcgaggcgggtgaaaaaatgccgccgtggcggcgtcgcgcgcgttttttcacccacgccataccgcacccaactttaggcgaaagcgcaagataccagtttgagccactttgcgattggttgacgccttcactaaaggcaccgacgtttaatttagaaggactgtttgagtgggaagatagtgaagcgtgttgcgatcatcttcttgaagcgatttacgcgagtggtgctagcggctgggaagaggccgagttaatcgagcttctcaggcgtatgaccggcgatatcaacgtatggcatttgattcggtgtttacatcatgcgggtctaatcgagccacgcctgcgccctgggtggaaaggtcgggcatggacgctgattaaaccttcattacttcatattcgctacggagaaaattctctggtcgttgtggaaggctcggtctgtgcctgtctgatggatgattttcgaaaagtggtcgccgggctgggtggagaaagtttccgtcgtcgcggcgtaagcctctggtcgccacctgtatttggggccttactcaccaaccctgttgcgttatctctgcgactaggatggccacttatcgaagccccatcgtcatctgatacaacgccgcttgcactaaccacgacagaacacgccgctgaactacacgagtcaaaggcagtctggaattggcattcaggaagatttcagcgacatgataccctagataaaaaatctgcgtcgctgtcacttcatattcatccaggtggtcgagatcatgatatctatcgggtcgtttctgggagaaaaacgacacattatctttcccgaactgccgctattatcgccgctagcgcgaaaaaccgtacccccatatttgaactcgtcgccaacaatcatttgttatgtcttatcactgattgcggcctacctgacgcgctggccgcgggaatacggcgccacacgctcagaaacggaggcccaacggattctggttatgtttatcctgtcaatgacgcctctttcctctggctgaaatcgctgcttccggggtgtatttcttccctcgtgccggacggtgagagggatgtaagcaatctggtttcctccgctcgccattccggcgggaaaatacgtttggcatggcgagacgggcaactcatgctgggtccgagataa

SEQ ID NO: 104881 - DNA, 2088 bp, Enterobacter aerogenes
atgagcgaaattccctggtatcttggtcaatatgaccgcagaaattatcagtcctaccttaaagccgtcgcgcaggaaaccccgaatggctggcgtacgatcgattctaagaagttatttcctcgaacgggagaagttgaatttaacgatactgacgaattacggcttcgtaaaggcgaatgggccgcttttcaggtgggtcctggcccccgccgaaaggtgcaggcgaaacgctcccgtcgtatttatccctattacgatttatctttcgggcagtctctattggaagcacgtcgcctattgagtttcgagggcataacggtaggcggcgaaccagggctatgggctatccgcttcgggtcggatgcgcttattctggttaatctggcagaatcgaaatccgggggccttatcctgtccagaaaccagaacgtttacgaatatgatttcaacgaaaacggcgtaattatcgtatccgacatgtctgagagtggaaaagcgttttatatgcctgatgtcggtgcttcgcctgctcagatccatgactggacgccagataagcagtacattgaaaacgtcattcagcgtctttcctgcgctaactcaacagcaatggtcgctgaatggcttcagaaatatgccgacgaacaaaccggaaaattaacctccggcatcaacgacatgctgaccgccgctcaaacactccgggcaggagagttggcgaagacgttggaggaggaggattctctagcccgtcagttcgctgaagcggcattgaaggaccataatatcgccgacctgctcgaacgacagatacaaaatatcgcggaagaagagcgagtagcattacgcgccgaacaccataagttgctcgataacgagttttctgctgaacgccagcgacgtcgtgaagctgttgaaacggaaatagccgcttttgagaaaacaaggaaaaacgagttcgaagaggagatcgcgcaattacggcagctcgaacaagaaaaattacacattgattttacagaaaagcaagcagacatagaacgaacacttaaacaggaaaaagcggatcttgaaagtgaaattaatcgtctgaaagacgctaactctgatttatgcgctcagaacgaaagacagcgtcaaatactggcttccctgacctgcgagcgtgaagtgtgtttggcatctttaacagatgtcgaagaacgtaccgcccaagcacaaattgaactcgaaaaaataaatatcgccattgctgagaagactcgtcgtatgacttattcagcgctccccgaagttcgtctcccggcacaagcgagagttgtatcctgcgaagaattcggtcatatcgtcagagagaacaagttgctgacgcctgacggaaagatactcatgacgcaatttctggcgttgatgttggcaggagaatgtccattgttatctggtcctgaaacgccggacttccttgctattgccgaatcgctaatttcctcaggccgctccatccgacagatcgccgatccaacgatgatttcctgcgaagatctttgggttcgtgcaggaaataatatggcgacgccgctttatcaggggttattgttgagcgaggcctcttgtccacgaacgattctcgccatcattgaacgtgtcgaatgttccgctgcacgtttctggctgccagcgctgaaaggccgattacacggcggcgatttgcccagacgatttctgatttgcggcaccattgaaaacgaagattgtgaagaagcggagaaaatgaaggaacaacatcttcgcctgcggatggaaaacgtcgtcattcagaatgcgattgcgctgtcccctttgcatctttcctcagaaaatcatagtgaactggatcctggcgtagcatcgcaaggttcgctaccggatcaactcgctatctcggataaaatgtcagccggacgtttggatctggcaaataccctacgggcgatgcgaacggcacatgaagtcgcgccgttcgacgatgaaaacaaagcgacacatcagaagcggttaatcgacttatacgccgatttacagaataacgagctatgcgcccaatag

SEQ ID NO: 104882 - DNA, 5841 bp, Enterobacter aerogenes
atgttagatcccattggtggttttcgccgcattcaggacttcttcgtttcatatatagaaactaacttccgcatcgctgatccttctgttgcgacagcgagacgcgagttgcttaacagtagtggggagtttgccgcagagccttatattgaacctgtcttacggtatgaatcttcaaataaaaccctcgaagatctggctgatatggatggtggaccgctgaatagcctgtctcctgaaggtcgaaaggcgtttgttgaactagcgttgtccggcctgttcgattccaagcccggcgatgcggcttggccgcgtcagtcagttcatgcgccgtatagccaccagactcaaatgctggagcgcggcattcgtcccggttgcccaagcattgtgacatcaggaacaggttcgggaaaaacggaaagctttatgttgcctatcctggccgcattatcgaatgaggccgtccgttgggcccgacctggcggcggctatctgcaaaaccgatggtggaatagctcagaaacgaactgggtttctcgtcgcgaaggcgaagaacgcccagctgcggtcagggcactggtgctttatccgatgaacgctttggttgaagatcaaatggcgcgtttgcgtaaaacgctggattctgctgacgcacgacaggttatggaggatcgtttcgccggaaacaggatcttcttcgggcaatatactagcgccactccggttaccggctacgccagccatccccgtctctccaaaattagttcagaaaaaagccgtcgcgttcgtaatcttgagaaattacgtaaggcgttgaacagaattgatagtgatcaacaagcagcacgcgcattcgacgaaaaagaaaatccttcggaaaagacccgatatatattcccttcagcggacggcggagagatggtttctcgctgggatatgcagtccgccccgcctgatgttctcgtcactaacgcctcaatgctgggagcaatgctttcgcgtgaagtcgaagacaagatttttagcgctacgcatgactggctcatgaacaatgatgacgcatacttctatctggtattcgacgaattgcatttaatgcgaggttccgctggcacagaaaccgctatgctgattaagtctttgattattcggctcgggctggatgatccgaaacaccgctacaaattgcgtttactggcatcttcagcatcgctgccgatggatggcgcggatggagagcaatcccggaaatacctgcgtgatctctttgcgcccttcggcacttgctgccatgcactggatcccggcagcgataagccggatttctggcataactgcgtcattcagggaaaacccttcatacctttgaagccgtcagggaaaatccccgtgcggccttttgccgcattaatgcgcgccgcccttgcagaccagggcaatgtcgtccgcaatctggatatgacggaagctctaaatcaggcgttacttgatgtcttccaagctcttggcgtaaaagagcaaaatatcaaacagggcataaaacaggcagcggaaatcgctgctgcgttattgacaaacgcctgtattgaaaatgacggcgaaatgccacgggcgatgccgccaggacttatcatcgataaagtcttcttgaaggaggagccaagtaaaccgagtgagtcagaactggcattacgcggattaatgctgacgcgcgcgctgccggagtccgggatagattgcgataagccaaccaatgttacaccagcctttcgcgtgcatactttcgttagaaatattgaaggtttcttcgcttccgtatcatcgggagagagaaaggcaaaattcgccgatttttgccttgagcgaggcttgtcgcacgcgccatcaactctagacggaaaacgcggtcgccgtctgttcgaaatgttgtactgcgaagcgtgcggcgagttactgctcggtggtcagaagggacaaaatgaaggctcgacgatagagctattgccttcagcgactaatctggaaaatcttccggaacgccccggctcagaatattacgatgatatgacactggatgagtttgcggttttctggcctgtcgatgtagttgataaaaatccagcaggcagcgaaaaaggttgggatgtatgggaaaaggcgacgcttaatcctgttaccggaattgtgactgtcggacaagactcatcggcggcaaatgccgattcggttcgcggatatctctattttcagaagccggccccgagcaaaaaaggcgaaccggcgaaaaaaccttccgcgcaacctttttgttgccctaattgcggtatcgattattccagtcgaccagccagcaatcgttccagaacacccattcgcgcatttcgtactggtgtgactaagtcatcccagctggtggcgacagagttatttgaattgctacatgcgatcggcgcggaggccaagagtattgttttttccgatagtcgacaggatgcagcatcgatggcgctggaaatcgaacgattgcatttacgcgacctgcgaagggaaattttggtcgcagccgccagagaaatgctccgagaggctgaaagcgagtatatttctgaagacagtattaatgaaaaaatggatttagccctacaagccaaagacatggatacgtttggtaaattatatgaactcaaaaaaaaccaagctgatattgctgacttatgtaagtacaggcgagtaaaaattgataaattgctggaaccagaaggcgattctatcggaaaaatatcgtccgatttggcaggactgggaatatcaccttataaatatcgcccatgctctgatggggatgacagcgacgtctggcacgccaattttacaaaagacaagaacatcgttaaatatcatgagaaactttcttcatctgaccgattggtactcaaaaaaaagatatttgatacccagtccgaattaattgatgatgtcattttcgccaacaccttcttcgcgctggaagagacgggattagcatatccgtgtgtttcagatagagaggatacgagcgagctcgatgcctggctaagggtattcgctggtgtttatcgcgtcaaagaaaataaatattttgatcccgaaaactctgtcgaatggaaaacagggaaagatgttaccaaagaaaaagtaaaacgtattgctaaagctttatttggtgaaaaaaattatctggataatttaacacaaatcttagatcaattcgcaacccgagggcatttagctggtttattcaatatcggtaaactattcctcaaggtagccaaaccaggcgatccttattggcaatgcagcaactgtgaacggatccacttacatttagggtttaaacgttgtacccgttgcacggaactgcttgatatcaagcccaggggtgtcgttgaaacgctatgggaagacaattttcttggcaaacgtatagtgcgaggcgaacgcgatggcgttaaacgcttccggttgaacgtcgaggagttgacgggacagacagatgatttctccgatcgactacgcaaattcaaggggatcttcgtcgatgagatgagcgagcttgaaaaacttgatgcggaaatcgatatgctcgccgtcaccacgacgatggaggtcggtattgatataggttcgcttcagtcagtttatcaggccaacatgccgccccaacgatttaattatcagcaacgtgtcggtcgtgccggacggcgcggccaggcattttcttttgtgatcacattctgtcgtggacgtactcacgatgcttattattttgcccatcctcatgcgatcactggcgatccgccccctccgcctttcctagcggtcgatcacgacgctattcccaaaagacttttgcggaaaatctggcttaagagcgcctttaactatttgcgcgaagaatgtcacaaaaacaaaacgactttccctggcgataagctcgttccgcctgatgttcatggcgaatatgtttcaacgcatgattactaccatgatgataaagcgaactgggccaaactattgtatcgcgcgctaaaagcaaatcaggacatacgagaacgctttattgatgcagcaacctttgatcccgatcagcgccgacgcctttattccgaaattaacgccgaaaaaataattgaagaaattggaaaactagggccttctgcgcctgatgacaacacgggacttgctcgctttctggccgagcgaggtctgttgccgatgtatggaatgccgactcgggtacgtaacctttatctggggctgcgcaaaacaaaagggctaaatggtcagactgaatacgaatggtcaacaatggaccgcgatcttgatcttgcggtttttgagtatgctcctggttcggtattaattaaggataaaaaaaagcatcaggtgatcggtttcacaggtaattaccgagaacctcaacttcgcgacaatcgagtttctgatctctcaactgcatgttcatgggatgaatcgagccactacattgcaacttgccagtcatgcggctccgcaaaacttgaacaaaataaacctgttaaaatgattaattgcgaggattgcgacacacctataagttcagatgaattcgagctttatattactcctgccgctttccgtacggatttcgagccaaaagatgacatggacagcttcactcgtatgtcgttaaaaactacggcaaccgtattgcataagggtatcccggaaaattgtggaccttttaaagtacggcgcggcggcgttactattttgcgtcttaataatgggccgattaacggagagaaggaaggcgaacgttttactgttgatttagcgacggaccaaaaggcaccgattccattagctacctactactcgcccattaaaggggagcaagcgattgattcaaactgggccggattacgcaataactttagatggcggtgttctggcgaaaagcaaaagtttggacttgtatcaagcaaagagactgagtcgcttcacctagaattaatgcattttgatgctcgccttaatctgaatatgatcgccagatacggcgaatatatgaatttgcctacacgcgcggcggctgttagtgcaacacagatattgacgcataaggctgcgctctatctggatgtttcgccagatgaattcgaaacccttgagccccgactacatcatgagaaacctatattgcaaatcgcagatgcgttgatcaacggttcagggttatgccgacggcttgccgagccaaccgtcgttggggccccgcctttgatagtcacattattacatgagattctggaggataagcgcgcctggccaatggttgattttcttaagaaggatcatccagctcagtgtcaaacagcctgttacaagtgcatacagcgctatggtaaccgccgatatcacggtttacttgactggcgtttaggaatggcatatttacgatcaatggttatgcctgaatttgcctgcggtttgaacgatgatgactggagttatcctgaaatggtagggtggcgagacagagcatttgagctggcggaagacgtcgcggctttaaggccaggaacaatcaaattatcaaaagagtactcattaccggttcttactgaaattcaggatggaaaagagctctggcgcgcagccgttacgcatcccctttggcaatggagagaacctgagcgaaacgctctgattgacaccctgggactagctgatgggagatcttcgctgcgattcatcgatacatttgagctggaaaggcggccattgcgcgcgcttgccaatcttaaacggaattaa

SEQ ID NO: 104883 - DNA, 834 bp, Enterobacter aerogenes
atgcatatttttgataataacggcaccgaactgaacgcagagtgctcagtcgatgaagaggatggagtttatggactaatccttgagtcttggggaccagcgcacagaaacaaagactacaatattgccctagattgtatcattgagcgactgattgattctaatattgaaaatgtcgttgtgtaccttgcctcatcgacagccagaaaacatatgccgtccatagctgaaagaaaaatccatcctgatgagtacttccctttagtgggtagtagtactcaggatattcgcaaagtaatgtgtagttatcaggctcatttcagtcgtacaggtagaaaagaagttccttccggtaacaggactaaacgaataataataagtgttcccaaagtcaacaatgacaaattttgggaacctataatacatggagaatcatcagaactctttcaaccaacagttgacgatagtgttctgaatacaagagttagtagattaataaaaaaaaatttgaacgagcccaaaggatgtaaagcaccagaggcggtagagcgacttcaaaaggcctatattagagatcctatggtgaaagcatggatcttgcagcagagtaaaggtatttgtgaaaactgtggttcaaaggcaccattttatttaaatgatggtagtccgtatcttgaagtacatcacgtgatacctctatcttcagcaggtgctgataccataagcaacagtgttgccctttgtcctaattgccatagagccttacattacagtcacaatgcaaaagaactaattgaggcactttacattaatatcgataggttacagaagtga

SEQ ID NO: 104884 - DNA, 933 bp, Enterobacter aerogenes
atgtatagagcatggggggattttgtcgtttccagcatatgtacggaactcgtagataacaaatgccgcaatcttaaaagctttttgaaacagccagcaactccaagagttaaagaaaaagaatctctaatcgataaagcctttcatagacgtgaaaagtcatatgaagacccttataaggaaattgaggataaagttggtgttagatttgttgtattgcttacatcagatatagatgatgtatgcgatgtaataaaaagaagtgataaatggatttataagacatcaaggcattacgacgaagaacggctaaatacgccgttaatctttacatatcaatctgtccattttatcgtgacagcaaaacgatcatttgatcataatggagtattcattgaggaaggcattccttgtgaaatacaggtgagaactctattgcagcatgcttatgcagaattgacgcatgacgctatttataaagctaaaactatcgttgaacctgatatacatagaacggtagcaagaagtatggcattaattgaaacaactgatgattttttttgttcggttgcgaaagccctaaataattcacctgatgcctatacaggagctcagaaaactctcgaccaactttacatgaccttgataaaagaaaagcctaacaatcagaaatcagctatattaatattggataccttcaaaaaagtccttggcgatgacattataagaaatttatataaatttgttgaagatatgccagagctggaatcattgatccgtgatggtaaaactaaaagcagtttctatgaacagagtattatcattttcgtatattggctgattaaaagacgcaaaaatattttacagaaggaatggccgttagaatggaaaatcatacaaaaacttgttttacatcttcctgtttatctgtaa

SEQ ID NO: 104885 - DNA, 1092 bp, Enterobacter aerogenes
atgaatattagtaagttgagcatcgataaaataattatacatcaagttcaccagcgagatgaagaaggtttaaaagttgagcctacacgtggttcgtcttttataaaatttgatgaagaggccttgcagggctttaaatctcgggtaatagacgctttaggtgatggatcaaaagccgtcaagatgaaaattatagaacacggcgaaggatatgtgccttttatagcaaccaatttatttggtaaagaaggtgatgaatacatcgatgaaacttataatattgcaaaaaagttagctgatgcccaaacaagaagagccatacccggaggcattgttgttatatttacaggtgactatggtgtaaataaaagaaaattcatcggaataattaaagctgacatatacagtgcatacgagaaaattattgattcaaatactggtaatatttctttaaaatttgttgaggaaatacttcttacaccttcaacaaaactctataagacagcaggtttttttcaatcaactaatattactgaaaaagatgatttgaacaaatcatgggatattatgatctctgattatcaaataagtaaagctgatggtaaagctgcggctcagtatttttatcaacattttttaggctgtggatatcctgaaacaagtgcacgcacaacaaaaaatttctatgagaaaaccagtgattttctaaatgaacttgatataagctcagaaaaaagaaatgacttgaaaaatgcattagttacttatttaaagcatgaaaaatctgatgttatttcagcaagagaatatgcagatagatttttcgacgatgaggttaaagacatttatcttgaatatgcaagcgaatgtggaattccgcagacatcatttacaagggataatgaacatatcgaaagtaaattaaaaacaagaaagctaaattttagcaaaaacataaaaatcacggctccagcagaagtttttaagaatcatgtagttattgaatctgccacgggtgatctagataaggatggaaaacctgcagaatggacaactattcttattaaagataaaataatacttcaagaataa

SEQ ID NO: 104886 - DNA, 1038 bp, Enterobacter aerogenes
atgatgaaaaagtttttccgttcaatcccagttgtattctggttaagtgttatcttgtttctaaccgttgtgtttggtctgacatattccagaaagcatccacatacagatctattgatgttaatgatatttgtaaatatgtcattaatatcggcatatattatttttatcttctcttcgtcaacctttgctagtgcagagaaagaacgtctcagaggcacatttcccggacgaaaaggtaaactgaaaggaattattagagcttcgagtacgttaattgttatgttttttatcgcggcagcaacggcgattttaggtgttggttttaagtatggagtcttcctgcttggaattccagcgatttgttttctgttgctattttataattattatttattatgcacttcaagattgaaagaaaataccgttaaaaaaattaatcgggttcttttaatactttgttcagctatattgtttatttcaaaaatgtttacaaatggttttgttaatgagttttttgatattggcattgctaaagttgcttatgttggatgggctttttcgattttattttccatcccgttttttgtaattgcttcctattttagctgtatggttataggggcggtaactgattcattgcgggttaaaaaaataaaaataccttcggtggtacataattcaattctttgtctgtcaggggttttttttactatcggctatacttcttattttattagcgctggtgggttgtttaatgctgtggcgaaagaagtttaccgttatgataccagaagttcctttcaatgtaataataaatactggattgtccctgaattaggtagagatgcccgatatctcatggatacaccgaataattatagagcgatatatattgaaaataactctgttcatgtggccgctgtggtgtgtaagaaagatggcggttatactcattatgcaattgaaagtgcggaagatataataaaaaaacaggctcccaaagaagccagtctgtcaccacatggtgggcgttga

SEQ ID NO: 104887 - DNA, 1362 bp, Enterobacter aerogenes
atgtcctataattcagttaaatgcgaagctgtcattcaagtagaacatattacaaaaatttttcgcatctacaacactccaaaggatcggataaaagaattcctggaaaatttaccacgccgagttgttggggcaaagcgtataaagaaacataaagaattctattcgcttaatgatgtctccttaactattaataaaggagagacaatagggatcattggtgccaacggcgcaggtaaatcaactctattgcaaattatttgtgggacgttgtcgccaacgaatggcaatgtaactgtgcatggtagagttgctgctctgttagaacttggggctgggtttaaccctgatttcacaggtagagaaaatatttttatctcagcatcaataatgggactaactgacgagcaaataaaagaacgtttcgacagtatcgttgagttttccgaaattggggagtttattgagcaaccggtaaaaacatattctagtggtatgtttgtacgattagcgttttcaattatcgctcacgttgatgcagatatcttaattgtagatgaagcgctttcggttggtgatgcgttctttgtccaaaaatgtatgcgttttctacgggcatttatggaacatggtactgtgctcttcgttagccatgataccgcttcaattgtaaacttatgcgatcgtgctatctggattgatcatgggcagaagaagatggaagggtcagcgaaagatgtctcggaagcttatcttgctgcattatttaaacagagtaacaggaatgtatccgtcaagcgtcaaaataaggatattatcgaggttgtagcttataaagatatgcgtactagttttattaatgctagtaatttacgtaatgatatagaactgttttcgtttaatgatgaaagtaaacagtttggcgagaatggcgcagagatctatagtgtaaggctagaggatcaaaacggtgaacctttatcatgggtagttggtggggaagaagttaagcttagaataagtgttaagtgcttgaaaagtatgtttagcccaataatcggtttctatataaaagaccgacttggacaaacgctatttggtgataatacatacctttcttatatggatacaccactcagtatgcaacctaatgacaatatggatagcattttcgagtttaacatgccaatacttccagtcggtgaatatagtatttgcgtcgcagttgcagaaggtagtcagcaagaacatattcaacatcactggatacatgatgcggtaatttttaaatcgcattcttccagtacggtgactgggctagtcggtattccaatgaaaaacattagtatctcggtgaattaa

SEQ ID NO: 104888 - DNA, 789 bp, Enterobacter aerogenes
atgctgaagtatttcttgaaaaacaaaaacctcatattaaaactggcgaaaagagatatcgattccaaatataagggatcttttatcggtggtttttgggcaattgttaacccagtaataatgttatgtgtctattcatttgtattttcagaagtcttcaaggctaaatggggtagtttagaaggagggaaagggaccttcgcagtagttttgtttgctggattgattatattcaatttcttagcagaatgtttaagtcgaggaccgacattatttaccagtaatgtaaattatgttaagaaagttgtttttccacttggctgtcttccatttagcatttttctttcggcagtgtttaatttcttaataagtttcatgattttgttcattgctcaactcattgtcttcaattcagtgccttggacaattttgttctttccattgttgttgattcctttgtttcttatcggtttttccttgattgttattttttcaaccattggcgtttattttcgagatatagctcaggctgtgccgattattataacgtttctgatgtttttatctccgatattttatccgttaagcgcaatccctaaaagttttcaggatgttatgatgtacaacccgctggcatttttaatagaaaatacacgggatgtattaatctttggcaaaaatatgccaattgaatcctatttaattatgtatatatcgagcattatattttacattatcgcaatgaaagtattccagaaagctaaaaaaggttttgcagatgtcctataa

SEQ ID NO: 104889 - DNA, 558 bp, Enterobacter aerogenes
atgaatattattaagaccgagattcctgacgtactgatttttgaaccgcgggtctttggcgatgcgcgaggatatttttttgaaagcttcagcagtaaggtttttgatgaagctgtcggacgtaaagtcgagttcgtgcaggacaatcactctcagtcgcagaaaggggtgttacgaggcctgcattaccagttggacccgcatgcgcagggcaaactggtgcgttgtgtggaaggcgaagtgtttgacgtggcggtagatattcgccgcagctcaccgacctttggtaaatgggtcggggtggtgctgagcgcagaaaataaacgccagttgtggatcccggaaggctttgcgcatggctttatggccctgagtgagacggtgcagtttgtctataaagcaaccaactactatgcgccacagtctgagcgcagcattatctggaacgatccggaaattgggattcagtggccagccctgaatggttgcgaggtgtcgctgtcggagaaagatttgcaggcgcacacactggccaccgcggaagtgtatatcaagtga

SEQ ID NO: 104890 - DNA, 891 bp, Enterobacter aerogenes
atgaaaattttactgattggtaagaacgggcaggtaggctgggagctccaacgttcactgtctacgctgggagaggtggtggcggttgactacttcgatgcggaattgtgcggtgacctgaccaatctcgaaggtattgctcagaccgtccgccaggtgaaaccggatgtgattgtgaatgcagcggcgcataccgctgttgataaagcggaaagcgagcgcgagctgtctgatctgctgaatgaccggggcgtagctgtgctggcagaagagtcagcgaagctgggggctctgatggtacattactccaccgactacgtgttcgacggggaggggagtcactatcgtcaggaagatgaggccaccgggccattgaatgtctacggtgaaaccaaacgtgccggtgagctggcgttgcagcagggtaacccgcgtcatctaattttccgcaccagctgggtgtacgccacccgcggggcgaactttgccaaaaccatgctgcgactagcggctgagaaggagactctgtcgatcattgacgatcaacatggtgcacctaccggggcagagctgttggcggactgcacggcgatagccattcgtgaagaaatgcgtaataagtcggtagccggaacttatcacctggtggccagcggcgagaccagctggtgcggctacgcccgctatgtgtttgaggtggcaagagcgcacggtgccgagctggcggttcaggaagtgaagggtattccgacgacggcctatccgacgccagcgaagcgtccgcttaactcgcgcctgtcgaatgagaaattccagcaggtgtttggtgtgaggctcccggactggcgtcagggtgttgagcgtgtagtgaccgaagtgttgggcaagtaa

SEQ ID NO: 104891 - DNA, 870 bp, Enterobacter aerogenes
atgaaaggtattgttctggctggcggctccggcacccgcttatatcccatcactcagggcgtgtctaaacagctgctgccgatttacgacaagccgatgatctattatccagtatccgttctgatgctggccgggatccgcgatattctgatcattaccaccccggaagatatgccggcattccagcgtctgctgggtgacggttcacagttcggggtgaacttcagttacgccattcagccatccccggatggtctggcgcaggcctttattatcggtgaagagttcatcggtaacgacgcctgtgcgttggtgctgggcgacaacatctatttcggtcagagttttggccggaaactggatgcggcggccagcaaaacgtctggtgccaccgtgtttggctatcaagtactcgacccggaacgtttcggcgtggtggagttcgatgagcacttcagagcgctgtcgattgaagaaaaaccgctgaaacctaaatctgactgggcggtgaccggcctgtatttctacgacaacgacgtggtggagatggcgaaagccgtcaaaccgtctgcgcgcggtgagttggaaatcaccaccctgaaccagatgtatctggagcgcggcgatctgcaggtggaatcgctgggacgtggttttgcctggctggatacaggaacacatgacagcctgattgaggcctcacagttcattcataccatcgagaaacgtcaggggatgaaggtcgcctgtctggaagagatcgctttccgtaaccagtggctgtctgcggaaggagtggcggcgcaggccgaaaagttaaagaaaaccgaatatggcgcttatctgcagcgtctgctcagcgaacgctaa

SEQ ID NO: 104892 - DNA, 390 bp, Enterobacter aerogenes
ttgtatgttgaagaccatgcccgggcgctgtataaggtagcgactgaaggccggaacggtgaaacctacaatattggcggtcataacgagcgtaaaaatatcgatgtggtccgtacgatttgcagcatcctggacaagttggtggagcagaagccgggcaatatcagccactttgctgacctgatcacctttgtgaaggaccgtccgggtcacgacctgcgctatgcgatcgatgctgcaaaaattgagcgtgaccttggctgggtaccgcaggagacctttgaaagcgggatcgagaaaaccgttcattggtatctgaacaacactacctggtggcagcgcgtgctggacggctcgtatgccggtgaacgtcttggcctgaataactga

SEQ ID NO: 104893 - DNA, 645 bp, Enterobacter aerogenes
atgtttgctgattttggtgtcgtgaatttctggacgtacctgcttggtgcaacgctgatagtccttgtacctggccctgaaaccatgttcgtgattaaaacgagcattaccagcggcatcaagcggggctttgctgcaatattttccattctgctgagcgacgttattctggttctgctggcatggtgtgggctggcggcggtcataagctcaactcctgccttgtttaacgccatcaagtacgcaggcgctgcttatcttttctatctcggtgtccagacaatacgcgctatcttcaagccagctgtcgaaacgagtgaggaaaagaaagcttcagctgatgccggggggatcatcggacgcggaatgttggttacgctattgaatccaaagacgctgctgttctatatctctttcttcgcccagttcattaatgttcaggctgaacactcctggatggcttttatcattctggcagcagtaatgttcgcaattactctcgtttatttcggctttctcgttttctgcggctcttatctgctcagccgtcttaaaggcaaccgtaggttatctgccataggaaatgcgctggtagggatgttcttcattggatttgcagcacgtctcgcaagcgcaacttcttga

SEQ ID NO: 104894 - DNA, 711 bp, Enterobacter aerogenes
atgagcttgccggataacctagagaacctccctgttgtactcattccaggatttatgcttgatgaaacattatgggacgattttatcgctgcatttcccgatagtagacgctttattcctgtgagcctgaatgggggaacaacaatccaggatattgccgccaacatagcccagaaactacctgagcgttttgttctggcaggtttttcgttgggtggctacgtagccagagctatttatgaagcttttccggaacggacagcggctatgattctcattgctacctctctcagagaagattcaccagagcagaaaaaaacacgcatagcgactgcggttactcattcctccagagcattcagtggactgagcaccatggcaattagaaagtcgcttcacgctgatcttgccgataatacgccccttattgatagaatccgtgacatgggaaaaaggctgggagcacatgcattcagtgtccagtcagggctaaaccgtgagcgaataacgttaaaaccagtttcatgcccgacctatgtcattgcagctgaacatgaccggctgcgttcaaaagaggaggcagaagaactggccaagctaaccggcacctgtgctgtttatattgacggctgtgggcatcttattcctctggagaaaccgtatgaattggcccaactcatgtacgtatggctcaataaaaaagacctttga

SEQ ID NO: 104895 - DNA, 1284 bp, Enterobacter aerogenes
atgattggtgataacgagcgaagtgatttgcagttaccttgcgattggtttaacatcctcggtttgcatcttgtgagagctacggacttagcgcttcatattccggagtatgcaccagtagcacagcaggcttttaagtcagatcttaacggagaacttacttttggccttataacgaagaaaaatttgagtcaaatttgtaatttttctcccgaaaagcttaagctattctcttctagtccctatcaaattggttataatcttgcaggacccttgcttactgcatttgctgaatggcttagaaaactcgctgcaaaagacggtgtgcaggacttatattttcttgcgagagaagggaaaatcattaaaagagtttatgatctttggtgtgatggagcggaaactacaccccaaagtcattatctgatactgtctcgtcgtgcggttaacgtaccaaatgtaacaacattggatgatgtactgaatatagctaagtcgactttctttgctaatacgctcgagatgtttttacgtgaacgttacggattaactcttccggaaggaaaactatcttctttatactcctctgggctatgggctaaaggaaaattagtggaggttcataatgaagatatttctgaaatcaaaccattactggagtatcttctctcagatatccttgctgaagcacatgctgaaaaacagggcttattacaataccttcagcaagaaggatttataaattcggctcacaaaacagttgttgatgttggatattccggtacgatccagaaatcactaattaatatcgtaactgacagggttgatggttattatatggcaacatctgaagttgcaggaaagggattgaaaaacggaagtgaggcacatggttgttttattgacaactctgtctccctgcagaatgataattcattaattttgcgtcatagtttcgtactagagaaattgttgagctcggatgatacccaaattgttaaatatattctggaaaacgcgaccgttacaccagtatataaacaacagcgtccagaagagcttataacaaaagacatcagaactgagttacaaaaaggctgcatggattttgttcgtgatgccagagatatacgaaatacactttatccagaattctcgccttcattaacaatagctgattctttatatagtgaattcatttcaagttgcaatcgaaaagaaaatgacttcgtgaaaaaaatgaccttagatgatgattattgtggtcgtggtttagtaaattaa

SEQ ID NO: 104896 - DNA, 1281 bp, Enterobacter aerogenes
  misc_feature (1107)..(1116): n is a, c, g, or t
atgccatttaagtttgatgtttacatttcagtaacaaacgaagaagccaaacaacaatgcaatctgcaatttaagaagattaaaaatatcgaagatctcgatgtgcgagtagtacctaatcgcggtcgtgatattgctccagtattcgctgagtttggttccgtcttaaaacaatatgatttcgtttgtcatattcaaagtaaaaagtcattatataatgagggtaaaacaactggttggcgtgagtatttgctgaacggtttattcggttctgaatcaaacgtcaaacggatattcaaagcttttaatgacgataaaaaattagggattgtttacccacaggtccatcatacattaccttatatggcgtttacctggctagccaacaaacagcaaggcagtgaactttgcgcaaaaatgggaatagcctgtcctgagggatatttcaatttccccgcaggttcaatgttttgggcccgtgtagatgctttggccccgttgtttaacatgaatttatcgtggcaagattttcctgaagaaaaggggcagactgatggaacaacagcacatgcgattgaacgtttgttaggcatagttcctcaggcattaaattatagttcattaatcatcaaagactgcgagtatgagtcaaaatccactttccgctgggatcatcaatatttccccagaacgttagagtcgattcatcaaataatttctgagccgagcaaaaaaattattgcttttgatatttttgataccttattgattcgtcctttacttcatcctgaccatacaaaacagattattgccagccaattgtctgctgaggaagcgtccgagtatctgtctaaaaggcctgcagcagagcagagtgcaaggcaccgcgctgggcgggatatcagtattgatgatatctataatgaattgcagcaacattatcaggttgaacactcagtcgcccaaaagtttcgtgaactcgaagaacgggttgaaattgcttctgtttcggctcggccggatatgttggaaatttttgagtttgttaaaaagagtggtaaaaaaatcgctattgtcagcgatatgtttttgccgcttgaaactatnnnnnnnnnnatatgtttttaccgcttgaaactatcgttaatatgctcgaatctaatggttttaccggatgggataaaatttatttatcatcagataaaggtaaaagaaaggatacgggtgaactgtatgagctccttcttgccgaatatggtgtttctggtaatgaagttgtga

SEQ ID NO: 104897 - DNA, 357 bp, Enterobacter aerogenes
atggaaaaaaaagatataattgatgaattacataaggttgaaaaacatgttggtatgttactacctcatggatataaaaagtttataatagagaacgtaaaagatactgatgcttatgaatttcagagagcaaatggagaacatttctatgttttcaattgtattgatttacttgagcgaaatttgacttatactatccaggatgttgaacctgattatttgttgattggccaagatggtgatttagggtactttataaacttgcgaaaaggaacagatgagatctactctttggaccttggtgcgctaggtagttttgccatggataaagaaggcgacagtatattgatgctatga

SEQ ID NO: 104898 - DNA, 141 bp, Enterobacter aerogenes
atgcgaatgaatttacaacacaccttatggaaacatggtcacactccttatgctattcgactctggattgaagaaggtgatatttcaatgcttgaacgtgaagcagctttcttaaccactctggctaaaggtgaatattaa

SEQ ID NO: 104899 - DNA, 303 bp, Enterobacter aerogenes
atgtacaaaaacaaattaactgttggtacagctaaggctgctattaccaaacaaaaacaagagctagtaggtgtactgtcttatgtgatgaacaaaggcaatatgacaagagctgaagcagctcgttcactgaatatagatgctcataattttggtgcttatatgcgtgatacatcgcgtgtaagccttaagacacttaaacgttttcttgtcgaacttgatgaaattgtagaagacatgaagcgcacatcatataacgaagataaagaggcaattattaaaagcctcaaggagaataaataa

SEQ ID NO: 104900 - DNA, 936 bp, Enterobacter aerogenes
atggctcagcaccactggccgacctggggcaacgaaaacgtggtcaacctacttaagagccagcgtgacctgtaccgttacattaacgatcagaccctgcgtatggctaacgaagggctgacccgcgatgaaatcgccgctaaattcaaactgccggatagccttgccaacacctgggctaaccgcggttactacggctctgttagccacgacgtgaaagccacctacgtgctgtatctcggctggttcgacggcaacccggccaccctcgacgaactgccgccggaagaagcggcgaagaaattcgtcgattacatgggcggcgccgatgccatcatgaagaaagcgaaagaggattacgaccagggtaactatcgttgggtagctcaggtggtcagtaaaatcgtcttcgccgatccgaaaaaccaggatgcgcgtaatctggaagcagatgcccttgaacagttaggctatcaggcggaatccggcccgtggcgtaacttctacctcaccggcgcgcaggagttgcgtaacggcgtggtgaaaggaccaaccccgaacaccgccagcccggataccgtgcgcgcgatgaccccggaaatgttcttcgactatctggcggtacatatcaatggcgagaaagcgggtaacgcgaaatcggtctttaatatcgatctcggcagcgacggcggcaagtataaactggagctggaaaacggcgtactgaaccataccgccaacgcggaagcgaaagatgccgataccactattgccctcaaccgcgccaccctgaataagatcatcctcaaagaggagacgctgaagcaggccgtcgataaaggtgacgcgaaaatcaccggtaacgccgataagctcaatgaaatgctgggctatatggacaagttcgaattctggttcgacatcgttacgccataa

SEQ ID NO: 104901 - DNA, 174 bp, Enterobacter aerogenes
atgttaatgtggtctctgaaggtggcatgtacactctcgttcttcgttgtcgtcaagctaccactgaaggtagtaatacgaaagtttcgcaaaactatttttcctatgcaattcacactggtgatattattagacgtacaaatatgtgtgcctaattataatatttataaataa

SEQ ID NO: 104902 - DNA, 705 bp, Enterobacter aerogenes
atgtttagctttatcagatgggaagatgttaagccaacagacaatattattgctgctgtagactttggttattcagggttaagagatagctctacaatcgtctatgcaatgcatgataaagaaacagatgtggttcacatcatcgatgcctggttctctagtcaagagcactcaacaaatccactatcacacatgcctgataacatggctaaggtgataaagagttgtccatatccaaacatccctgttatctgtcctaatgatgcttcaggtattattcagggaaccactaagacacgagcacaagtgttacgtgataacggatgcaatgtttattacgagaactatcatcttccttatcagctaacctctgatacaaagaaaagcacgtcaaagattggtggtcttcagtatcttgttgattggttcagtaaagggctattgaaggttaatttaagaagtgttagtagtggcctgaatgaacttcacaaagaaatcaggggatatgtctggaaggataataaaggctctggaaagcttgaaccaatagataagaatgatcatggcattgatgctatgcgttatgcagctactacagtgaagtggtttggtcagatggcttctacatgtatcaataattcttccaatgatgttagtagtgttaacgataatttgaacagacgttggctggaagcctacggataa

SEQ ID NO: 104903 - DNA, 135 bp, Enterobacter aerogenes
atgacaactaagtcatatgatgatgaaagccactccatcaagctgtcaaatctcttattcatcaataattctgaaggatttggcggaatcatacctcgactaatgaaatcaatatttgcgctactaattttctga

SEQ ID NO: 104904 - DNA, 255 bp, Enterobacter aerogenes
atgtcaaaccactctgcgttgagcctggagggcgttgcgcctgccataaatgaagagttagtgtggaagaaagtcgtccgccgcacgctgcccttattaatgatttgctatattctggcctatcttgaccggatcaacgtcagtatcgctaaattacaaatgtcgagcgatctggcattttccgacaccgtttacggtatcggtgcggaatatttttcatcggttttttcttttttgaaattcccagtaatatga

SEQ ID NO: 104905 - DNA, 660 bp, Enterobacter aerogenes
atgagtgaacttattacggcttacatatattcattttccgtatatcaatttcctatagttgttaatatttctaagaaagatgctgcagtttataaagggctcgttaattataagtttttaaagaaagtacttcgagattcaaaagaatccatacttaatatttattctttttttgaaaagcaactagaactagaaggcttgtttttattgcaatatggtttggctctccgtgcatatggagataatgaactagcgcttcaaaaattgattaatgcccgagaggcttttcctgaatcacctcatatcgagcatgcgtatgcccaacaattacttatcattgctgaaaatactagcgatacaaatttatcgttagaatatttaggtaaggcaaaagacattctaaataggcttgataaaactaacaaacacgaaagtgatcgctatccgattattaccctctcgattagccatgtccgtattttagataagctaggtagggagagtgaggcgaaaataattgccaagcaatattttgatgaactcacatataaatttggaaaaaatgattccaagttgaatgagatggttattgctaccaaaaaattccttactgtatatttcactaaaggaattattgttgacatacatagctatgattaa

SEQ ID NO: 104906 - DNA, 1323 bp, Enterobacter aerogenes
atgtcgacaacgccgctgtggttaattcagaacgtccatctgccaaagagggaagggctgtggcagattgcaattgataaagggcgattcggcgacattacgccgatgggagaggcgcgcagcgagagctacgaagtgcttaacgcccgcggcggattggccattccaccgtttatcgaaccacacatccatctcgataccacgcagacggcgggagaaccgaactggaaccagtccggaacgttgttcgaagggattgagcgttgggcggagcgtaaagcgctgctaagccatgaggatgtgaaagcccgcgcgtggaaaaccctgcgctggcaaatcgctaacggcatccagtttgtccgcacccatgtcgatgtttctgacccgtctctgacggcgctgaaagcgatgctggaagtcaaacaagaggtagcgccgtgggtcgatttgcagatagtcgccttcccccaggaagggattttatcctaccccaatggtgagagtttgctggaggaggcattacggctgggcgccgatgtggtcggggcgatcccgcatttcgaatttactcgtgaatatggtgtggaatcactgcatatcgccttccgtctggcgcagaaataccagcgtccgctggatatccactgcgatgaaattgacgatgaacagtcacgctttgtcgaaacggtcgccgcgctggcattaaaagagggaattggcccccgggtgaccgcgagtcatacgaccgcgatgcactcctacaatggcgcttatacctcgcggctgttccgcctgttaaaactctcgggcattaacttcgtcgccaacccgctggtcaatattcatctgcaggggcgttttgatgactacccgaagcggcgtggcgtgacgcgggtcaaggagctgatggcggccggcattaatgtctgttttggccacgatgatgtgttcgacccgtggtatccattgggaaccggcaacatgctacaggtgctgcatatggggctgcacgtttgccaactgatgggctatcagcagattaacgacagtctacagctgattacccacaacagcgccagaacctttgggctcaatgattacggcattgctaccggcaatccggccaatctggtgatcttgccggcggaaaacggttttgaagccgtacgctgccaggtgccggtacggtggtcaattcgtcagggaagggtcattgcgactacgcagctggcgcagacgtggatacagaccgataaaggcggcgaggagttgttttttaccaaaaatagcccctttgccgaagcaaaggggcctaaggcttag

SEQ ID NO: 104907 - DNA, 2097 bp, Enterobacter aerogenes
atgagcaaagtcagaatcgctattatcggtaacggcatggtcggccatcgctttatcgaagagcttcttgataaggcgcctgccggacaattcgacattaccgtgttctgtgaagagccgcgtatcgcctatgaccgtgtccacctgtcgtcttacttctcccatcacactgcggaagagctgtcgctggtacgcgaaggtttctatgagaaacacggcgtcaaggtactggtcggcgaacgcgcgattaccatcaaccgtcaggaaaaggtgatccactccagcgctggccgtaccgttttctacgacaagctgattatggcgactggctcatacccgtggatcccgccgattaaaggcgcggaaacccaggattgcttcgtctatcgtactattgaagatcttaacgccatcgaatcctgcgcccgtcgcagcaaacgcggcgcggtggtcggcggcggtctgctcggtctggaagcggctggcgcgctgaaaaatctcggcgtggaaacccacgtgatcgagtttgcgccgatgctgatggccgagcagctcgaccagatgggcggcgagcagctgaagcgtaagattgaaagcatgggcgtgaaggttcacaccagcaaaaataccaaagagatcgttcagcagggcaccgaggcacgcaaaacgatgcgcttcgccgacggtagcgaactgcaggtcgatttcatcgtcttctctaccggtatccgtccgcgcgacaagctggctacccagtgcggtctcgccgtcgcccaacgcggcggcatcatggtcaacgatagctgccagacctccgatccggatatctacgctatcggcgaatgcgccagctggaataaccgcgtatacggtcttgtcgccccgggctacaaaatggcgcaggttaccgttgaccatatcctcggcaacgacaatctgttcaccggcgccgacctcagcgccaagctgaagctgctcggcgtggacgttggcggtatcggcgacgcccacgggcgcacgccgggcgcgcgcagctacgtctatctcgacgaaagcaaagaggtctacaaacggctcattgtcagcgaagataacaaaaccctgcttggcgcggtactggtcggcgacaccagcgattacggcaacctgctgcagctggtgctgaatgccatcgagctgccggaaaacccggattcgctgatcctcccggcccacgccggcagcggcaagccatccatcggcgtggataaactgccggacagcgcgcagatttgttcctgcttcgacgtcagcaaaggcgacctgatcgccgctatcaataaaggctgccacaccgtggcggcgctgaaagcggaaaccaaagccggaaccggctgcggcggctgtattccgctggtgacgcaggtgctcaacgccgagctggcgaaacagggtatcgaagtgaacaacaatctgtgtgagcacttcgcctactctcgccaggagctgttccacctgatccgcgtcgaaggcatcaaaaccttcgacgaactgctggaaaaacatggtcagggctacggctgtgaagtctgtaagccgaccgtcggttccctgctggcctcatgctggaatgagtacatcctcaaaccacagcacacgccgctgcaggacaccaacgataacttcctcgccaacatccagaaagatggcacctactcggttatcccgcgctccgcaggcggcgaaattacgccagaaggcctggttgccgtcggtcgcatcgcgcgcgaatttaatctgtataccaaaatcaccggctcccagcgtatcggcctgttcggcgcgcaaaaagacgacctgccggaaatctggcgtcaactgattgaagccggcttcgaaaccggccatgcctacgccaaagcgttacgtatggcgaaaacctgcgtcggcagtacctggtgccgctacggcgtcggcgatagcgtcggcttcggcgtagaactggaaaaccgctataaaggtatccgtaccccgcacaaaatgaagttcggcgtctccggttgtacccgtgaatgcgcggaagcccagggtaaagacgttgggatcatcgccacctag

SEQ ID NO: 104908 - DNA, 429 bp, Enterobacter aerogenes
gtgtgcggtaacggcgggatgaaaccacgccacgccgatctgctggccgcggacctcgatcgcgatacgctcatcaaatatctcgaccgctttatgatgttctacatccgcaccgccgataagcttacccgtaccgcgccatggctggacaacatggaaggcggcatcgactatctgcgcagcgtcatcatcgacgataagctgggcctgaacgatcaccttgaagaagagctggctcgcctgcgcgccgcttttgcctgcgaatggaccgagaccgtcaataacccggcggcgcagacgcgcttcaaacactttatcaacagcgatcagcgcgacccgaacgttcaggtggtgccggaacgtgaccagcatcgcccggccacgccctatgagcgcatcccggtcacgctggtggaggaaaacgtatga

SEQ ID NO: 104909 - DNA, 264 bp, Enterobacter aerogenes
atgaatgccacgctcactatcatcgttgatggcgaagcgctgacggtgccggaagggatcagcgtggcggcggcgctggcgttgaccggcgaccccaccacccgccaggcggttaacggcggcctccgcgcgccgttttgcggcatgggcgtctgccaggagtgccgggtcaccgtcgatggcctacgggtgctggcctgccagaccctgtgccggtccgatatgcaaatagaaaggagccgcgatgaacacgctgcgctgtga

SEQ ID NO: 104910 - DNA, 144 bp, Enterobacter aerogenes
atgctgaacgaagcgcgcgcggatatggtgatggcgccgcatgtggcgttattcccggcgatcgccattttcctgacggtgctggcgtttaatctgttgggcgacggcctgcgcgatgcgctggatccgaagataaaggggtag

SEQ ID NO: 104911 - DNA, 714 bp, Enterobacter aerogenes
atgatatttgggctttttgtttgtggactgttgtccggggtaaccacctggctgtttggcttcggcggcggctttgttaccgtgccgctgctttacctgttgctgagccatcagggcacagtaggcggtcaggcgatgcaaatagcggtagcgacgtcggcgctggtgatgctgtgcacgtcgctgttggcaagcggccgccacctgcgcgccggaacggttcactggcgctccctgctgccgatacttggcggcatcgccatcggcggtattgccggcgcggcgctggcgctgaaggtcaacggcgagtggatccgctggctgttcattttgtacctggcggtgaccattgtggattgctacgctcgccccggctttatggcgccgtcgacggcttgcgcaccgtcgagtgcagggcgcgagactatccttggcggcgggattggcctgattgccgccttccttggcgttggcggcagggcggcgaccgccagcctgacgtggctgctgatggcgccgatggcggcgctgccctccggtttcatcggtaatatctggtggctggcggccgggctgctggtggccgggagctggttgggattgcggggcgcatcgcgctggttggcaaaactccccgatcgctggcacgtgcggatctacccgctactattgctactggtgttgctggcgatgggctttggcggggtgggctga

SEQ ID NO: 104912 - DNA, 1008 bp, Enterobacter aerogenes
atgagcatcgatcggcgctgtctggcagaaaatacctttaatttgatttccatgtccggcgggaaagactcgttggcgcaatgtctatatgccgtagagaacggcgtgcaacacgagcgcgtgtttgctgacaccggccacgaacacccgcagacgatggagtatctcgaataccttgagcaaaaactgggcccgattcgccgcgtaaaagccgactttactcgccagatcgagggtaaacgtaaattcattgcagaaaaatggccggtatctctcgttgaagagtgcggcatgacccccgatgaagcagcagagcgtattgctcgagctctggagatccttcacccaaccggcaatccattcctggacctgtgcatgtggaaatgtcgattcccgagcacaaaggcgcggttctgcacgttcgaccttaaacatgagcctgttcgtactcaggttgtactgccggagcttgatgaatatgacgaggttatcagctggcagggtgtacgtgcccaggagtcgccagcacgggccggcctgccgatgtgggaagaagatgcagacaatactcctggcttacatgtttatcgtccgatccttaattggctgcatgaagatgtgttcgccattgctaaacgccacggcatcaagcctaacccgctctatcagcaaggctgcagccgtgttggatgcatgccatgtattcatgcaaggaaatctgaattagcggagattttccagcgctggccggaagagatagcaagggtagccgagtgggagcgcctcgttgcatcttgctctcgccgcggaaactcaacctttttcccatctacgcatgacccacgcagggcagaacgccggatagacgttattaccgtagacggttacgggattgaaacctatcgcgactgggcaatgacaacccgtggtggcgctcagtttgacctactggctgaggctaacgacaaatctgtgtgcagcagcgtctatgcaggagtatgcgaatga

SEQ ID NO: 104913 - DNA, 297 bp, Enterobacter aerogenes
atgaccaataaccagttaacagaccaacgcattgctgaaattctagcccgtgctgagatttgcgacgattcagtcttaactgattacgccgacattgcagcggcaatgcgtgagctacaggaacgccgaaagaccgcaactgaaccagcagcgtatttggtatgtaacggaagactctaccaggacaggccatttctaagcttgtctgctgcgagaatttcagtcaacgacaggaatgatggtgctgagattaaagcactttgtgtcagcggagcattggcggagaaagcgaaatga

SEQ ID NO: 104914 - DNA, 765 bp, Enterobacter aerogenes
atggaattagaggaatacataaatctggagcagcgggttagtggtcgtatggtactacttgatatttctgcgacaggtgaagagaatttgatcgagcagcaatccggtaactctatgaatgatcttgagtatcgtcgtaaacaactgctcaaattgcaggataccgtgatcgatttggaggacctttctactggggtatcgatcactgatcttacactcaacgacttccgtattgatctggcaaagtatttaaagacttatcctgacaagcttgatgctcaaccactcggtgtatacgcagttaccactagcctggatccggaaataccaccaggtatgattttttgtctgcaggcttttgagaagaaagggcataaagtacttgttgaacaagcatcttcagattatccacttgcaccacactacttggttcacatcggagatgatggtgcggtgttattgccttactcacaggctaaacgcatcctcgatagcctgaaacgtctggcgcttgggcgtgaagttcccgacgatacagcgtgtgctagttttgataaaaaaaccagatatggtcaagacatgagtcacgcacaaaaacttcttaccgcagcggttgcatcaatagcgggtaaaaatgaagaacgtgctgttgccagtcttttcactccaggtggaacccacgccatcaagggggagtttgctgggagtaatgattttgaagtgatagcatttatggtcatcttgccagagagtgagtcaatatga

SEQ ID NO: 104915 - DNA, 1335 bp, Enterobacter aerogenes
gtgattccgactctgacagcgactcggattccgacagcgactcggactccgacagcgattcggatagtgacagcgattcggactccgacagcgattcggactctgacagcgactccgactctgacagcgactcggattccgacagcgattccgactctgacagcgactcggactctgacagtgattctgactctgacagcgattcggactccgacagtgactccgactctgacagcgactcggattccgacagcgattcggactccgacagtgattccgattccgacagtgattcggatagtgacagcgattcggactctgacagcgactcggattcggacagtgactcggattccgacagcgactcggactctgacagcgactccgactccgacagcgactcggactccgacagcgattcggattcggacagcgactcggactccgacagcgactccgactctgacagcgactcggattccgacagtgactcggatagcgacagcgattccgactctgacagcgattcggattctgacagcgactccgactccgactctgacagcgactcggactccgacagcgactccgattctgacagtgattcggactctgacagcgattcagattccgacagtgattccgattccgacagcgactcggattctgacagtgattccgactccgacagcgattcggactctgacagtgattccgattccgacagcgactcggattccgacagtgactcggatagcgattccgactccgacagcgattcggattctgacagcgactcggattcggacagcgactctgactcggatagcgattcggatagtgacagcgattccgactccgacagcgactcggattccgacagtgactccgattccgacagcgactcggactccgacagcgactccgactctgacagtgattcggactccgacagtgactcggattctgacagcgattctgacagcgactcggactctgacagtgattccgactctgacagcgactcggatagcgacagcgactcggactctgacagtgattccgactctgacagcgactcggatagcgacagcgattcggactctgacagtgactctgactcggacagcgattcggactccgacagtgactcggattctgacagcgattcggactccgacagcgactcggactccgacagtgactccgattctgacagtgactcggattcggacagcgattcggactctgacagcgactcggactccgatagcgattcagattccgaaccgcaggcaaatgatgatacgcatacggcagctatcgataccgtag

SEQ ID NO: 104916 - DNA, 483 bp, Enterobacter aerogenes
  misc_feature (449)..(458): n is a, c, g, or t
atggaaaaggcgttcggccaagcggcctacgtgacgcattttgatcccttcatgcgtcattatctcaccgcgaaaacaggtgatatcccgaatgtgcgagatgtttacaccgctttcaaatcttttgctcgttccagccaggttgatattacagtactggttgccgatattcatgcctttgcaaattactactgtgctatggcgcttggtgcagaaaaaaatccactgataaaacaagcttttcatgatcttcgtgagcttaaggtcgatgtagcctatccatttttactggatgtttaccacgattataaaatggaaaggctggggactgatgaattagtaagcattgtccgtctggtcgaaagctatgtgttccgccgagcgatctgtgctatccccactaactcgctcaacaaaacctttgctggactgagccgtacattgaagannnnnnnnnnccatcgtatcgtcgtttcccagtga

SEQ ID NO: 104917 - DNA, 360 bp, Enterobacter aerogenes
atgagtggttcgctaatccgatcgaactggacgacgcgcgcgctggtgaccgacacccgtgagtatctggatcaggtgccgggccatacttcctttaccaacgcccaactgatggaaatcatgatggcgcaggatttccaggacctgaccggtcaggttatcaagcgcatgatggacgtggtgcaggaaattgaaaagcagctgctgatggtgctgatggaaaacatgccggaaccgccggtgaaagagaaacgggccaacgatagcctgctcaacggcccgcagcttgaccagaacggcgtcggcgtcatcgccaaccaggcgcaggttgacgatctgctcgatagtctcggtttctga

SEQ ID NO: 104918 - DNA, 366 bp, Enterobacter aerogenes
atggatcaagctgggattattcgcgatctcctgagctggctggaaggtcacctggatcagcccctctcgttggataatgtggcggcgaaggcaggttattccaagtggcatttgcaacgtatgtttaaagacgtcacgggtcaagctatcggtgcctatattcgcgcacgtcgtctatcaaaatccgccgttgcgctacgcctgaccgcacgtccgatcctcgacatcgcgctacagtaccgcttcgattctcagcagacgtttacccgcgcctttaaaaaacagtttaacctgaccccccgcgctctatcgccgttctgcggactggagctcgtttgggatgcgtccgccgctgcgcctcggtga

SEQ ID NO: 104919 - DNA, 144 bp, Enterobacter aerogenes
atgaagtttcatagtttaccctcacaaactacgcacattctggatgccatgctgttccaggatagctgcgaggttagttttcgccacatcgtcggtaaaagcactatcgcggaatacacaggtagtatcaccagcggttgttaa

SEQ ID NO: 104920 - DNA, 144 bp, Enterobacter aerogenes
atgaagtttttggtgaggaaaactttattgcttcacttgtgtgggatcgtaatagaaagaatgatgctaaatatttttcagtgggtcatgaatatatggcagtatatgctaaaaatgaatcattcctttctgctaaccaagtga

SEQ ID NO: 104921 - DNA, 246 bp, Enterobacter aerogenes
atgagcgaacttttttccagtcctgaccatacgctggacgcccttgggctccgctgcccggagccggtgatgatggtgcgtaaaaccgtgcgtaccatgccggtgggcgagaccctgctgattatggccgacgatccggccaccacccgcgatattcccggtttttgcctctttatggagcatgaactggtggcgcaggaaaccgaagccctgccgtaccgctacctgatccgcaaaagccactga

SEQ ID NO: 104922 - DNA, 372 bp, Enterobacter aerogenes
atgagtgacaaagacattgaatctgaaattcaggctaaaggcttaaccgcgccgcgcgttacgcctgcccgcatcgaaagcattattgctcaggaggcatatttcacagcagaagatggtgcctttggcgtagccataaaagcgaaacatactggcggagaggtaaactaccagccgcacgaatcactttctcttctgacgttctgcgtcctggtgctgtgcaacggcttcaccgtcaccggtgaaagcgcctgcgccagcccggagaacttcgacccggaaatcggccgcaaaattgcgcgtgaaaacgcgatcaacaaaatctggatgctggaaggttatctgttgaagcagaaactgagcgagcaatga

SEQ ID NO: 104923 - DNA, 198 bp, Enterobacter aerogenes
atgctgtatacagtgacgttcaatgagactgaacgaaaggaacatattgaacttaacgaggaagttagggtgggtgatttgctgtcattaacgctagatggtgtgaaagatgactacatggtgatgacagtgggcggcccgatcattggcaatacctgtgttccatcaataatccgggtcaaaaaagctcagaaataa

SEQ ID NO: 104924 - DNA, 123 bp, Enterobacter aerogenes
atgaccagcaaattaaccagagtgcacctttcgcatccgtattccggtctcggcctggcaaagatattcgttataaaggtgagggtagaaatgcggctttctttgtacttgtatattaattaa

SEQ ID NO: 104925 - DNA, 201 bp, Enterobacter aerogenes
atggcagatacaaccgctgagtggagcctttccctcgatacgcaatgcccgaattgcaaacacgttttcgatttacgcccagaactagttgattgtgcttcacctgtcgaggcttgcgaaacaaataccgttgctacgcgcgactatgagacagcatgcccggaatgcggccatgagttcactgtcgatttcgtctactga

SEQ ID NO: 104926 - DNA, 207 bp, Enterobacter aerogenes
atgattagtcagcactacggaacccagaccgttaaccgcggcgctgttcagcctggcacgctggttaagcatcgcgacggcacctggacggcatcagctcacaagcgcgggaagctgtaccttcaccgcggctgcgaacgtacctacaccaaagccctgcttatcgagatctacctcgatgaacgcggaaacggcttaagcaactaa

SEQ ID NO: 104927 - DNA, 903 bp, Enterobacter aerogenes
atgatttttaccaaaatcattaggggattcatcagtgctctggataggcatggctcgttcgcgctggcggcggagtcgctatttaaaacccccgccgcgctgagctatatgatccaaaaactggaaaacgatctgaacatcagtctgctggatcgttccgggcaccgggcgaaatttaccgataccggtaaaatgatgctggaaaaggggcgcctgctgctcaatgccgccaacgatctggaaaaacaggcgcagctgctgagttccggctgggagcgggatctggcgattgcgctggacgactcttttcctttccgggccctattgccgctgattgaaaagttttacgcgcaatatccgcaaacccggctcaactttacccaccataccctggcgggctcgtgggaagagctgactcacaacggcgcggatattattcttggggcgattaacgaaccgccgacttcagcggaatggtcgtggaaaatgctcggcgcgatggacaacgtgttcgttgtcgcgcccggccacccgctggcggcaacaacccagccactgaccaacaaacaactcagcctgcatcgcgcggtggttattagcgatagcgcccgctactgtcatccactgaacagcaacctgctcgatgagcaggagcaaatccgggtagatgatttcgccaccaaagtcgcgctcctgcgcgccggtttgggatgcggattcctgccccgccacatcgccctcccgtggctggagagcggtgagttgctggagaaaccggtgatttcgagccgtgagaaagatataacctatatggcctggcgtagcggcaataacggtctggctcagcgctggtggcgagaggctattctcgaagacagctgtctgagccagctctaccgttaa

SEQ ID NO: 104928 - DNA, 165 bp, Enterobacter aerogenes
atgaaccttgcccgcggccgcgagtactcggcgatggagcgttccatcgacgtacaaatctcccgcctgcgtcgcatggtggaagaagatccggcgcatccgcgctacatccagaccgtttggggactgggctacgtcttcgtgccggacggttctaaggcatga

SEQ ID NO: 104929 - DNA, 495 bp, Enterobacter aerogenes
atgcaagagaattataagattctggttgtggatgacgatatgcgcctgcgcgcgctgctggaacgttatctgaccgagcagggcttccaggttcgtagcgtggcgaacgctgaacaaatggatcgcctgctgacccgtgaatccttccacctgatggtgctggatctgatgctgccgggcgaagatggtttatctatctgccgccgtctgcgtagtcagagcaacccgatgccgatcattatggtgacggcgaaaggggaagaagtggatcgtatcgtggggctggaaatcggcgccgatgactacattcctaaaccgtttaacccgcgtgaactgctggcccgtatccgcgccgtgctgcgccgccaggcgaacgagctgccgggcgcgccatcgcaagaagaagcggtgatcgcttttggcaaatttaaactgaacctcggcacccgcgagatgttccgtgaagatgagccgatgccgctcaccagcggttag

SEQ ID NO: 104930 - DNA, 630 bp, Enterobacter aerogenes
atgcataatcatagcgattattctgaagacgtatttcattggataaaaacggattacgttggaaaagataacaaaaaagctgatgagttagccttcgaaataatgaagaaaattgttatggatggctacctaaatgcgtcaggtaaagacacattcagaaatctggaaagcgtttgctttaccgagtcgccattagaagtaaaaaggcatcagtcatcgcgctatactcagtttggatttgcttttagtaaatcacttatttttgacttgggtggcaggcacgttatataccaacctaaaaatgaggcttatttcctcccggagggccttcattggcgtcatgtgacatatgaccctaatgataaagataaggtaaagagagacggagttaacttcacttgggaaagagagtggaggttgaactgcaagcaactacatatacgtaatgctcactcagtaatagtaccaaatgcattttttgctgatgagttaagccagtatttgcatggatgggaacatatgaattgggccggctggatgagtggagatatcgatgccagaagccctgaagaatatggagagcatttaattgaaatacatgaccgtataaaaatatttgaagacatctaa

SEQ ID NO: 104931 - DNA, 237 bp, Enterobacter aerogenes
ttgaacagcgcggtaatgccgcgctgttttttagccatcacagggggaatggagatgaaaaaaaatagcgatgaatatcagcgctggcagataacccaggccgataagagagaaaaagagagctatcaacgttctttccagaagtggaaaagtattatttttcagtcggttttcattggagttctggcgctttgcgtcattttagcgcttttacatgtatctggtgatatacaataa

SEQ ID NO: 104932 - DNA, 372 bp, Enterobacter aerogenes
atgatgaatattgatttcagtttaattcgcagcgcccccaaaagccgtaacgatagctttgaaacacttgccgtacagttatttaggaaaacctgtcgaataccgacagattcaacatttattagtctgcgtggcgacggtggagacggtggcgttgaagcatatttccgttcatcggacggtgccgtattcggtgttcaggcaaaatactttttccagcttacttccgcagaactcacacagattgatagttcccttaaagccgcgctaagcaaccattccaaactaaccgaatactggatttatataccgtttgacctgaccgggcgtgtgatcttgaccctccatctccgaacagcttttgtatcttaa

SEQ ID NO: 104933 - DNA, 3639 bp, Enterobacter aerogenes
atgcgcaggtattggtttgatgatacgttgctgacagcagctcaaattcaacaatgtctggatgacgccattgcttttgccgggccaagatatacttcaatgctggatgtggtgacgaatgctcatgtcggcctggatttctttggtgggactggtgacttttgcgagtggtacgaaacatcattaacaccaatcgttcgagagttccgttcactgaatggatacggacgcaaatcgctggatatactcggcgaaacccgtgctacatccgccacggcattgattgaagaaataattgcctactgtgagagcatgagagataacaatgtcacggccacatcggttacagatctttgcgtcgctctgtcatccctattgacacttttcgctgatgcccgccatgctcaagaagataaattttatgaaaagcatggcaagcatagtgatacagaatcgttccgacagttccacgcagagtatatgtgtgcatttcctgccggagatatggatgcggcgagaaaatgggaagagcaggcgcagcaactgcaaaatttgctgacttctcaggtcattggtgccgcaacagcacattccttactgctggttgggccagcgggtatcggcaaaacccacgcgattgtcagcgcagcattgcgtcgactggaacatggtggtttttccctggtcgtctttggagacgactttggcaaagcagagccctgggaagtgctacacagtaaaatagggctgggtgccgccatcgatcgttcgacattatttgaatgcatacaggcctgcgccgaacatactggcttaccttttgtcatttatatcgatgccttgaacgaaagcccgcgagaagtgcgctggaaggacaagcttcccgaattgctcgctcaatgcaagtcttatccagacatcaaaatctgcgtttcaacccgagatacctatcgcaatcttgtggtcgattcacgctttccagggtttgctttcgaacacatcggtttttcaggacatcaattcgaagcggtacaagctttcgcagcctactatgggctggatgcagagattacaccacttttttcacccgaactcagtaatcctttatttttacacttggcctgtaaaacgctaaagggcgaaggccgtgacagcctggatatttctttgccgggttttacctctctgtttcaaggacatctcaaacattgcgatgttttaattcgagaacgcctccactacgcaaaccctcgcaatctggtaagggctgcaatgatggcactcgcgaataccctgacacatgagttgccgcagaaccgaacctgggaaacctgttgcgaagcactgagcaaaatagtgggaactgagaccacacctgaatcctttttaaatgcattggcacatgaaggcctcattatcctttctgttgtagatgaggataccttcctgatccgtctgggttatcaacgctacggtgacatattccgtgctatcagccttgtggaagctcttgattcggatacagcaaaactagcggagaaaattgcagcgttaacagaagaagatgctggattgctggaagctcttgccgccgtgctgccagagaaaactgctcttgaaattactgctgaagaagtaggattaccatccgaacaagcccataagctgttcatccagtcattggtttggcgctcccgacaaagtgtagtggaagaaattgatgaacacatccatgcagcactgcatacacctggattatgggagtcggtttatgaagcgctgttttcacttagtctggttcctgaccatcgtctaaacgcaactaactggctggggccatttttacggcagtcatccttagctgaacgtgacacctacttgtcattagctgcgctgggatcatttgataacaagactgctgtctattcactcatccatgcagcactatttgctgacataacccattggcctgctgaaagccggaggctggccagtctaacacttgcctggctcacttcgtgtgctgaccgccgaatcagggatttatcctcaaaagggctaagcagaattctggcaaactacccggaaaactgccaaaccgtaatcagtgaatttgcatattgtgatgatgattacgtattagagcgtattagccttgctatctacagtgcatgcttattgtcacgccaacgcagaaatgcgtttatgccagcgctccctggtctattaagcattgcgtccgatagcgagaatattctgctccgggatacggttcagctattagtaaacttgttgaaaacaggagaatttcccacagccgtaacaagccaattacagcattaccagacaaacgtatcattaccatcacgatggcctgtactggcggatgtcaaacccctcctagatctggaacatttaccatcaaacatggtgctctggggagagtccatggccccggatttctggcgttatcaggtggtatcgaagatttccggctttgacttggagagcgccaatatcagccatgaaaacattgcctgttggttaatgcgagaagctcttaatttaggatatcccggttataaccactgcgcgctcaattatgatcgccatatcgggagtcagtatggctcgggacggggtagaaaagggtatgctgaccgactcggtaaaaaatattactggatcgccttacatcgactactgggcattctggccagtaatgttcccgcactggaagacccatattccgactacgaacctacaagtgatcatctatggtcagtcgacgtccgtaaagtcgacctgaccgatgtacgcgacatcaccgcagaaagtgtctatccagtactgatggaagaaacaaattatgcattccctgaccgcaattcagatatcaaaggttgggttcggaccgatgatttgtcaccttatgaagcttgtctgattcgaactgacaaggaaggggaacagtgggtagcgctttcacacagctattgggacgaggataaagcggcgaatgaaaatagctggaattcaccttacctggcagtgcgtgcttattattcaagcgcactcataaatgaaagcatccagaacttcaaacagaaaagtgcgcgcgatattttccaatataatcaggggaatagctgttatcgcggttatcttgctgaatatcctgacagcccagtgtataaacaacttcttaataatgaggaagatagtgaagcatttaattttacagaagtcagtttactacgcggaagcgaatgggaatatgactactcatataccacgcccgagcgccaggataacctcattgcgccatgccagggaatcattcaaaaactcgaacttttatgggattgtcaaagcggttgggttgatcgttctggcaaacttatcgccttccaccataaaggtgtaagacaaagcggacttttcattcatcgttcggcgttgaacgcctacctgttcataacaggtgaagaacttatatatcgccgttttgctaacaggggatattttgatttagctggccgtaacggctcgcaaatagacctgaaaacttggatccagtaccgggcagacaaggcgccagtagttttacgagaagaggaactgccgtttaactgctga

SEQ ID NO: 104934 - DNA, 129 bp, Enterobacter aerogenes
atgaatcagtgtctgaaaaaaatcctataccagaacggcttaaggaagcgagatacagggcagggttatcacagcgctctctgggactacttgttggctttgatcccgcatcggctagcagtcgtatga

SEQ ID NO: 104935 - DNA, 435 bp, Enterobacter aerogenes
atgcgcggcaaggaactggacacactgatcgagcacgaattacaactgatgctggttgaaggctttgacaagtcccctatttccgccaaggccctgcatattcggctcaaggcaaaaggtatcgttaacggtggtttaagtacgctgagcagccttgagcgaaaacgcctaattgctgcctatgttgatcagcaacttggcccattgaatctacgcccaaaagaaaaacagcaatacgtcaaccgcaaaacccgtcaggccttgctggccagaaaccagcagttgcaggcggaagtcagtgagctgcgagaccaattagcgcaaaataccctatcgttgatagaaattgtcaaagcggtaaaaataaattccgttattccagtggaaagtctgttagccgaacatgtgattcgcgagttacacaagttgtcataa

SEQ ID NO: 104936 - DNA, 2367 bp, Enterobacter aerogenes
atgaaaaaacattttgcgcagtttcacgcctttatcaccgagcagcaaagctggtttgaacagcatctggcggcagacttcgagcagtcatgggatgaccctgtttgggtctgcggcagcaatggtagtggctggttacgtggtaatggcaaaaataaattacgctttgatgaaatcagccgtaccaaaggtattgaggggcgtcatgccgtggaagaagactatgtccggtttatgaaagccctgctggtactggtgtatcggaggcgaaatcgaagtatatccccagcggtggctgtggcaacactgatgattttgaagcgctggtaccactcactatttgagttgactgggcaaacccacccagtgtatctaaccacaggggtaattcaacggtcgatggataacctcagcgcagcttcatctctaggggatcccaataccgccaattacaaagggcgttgtgtcagcctgcaaaaactggttaatcaccagtcattcacactggtgacattgcaatatgtgtccgatgggcaatataccaatcaaaccaacctcacccgcaaagcccgggaaaccatggcgctgaaacagcagtacacgctggctgataccactaccgatggtgaagatgcgttgattaccattcgtggttttctgaacatagttgcattaatccagcgggtggaaagtgatgctgagaaaattgcgttaaattgcctgttgttattggttatcaccggctttcgctccattgaagcgtttaatctcagacaggatgcgctgtttaaacgccagattgatgatccggcaatccgcaagcggtttcaggataagggattacccgattatttccttggtatccgttatgttggtgtcaaaggtgctggggagcgaacgcattgggtagaaccgctggcagcacctctggtcgagagtatattctgttccgttaaaatattgaccgcaccaacacgcggtcatctgacctatctacgggcgaaatcttttactgattacctgccacaggccatcagcgccctgcccggtgaacgagtcgaactggatgatgtggtgacgtacatcacaaaaaccacctcaagttttcgtggccgggcaggacaacgagacaaaacatccaaagccctcagcaaacgaggtgtgattcccgttcaagaaatgccagggcccaaaaacagcaaatctatctattattccaagactgaccttaatcattatatcaagaccgaatttggcctgacgaatgccaacgaaccctgtacgcacgcctggatggaaaatggcaagcgctacgaagttaactacgaagacctgttatttcttcatgagaaggggtcgctggcattaaagcgcacgctggctttgctggctataccgataccattaactaacacacttatgaataaatttttaggcaatattgagcctgatggatcagtgttcagcaaatatcaattactggaagagaatggtacccccacacggatgcgtacccacattccccggcacaacatcaatacctttcttgccattgcggatatctctgaccacttacaggcaatgctgatggggcgagtggacatcacacagaatcagcactatcaacatctggcgcttgcagaacggcgaaaagcagcctcgttggtgcccttgcagccgatatcgacaacagtaactgccgcgccctcttcgtcctccgttgctacgccactggaaatcgtcaaacggaccggccaactggcggtcaccgaacacatgactttggacaataccatcaaagccaacctgcatacttttgacgatcgggatgatgtagccaagtttgtcgaggcgtcatttgctgacggcctctttgaagatgttgctgctgcctttgaggaaatctgcgacgcagaaggactagagcaagcctctgccatggtggcaagacatgccgtgctgtatccgctgaaatttggttcctgtatgcgagaagttaacctctggggatgtccttatcgactgaaatgtcagagtgctaccttttgtgaacatttcacgttgacaggccggatagatgagctacccaatctgattgccaaaaaaaaggcgttacagcaagcacattcgaagttgacccaacttacacaacatcagcttgagtaccagaccagactggccgacatcgaacgacggttacagcaactcgaggcaatacaagcgcaatggcagcgtcgtgccaagactcaacaactggttgctgcggagagtgtgttgtctggtggagtaatctccgagggcaaagtccgtacactggcccagctttttgcacttgaataccaacaattgaagcaggagaacgactga

SEQ ID NO: 104937 - DNA, 1551 bp, Enterobacter aerogenes
atgagtcgaatcaataaacagttaaatgagtcgaatggtatcatttacacatctgcatttgttgaaactatatcaaaagttgatatacctgctgtgatttatctcaagtcagcaggttgtttcgatgataaatatattaattcaacaagtgacagttgggtgttcgattattcaggcagccgctgctatgcccacttccgacgggataaaatcagcaaccgtttaaccaaatatatttgcttccgttatgcatctgccaagtgtccagcccagattcctgatgtactccatgcctggtctttggctactgatcattgcataaccaaatctgctttcacttttacggtgttgaaagattaccttgaaactcaggaaattgatcctcgatatttctactacatcattttcggcctaaaaatcctctgtgccgaagcattccccggtttcaccgtcgacgattacgaagacctcgaatttatccctcgcccgcattcccacgactgggacatctatcaggaaatcgaccatgttctggatccgctcgaaaaaagcatgatcagtaaaggcttgtttgaaatggctacgtcgattcgtcatggcgaaaactacagtctgaacaccattcgagatgcagcaattctgggtctgacttatgtcactggagcccgcccggcacaactggctaagctggcaacaaaagatttgcgcattgatacccgaaactccgaaaccgggttaatacgctatagcttacttctgccctacgccaaacagcggcgtgtaacgactgaacgtctgtttttggcgattccagcggaaatcggcgtgttgattaggcactatatcgagcgagcgcaactaaaacctgatggcaagctatttgaatttagtcactctgcaccatcttatgtgtctaaggcgattagcaaggccatcctcagtttcagtcctccagattatcaggctgccgtagcgcgtggcgaagcggctttgccaaccattacaccgaccgacttgcgccacaacgtgggccattcactggctatgcaagggggcagcgccgaagaaattgcgcatattctgggacatacctcacttactgttgccaagtattacattctggcgacgcctgcgctggcactgattcgagccaaagcattgggtaccaatccggtatggcaaagcatggtagctatgatgttgacaggtgaactgacctcttcaacggaatggcaaggccagcgcgtggtcggcatagtcggtgatcagttgcatgatgggattggcggttgcactagaggtgatggcgaatgtccgttctgtgaagtacgctgctgctacggttgcctgtattaccgcccctttactgatggtgaccaccaggcggtgctggagagtgtagttaaagaagtcgatgagttgatttccatttcagacagtgttggcaacgcccgcaatccacttatttccatccatgaaaccacacaatttgaaattcaatccgtgattgctcgttgccgctttcatcaagaaaaaggaggtgtgcgatga

SEQ ID NO: 104938 - DNA, 1455 bp, Enterobacter aerogenes
atgtttgtcggttactttgttcatatccacacaatatatgaggttaagtgccgcgtgttcatactcacacaactcaatatcaaccaacggcagcgtttatgggcactgatggatactcacacgcgccagccgcttttatatccgttaatatatcttatagaccaacttgctttgcgttcatcagccacgcaatccgcctcacttcaagctctcaagtttttctatgaattctggcaccagaaacatggcgtgactttttgcttcagtttctattcctcgaaccacaatccattgattgccattgatgaacttacagcctttttccattatctggaaaatacgcatttatatgttccagcgttaaccataaggtctactacgcagaccacgcctcaacgtcgtacaaatattaggcatatacattcggttattcgttttatcagatatttgattaacacgtatatctcgccgagatatctagacggctcgcctaaagagctcacacgacttgccacgcagttaacgggacggttatcgatacataaagcagaattccgtactcttacccattctcgtcagatgagcaatggcacgacccataagcgctttcgaagtctgactgctgagatggtcatggctttttaccaaatcattacacccggttcaatttcaaagaaaaacccacttaatcccttccccgttggtgaaatccagctacgtaattttctgatttgcagattgcttttaaactacggattgcgtgtcagtgaattactacttttggagtgtcattcgatcaaaccaaatctccgaggggatcagttcagcctgattgtgaccacagtagatgacgacgtttcggatgagcgaaaaagattgccttcattaaaaaatgtctatgcaaatcgggtgttggcattagataaactggactttcattttctaaatatatatatccataaaattcgccctcaagcctcccatagttttctgttcacttccacccaaaaactacatccgccactgtcataccatgcagtttatgatatctttacgcggattgatgacattatgagtgtgcagtatcccgaatataaaacagatgaatattatgatgccattgaaagcatctcgcctcatataacccggcatacttgggcttatttgacacttcaacgcatttatcgtgaaaaacttcaaaaaactaaggccgactcacgccaagctgtcatggatttttctatcgttggattgatggatgaagccaaggatgaattacggttgcttggtggctggagtcacaatagccatatgcctgatgtttatgccaaaagatttctatcacagcaggctaacacggccaatcttcgccgaatcgctatggataacgaggccctgagagcaaccctttctaatgtatgcgacgaatggagtgcatatgagtcgaatcaataa

SEQ ID NO: 104939 - DNA, 246 bp, Enterobacter aerogenes
atgaaacgtagaagccgtaacaatctccatacgcaggaaatgctctaccgccctgcccttgaatttcgttcagcgctaatactcatacttttttctgcttacgtgcttatagactcatggaccagtaagtacggtatcagtgaaatacccttctattgctctctggggttaatagcgatggcaggatggagggtatggcacggggtaccggtcttcatagctcactggcgattattttatcactag

SEQ ID NO: 104940 - DNA, 318 bp, Enterobacter aerogenes
atgcatgcaactcatctgacgaaaaaatttaatgttttggcggtcgtctatttcacaatcattgcttgtggtcagattgttctgttccctcattctcagcccattttcctgttcctcgtgactatggctatggcggttcgcttatttaccctgcggcctcaatataaaaatttacgatttctggttttgtccatcatctcacaccaccttgtttccaggtatagcagggcaagtttcattgagtatcaaatggtttatgcgcctttgctcatcgggatgggatatgtgtatttcaacgtctggagagcgcgtacctaa

SEQ ID NO: 104941 - DNA, 867 bp, Enterobacter aerogenes; identical to SEQ ID NO: 36225

SEQ ID NO: 104942 - DNA, 1200 bp, Enterobacter aerogenes; identical to SEQ ID NO: 36224

SEQ ID NO: 104943 - DNA, 249 bp, Enterobacter aerogenes; identical to SEQ ID NO: 36223

SEQ ID NO: 104944 - DNA, 675 bp, Enterobacter aerogenes; identical to SEQ ID NO: 52760

SEQ ID NO: 104945 - DNA, 327 bp, Enterobacter aerogenes; identical to SEQ ID NO: 52759

SEQ ID NO: 104946 - DNA, 246 bp, Enterobacter aerogenes
atgaatgtcacgcaatgttctcagttcttcacccgttcgcccctggtaaatatcacagatatcagtgagaaaagagtaatactcgcttgcctgaccaaatatttcagaaataatagctcctggcataatgggatcttctgggaaatgcccaagcagatacggatcattataagtcacatgctttataactttgatgaaaccattctcgccatacttataatcaactatctggtcgaccataagtag

SEQ ID NO: 104947 - DNA, 465 bp, Enterobacter aerogenes
atgtattcccccccgactgcgggggttatcggagcaaatcgaaaatccggctgtttgaaaaatggtattccccccccgcttacgggggttatcgccatgagcctgcgcactctgacgcgcacctgctgtattcccccccgcatgcgggggttatcggtgaggctgctgacggagaattgggacctgttcgtattccccccgcacgcgggggttatcggccgacccggtgcccaggagaactggctgaatagtattccccccgcgtacgggggttatcggttccctgcactaagacgctggtggtcgccacgtactccccccgcatgcgggggttattggccggttcggattttgcgaaacaggtgcagggcgtattccccccgcttgcgggggttatcggggcatgagcgagaaccactgcgagagtgtggtgtattcccccagcatgtgggggtatcgacatag

SEQ ID NO: 104948 - DNA, 300 bp, Enterobacter aerogenes
atgactaaatcagtacccgtcagtaaaaagccgcgtaaacagcacactcccgagttccgcaaggaagcccttaaacttgctgaacgcattggcgtcgctgctgctgcccgcgaactcaacctgtatgaatcgcaactctatggctggcggaaaaagcaacagcaacaactgacatcatctgaacgcgaaagcgaactggccgctgaaaatgcccggcttaaacgccagcttgcggagcaggcagaggagctggctattctccaaaaggccgcgacatacttcgcgaagcgcctgaaatga

SEQ ID NO: 104949 - DNA, 1479 bp, Enterobacter aerogenes
atgtttataaaaattggtcctgctcagttaaatcagacattttcactatacttatcaccaataactaattggaatgatttttcatttgaaacatcatttatattaagttattcacttgacggcaaagtggtcaaggtcggtgaggtaaagatagggcataaaggccaagaaaaatcaattcatacgtataaaagtctaaacaacgaatttgaaaatttgcctgataattatttttcattaggtcaatcccccgagtattataaagaattgaagaagttatctcaggatttacaagtaaaaattttagtgggattgaaagatgtggtttatgatcgaaatatattcgaagatgttcgtgttgaggctgtttttattgattcacttactcgatatgtgagtatttcaagcgttgagcaattcggtgatatattggagcatggtgtttcattaaggcattttggctttcgagttaattatgagaatggagtgtctccagaatttgttgttgaatctgattcaaaaccacctaaaaatgttcatgtaatcattgggcggaatggtgttggtaagagtcacttactaagaactattgttgaaaacatagatatgaacaatgatgtggtaacaaagactaatggagagcctgtttccgtctatgattttggattgttgttgtatttttctttaagtgtctttgataagccttttgaaaaagttagctttaatgaggtcaggtttagtacaactcagacaaagaaaaaatatattggtctttataaacaagatagtggagagctaaaagatatcaataatgatttggcgaaagatttttctgtctcactctataattgtatttatggatcggaaattaagaataatatgtggtctgaagttataaaatctttagaggttgatataaacttcagtgatttaggactatctaagcttatgacagtcactcaagaggagttcacgcatgagtctacagaggtgtttaaatcactaagttctgggcacgcagcggttatctattatataacacatgttattgaattaattgagaataaaaccatatgcatatttgatgagcctgagaaccacttgcacccaccattattgtctgcttttattcggacgttatctgaagttcttaaaataaataatggaatggccgtgattgcgactcactcacctgtggttttgcaggaaactccgaggagttgtatttggaaaatgttccgctcaagtgaggacgatacagacttccaacgcccttcaattgaaacatttggcgaaggggtaggtgaaattacatctgaggtgtttaatcttgatgtcagaaagtctggtttttattcattgcttgaaaaggactctaaatcatacagaaccgccaatgaactttttaatatttataataatcaaattggcttagaaggtcgcgccgttgtttattctgcaatgaaacacaaagggtaa

SEQ ID NO: 104950 - DNA, 1521 bp, Enterobacter aerogenes
atgactgttaatactaaccctgttactcttgtgtacaagattcccaaacataattatagggcttataacaaagctggtttatccttcggttctttgcttactgaagataatagttatgtatatataaaacaatccaccccagttggtacatcatttactattcataatggataccaatacggaggaggtaacgcttcgtataatgttaagttaagttcaatcgctccgaaatccccatcaataaaatcctactcagcaaacttttcaacaattggcgatttttctgctggcacaatgaaattcacaaacatagatttgccaggtgagtatcaaagtataactgtgtttgtagaccctagggattatgtgcagtcattttataaccttacacaaggctacgaagtttgtactattgagcccggagaaagttcttgcactggtcctttttcatacgcaataaataaggggaatggttacatagctcattattttatagttcgcaatcaagataagacacttacatcaaatcaatttgagattcgtagcatctggaatacggatttaatacctaagatcacagggtatgattacaaagaagagaataaatctgtccttgtttatgtcacacaacccggcaatggcaattggcgtgatgtcttgatgctttctaagctagagatactggatacaatttctaatacggttcttctgacgggcacaaaagccgcgatgtctggagaggactatacttatgcatttgatttatcggctatacctgaagggaagtatgatttaaccttcagggccactgatacttttaacaacagttctcagttgccgttcagatctcttattatagataactcccccccttcaatttcattttcgtatgaagggaaaccactgttatcagaaagtacagtctatggattagaaaacatctcagtagctgtatctgatgctttaagtaagtccaagatctctcaaatggttcttcaaggaggccctgcatcagatgatgtagaattaggatttacccataacacagatggttcatacacaccactttatcctcgtttgtttccttcacttgatgaaaaaactgataaatacacacttgtagttaaagctatagatgatgcaggtaatgagtcatcaaaatctatccgttttgcatattatcctaagaatctcattgttcttgataaacttaatacccttgcggttaacaaacctttaaacctttcttcaggtgaacctctggctgttcttaaagcaagtcagttacgccgtaatgatggttccttagcaaaaggcgtacagacagctttaattactgttaggggtgactcagcattcccaattagtgttattggaaaccttgtttctccaggtgaaacgaaagaaattcaaatagatttaggttctgtaggaaatgacgttgttgtccctatattcccaggagtatctggcgttgtcggtgcctccggttttattgttgaattccctcaactaaaataa

SEQ ID NO: 104951 - DNA, 546 bp, Enterobacter aerogenes
  misc_feature (226)..(250): n is a, c, g, or t
atggcaaattgcccaataaaagttgcccataatgccttcctcaatctgctgttacaccactcatcgtatgtttttagcggcttatcggtggttacgtcattacacttacaattatatgccgtaggaggaacatattttgcaatcacatctatgtggtggctcatgtttttcaaagcacgtcaatgtatgcagtctgagcggaggaatacggcgaaatacggtatgnnnnnnnnnnnnnnnnnnnnnnnnncagttgtgatatcaatgtgtacaacatccctccagacctttttcattttggtttcttatccaagctttttgctgtttttatcaaagggaggatcaattaccatatccgcagctttgtcccactcacttggggtcactgctcccgtcaggtacgcaatcctcatacctattgtaggtctgcccgctttcatgagatacgccgctgcacctgcacacatagcatctttcgttgaaggggtgtacaagccatcttcaaattgcccgccagcaatagaatgtacaattttatggcagtaa

SEQ ID NO: 104952 - DNA, 534 bp, Enterobacter aerogenes
atgaacccattcaaaggccggcattttcagcgtgacatcattctgtgggccgtacgctggtactgcaaatacggcatcagttaccgtgagctgcaggagatgctggctgaacgcggagtgaatgtcgatcactccacgatttaccgctgggttcagcgttatgcgcctgaaatggaaaaacggctgcgctggtactggcgtaacccttccgatctttgcccgtggcacatggatgaaacctacgtgaaggtcaatggccgctgggcgtatctgtaccgggccgtcgacagccggggccgcactgtcgatttttatctctcctcccgtcgtaacagcaaagctgcataccggtttctgggtaaaatcctcaacaacgtgaagaagtggcagatcccgcgattcatcaacacggataaagcgcccgcctatggtcgcgcgcttgctctgctcaaacgcgaaggccggtgcccgtctgacgttgaacaccgacagattaaggggtctgacgctcagtggaacgaaaactcacgttaa

SEQ ID NO: 104953 - DNA, 897 bp, Enterobacter aerogenes
gtgacgcaaccagggcgcggaaaattccgcgatttgttgcaactcaaatctgctgctctgattgattcagataccggggaccaactactgtcaggtatccaaacagctctatctggcgaggattacacatacagttttgatctcagcaaactggccgaaggtaaatacaatttaggctttctggcaaaggacagctttaacaatgaaacttcatcaccattcataaatctgattaacgacaagacacctcctgttgttaattttaaatatgaaaatgcgccgctatcccccggtgctactgttttcgggcttgagaacatcagtataacgctaaatgatgagttaacagcacccagccttgtcagacttgaacttaaaggaggaccagcgtcggatagcgttatcttggggtttaaccagaatacggacggtagttatacacctgattaccctcgtctcttccccagtctggatgcaaatacggacaaatatacactaaccgcatatgctaccgacgcgaaaggtaacactactcaaaaaagcattcagttcgcctattacccaaaaaacctggtcacccttgagaagctgaaaactttgggtgttgtaaaggcgctaaaaaccagtgacaacacaccgttggccgtcatgcggacgggacagctacgacgtaacgatggctcactggctaagggtatacaaacggcaaacatcacggtcaggaaggacgcagattatgcgataaatatccttgggaacgttattcaccccggggagacaaaagaaattcagatagaccttggaaccggtgaaaactcaactgttcctattttcacagcagaaaacggttctacaggggaaagcaatttcataatcgaatttccgcaaatcaagtaa

SEQ ID NO: 104954 - DNA, 1014 bp, Enterobacter aerogenes
  misc_feature (997)..(1006): n is a, c, g, or t
atggtcttaacaggtgagcgttgggaactaggcctcggggctgaagcaaagctgtacctgaatgtgaaaaacgtcaaatctgccaccggttttgataaagcgactattcaggtgataaaacctgatgatactgttttttcaactacagatatggtttatgacagtggatcagcatccctttcaataccgtggacaaaagggaatatgagtcggtcatcatggatgcctgtatcaaacgctgatgtggaatatcgtttccgtgtgacgctctatgataaagcgggaaaccataaagttttgccggatcagaagttcatatttgactcagatcttggtgaatatactttatttgctgtttatgacccgacttctaaaacaagcgtagttccgggatttagtgaaggttacatagcatataagccgggaatgaccgttaaccaaaaccctttaacactcgtgtacagggttccatcgaataatcgaagggaatacagtaaagctggtttgaaatttgggacgattatttccgaagcgaatggatacagttatgtatccgcgaaaacggcctataaggtagcttacgtcatccataacggatatcaatggggtggaggctcactctcctataatatcaatttaggaagtgaggctccggccagcccggcagcacctgaagtatggttaacatcagatataaaaggtgaaatgaatgcaggcagctatctttgggattccaaagatctacccgtgaaattcagctctgtaaagatcactgcgtctccgcgaaattatggtcagagagcgatgagtggaaatactgagatttgtcagatacctgctggtgagactgagtgtactggtgcggtatcatggtctattccgaaatcagggaatggtattacaacatacttcttcagattgactgatatggataaaacactttcatcagtcactgtagaaaaaagacatcactggaacactgatctgtttcccaagnnnnnnnnnnggatatag

SEQ ID NO: 104955 - DNA, 606 bp, Enterobacter aerogenes; identical to SEQ ID NO: 53558

SEQ ID NO: 104956 - DNA, 558 bp, Enterobacter aerogenes; identical to SEQ ID NO: 25303

SEQ ID NO: 104957 - DNA, 504 bp, Enterobacter aerogenes; identical to SEQ ID NO: 52325

SEQ ID NO: 104958 - DNA, 183 bp, Enterobacter aerogenes
atggctctgatggctctgatggctctgatggctctgatggctctgatggctctgatggctctgatggctctgatggctctgatggctctgatggctctgacggttctgatggctctgatgaccctgacggctctgacggttctgatggctctgatgactctgacgtctctgatggttctgtaa

SEQ ID NO: 104959 - DNA, 378 bp, Enterobacter aerogenes
atggacgagcaatggggctacgtcggtgcaaaatcacgtcagcgctggctgttttacgcgtatgacaggatacgcagggcggtggtagcccacgttttcggtgaacgcactatggccacactggagcgtcttctgagcctgctgtcagtttttgacgtggtggtatggatgacggacggctggccgatgtatgagtcacgtctgaagggaaaactgcacgtcatcagtaagcgttacacgcagcgaattgagcgacacaacctgaatctgagacagcatctggcaaggctgggcaggaagtccctgtcgttctcaaaatcggtggagctgcatgacaaagtcatcgggcactatctgaacataaaacactatcagtaa

SEQ ID NO: 104960 - DNA, 276 bp, Enterobacter aerogenes; identical to SEQ ID NO: 56170

SEQ ID NO: 104961 - DNA, 393 bp, Enterobacter aerogenes
atgaacagaacatatgacgaaccagagaccgaaacggacgtgatggccgccgccttccgcaccatacgcaggtacggcatgactatcatcaccgccacgcagcatatggatgttaatggttacgtgaaaactgacccgcggatgcccagaacgcggctgcgccgctacctggggcagtatggcctgcgcggtgaggcgctgaacagggaggtcagacgtatcgttgcagggcctgagcgacgcgacagtaagctgaaggacgggatttactatacctggccttatggctgggagccctgtgattttacgccgatgatgcgccgtatttttcgcgggaagcggacccgccatgtgatgatgtcagatgaaatgccagcgctgtttctcaactaa

SEQ ID NO: 104962 - DNA, 522 bp, Enterobacter aerogenes
atgatagcgcccggacaacatggcaagaatctgcgggacattcctgagcagtgttttgattacgggtttgatcgggaagatcgctggccggggctggttctggcctctacggtaactgtgccgaacggtaacaccgatggctggcgactggcgacgcagagttgtggtggattcagctgtaacgaatttcaggccgcggttctgcccctgccagttcgcccggagatgctacggtttcttgaaaccgtcgcggaggaggaattttcgccggcgcctctggattacttcaatatgatggatgccgccgatgccgcagcagttaaaaaagggttcctgtcatgtcttcaccgcgcggggctttcctgcagtgagcataatctgtcactcctgacacaggcgctttatccggtggatgccacagcggaaaacatgaagatcctggccgggaattgtactgaactggccgcaatgaaggttcccgggggactgacgatatttatcgtgggtcagaactgtgattaa

SEQ ID NO: 104963 - DNA, 204 bp, Enterobacter aerogenes
atgatgccggcattaccaggtccgggcgtttcgttttccgctgcgcagctgccgatgatgacgaccctgagcgccagtgacggctgtcacctgtattttgagcagggcacactggtgtggatcgaggtttactcgcagggcgacaagcgctggccgttttatggcagaccagaactgacgggaattacccattcatccacgtaa

SEQ ID NO: 104964 - DNA, 867 bp, Enterobacter aerogenes
atgggaaagaggtcaagttcagttctcaattatccacttgtggataaagtgcagatttttccggtggataagtatcgcgatagcttgcaatttctgttttcactgtcattatgggtgggtaaaaatttacccataggcattgaaatggatactcaagcactcttgccagctactaaaacgtttaaaaaacgcgccagtataaagcaatctaacgaattgactgaagcagcatattacctgcctcttcaggcaaaacgtgtgctgtggttatgcctcatgcaggcctattttaacgacagccaggaagatgactctgacgtattgccgctcttcaaaatcagcgtttccgattacgtcaaatacttcaatgtcgctacgtctgtcgccagtcgtgatgtgaaggctggggtaaatgctctgggcgaatcaacggttaccttttatccaaaagaaggtgagtttgaagaagttaagcgtccgtggctggctgaagcaggaatgaagcgaggccggggttcctggcagattgaatttaactacaaggtcatgccattccttgtcggcttaacctcccagttcactacctattctctctatgactgtggccagcttaatagtgttcgtgtcatccggctttatgaaagcctgtgtcagttccggagcactggtgtctggatcaccacacatgactggttatgtgaaaggtttatgctccctgcctcgcagaaaaacaatattgctgaaatgaagcgtaccttcctggaacctgctctgaagaaaattaatgagaagacgccattaaaggtaacatataccactgaagaagatggtcgcttgctgtttaattttcttgataaaaaacaatag

SEQ ID NO: 104965 - DNA, 540 bp, Enterobacter aerogenes
atggacgctccggactatgggaaacaggtcaacttcgcggacggtccggactatgggaaacaggtcaacttcacgggcggccgggagtgtggggaacaggtcaacttcgcggacggcccggactatgggaaacaggtcaacttcgcgggcggccgggactgtgggaaacaggtcaactttacggacggcccggactatggcaaacaggtcaactccgcggacggcgcggactgtgggaaacaggtcaactccgcggacggcccggactatggggaacaggtcaactttgcagacggccgggactatgggaaacgggtcaactttgcagacggtccggactatgggaacaggtcaactccgcggacggcccggactatgggaaacaggtcaactccgcggacggcccggactatgggaaaaaggtcaactttgcagacggcccggactatgggaaacaggccaactttgcagacggccgggactgtgggaaacaggtcaactacgcagacagccgggattgtgggaaacaggtcaagttag

SEQ ID NO: 104966 - DNA, 207 bp, Enterobacter aerogenes
atgaataatactttgcagttgttctggagtagcgggctgcatatcgctagaatcttcaatatactgcacaaaaaaaatacccagttaacacaattaaaagaagaactatcaaaaaaccaaattgctggccaatttcttgctgtctttccattgttccatccctaccggtcaatccagtttgttaatcagcatttcattttgagttag

SEQ ID NO: 104967 - DNA, 5736 bp, Enterobacter aerogenes
atgtcgactgtagatacctctacagcagaggaactcaatcaaggaggctcagattttattctgacttccctcgaggctatgcgtaagaagttattggaccttacgtctcgaaatcgacttttgaatttccctatcactcaaaaagggtcttcactacgtattgttgatgaattaccagaacagctttatgaaaccctttgctcggaaatcccgatggaatttgctcctgtgcccgatccaactagagcgcagctgttagagcatggctatctcaaagttgggccagatggtaaagatatacagttaagagctcatcctagcgctaaggattgggcgcacgtcttaggaatccgtacagattttgatttaccagatagccataaaacggttgtttctgattcagatagagagttgctggaaaaagcccatcagtttatcttgcaatatgcccaaggccagaatggaaaattaacagggattcgttctgaatacgttaatcaaggtatagctttgtcagcgttgaaggaggcgtgctgcttagcaggctatgaagggcttgaggattttgaacgacaggcaaaggctgggaatgagattagtatatcttcttccaatccctctcatgacgataatcggatacaggctctgctttatccaaatgaactggaagcttgtttgcgcgccatctatggtaaggctcaaactgctttggaggagagtggcgccaacatcttgtatttggcgttagggttccttgagtggtatgaaagcgattcctctgaaaaggcacgttatgcaccgttatttacaattccggtgagatgtgaacgaggaaaattagatccgaaggatggtctttacaagtttcaactttattatacgggtgaagatattttgcccaatctctctttgaaggaaaaacttcaggctgactttggcctcgctcttcctttgttcaatgaagaggaaactccagagtcttattttgcttcggtgaagaaggttgtagagcagcacaaacctaaatggtctgtgaaacgttatggtgcacttagcttgctcaattttggcaagatgatgatgtatcttgacctcgatcctgcccgctggccttgtgacaagcgcaatatattgtctcatgaagtaattcgtcgctttttcaccagtcagagctgtggtcaagagaattccggcttacctggtggcttcggtcagcatgagtactgcatcgatagttaccctgatattcatgacaaggttccactaatcgatgatgcggatagctcgcagcacagtgcgttgatcgatgctatccgtggtcaaaacttagtcattgagggccctcctggtagtggcaaatcacaaacgatcaccaacttgattgcagcagctctgctcaacggtaagaaagtcctgtttgtggcagagaagatggctgcactggaggtcgtcaaacgtcgcttggatcgtgcggggctaggtcaattttgcttagagttgcacagtcataaaactcataagcgcaaggtgctggatgatattaatgctcgcttggtgagtcaggcgaccatgcctactatggaagagattgatgctcagattttgcgttatgaagatcttaagcagcagctcaatgaatatgccgcattgatcaataaccaatgggcgcaaacaggcaaaacgatccatcagattttgagtggtgcaacccgttatcgtcacaaattagatattgatgcaacagcacttcatatcgaaaacctttccgggaagcagttggataaagtgacccaattacggctgcgtgaccaaatagtagagtttagccgcatctacaaagaggttcgtgagcaggtgggggctaatgcagaaatatatgagcacccttggagcggtgtgaataacacacaaattcaattgtttgacagcgctcgtatagtcgatttgctacaaacttggcagacatcaattgtcgactttcaacatagctatcaagaatatgtagataagtgggcgttagaaggcgaaagccttaatacgcttcaatatattgagcaattggtagaagatcagtcgaatcttccagtgttgtgtggttcagagcatttcccagcacttagtgagctagattcacccgatgccattgcacgggtgcgtcactatttagataggttcgagttgctacaaggtcattatgtggccttgagccaggttatcgagcctcaaaagctacgacttttagaacaaggacaatcgtgtgactttcctcgtgaagagctggaaaaatatggtgcagcagaggatttcactttacgtgatttggtcaggtggcttgaatccatccaatcaattcatgatgagttatcatctatttatgcgcaattaaacgatttcaaaaatgctttgccagatggtattgcttcgtatatcgatgattcgcaagctggattgctattctgctctgagttgttgtcgattctgggtgctttaccgactgagcttattagagttcgagatcctctttttgatgatgatgatatcgatgcagtattgcgcgacttaatgtgtcaaatcgaaacattgcgtcctttaagagatggtctatctactttgtatcaattggaccagttgccttcccaagagatgctcgcgcatgccgttgctgttatccagcaagggggattatttgcatggtttaagagtgattggcgtagtgccaaggcactgctcatggcgcaatctcgtaagcctgacactaagtttgctgagttaaaacgctgctcagctgatttgctcaagtattcggagctgttacaacggtttgaacaaagtgactttggtaatcaacttggtaatgcattccgagggttggacaccgactgtgaacaactcatgttattgcgtgattggtacaagaaggtccgagcttgttacgggataggttttggaaagcgagttgcgataggctctggattatttaacctagatggtgagattatcaaaggtgtgcatttaatcgagaaatcgcagattagctcaagattaatgactttggttaaacgggtcgagcacgaggctaagttattaccgcgtatttctagcttgttggaagaacatgcatcttggttaggtgagcaaggtgtattgatgcaatcttaccgacaggtgcggaatactctcattgccttgcagggatggtttatcaatccagatatatcattagagcagatgactcattcctccgagattttgcaaaacataaacgatcttcagatatcccttgaaaatgactcgttacagttaggggcgtttttacaattaaccccattggcttgcggtgcgtataaaaataatcaactgacgttagacactattaacgacacgctgaattttgccgagcaactggttgataagataaattgtgtatccttggctacccagatcagacatttggctagtggtagtgattacgatttactatgtcgtgatggtggggaaatagtttcgaaatggaatgaacagattaaaaatgctgagttatatgcgctagaaacaaagttagagcggagtcagtggctcaagtcgactgatggttctcttaatacattaatcgagcgcaacgaaagagcaatacagcaaccccgttggttgaacgggtgggttaactttattcgttgttacgagcagatgcatgaaaatggattgcagcgaatctggagtgctgtacttgcgggctcgctcccgattgaaaaagttgaattgggtttagcattagcaattcatgaccagctggcgcgggaggttattcacatccaccctgaattgatgagagtttccggctcacagcgcaatgctttgcagaagtcatttaaagattacgacaaaaaactgattgaattacaacgtcagcggattgcagcaaaaattgcttgccgaaatataccagaagggaattctggtggtaagaaaagtgaatatacagaactagctttgatcaaaaatgagctgggtaaaagaaccagacatattccaattaggcaattggttaaccgtgcatgtaatgcgctggttgcaattaaaccttgtttcatgatggggccaatgtcagcagctcattacctagaacctggacgaatggaatttgatctggtggtgatggacgaagcgtctcaggtgaagccagaggatgcattgggtgtcatcgcgaggggcaagcaactagtggtcgttggtgacccgaaacagctaccaccaaccagtttctttgatcgaagtgccgacggagaagatgacgatgatgccgcggctttaagtgatactgacagcattttggatgctgctttgccactgtttcctatgagacgtttgcgttggcactatcgttcacgacatgaaaagttgattgcatactctaaccgccatttttataacagtgatttggtgatattcccttccccaaatgctgagtctccagagtatgggattaaatttacctatgtgtcaaaaggtcggttctccaatcaacacaatattgaagaagcccaagcagttgctgaggccgtacttcatcatgcgcaacaccggccgggtgagtcactcggggtagtggccatgagttccaagcaacgcgatcaaattgagcgcgctatcgatgaattgcgccgaaatcgccctgaatttaacgatgcaatcgatggcttatatgccatggaagagtcactttttgtgaaaaaccttgagaacgttcaaggggatgagcgtgatgtaatctttatttcctttacctatggaccttctgagcatggtggaaaggtttatcaacgctttggacctatcaattccgatgttggctggcgtcgcttgaatgtgcttttcactcgatcaaaaaaacggatgcatgtgtttagttcaatgcgttctgaagatgtattgacgagtgaaaccagtaaacttggtgttatttcgttgaaaggttttttacagtttgccgaaagtggcaaactagattccctcacaacgcataccggcagggctccagatagtgactttgaggttgctgtaatggaagcactcaatcacgctgggtttgagtgtgaacctcaggtaggggttgcaggattctttattgatctagctgtgaaagatccaggttgtcctggccgttacttaatgggcatagagtgtgatggtgcggcttatcactcagctaaatctgctcgtgatcgtgaccgtttgcgtcaagaggttctggagcgtttgggttggagaattagccgcatttggtccactgattggttcagtaatcctgatgaggttctatctccgattatccgtaaactccatgagcttaaaacattggctccagacgttgttgtaccttcctatgaatatgtagaaacgattgagtcaagcgctgaagtggcgtctgactcaattgattctcttatgcccaatttggggcttaaggagcaacttaagtattttgccacacatgtcattgaggttgagcttcctaatgttgatgctgatcgtcgtttgttgcggcccgcaatgcttgaggctttgctggaacatcagcctttatcacgttccgagtttgttgaacgaatacctcattatctgcggcaagcaacagatgtatacgaagcgcaacgctttcttgaccgagtcttggcattaattgatggcgaagaggctgaagcaaatgatgcagcgtttgagtctgaattggcataa

SEQ ID NO: 104968 - DNA, 1578 bp, Enterobacter aerogenes; identical to SEQ ID NO: 62825

SEQ ID NO: 104969 - DNA, 195 bp, Enterobacter aerogenes; identical to SEQ ID NO: 36234

SEQ ID NO: 104970 - DNA, 474 bp, Enterobacter aerogenes
atgaataatatcgagataattgaatcaggatacaatgcgttatgtgatgcttataataattccgttatcagtcttaagcgctcctccctatatgaagatttactagtccatatggatattcctgaaaaaaacaggagccgattcacttatgctactttgaatgatcgcgacgaaataatcgcaatatgtgtgtttattgtctctcttgatgagggaacaactgatgtaggatggtttgttagagcggactttagaggtaaaggggttggtagagatacagtagaaaaggcattcaacgagtttaagaatggtctcaagggggctggagttgaggctatttttattggcgccactgttgataatggtaatactccttcaatttcattggggcagaggtttataggcggagaagaaataatagaaaaagaagacgggactaccatctactcatacctcaatcgtttcacgctttag

SEQ ID NO: 104971 - DNA, 912 bp, Enterobacter aerogenes
atgataaaattcaaacgtatcagaactcacaacaacttagattttactaatcgccatcatgacatttttttctatggtgaagagttagatgagagaactggcctggcgataaaaaaagtaaacgcaagcaatgcatttcaggttaaatatgtaaaagatgaatatgcattaaaactcaatggtaataaatacaaattgttagcattgaaggatgcattaatctctatgtcgcctaaaaaagtaataatagactctacttctcttgatttccctgaaatattgtatcttttttactccattaatatgattgaaggtatagaatcatttactgttctctacattgaaccgaaagaatacagtaagtcgccttcgactgagggcggggatgaggagtatcaattaagcgatggccgacagccattttcttctcttcccgtattttcactgaatacaatcacatctggcttacaaaaaaccagcctggtttcattcttaggatttgaaaactctcgtctaggccagattttaagtaatgatgatggggcaagcttcaataaattactggcttgtatatcagtcccagcttatatcccaggctgggagaacaaatcactcagaaagcatttattacatttcgacagcatggagacagatctaagaacctgtcctggtgcaaacccttacgccgtatatcagaccttattagatatatatgcagaaaacccaagactggtgctgacatccttaggtacaaagcctacggctatcggtatctgcgttttcttaattaacaatcatccaaataatagcgttgaaaaacaattgggagcaatatatgactatcctataaaatccatcaaccgtacaattggaattggtgagatttactcctacgaactatcaataagctaa

SEQ ID NO: 104972 - DNA, 1998 bp, Enterobacter aerogenes
atgaaatttaacgagattttttcgaaaaaccgtgccgaagaattacctgatgatctctatggtaaatatgttcttcccttagggtacgaagatgtaaatctaaaaaaaacgacaaaagcaagtatagttattggggggagaggatatggaaaaacgatgttcttaaagtatcattgccaccagacagctctaagtgtgaataaagatacgattggtattgaggatctttccaatctgggtatatattggcgcccggatacatcctttagccagttattaaccgaagcttggctcggaaaattttggtcaacagctttcaaaacgtacatgagtctatcgctgattattgagtttgttaaactaaccaataatttattgtccgaaaaatctcctgttttttcgttgaaagagaagattaataatctgaaattgccagatacaatttctgaaggtttgggcattgataaaaatgcgaaacttgttgatgttagcgatcttttacatgaaagactgtttactctttgcaattggataaatgccccagttactgaaacaccaccgttttctcttgatacaaaattttcattacagaatatcattagcaaactacatgcaataactggatgcattataaagcctaattttcaagtttacattgacgagttcgagaacttgacatcagaccagcaggcaataatcaatactttaatgaagcacggatccatgccgttactgttcagtgttgcctataagaaaaatgctaatatttcacataaaacgttaggcaacgaaagcattgttgagcagcatgatttcagatatatagacttagaagaactgtatctcaatgactttgatacatttgctggtgagatattagccctgcgcttttcagattatatagaaaacactgatcatgaaaaactccgttccatatttacgtcagaacatcaaatcccgcacagacaaacgaaggagtatcaggattcaattaaaaatctggccagtaagtttcttcctgaaaaatcgacaaaagagatatcacatgaaatattcagtgatgacgcattaactaaaaaattacattcaatgattgaaaccggtttgtctaaatcaaagtcaaaattgcaagttcaatattttatagatgataaatttcctgaggcaagcctgataaatggtgcattgctgaataggaaaagtattagcccagacgaggtgttagaacaatatttgcaatataaagcaggacatacaacaaaatataaatcatggatacctaacaatctcgtcggtgtaattctctatctttataataaattaccaaccagaatctgcccactgtacgctggctataaacagtttgtatatttatcaagagggaacatcagacattttctggagttatgtcaccagtcggtaacaaaaacaaatatcacgtctccactgccgccaaaaacgataccatccatgacaatcgaagctcaattagaggccaccctgaagacgagtgaactcgaaattgaaaaaataggagattttggtgctcatggaatgcatctaaaaagagtggctaaaagacttggtgcgattttcaactattgccaatctcgacgttctcagagcgaatcagaagtaaaccatttcactttagatttaactgatataaatcttcttgcttataatgttaaggaaatcctaaatgaatcattggtgtggtccgtgctgattgaacagaaaggaacgaagagtaaatcaactgacaacctggaactcaatgattacgtcttacatccagttcttgcaccatattttggaataagccacagaaaaaagaaaaaaataaaatttagcaaaggtgaggttgaaaccatttttgtaggtagtgatgaagatttttcatccttgttaaagaaatatggagcccggtgggatatcgatgactcatcttttgatgtttctagttcagtcacatcataccagttgggcctgttatga

SEQ ID NO: 104973 - DNA, 894 bp, Enterobacter aerogenes
atgaaaatagatcatattacagcaagagatactgaagcgattattgaacaatccaaaaaattaatcaagattggttactgggataatgtaaaagtatcagtactgcaacgctggttagataatttcaaggatgaaaaggaaaaatatcttgcagcctctgtgttaagcgagttgatatatcgtaacagagaaactgttacatctatgggctataatatattctcaattattctcccacagatcttagaggagttagatatttaccatattgaggatattgaaaaatggatgaatgacatcaactcgccaaaacatgcaaggaatcttccgtttcgaacgtccgtaataaataatgtggatagtaaagtcactaaaagtggtgatgtaatacacacattcctacaaagagattttttcgataaaaacttaggggtaaaagttgaaaatatagaaaaattgccaccaagaatcaaagcgatagttttttttgatgatatgcttggttctggcactcaaattgacactttcatgaaagaaacaaatcttgatgaacttggaaagaaaataatattcattccatttgcggctctacgcgattcaacaataaggatacaatctaaatataaaaacctaattattaggcctgttgagtacttggatgaaaatcatagtttctttagagcatccaacaggagaataaatagagaatatttctatacacataatgacttcttaagattgtacattgatatatgtaataagaactcaataagcaatccattagggttcggtaatttggggcttagttatgtcttggcaaactcaactccaaataataatctttcattcctctggtttgaaaatgaaggatggaataggttattcaaaaggtaa

SEQ ID NO: 104974 - DNA, 1242 bp, Enterobacter aerogenes
atggctatcagacatgatgatctgagggcggtagcattccaaaaacaagagcagaagaggcggaagttcaagttgagcatgggcaaaacgatttcaagaaaaaaacgtctatctcagtactatacaaaccgggatgtggcagagttgcttatctcatcattaccatcagacgaagcaagtacaatcattgacttaagtgctggtgaaggctcgttgttgatgacagctgcgctcaaatacgacaacgcaaagctctacggaattgatattgatgatgaaaactgcagaaagttagacctattacaaaacacgacgagtatatgtttagatgcaacccattcagccagttttgataaaataaaggcacaaaacagtacatatggcatagtcattggcaatcctcctttttatacagctgaacatactgcctatacaaggttcttatttaaggagtgggcactaaatcataaaacaaaatattacagagctgaggttttgttcttaatgttatcgcttaagttgcttgatcgagacagttgttgtggaattgttgtacctgatacgatattttcaagcgagaaatataaaccactcagagaaaaaataacctcattatttaaatatatagatgttatagaattagataataaggcatttttgggaactgaagcaaggactcatattctcactgtcagtaacaaaaaatcaataagcccatcaataacaacaagaagttcaaaaaaaaataaagcgataaggcttaaaaaagaagagtttattgaaagggccgaccatcaatataactcttttaaatataacaataacgaaaaaacgattgaaacttcaggtataaaagttatgagagggaatatcagcaaaacgaaaaaaactcaactgcatgatgcgataatccattcatcttctttttataatgatttttctttatttgaaaataacaatgacagtgcagaaaatggttcagccgtacaggcggtgaaaggagatgttgttgtaccccgtgtaggaacaagatgtttggggaaagttgggatcatacgaaacggttctttttccattacagattgtgtttttgttatcaaagcttctgagtacgaatgtggtgaaatggttgccgcggcattaaaatcgaaatttggagtcgactggattaaaagtatttcgaaaggcattggagcgcagtacataacattaaatgacataaaaaaactacccctgcgataa

SEQ ID NO: 104975 - DNA, 705 bp, Enterobacter aerogenes
atgaacccattcaaaggccggcattttcagcgtgacatcattctgtgggccgtacgctggtactgcaaatacggcatcagttaccgtgagctgcaggagatgctggctgaacgcggagtgaatgtcgatcactccacgatttaccgctgggttcaccgttatgcgcctgaaatggaaaaacggctgcgctggtactggcgtaacccttccgatctttgcccgtggcacatggatgaaacctacgtgaaggtcaatggccgctgggcgtatctgtaccgggccgtcgacagccggggccgcactgtcgatttttatctctcctcccgtcgtaacagcaaagctgcataccggtttctgggtaaaatcctcaacaacgtgaagaagtggcagatcccgcgattcatcaacacggataaagcgcccgcctatggtcgcgcgcttgctctgctcaaacgcgaaggccggtgcccgtctgacgttgaacaccgacagattaagtaccggaacaacgtgattgaatgcgatcatggcaaactgaaacggataatcggcgccacgctgggatttaaatccatgaagacggcttacgccaccatcaaaggtattgaggtgatgcgtgcactacgcaaaggccaggcctcagcattttattatggtgatcccctgggcgaaatgcgcctggtaagcagagtttttgaaatgtaa

SEQ ID NO: 104976 - DNA, 852 bp, Enterobacter aerogenes
atgaccagccgcaacggctacttcccaggcaagaccaaggcgaagcgcagcgcgatcatcacgccgcgcaccgcccaggaaacacagattgcggccatgccgcgccagtcacgcgcagcgcgccaggcgctcgccaagacgccaccgctgcgcgtcggcggcgatggcctggtcgaaggtgccgaccgcatcatgcggacgccgaccgagcaccaggccgccggcgtcgctttcaaggtcgcgcgcatctacttgcgcgtcagcaccgacgagcaggacttgaccaggcaggccgccatcgtagagagcaccagggccgccggcttctacgtcgccggcatctaccgcgagaaggcttcgggcgctcgcgccgatcgcgccgagctgctgcgcatgatcggcgacctgcaacccggtgaagtcgtcgttgcggagaagatcgaccgcatcagccgcctgccgctgcccgaggccgaacgcctcgtggcctcgatccgcgcccagggcgcgcgcctggctgtccctggcgtggtcgatctatccgacctggccgccgaggcgaagggcgtggcaaaggtggtgctggagtcgatccaggacatgcttttgaagctggcgttgcagatggcccgcgacgactacgaggatcgccgcgagcggcagcggcagggcgtcgagctggcgaaggacgccggccgctacaccggccgcaaggccaacacaaaggtgcatgaacgcatcgtggcgctgcgcagcgcaggccacagcattccagagacggccaggctggccgggtgcagtgaaagccaggtcaagcgcgtatgggcgctgcacaaccaggcgcaggcgtga

SEQ ID NO: 104977 - DNA, 459 bp, Enterobacter aerogenes
atggctgcaaaagcgaaaaacggagtgattggttgcggtccacacataccctggtccgcgaaaggagagcagctactctttaaagccttgacgtacaaccagtggcttttggtgggccgcaagacgttcgaatctatgggagcactccctaataggaaatacgcggtcgttactcgctcagcctggacggccgataatgacaacgtaatagtattcccgtcgatcgaagaggccatgtacgggctggctgaactcaccgatcacgttatagtgtctggtggcggggagatttacagagaaacattgcccatggcctctacgctccatatatcgacgattgatattgagccggaaggagatgttttctttccgaatattcccaataccttcgaagttgtttttgagcaacactttagctcaaacattaactattgctatcaaatttggcaaaagggttaa

SEQ ID NO: 104978 - DNA, 252 bp, Enterobacter aerogenes; identical to SEQ ID NO: 30842

SEQ ID NO: 104979 - DNA, 321 bp, Enterobacter aerogenes
atgctcacgatgtgggtgacggaagacgaacaccggcggctgctcgagcggtgcgacggcaagcagctggcggcgtggatgcgtcagacctgcctcgatgagaagcctgcacgtgccggcagactgccgtcgatatcgccggcgctgctgcgccagcttgccggtatgggtaacaacctgaaccagatcgcccggaaagtgaatgccggtggtgccggtcatgatcgggtgcagatcgtggccgccctgatggcaatcgacgcgggactggagcggctgcggcatgcggtgctggaaacagggggggatgatgatcgttaa

SEQ ID NO: 104980 - DNA, 246 bp, Enterobacter aerogenes
atgacacacctgaaactgactcccgctgaagaaaagcgcctggcggacgcctttgtcgctcaggcactggccatgggcctgaaagggaacagaacgctgccaaaggcggtaaaacaacaggtgcgggaaagggtgctccggtccattcaggacgaacgtgaagccagacaggcgcaggaaatacgtcgggagaaatacgaggcggcggaaaccacctttacctggcagccgcgacgccgccggtga

SEQ ID NO: 104981 - DNA, 948 bp, Enterobacter aerogenes
atgaccagtaacgaacgaattctgcagccatttactttaccgaatgggactgaactgaaaaaccgtttgctaatggcgccaatgaccacctgcaccggttatttcgatggtaccgtcaccagcgagctcgttgaatactatcgcgcccgcgccggcagcatcgggactatcatcgttgaatgctgctttattgatgattatggtctggccttcccgggcgctattggcattgataacgatgaaaaaatcgccggactggcgaaaatcgccgaagcgataaaagcggaaggctcgaaagcgattctgcagatttaccacggcggccgcatggttgacccacagttgattggtggtcgccagccggtggcgccgagcgccattgccgcgccgcgcgacggcgccgccatgccgcgcgccctcagtggtgaagaagtcgaaggcatgattgccaaatttggcgacggcgtacgccgcgccattctcgccggtttcgacggcgtcgaaatccatggcgccaacacctatcttattcaacagttctattcgccgaactccaaccagcgtgacgatgagtggggcggcagccgcgacaaccgcgccagattcccactggcggtgctggacatcacgcataaaatggcccgccagtacgctgacgatgcctttattatcggctatcgcttctcgccggaagagatggaagtcccggggatccgcttcgacgacaccatgtatctgctggaaaaactagccgcccgcggcgtcgattacctgcacttctcggttggcgcgacgctgcgcccgtctatcgtagataccagcgatccgacgccgctgattgaaaaatactgcgccatgcgttctgaaacgctggcgcaggtgccggtgatgggcgtcggcggggtggttaaggggtctgacgctcagtggaacgaaaactcacgttaa

SEQ ID NO: 104982 - DNA, 420 bp, Enterobacter aerogenes
atgtccgataacgcagactccacgctgaatgccctcaaggcgctcattgccgcctttcagaccggcgccactccggttacggttaaagcctccaccgcggaagccgccagtttaccgccaaagtttcccgggccggatgacaaaaagcccgcggataaatccgcgcagcagaaagccgaatacaacgagcgcggccgcctgccggcgagcagaacgcagaccgaaggtaactacgccaggcagtacctggaaggatatgtcggggagtcagaagatccctcggacaaaaaaacggaaccgggctgcccggccagcctgcatatcagcctgttcttcgacggtacctgctgtaatgaagaagatggtgatgaagtgtatggctcgcgaaacccgccgctgaccaatattgctcggctctaa

SEQ ID NO: 104983 - DNA, 330 bp, Enterobacter aerogenes
atgggattcccgtcacccgcaaaagactatgtagagcaaacacttacaataaacagactttgccagattgatgctaattgccgcgtactggagacgagttcgggttatgccgttatcgatgtttcccggagaccaaagcagggcgatcacgtgctcgtttctttctgcgggataattcagtttggcatcgttcgcggtcgcgcgctaattacttccgatggcgaagcgatcgagggtgacgccctggacgatgtggaggtgaagggcgttctgacgttcctgattaaccgcgcaactttcgttgatgaagacccgaaccccgttatttaa

SEQ ID NO: 104984 - DNA, 1599 bp, Enterobacter aerogenes
atggcttttactcaattaacaatacgccagataatacaaaaagtaagtgaaggtgaaataagaatccctgcattccaacgagactttgtgtgggaaccagataggattcagtttctaatggatagtatatataaaggttatcctattggcacagtacttttttggcgaagtagagaaaaattgtcatttgatcgtgacttaggtccatttacattacctgaacccaaaaaagaatatcctatcgattatgttttagatggacaacaaagaattacatctatattttcgacatttcagactgagcttcaaaaaaataaagataataagtgggtgccaatatatttcgatttagatgcaccggaacatgctcaggattcacagttcatagccacagatgatgatgatgttccagatacttttatcccattaaatattctttttgatgtagttgagtatggtaaatactctagaaagattaccaacgatatacacataaaaaaactggacgaattacaaacaaagtttaaggaagcaagtatcccagtcgaaactgtcgagacggaagagcattcaaaaatagcaatcatatttgaaagaataaatagaaatggtatacctttaaatacataccaattgctatccgcatggacatggagcagtgaattcgacttaagagcaaagtttgaagagttatcaagcaaattagaagatgtcgagtatggtgatttaggagatgaagaggatctgttaatcaagtgctgtgctgcggccatgaaagaagacagttcttctcatgctattgtagaattaaaaggtgatgaagtaagaaataatttcattacttttcagaatggattgttaggcgcaattgacttcctcagaagggactgtggagctgtttcattaaaagttcttccatataaatcaatgcttattccattaacccgtttctttatgactgataagcctgctggtgtacatcccgatgcaacccaaaggcacttattaaaaaaatggttttggcacacttgtttttcaagaagatattctaatagcgtagattcagcagtagcccaagacatatcagccatggccgatctcagaaataataaaacagaaaaaattgaacgaaaaaaatttgaggtaactagtgactttttcttagaaaatgcattttctgtaagctctgtgaatacaaaaacatttatacttttactcgctaaaaagaaacctaaatcttttatctcaggtgcagatgttgatcttgatgatgtattaacatcatgcaatcgaacggagttccatcatatattcccagataactacctgaaatcaaaatgtggtatcgatgaaagaataaaacgattctgcttagctaattttgcatttttatcccaaaaagataaccgttcaattaaagataagtcaccaactgattatcaaacacaaattcataaggatttaaaaaacggaatatttgagcactctcttattccagtcaatggattaaatatgaagtatgagatattcctcgaagcaagggttgaactcttaaagcagacagccaatagtttaatagatggtacatttactagctaa

SEQ ID NO: 104985 - DNA, 186 bp, Enterobacter aerogenes
atggtacctaccatgcaagataaaaagaaaccaaatttcgatcgcagcaaaagcacgatgaagaacatccgttttgaagatgagcttttggaacagattgagaaagctgccggaaagggcaatttcagtaagtgggtgaaagaggcgtgtaaagaaagacttatcacgttggatttagaaagataa

SEQ ID NO: 104986 - DNA, 2136 bp, Enterobacter aerogenes
  misc_feature (2102)..(2111): n is a, c, g, or t
gtgaagtatcagatagtaggtggtgcaggcctgcaccgcagcgaaaccaaaacagttgatatgatggttaagcagttaccagatagttggtttggctatgctggcttggttgttactgatagccaaggatcgatggaaatcgatacgctaattattactgctgaccggctgctattagtcgagcttaaagagtggaatggtaacatcacatacgaagggggtaagtggctgcaaaatggtaagccacgaggcaaaagtccctatcagatcaagcgtgagcatgcactgcgactaaaagatttgttgcaggaagagctatctcgtaagttgggttactttttgcatgttgaggctcatgtagtgctgtgtggcactgcaggtcctgagaacttgccatcaagtgagagtcgctatgttcatacccgtgatgaattcttgactataggcaaccccaaaaattacgaaaagttggtgcaagacactaacttttctcatctttttgagggggggaagcctcggccaaattcagatgaggcattaccgatcattaagtccttcttcgaaggcccaaaagtcaggcctttaccacttaaagaaagcggttatcttgcgaacgataagccattctttagtcaccctcacatggtctacaacgaattcagggctacccacaaagacaatagtcaacacagaggtctgctacgtcagtggaactttgatgccctaggtgtagcaaacgcaatgcaaacattgtggactgagatagctctgcgtgagacccgagtaggtcgcttagttcgtcatggcagtgcaactatgcaggattatatgttgcgtgcagtaagggaactatccgaggaggatataactgatgatgcccgtgagctgtatgagttacgccgtagttttaaccgattggatgagatactagatagcgaagctgacggatggagtaagtctgatcgtattgatcgcgttcgtgcattattggctccattctctgaattacatagcctaggtatcggccattgtgatattgacccgcacaatctatggtacgcaggggatcaaaagagcattgtcgttactggttttggcgcagcctcgctggagggacataatagcctggaggcattacgtccgacactgcaaagtgctccatatactctgcccgaagatgcttttgaagaagcagttgagccctatcgcctagatgtattcatgttggctgtaattgcttatcgtatttgttttgcaggcgaatcattactaactcctggacagatgcctgaatggcgagctccattaactgatccttttagcggtattttaaatagctggtttgaacaagctcttaaccttgagccaagtaaacgctttccacgtgcggacataatgctcaatgagtttaatgcggctactaaggaacatagccaagaatttgatgaagctaaccagatttatcaagagttaaagcaaaacaaattctttcgcgaagggatgaacagcgttggtgtgttaattgagtttcctccgcttcctgaacagttgtctatggtttaccctgctcttgctgctattgctacgactggcagcatcagttatcactgtgaacaaggtgggaaagccctgcaggtaaaattgtgggatggcgtgattttgaatcctcagcaacctggtgttaaccgccgtatccaagcttttaagcagcgaatcgataagattacgcatttaaatctgccaactcctaaggtgcagtcctgtggtctattaggacaaggcggcttgtatgtagtgagcgagtatgtggatggtctaccgtggtcacagtttattgctgagaacgtgttagaacaatcccaacgtttcaccattgcggagacgttgatcaacaccattcatgcttttcatgaaaagcagttacctcatggagatctttgcccagagaaactgctggtacaagtcggggagcaggcagcaattaccctgattggattgcttgaattcagtgatgaattaactgcagataatcgctaccagccagataatcctgaaagtactgatgcttttgggcgagattgctttgcagtatatcgtatgtnnnnnnnnnnatcgtatggtggaggagctatttag

SEQ ID NO: 104987 - DNA, 660 bp, Enterobacter aerogenes
gtgaataatccgggagggttgcagtccttgcaggactcacttaagggcttaccagactgggcctcagaacgggtcatgcagcaaattcgtcagctcacaaactacgagccagttatcggcattatggggaaaacaggggcgggaaaatcgtcgctgtgcaatgctctgtttgccggtgaagtgttgccggtcagcgatgtggcggcctgtacacgcgaacctctgcgctttcgtctgcaagtcggcgagcgctatatgacgctggtggaccttcccggcgtgggggaaagtggtgcacgcgatactgagtatgctgcgctgtaccgcgaacagctaccccggctcgacctggtactgtggctgattaaggctgatgatcgggcgctggccgtagatgaacatttttaccggctggtgattggtgaaacataccggcataaggtgttgtttgttatcagccagtccgacaaggttgaacccgcctgcggtggtgaaaagctgtctacagagcagaaacaaaatatcagccgcaaaatctgtctgctgcatgagctgttccaacctgtaaaccctgtttgtgcggtgtcggtacgtttgcagtgggggctgcgggtgatggctgaacggattattcgtagcctgccacgggaggccagttag

SEQ ID NO: 104988 - DNA, 546 bp, Enterobacter aerogenes
atgatcatctacgcttctgaatttaatgaaatacctagtgctttaagcaacaacgttgaactcaaagacaaaatgttatccctcattgccagtaaaaagattgcaggaaaagcgactgaaggggcaggccaagtagaagagttcagagcaattttatctcagctcacaagaggcgaattacgcttagatgatgctattcgagcagttgaggctagtcttccacgttatacatcaatccattcaggggataatcgcgtctttgcgagtggctgggcagagcgtttgacaagaacacaattcagtcgattctataaccaagcagttttagaaatcgaaatagcaaaggggcacgacgaatgcttcgttccgccatcttcccaagaacaagcatcgtctcagtgctcacaagttcttgcaggtcgttctcatgacgtcagccacttacttagattactagttacttcttatgaggaaggcaactgggacaaaacgcctaagatccccgatcatcctcattgcacccacgtaattaaaccaatgtcttga

SEQ ID NO: 104989 - DNA, 927 bp, Enterobacter aerogenes
  misc_feature (851)..(860): n is a, c, g, or t
atggaaaaaaatggtctcttcagtcagcgcattcgcttgcgccatttacatactttcgtcgccgtcgcacagcagggaaccctggggcgggcggcagaaaccctgaatcttagccaacctgcgctatcaaaaacgctcaacgagctggagcagttgaccggtacccgtctctttgagcgcgggcggcttggcgcgcagttgacgctggtaggcgaacagtttcttacccacgcggttaaggtactggatgccctcaataccgcaggccaggctctcaatcgtaaagaaggcatgaatagcgatgtggtgcggattggcgccctgccaaccgcggcgctcggtattttacctacggtgattggtcaatttcataaacagcaaaaagacatcaccttacaggtcgccaccatgaataacaccatgctgctggcggggctaaaatccggcgatgtcgatattggtatcgggcgcatgtctgatccagaactgatgagcggcctcaactatgaactgctgtttcttgaatcgctaaagctggtcgtccgccccggccacccgctgctgcaggagacggtaacgctcagccgggtgatggaatggccggtggtggtctcaccgaaagggacaatcccgcggcagaatgcggaaacgctactgcaaagccagggttgtaaaattccccccggctgtattgaaacgctgtcggcctcgctttcacgccagctcaccgtcgattacgactatgtctggttcgtcccttccggcgcggtgaaagacgacctgcgtcgcggtttgttaacctcattacctatcgccaccgaaggcgccggcgagccgatcggtattcttannnnnnnnnnggggagccgatcggtattcttacccgggtggacgccagcctgtcgcagggggcgcaaactctactga

SEQ ID NO: 104990 - DNA, 615 bp, Enterobacter aerogenes
  misc_feature (571)..(571): n is a, c, g, or t
atgccccgggctttgttgtttttgcagcatttccccggcggcgctgcgcctggacgggctactggctggtggtgcgtcctgtgggattcccggcgacgctgcgcctggccgggctactggctggtggtgcggcctgtgggtttcccggcggcgctgcgcctggacgggctactggctggtggtgtggcctgtgggatgggtagcccgggcgaggcatttatgccgaccccggggaggtttacaggggctagatgcgaaaagagcccgtactttcgtacgagctcttatctcgaatatggcggtgagggggggattgactcgcttcgctcgccgttactcggcccatccatgggcctcgccccttcggggccaacgcaggcgttgttcaaaaacgctcccggcgtttttgtcggggcagcccgcttactgcgtgcgcggtctgtccaactggctgcgccagttgtcgaacccggtcgggggttctcatcccccccaacggagaatataaaagaaaaaagcccgtactttcgtacgagctctcatctcgaatatggcggtgagggggggattnagcccgtactttcctacgagctctcatctcgaatatggcggtga

SEQ ID NO: 104991 - DNA, 192 bp, Enterobacter aerogenes
atgaggaacttcaaaaatgcgcagcgctttaccgctcacgggatgcgccacgcgaaaactggtcatgccaaaaaccggatagcttacgctggggtgcagcgcagcctcgggtacgtcgcaaatcacctgcttgccgtggtggataaccagcattcggtcggcaaaggcttcagccgcggcaagatcgtgtaa

SEQ ID NO: 104992 - DNA, 720 bp, Enterobacter aerogenes
atgcgacttgataagtttatcgctcagcagcttggcgtcagccgtgctattgccgggcgtgaaatccgcggcagccgcgttaccgtggacggcgacattgtgaaagatgcctcctttaagctccagccagagcatgaggtggaatatgacggcaatacgctgacccagcagcacggcccccgttactttatgctcaacaagccgcagggttacgtctgttcaacagacgatcccgatcatccaacggtgctttattttctcgatgagccggttgcccataagctgcacgccgccgggcgtctggatatcgacaccaccggtctggtactgatgaccgatgacggtcagtggtcgcaccgcatcacttcgccgcgtcatcactgcgaaaaaacctatctggtggagctggaaaatccgctagaagagggcgtcgccgagcagtttgccaaaggcgtacagctgcataatgaaaaagatctcaccaaacctgcagtcctcgaagttatcactccgacagaagtgcgcctgaccatcagcgaaggccgctaccaccaggtaaaacgcatgttcgcggcggtgggtaaccacgtcgtgggattacatcgcgagcgtatcggcgacattaccctcgatgcgtcgctggaacccggcgaataccgcccgctgacggaagatgaaatcgccagcgttggcgccccacaagcacggagtaaaacgtga

SEQ ID NO: 104993 - DNA, 1197 bp, Enterobacter aerogenes
gtgacgacaaagcagaattcttcatttgggattgtgtttattcttggcctgttggccatgttaatgccgctgtcgattgatatgtatctgccggcgctgccggttatctcgtcgcagttcaacgtgccggacggcagcgcgcaaatgacgctcagtacctatattctgggctttgcgctggggcagttgctgtacgggccgatggccgacagcattggccgtaaaccggtgatcctcggtgggacgctgatattcgccgcggcggcggtggcctgcgcgttgtcgcagaccatcgagatgctgattactatgcgtttcttccacggcctggcggccgcggcggccagcgtggtgatcaacgccctgatgcgcgatatctacccgaaagaggagttctcgcgcatgatgtcatttgtcatgctggtcaccaccattgcgccgctggtggcgccgatggtcggcggcgcggtgctggtgtggttcagctggcacgcgattttctggatcctggcgctggcggcgctgctggcatcggcgatgatcgctttctttattagcgagacgctgccggtagaacggcggcagaaatttcatattcgcaccacgcttggcaacttcgccaccctgttccgccacaagcgggtactcagctatatgctggccagcggcttcagttttgccggcatgttttcatttctcagcgcgggtccatttgtctacatcaacattaatcacgtgtcgccgcagcactttggctactattttgcgctgaatatcgtgttcctgttcatcatgaccatcattaacagccgctttgttcgccgggtcggcgcattgaacatgttcagagccgggctgtggatccagctggcgatggcggtgtggatggtggtgtgtgcgctgcttgatgttggtttctggtcgctggtggtgggcgtggcggcgttcgtcggctgcgtatcgatggtctcctctaacgccatggcggtgatcctcgacgagtttccgcatatggcgggaaccgcatcgtcgctggccggaacatttcgctttgggattggcgcgattatcggcgcattgctgtcgatggccacctttaccaccgcctggccgatgctgatttctatcgcattttgcgccgttagctccattctcttctatctgtacgccagccggcgacgaaaagtcgcacattaa

SEQ ID NO: 104994 - DNA, 345 bp, Enterobacter aerogenes
gtgaatacacagcaactctctatcgtacaccgactgccgcagagctatcgctggctggccggttttgcgggttcaagagttgaaccgattccgcaaaacggcgctgagggcgaaaatagccttgtggcattaaaactgctcagcccggacggcgagaaagcgtggccggtgatgcgcacgctgagccaggcgctgagcgacatcgaagtggactgttccattcttgagtgtgaaggcgaaccgtgcctgttcgttaatatgcaggatgagtttgccgctacctgtcgtctgaaaaatttcggcgtggccattgccgagcctttctctggcaacaaccccttctga

SEQ ID NO: 104995 - DNA, 1590 bp, Enterobacter aerogenes
atgggccagccgttattagacattgacgacctctctatcgccttccgccagcaaggggcaagccaaacggtcgtcagcaacctgacgctgcggattgccgcaggtgaaacgctagcgttggtcggcgaatcaggctccggcaagagcgtctccgcgctgtcggtactgcgcctcctgccctcgccgccggtcagctatcccagcggcgatattcgctttcacggtcaatcattgctgcacgccgatgaacgaaccctgcgtgggatccgcggcaaccgcatcgcgatgattttccaggagccgatggtgtcgctcaatccgctgcataatctggagaaacaactgtacgaggtgctttcgctgcaccgcggcatgcgcaaagaggcggcgcgcggcgaaatcctcgactgtctggatcgggttggcatccgcaatgcctcacgacggcttgccgactatccgcaccagctttccggcggcgaacgccaacgggtgatgatcgccatggcgctgctgacgcgcccggagctgctcattgccgatgaaccgaccaccgcgctggacgtctcggtacaggcgcagattctgcaactgctgcgcgaactgaagcgtgagctcaacatggggatgttgttcatcacccacaatctgagcatcgtccgccagcttgccgaccgggtggcggtgatgcaaaacggccgctgcgtcgaacaaaacggttgccgggagctgtttcaggcgccaacgcacccgtatacccgccacctgctggatagcgaaccggccggcaaaccggtgccgctccccgccgacgcgcccatcctactgcaggcccgcgatcttaatgtcgccttcccaatccgcaaagggatcctgcgccgggtggtcgatcacaatcgagtggtcaaccatctgacttttaccctgcgggccggagaaacgctggggctggtgggagaatccggctctggcaaaagcaccaccgggctggccctgctgcggctgattaactccagcggagaaatgcagtttgccggcgagtcgatccagggacgaaatcgccgccagatgctgccgctgcgccgacgcattcaggtggtctttcaggatccgaattcatcccttaacccgcgcctgagcgtcctgcagattatcgaggaaggattacgcgttcaccagccgacgttgacgtccgcgcaacgtgaacaagcggtgattcaggtgatgcaggaagtggggctcgatcccgcgacgcggcagcgctatccggcggaattctccggcggccagcgccagcgtattgccattgcccgggcgctgatcgtcaaaccgcagctgattgtgttggatgaaccgacgtcatcgctggataaaaccgtgcaggcgcagatcctggcgctactgaagacgctacagcaaaagcatcagctggcctatctgtttatcagccacgatttacgtgttgtacggacgctctgtcatcaggtgatagtgctgcggcagggagaagtcgtcgagcagggtgaatgcgagcgcgtatttacggcaccgcttcaggagtacacccgccagctgctggcgttaagctga

SEQ ID NO: 104996 - DNA, 1026 bp, Enterobacter aerogenes
atgtcatttctctcccccgttaatcaggcccgctgggcgcgttttcgccacaaccgccgcggctactggtcgctgtggatcttccttgcgctatttatttgcagcctgtgcgccgagcttatcgccaacgataaaccactgctggtgcagtatcgcggtagtctctacgtaccggcgctgaaaacctatagcgaaacaacctttggcggtgattttgccaccgccgccgactatcaggatccctggctgcaaaaacggctggcggaaaacggctgggtgctgtgggccccggtgcgtttcggcgccaccagcatcaatttcgccaccgacagccccttcccttcgccgccgtcccggcacaactggctgggtaccgacgctaacggtggcgatgtattcgcgcggatcctctatggcgcacggatctcattattattcggcctactgctgacgttcttctccagcgtgcttggcgtgcttgccggggcgctgcagggctactacggcggtaagctcgacctgtgggggcagcgttttattgaagtatggtccggcatgccgacgctatttttaattattctgctctcaagcgtggtgcaacctgatttctggtggctgctggcgattaccgttttatttggctggatgacgctggtcggggtggttcgcgccgagttcctgcgcacccgtaactacgattatattcgcgccgcacaggcgctgggggtcagcgatcgccatataatcctgcgccatatgctgccgaatgcgatggtcgccaccctcaccttcctgccgtttattttgtgcagttcgataaccaccctgacctcgctcgactttctcggctttggcctgccgctaggctcgccatcgctgggcgaactgctactgcaggggaaaaataacctgcaggcgccgtggctggggatggcggcatttttgtcggtggcggtgctgctgactctgctaattttcattggcgaagcggtccgcgacgccttcgatccgggtaaggcggtataa

SEQ ID NO: 104997 - DNA, 1095 bp, Enterobacter aerogenes
atgggcgcctacctgctccgccgactattactggtgatcccgacactctgggccatcatcaccatcaatttttttatcgtgcagattgcgccaggcggtccggtcgatcaggcgatcgccgccgtggagttcggcgaccgcagcgggttgcccggcgcaggagatagcggtatgggcgccagccatgcgcgtaccggcgttggcaatatcagtgaaggccattatcgcggcggacgtgggctcgatccggaagtgattgccgaaatcacccaccgctacggcttcgataaacccattcacgaacgctactttaagatgctcggcgactatctgcgttttgattttggcgatagcctgtttcgcagcgcttcggtgctgcagttgattaaagacagcctgccggtatctattaccctcggcctgtggagcacgctgattatctacctggtgtcgataccgctggggatccgtaaagccgtcagtaacggcagccatttcgacgtctggagcagcacatttatcatcatcggttacgccatcccggcgtttctgttcgcgatattactgatcgtgattttcgccggcggcagctatttcgatctttttccgctgcgcggcctggtctccgctaattttgatagcctgccgtggtatcagaagatcgccgactatctctggcatatcaccttaccggtgctggcgacggtgatcggcggttttgccgccctgaccatgctgactaaaaacagtttccttgatgagatccgcaagcaatatgtggtaacggcccgcgccaaaggcgtcggtgaaaaacagatcctgtggaaacacgttttccgcaacgccatgctgctggtgattgccggttttcccgccacctttatcagcatgttctttaccggttcgctgctgattgaggtgatgttctcgctcaatggtcttgggctgctcggctacgaagccaccgtgtcgcgcgattacccggtgatgttcggcactctgtatatcttcacgttaatcggcctgttattaaacattgtcagcgacatcagctatacgctggtcgatccgcgtatcgatttcgagggccgctaa

SEQ ID NO: 104998 - DNA, 1806 bp, Enterobacter aerogenes
atgtttgcgcgcatcggcctgctgctgctggctttatttagcctgagtagccaggcgcaaaccattaaagagagcgaagcgttcgctattatcggcgagccaaagtatgccgttgactttcatcacttcgattacgtcaatccggacgcgcctaaaggcggcagtataacgcttgccgccattggcacctttgacaattttaaccgctacgccctgcgcggtaaccccggcgtacgcaccgatgcgctgtatgacaccctgtttaccacctcggacgatgaaccgggcagctactacccgctgattgccgatcgcgcgcgctttgccgatgatttctcgtggatggaaattaccatcaacccacgtgcccgctttcatgacggtagccccattaccgccagcgacgttgctttcaccttccacaaatttatgaccgaaggggtaccgcagttccgtcttatctataaagggacgaccgtcaaagccatagccccgctgacggtgcgcatcgaactggccaagccgggcaaagaaaatatgctcagcctgctgtcgctgccggtaatgcctgagtcattctggcgccatcataaactgagtgacccgctttcaacgccgccgctcgccagtggcccctatcgtatcagccgctggcgaatggggcagtatattgtctattcgcgagtcgagaactactgggccgccgacctgccggtaaaccgcgggcgctggaacttcgacacgattcgctacgactactatcttgacgataacgtcgctttcgaagccttcaaggccggagcggtagatatgcgcgaggagagttcaacaaaaaactgggccacgcgctatatcgggcgcaactttagcaacggttatattgtgaaagacgatcgaacgaatacctcggcaaaggatacccgctggctggcttttaatattcagcgcccggtctttgccgaccgtcaggtacgtgaggccatcacccttgcatttgatttcgaatggatgaataaggcgctgttttacggcgcctacagtcggccaaacagctactttcagaacacagaatatgccgctcgtgattacccgaaggccgatgagctcgccctgctggcgccgatgaaaaaagaattgccgcctgaggtctttacccggatttatcagccgccagtttccagcggcgatggttttgaccgcgccaatttactcaaagcagatgccctattgaaccaggcgggatgggtgctaaaaaaccgtcagcgcgttaatgccaaaaccggcaaaccgctgcgctttgagctgctgctcgcctccggcggcaacgtcagttgggttctaccgttccagcataatttacagcgtttaggcgtgacgatggatatccgtcaggtggataactcccaggccaacagccgactgcggagccgcgattacgacatgatgccctcactgtggcgcgccaccgcctggccagatacgggcttacaggtttcgtgggcctcggactatattaactccagctataacgcgccgggagtgcagaacccggcggtcgacgcgttgattgcgcagatcgtgcgctggcagggcaacaaacagaagcttctgccgctgggccgcgcgctcgaccgggtgctgacatggaactattacatgctgccgatgtggtatatggcgcaggacaggacggcctactggaataaattttccttcccgcaaacacgcccgacctactcctccggttttgatggctggtggtacgatgttaacaaagccgccaggcttcccgcggaccgacgttaa

SEQ ID NO: 104999 - DNA, 1563 bp, Enterobacter aerogenes
atgctaacccgctacttttcaccccgacgtaaaatctggcttaccagtatttgtatcggcgttgccgtcgcactactggccggcagcatccagtttatggttatctaccacaaccgctctgagcgtttcgatcagataatcaataacgtcagccactaccttaatagctatttcgctgatttaagcaaaaccattgatggcctgcagccgctgctcgatcagccctgcgaacatattgactccggcctcgccgccagcgccgcctttagtcccaacgtgcgcgccttcctgctggtgaaaaacggcaaagcgttctgctcatccgccaccggcgcaatggacacaccgtttaaacaattgataccgcagcttgataccaataaacctctggatatggccatcctccagggcacgccgatgatgccgaacaccgccgcgctggcaatgtgggtacaacgtcctggcgatcgagacagcggaatttttgtatccatcaatgccaatctgacgccttatatcctctataccgcacgacagaatgatttcagcggcattgcgctggccatcggccatacggcaatttcgaccttcagcagcaaaattatcgacccgctatcattgcccaatgagccgatacgccagattcaggttccggggctaccgctaaaagtgtatctcttttctaacagttggctcggcgagaatacccagttcgccctgttgcttggcgtagtatgcggcatgcttgccggcttgctcagctactacatcctgacgatcaaatccgatccgcggaaatcgatccaactggggatcaaaaacaaccagttctacgtggtctaccagccggtggtaaaggccgataccctgcagattagcggcgttgaagtgctgatgcgctggcggcatccggtggtaggtgaaatcccgccagacgtctttattaatctggcggagacgcagcagatgatcgtgccgcttacccatcacctgttaatgttgattgcccgcgacgcgccgactctgcagcgtattttgccgcgcggtaccaagctcggtctgaatatctcgcctgcccacctgcatgccgccggattccagcaagatatgaaacgttttgccgccgcgttacccgcaaactacttcgacgtcgtgctggagataaccgaacgttcgatgatcgataaaaaccagtcgatggccatttttgagtggctccatcaacagggcttcgaaattgctatcgatgattttggtaccggccatagcgcgctgatttatctggagcgctataactttgattatctgaagatcgatcgtggttttgtgcaggcgatcggtaccgaaaccgtcacctctcccgtgctggatgcggtgctaacgctaagccgccgtctacagttgaaaaccgtggctgaaggcgtagaaacgccggagcaggcggaatggctgcgtgctcacggcgtgaagtatctgcaaggttactgcttcagccgcccgctgccgctggataaactggtcgccgcccatgatgaaccggcaaattatttcacaagccgctga

SEQ ID NO: 105000 - DNA, 570 bp, Enterobacter aerogenes; identical to SEQ ID NO: 89891

SEQ ID NO: 105001 - DNA, 708 bp, Enterobacter aerogenes
atgactaaaaaccgtattccacttatcttgctgctgaacgtcgcgggcgtagccttattttgttcctggtatctaccggcaaatcacggtttctggttcccgcttgactcggctatttttcacttctttaaccagggcgtcagcgccaaccacacctatgcctggctgttagccatcatcaacaatcgcgctttcgacgcctgctcgctgctggcgatgggctgcctgatgctcagtttctggatcaaagaacaaagcgctgagcgccgccgcataatcattatggggctggtgatgttgctcgcggcggtaattatcaatcaacttgcccagcatctgatgccggtacagcgcgccagcccttcgctgttctttacggatattacgaaagtcagcgacgtggtctcattgcccaccaaagacgcttcaaaagatagcttcccgggcgaccatggcatgatgctgctcattttcgcctcgtttatgtggcgatatttcggccgccgggcatttaccatttcactgattatttttgtggtttttgctttcccgcgagtgatgatcggcgcccattggttcaccgatattgccgtaggttcactcagcgcggtgctgattggcgcgccatgggtattaatgacctcgctttccgataaggccatcgcctggtttgaccgttcgcttccgggtggaatagcaaaaaattaa

SEQ ID NO: 105002 - DNA, 978 bp, Enterobacter aerogenes
gtgaccaaaactaacctgatcacgggctttctcggcagcggcaaaacgacctcgattcttcatttactggcccacaagcctgcaaatgaaaaatgggccgtgctggtcaacgagttcggcgaagtcggcatcgacggcgccctgctggcggaaagcggcgcgttactaaaagagatctccggcggctgcatgtgctgcgtcaacggtctgccaatgcaggttgggctcaatacgctgctgcgccagggaaagcccgatcgtctgctgattgaaccaaccggactgggtcatcccaggcagatccttgatatcctcaccgctgcggtctacgagccgtggatcgatctgcgcgcgacgctgtgcattctcgatccgcgccagctgttggaggaaaagatcgtggccaatgataatttccgcgatcagctggccgcagccgatatcatcgtcgccaataaaagcgatcgggcgacgccggaaagcgaggccgcttttgccaactggtggcaacagtacgccggcgagcgcctgcaggtgaacgccacccagggtaacatcgagctcgcgctgctggatctcccgcgccgtaacaccgccccgctgccggcaagcccggaccacgtgcatagtcacgggcaaaagcagggtctggcggcgttgaatctaccggcgcatcaacgctggcgtcgcagtgttaacagtggtcagggataccatgcctgcggatggatttttgatgctgatacccaatttgacaccgttgggttgctggagtgggcgcgtctggcgccggttggccgggtgaaaggcgtgatgcgaattgccgagggtctggtgcgtatcaaccgccagggactcgatctgcatatcgaaacccaaaacgcgccgccgccggatagccgcatcgaactgatttgtgaatcagacgttgactggaatgccctgcagtcctcgctgttgaagcttcgtttaagttaa

SEQ ID NO: 105003 - DNA, 1467 bp, Enterobacter aerogenes
atgacaactatcgctaccgccgcgctgccagcaggcgtgcaacttccgcaatacgatcgccgccaattgcgctcgcgtatcgtgcaccttggttttggcgcatttcaccgtgcgcatcaggcgctgctaaccgaccgggtgcttaacgccagcggcggcgactggggaatttgtgaaatcagcctgttcagcggcgataagctgatgagccaactgcgtgcgcaagaccacctgtttacggtgctggaaaaaggcgctgagggtaaccagccgatcgtggttggcgcagtacatgaatgcctgaacgccaaacttgattcgctggcagcaattatcgaaaaattttgcgaaccgcaggtggctatcgtttcgctgacgattactgagaaaggttattgcatcgatccggccaccggtaaactggatccagcccagccgcgcatcgttcacgatctggaaaaaccgacgctgccgcagtcggctcccggtattttagttgaagcgctcaatcgccgccgcgaacgcggactcgctccctttaccatactctcctgcgacaatattcccgacaatggtcacgtcgtgaaaaacgccgtcctcggcatggctgagaaacgaagccaggagttggcaagctggattgctgaacatgtcagcttccccggcaccatggttgaccgcatcgtcccggccgccaccgaagaatctttggcggagattgcctccgtgctgggcgttgacgatccctgcgctatcagctgcgaaccgtttattcaatgggttgtggaagacaattttgtcgccgggcgtccagcctgggaaaccgcgggcgtacagatgaccaacgatgtcctgccgtgggaacaaatgaaactgcgcatgctcaacggtagccactccttcctcgcctggctgggctacctggcggggcatgcgcacgttagcgactgcatgcaggacgatgttttccgccatgccgcccgtcgcctgatgcttgatgaacaagcgccaacgctatcgattaccggcgtggatttagttgcctatgccgacagcctgataacgcgcttcgccaatccggccttaaagcatcgaacctggcaaatcgccatggacggcagtcaaaagctgccgcagcgcatgctcgatagtatacgcgttcatctggctaaacgcagccgctggccactgctggcgttgggtgtagctggctggatgcgttacgtaagcggcgtcgacgacgccgggcaagccattgacgtgcgcgacccgctagtcgacaaaatcaaacggttggttgacgccagccagcaagaggaacgcgtcagcgccctgattggcctggaagagatatttggcaaagatctgccgggcaacccacaatttgttgccgaaatcacttcagcctggcatcagttagctaaatcaggcgcccgcgaagccgtagctaccgcactgcataattaa

SEQ ID NO: 105004 - DNA, 1191 bp, Enterobacter aerogenes
atggagcaaacctggcgttggtatggaccgaacgatccggtatcgcttgatgatgtgcgccaggcgggcgccacgggtgtcgtgaccgcgttgcatcatattccgaatggccaggtctggccggtagaagagatccaacagcgtttagcgctactggcggaaaaaggcctgagctggtcggttgttgagagtatcccggtgcacgaggatatcaaaactcacagcgggcaatatgagaagtggattgccaactatcagcagagtatccgcaatctggcggcctgcggtattgataccgtgtgctataacttcatgccgattctggactggacgcgtaccgatctggaatatcagttggctgatggctccaaagcgctgcgttttgaccagattgctttcgccgcttttgaactgcacatccttaaacgcccgggcgccgaagctgactacagcgctgaagaacagcagcaggcggacgtttactttaaggcgatgagcgcggcggatatcgacaagctgacccgcaatatcatcgctggtctgccgggagcggaagagggctatactctcgatcagttccgcgcacgtctggcggagtatgaccacatcgataaagcgcaattgcgtgagaacatggcttacttcctgcgggcgattgtgccggtgtgcgaagaagtcggcgtgcgcctggcggttcacccggacgatccgccgcgtccgatcctcggcctgccgcgtatcgtgtcgactatcgaagatatgcagtggttgaaagagacggtggacagcatttataacggctttaccatgtgtaccggatcctacggcgtgcgtgccgataacgatctggtgaagatggtggaaaccttcggcgatcgtatccactttacccatttgcgctctacctgccgtgaagagaatcctaaaaccttccacgaggcggcgcacctgaacggcgacgtcaatatggtggcggtggttgatgcgattctgagcgaagagctgcgtcgtaagaaagcaggcgatctgcgtcccatcccgttccgtccggatcatgggcatcaaatgcttgacgatctgcgtaagaaaaccaaccccggttattcggcgattggccgtctgaaaggcatggcggaagtgcgcggcgttgagctggcgctgaagatgaccaaatatcctgagctgctgtaa

SEQ ID NO: 105005 - DNA, 573 bp, Enterobacter aerogenes
atgccaagagcgaatgaaattaaaaaaggtatggtgctgaattacaacggcaaactgctgattgttaaaaatattgatattcagtcgccaagcgcccgtggcgcagcaacgctgtataaaatgcgtttttccgacgtgcgtaccggcctgaaagtagaagaacgttttaagggcgacgacatcgttgataccgttaccctgacccgtcgtttcgttgacttctcctacgtcgatggcaacgaatacgtgttcatggataaagaagactataccccgtataccttcaccaaagagcagatcgaagaagagctgcagtttatcccggaaggcggcatgccggatatgcaggttttgacctgggatggccagctgctggcgctggagctgccgcagaccgttgacctggaaatcgtagaaaccgcgccgggaatcaaaggcgcttccgccagttcgcgcaccaaaccggccaccatgagcaccgggttggtgattcaggttccggaatacctgaccagcggcgagaaaatccgcattcatatcgaagagtgccgctatatgggccgcgcggactaa

SEQ ID NO: 105006 - DNA, 255 bp, Enterobacter aerogenes
atggaatgtcgcccggactgcggagcctgttgcaccgcgccgtccatctcaagccccattcccggaatgcctgacggcaagccggccaacaccccatgcgtgcagctggatgaacatctgcgctgcaagatttttgcctcgccgctgcgccctaaagtctgtgcaggtttacagccggccgcggaaatgtgcggcagcacgcgtcagcaggcgatggcttatcttattcatctcgaagcgctgaccgcgccttaa

SEQ ID NO: 105007 - DNA, 1182 bp, Enterobacter aerogenes
atgcaaaacagtagcgccgcccttccccgccgcgggttcgacttaacctcctccgcttttcttatcgtcgcctttctgacggggatcgccggggccttacagaccccgaccctgagcctgtttttgaccaatgaggtgcacgtgcgcccggcaatggtcggcttcttttttaccggcagcgcggtcatcggcattctggtaagtcagtttcttgccgggcgttccgatcgtaaaggcgatcgcaagcagctgattgtcgcctgctgcctgctgggggtgctggcctgcgtgctgttcgcctggaaccgcaactactttattctgctgttcgtcggcgtcttccttagcagctttggctctaccgccaacccgcagatgttcgcccttgcccgcgagcatgccgataaaaccggccgcgaggcggtgatgttcagctcgattctgcgcgcgcaggtctcgctggcgtgggtgatcggcccgccgctggcctacgcgctggcgatgggttttggttttaccgtgatgtatctcagcgccgccgtggcgtttatcgtctgcgcgctgatggtctggttcttcctgcccagcatgcgtaaagagagcaaaaccgccggtggtcatcttgaagcgccgcgtaccaatcgccgcgatgcgctgctgctgttcagcatctgtacgttaatgtggggcaccaacagcctctatatcattaatatgccgctgtttatcattaatgaactgcatctgccggagaaactggccgggctgatgatggggaccgccgccgggctggaaatccccaccatgctgattgccggttattacgcgaaacgttttggaaagcgcttgctgatgcgcattgccgcgcttgccggactgctgttttatgtcggtatgctgactgtccataccccggccctgttgctggcgatgcaggcgctgaacgcgatttacatcgggatcctcgccggtatcggtatgctctattttcaggatctgatgccgggccaggcgggcgcggcgaccacgctgtataccaataccacgcgcgtcggctggatcatcgccggctcgctggcgggcgttgtcgcggaaatctggagctatcacgcggtgttctggattgcgctggcgatgggaattatcgcccagggctgcctgtggcggattaaagacgtttaa

SEQ ID NO: 105008 - DNA, 1131 bp, Enterobacter aerogenes
atgttccagttatctgtacaggatatccatcccggccagcaggccgcgaataaagaagaggcaatacgtcagattgctggcgcgctggttagcgcgggtaatgtggctgacggctacgttaacggtatgcttgcccgcgagcagcagacctccactttcctcggcaatggcatcgctattccgcacggcaccaccgatacccgcgaccaggttctgaaaacgggcgtccaggtgtatcagttcccgcagggcgtgacctggggagaaggacaaaccgcttatgtggcgatcggtattgccgccagctccgacgagcacctcggtctgctgcgtcagttgacgcacgtcctgagcgacgactcggtggctgaacagttgagaaccgtcaccaccgcagaagaactgcgcgctctgctgatgggcgaaaagcaaagcgaagcgctgaagctcgacaacgaaacgttgagcctcgacgtggtcgccaacgatctgctgacgctgcaggcgctgaacgccgcgcggctgaaagaggcgggggcggtaaacgccgatttcgtcagccgcaccattaatgatgcgccgctcaacctgggccaggggatctggttgaacgactgtgcggaaggcaacctgcgcagcgccgttgccgtgagtcgcgccgccaatgcgtttaccgctgacgggcagccggtggtgctgctgatcaccgtcgcgatggccgatgagcagccgaccgcggtgcttaatcgcctgagcaatctgcttattgataaaaaagcggagcatctgctgaaagccgacgccgccacgctgctggcgctgctgaccagcgacgacgccattgctgaagacgtgctgaacgccgagtttgtggtacgcaacgagcacgggctgcacgcacgtccgggcacgatgctggttaatacgattaaacaattctccagcgacattaccgttaccaacctcgatggttccggcaagccggctaatggccgcagcctgatgaaggtcgtggcgctgggtgtgaaaaaaggtcaccgtctgcgttttaccgcgcagggtgaagatgcgcaacaagcgctggatgcgattggcgaagcgatcgccgcaggccttggggagggcgcataa

SEQ ID NO: 105009 - DNA, 939 bp, Enterobacter aerogenes
atgagcagacgtgtagcaacgattactttaaatccggcatacgacctggtgggtttcaccccggaaatcgaacgtggtgaagtgaacctggtacgtaccactggcctgcatgcggcaggtaaaggtatcaacgtggcgaaggtgctgaaagatcttggcatcgacgtcaccgtcggcggcttcctcggtaaagataaccaggatggcttccagcagctgttcagcgagctgggcatagccaaccgcttccaggtggtgcaggggcgtacccgtatcaacgttaaactgacggaaaaagatggcgaagtgaccgatttcaacttctccggtttcgaagtgaccccggcggactgggagcgtttcgttaatgattctctgagctggctggggcagttcgatatggtttgcgtcagcggcagcctgccgtccggcgtgagtccggaagcctttaccgactggatgacgcgcctgcgcagccagtgcccgtgcattattttcgatagcagccgcgaagcgctggttgcagggctgaaagccgcgccgtggctggtaaaaccaaaccgccgcgagctggaaatctgggctggccgcaagttgccggagatgaaagatgttatcgacgccgcccatgcgctgcgcgagcaaggtatcgcccacgtggtgatttcgttaggcgaagagggcgcgctgtgggttaacgcctccggcgaatggattgccaaaccgccttcagtcgaggtcgtcagcaccgtcggcgccggagattcgatggtcggcggcctgatttacggcctgctgatgcgtgaatccagcgagcataccctgcgcctggcgaccgccgtcgccgccctggccgttagccagagcaacgttggcattaccgatcgtacccagttggccgcaatgatggcgcgcgtcgacttacaaccctttaattga

SEQ ID NO: 105010 - DNA, 1695 bp, Enterobacter aerogenes
atgaaaacgctgctgattattgatgccgggcttggccaggctcgcgcctacatggcgaagaccctgctcagcgccgcggcgcagaaagcgcaccttgagctgattgataacccgaacgatgccgaactggccatcgtactggggaccgcgctgccggccgatagcgcgctgaatggtaaaaacgtctttctgggcgatattaaccgtgctgtcgcccatccggagctgttcctgggtgaagcgaaagatcacgctaagccgtacgttgcgccagcggcggtagccgttccggccgccgcccaggggcagaaacgtattgtcgccgttaccgcttgtccgaccggtgtagctcatacctttatggcggcggaagccattgaaaccgaagccaaaaaacgcggctggtgggtgaaagtggaaacccgcggctccgtgggggccggtaatgctattaccccggaagaggtggagcaggcggatctggtgatcgtcgccgccgacatcgaagtcgatctggcgaagttcgccggtaaaccgatgtatcgcaccaccaccggactggcgctgaagaaaaccgcgcaggagctggataaagccgttgcggaagcgaagccgtaccagccatccggcaaaccgcaggcctccggtgacggtaaaaaagagtcggctggcgcctatcgtcacctgctgaccggcgtctcctacatgctgccgatggtggtcgcgggcggtctgtgtatcgcgctgtcgttcgcgttcggtattaaagcgtttgaagtgaaagacaccatggcggcggcgttgatgcaaatcggcggcggttcagcctttgcgctgatggtgccggtactggcaggctttatcgcgttctccatcgctgaccgtccgggtctgacgcctggtcttatcggcggtatgctggccgtgagcggcggttccggcttcatcggcggtatcattgccggtttccttgctggttatgtggcgaagttaatcagtactaagctgaaactgccgcagagtatggaagcgttgaagccgattctgatcattccactgatttccagcctgattgttggtctggcgatgatctacctgatcggtaaaccggtggcgggtatcctggcctggctcacccactggctgcaaaccatggggacggcgaacgcggtgctgctcggcgcgatccttggcggcatgatgtgtaccgatatgggcggcccggtgaacaaagcggcttatgctttcggtgtgggtctgttgagtactcaaacctacgcgccgatggcggcgattatggcggccggtatggtgccaccgttggcgcttggcctggcgacgctgattgcccgcaacaagttcgacaaatcacagcgtgaaggcggtaaagcggcgctggttctgggtctgtgctttattaccgaaggggcgatcccattcgccgcacgtgatccgatgcgcgtactaccttgctgtatcgttggcggcgcggtgaccggcgctatttcaatggcggttggcgcgaaactgatggcgccgcacggcggtctgttcgttctgctgatccctggcgccatcactccggtgctgggttatctgctggcgattattgccggtacgctggtcgcgggtctctcttacgcggtgctgaagcgcccggaagcgccggcggcggaagctgaaaaagcggcgtaa

SEQ ID NO: 105011 - DNA, 855 bp, Enterobacter aerogenes
atgaaatacattggagcgcacgttagcgcctccggcgggctggccaatgccgccatccgcgccgccgaaatcgaagcgaccgccttcgccctgttcaccaaaaatcagcgtcaatggcgcgccgcgccgctcaccgacgaagcgattgccgaattcaaagccgcctgcgaaaaatatcacttcggcccggggcaaatcctgccgcacgacagctacctgattaacctcggtcacccggtcgaagaagcgctggagaaatcccgcgaggcgtttatcgatgaattaacccgctgccagcagttgggattaacgctgctcaacttccatccgggcagccacctgcagcagatcccggaagatgaatgcctggcgcgtattgcagaatccatcaacatcgcgctggcgaaaaccgaaggcgtaaccgcggttatcgaaaataccgccggtcagggcagcaatctcggttttaaatttgaacatcttgccgccatcattgacggcgttgaagacaaatcccgcgttggcgtctgcattgatacctgccacgctttcgccgccggctatgacctacgcagcgcggaggtgtgtgaaaagaccttcgccgaattcgaacggatcgtcggcttccagtatctgcgcggcatgcacctgaatgatgccaaaagcgcttttggcagccgcgtcgaccgtcaccatagcctgggtgaaggcaatatcggccatgatgcttttcgttggatcatgcaggataaccgtttcgatggtatcccgctgattctggaaaccattaacccggatatctgggcggaagaaattgcctggctgcgggcgcagcagaccgccgaagtggcctga

SEQ ID NO: 105012 - DNA, 1050 bp, Enterobacter aerogenes
atgacagcactcactttacccactaaacatcgcaccctgtggcatttcgtcccaggcctggcgctgaccgccgcgttgaccggtgccgccctgtgggcaggcagtttccctgctatcgccggcgcgggcttcagcgcgctgacgctggctatcttgttcggcatggtggtcggtaacaccgtttatcctaaaatttggcagtcctgcgacggcggggtgattttcgccaagcagtatctgctgcgcctggggatcattctttatggttttcgtctgacgtttgcccagattgctgacgtcggcgtcagcgggatcctgattgacgtactcacgctgtccagcaccttctttatcgcctgtttcctcgggcagaaggttttcgggctcgataaacataccagttggcttatcggcgccggtagcagcatttgcggcgccgcggcggttctggccaccgagccggtcgtcaaagccgaagccagtaaagtgacggtcgccgtagcgacagtggttatcttcggtactatcgccatcttcctctacccggcgatgtatccgctgctggcgcactggttcactccggaaacttacggcatctatatgggctccaccatgcatgaagtcgcccaggtcgttgccgccggtcacgcggttagcccggacgccgaaaatgcggcggttatcgccaaaatgctgcgcgtgatgatgctggctccgttcctgctgttcattgctgctcgtgtgaaacagctggcgccagccggtaacggcgaaaagagcaaaatcaccattccgtggtttgccatcctgtttattctggtggcggtgtttaactccttccacctgctgccaaaagccgtagtcgatatgctggtcaccctcgataccgtactgctggcgatggcaatggccgcgctgggcttaaccacccacgtcagcgcgctgaaaaaagccggtgcgaagccgctgctgatggcgctgatgctgttcgtctggctaattgttggcggcgccgcgattaacttcgctatccaccacctgattggttaa

SEQ ID NO: 105013 - DNA, 867 bp, Enterobacter aerogenes
atgcatatcacgctacggcaactggaagtttttgctgaggttttgaaaagcgggtcaacgacgcaggcgtcacagatgctggcgctgtcgcagtcggcggtgagcgcggcgctaaccgacctggaggggcaactcggcgttcagctgtttgaccgcgtcggtaaacggctggtggtcaacgagcatggccgcttgctctacccgcgggcgctggcgctgctggagcgcgccggagagatagaacagctgtttcgcggcgataatggcgcgatccgcgtttatgccagtagcaccatcggcaactatattctgccggaaatcatcgcccgctaccgccgggacttccctgaactgccgctggagctaagcgttggcaacagccaggatgtgattaatgcggtcagcgatttgcgcgtcgatattggcctgattgaagggccgtgccatgcggcggatattatcgccgagccatggattgaagatgaactggtggtgttcgccgcgccggactcgccattcctcgaaggcgaattgacgctgcaacggctggcggaagcgcagtggatcctgcgcgagcatggctccggcacgcgggagatcgtcgactacgtgctgttgtcgcatctgcccgcatttcaactgggcatggagcttggcaactcggaggcgattaaacatgcggtccgccacggactaggcatcagctgcctgtcgcggcgagtcattgccgagcagctggaggccggaacgctggtggagcttaagctgccgctgccgcgcctgacgcgcacgttatggcgtattcgccatcggcaaaaacatgtttccaaggcgctgcagcgctttatccgttactgtgaggtgtag

SEQ ID NO: 105014 - DNA, 1470 bp, Enterobacter aerogenes
atggtttcggaaactaaaaccacagaagcgcccacgctccgccgcgagctaaaagcgcgccacttgaccatgatcgctattggcggttccatcggtacaggtcttttcgttgcctctggcgcaacaatttctcaggcaggccccggcggcgcgctgctttcctacattctgatcggtctgatggtgtatttcctgatgaccagcctcggcgagctggcggcgtttatgccggtttcaggctcttttgcgacctacggtcagaactatgtagaagaaggctttggtttcgcgctgggctggaactactggtacaactgggcggtgactatcgccgttgacctcgttgcttcgcagctggtgatgagctactggttcccggatacacccggctggatctggagcgccttattcctcggcatcatgttcctgctgaactggatctcggtacgcggcttcggcgaagcggagtactggttctcgctgattaaagttgccaccgtgattatctttatcatcgtcggcattatgatgatttttggcattttcgaaggcgccaagccggcgggctggagcaactggggcattgatgatgcgccgtttgccggcggttttgcggcgatgatcggcgtggcgatgattgtcggcttctccttccagggcaccgaactcatcggtattgccgcgggcgaatcggaaaatccggagaagaacattccgcgcgcggtgcgtcaggtgttctggcgtatcctgctgttctatgtcttcgcgattttgattatcagcctgatcatcccgtataccgatccgagcctgctgcgcaacgacgttaaagacatttccgttagcccgttcaccctggtattcgagcacgccggtctgctctctgcggcggcgatcatgaacgcggttatcctgacggcggtgctgtcggcgggtaactccgggatgtacgcctctacgcgtatgttgtataccctggcgtgcgacggcaaagcgccgcgcattttctcgaagctgtcgagaggcggcgtaccgcgcaacgcgctgtatgcgactaccgtgattgcggcgctgtgcttcctgacctcgatgttcggcaaccagacggtctacctgtggctgctgaatacctccgggatgactggctttatcgcctggttgggtattgcgatcagccactaccgtttccgtcgtggttacgtgttgcagggtaacgatattaataacctgccgtaccgttccgggttcttcccgctggggccgatcttcgccttcgtactgtgtctgatcatcacccttggccagaactatgaagccttcctcaaggacaccattgattggggcggcgtggcggcgacctacatcggcattccgctgttcctggttatctggtttggttacaagctggtgaaaggtacccgcttcgtgcgctacagcgaaatgaagttcccggaacgctttaaaggctaa

SEQ ID NO: 105015 - DNA, 1974 bp, Enterobacter aerogenes
atgttcaggttaaacccttttgcccgggcgggactgtgcgcgtccgtcgtagcattggcatttccggcgctggccgcaaatgatgacgaaacgctggttgtcaccgccgcggcgactgaacagagcgtcaaagatgcgcccgccagtatcagcgtgatcacccaacaggacttgcagcgtaagccggtgcagaacctgaaggacgtgttgcgcgatgtgcctggcgttcagctcaccaacgaaggggataaccgcaagggtgtcagcatccgcggtctggatagcagctatacgctaatcctgatcgatggcaaacgtgtcaactcgcgtaacgccgtcttccgccataacgatttcgatctgaactggatcccggtggactccatcgaacggattgaagtggtgcgcggcccgatgtcttccctgtacggttccgatgcgctcggcggcgtggtcaatatcattaccaaaaaaatcggccagaaatggaccggtaccctcagcagcgatgccaccattcaggaacaccgcgatcgcggtgacacttataacggccagttcttcaccagcggcccgctgattgacggcgtgctgggcatgaaagcctacggcagcctggcgaaacgcagtaaagacgatcagcaatcttccagcaacgccgcgggcgaaacgccgcgcattgaaggttttaccagccgcgacggcaacgttgagttcgcctggacgccaacggagaaccaggacattaccgccggctacggtttcgatcgccaggatcgcgattcagactcgctcgacaaaaaccgccttgagcgtcagaactactctttgacccataacgggcgctgggatgtcggcaatagcgaagtgaaattctacggcgagaaagtggataacaaaaacccggggcaggctgggaccattacctctgaaagcaatgcggtggatggtaaatatgtgatgccgctgggtatgatcaaccagatcgtcaccctcggtggtgaatggcgccacgataaactcaaagatccggtgaacctgagcagcggcggcaaatcgacttccgccagccagtacgcgctgttcctcgaagacgagtggcggatctttgaaccactggcgctgaccaccggcatccgtatggacgatcaccaaacctacggcgatcactggagcccgcgtgcgtatctggtctataacgccaccgataccgtgaccgtgaaaggcggttgggcaacggcctttaaagcgccgtcgctgctgcaattgaacccggactggaccaccaactcctgtcgcggtagctgcagcattatcggtaacccggatttgaagccggaaaccagcgaaagctttgagctcggtctgtattacagcggtgaagagggctggctggagggagttgaaggcagcgtgaccgccttccagaacaacgttgacgatatgatcgacatcctgcgcacctccagcgccagcgaagcgccgggttacccgaacttcgtcggctggaagaccgtgaacggtaagcgtgtgccggtgttccgttacttcaacgtcaacaaagcgcggattaaaggcgtagagaccgaagtgaaggttccgttcggcgaagagtggaaactgacggtcaactatacctataacgatggtcgcgatctgagcaacggcggcaataaaccgctgcagacgctgccgttccacaccgctaacggtaccctcgactggaaaccgctggaggattggtctttctacgtcacggccaactataccggcgagcagcgtgcggtaagcgcgacgggtaaaaccccaggcggttataccatgttcgatatcggcgccgcgtggcaggtcagtaaaaacgtgaaactgcgctccggcgtgcttaacgttggcgacaaagatctgaaccgcgacgattacagctacaccgaagatggccgtcgctactttatggccgtcgattaccgcttctga

SEQ ID NO: 105016 - DNA, 435 bp, Enterobacter aerogenes
atgagtaatatcaccatctatcacaacccggcctgcggcacgtcacgtaatacactggagatgatccgtaacagcggtaatgaacccaccgttattcactaccttgaaacaccgccaactcacggtgagctggttaaacttatcgcagagatggggatcgccgtgcgtactctgctacgcgagaatgttgaaccttatgcccagttgggactcgcggaggacaagttcaccgaggagcagttaatagaatttatgctcgctcatcccatcctgattaatcgccctattgtggtcactgaacggggaacccgcttatgtcggccatctgaagtggtactggatatcctgcccgatccgcagcaaggcgcttttagcaaagaggatggagaaaaggtggtggatgaaaggggcaagcggctgatacctggcggatag

SEQ ID NO: 105017 - DNA, 1290 bp, Enterobacter aerogenes
atgttgttggccggtagtctctttttattcacgctggtgttggttatctggcagcccaggggcctcagcatcggctggagcgcgagtattggcgcaatactggcgctggccagcggcgttattcatctcagtgatattcccgttgtctggaatatcgtctggaacgcaacagcaacttttatcgcggtgattatcatcagcctgctgctcgatgagtcgggcttttttgaatgggctgcgctgcatgtctcccgctggggcaacgggcgcggtcgtctgctgttcacctggattatcctgttaggcgcgaccgttgcggcgctgtttgctaacgatggcgcagcgctcattctgacgcccatcgtcattgccatgctgctcgctctggggttcagcaaaaggacaacattagcctttgtcatggctgccgggtttattgccgataccgccagcctgccgcttatcgtttccaatctggtcaatattgtctcagctgatttcttccggcttggttttacgcaatacgcctctgtgatggttcctgttgatattgctgccatagcggccacgctgggcatgctgcatctgtttttccgccgggatattccagcaacttacaacgtcactttgctgaaaacacctgccagcgcgattaaagatcccgcaaccttcaaagccggctgggttgttttgcttttgttgctggttggtttctttgttcttgaaccgctggggctgcccgttagcgccatcgccgctgtcggagccgctgttctgtttgccgttgcgaaaaaaggtcacgccatcaataccggtaaagtattgcgcggcgcgccctggcagatcgttattttctcgctgggtatgtacctggtggtctacggtctgcgcaatgcgggcttaacggaatatctatcgggtatgctgaatatgctggcggataagggactgctggcggcaacgtttggcacgggcttcctgaccgctttcctgtcgtcggtaatgaacaatatgccaacggtcctggtgggcgcactgtcgattgaaggaagcaccgcttctggcgttattaaagaagcgatgatctacgccaacgtgatcgggtgcgatttaggccccaaaatcacgccaataggcagtctggcgaccctgctgtggctgcacgtactgtcgcagaaaagcatgaccatcagttggggatattacttccgcacgggcatcgtcatgacgctacctgtgctgtttgtcactctggccgcgctggcgctgcggctctctctcactctataa

SEQ ID NO: 105018 - DNA, 339 bp, Enterobacter aerogenes; identical to SEQ ID NO: 89911

SEQ ID NO: 105019 - DNA, 837 bp, Enterobacter aerogenes
atggaactgcttgaagagcatcgctgttacgagggtcgacagcagcgctggcgtcatcactccagtaccctgaactgcgccatgacgtttagcatctttttaccgccggcgacggaaaccgccccgccgccggtgctgtactggctatccggtttgacctgcaatgacgaaaacttcaccaccaaggctggcgcccagcgtgtcgccgccgaactgggcatcgcgctggtgatgcccgacaccagcccgcgcggtgatgacgtcgccgatgatgccggttacgatctcggtaaaggggctggtttttacctcaacgccactcaggcgccgtgggcggcgcattttcgcatgtatgactacctgcgcgatgagctaccgcagttgattaacaaccaatttcaggtcgccgaccgttgcgctatcagcggccactcgatgggcggccacggcgcgctcatcatggcgctgaaaaacccagggcgctttaccagcgtctcggccttcgcgccgatcgtcaacccatgcaaagttccgtggggacaaaaggcgttcagcgcctatctcggcgatgatgaggcgacctggcaggagtgggacagctgcgcactcatgcaggcaagccaggccggggatgccattcccacattaattgatcaaggtgacgccgaccagtttctcggtacccagctacagcccgcggtccttgcagaggcggcgcgacagaaacagtggccgctgagcctgcgtatccagcccggctacgaccacagctactatttcatcgccacctttatagaagatcatctgcgcttccacgcggagcatctgtttaagtaa

SEQ ID NO: 105020 - DNA, 669 bp, Enterobacter aerogenes; identical to SEQ ID NO: 89913

SEQ ID NO: 105021 - DNA, 1158 bp, Enterobacter aerogenes
atggagagaaacgtcacgctggacttcgttcgcggcgtcgccatcctcggcattctgctactgaatatcaccgccttcggcttgccgaaggcggcctatctgaatccggcctgggccgggagtgtttcgctgagcgacgcctggagctgggccatcctcgatctgtttgcgcaggtaaaattcctcaccctgtttgctctgcttttcggcgccggattgcaaatgctgctggtacgcggtaaacgctggatccagtcgcggctaacgctgcttgccctgcttggttttatccacggtctctttttctgggacggcgatattctgctggcctatgcgctggtggggctgattgcctggcgcatggtgcgcgatgcccatcatgtcaaatcgctatttaataccggcgtcgtgctttatctcatcggtattgcggtgctggtattgttgggattaatttccggcaacggcgccagtcggtcatgggtgcccgatgccgcgaatgtgcagtatgagcagttctggaagctcaaaggcggtatggaggcggtgagcaatcgcgcggatatgctgtccgataacctggtggcgctgggcgtgcagtacggctggcagctggcggggatgatgctaatgggcgcggcgctaatgcgctgcggctggttgaaagggcagtttagccttagccattatcgccgcgtcggggctgtgctgattattgccgggatgttggtaaatgtgccggccatcgccgcgcagtggtacttgcaatgggactaccgctggtgcggttttctgctgcaggcgccgcgtgaacttggcgcgccgctacaaaccattggctatgccgcgctggcgtggggattctggccgcaattatgccgctttcgtctggttggggcgattgcctgcgttgggcggatggcgctcagtaactatttactgcaaaccctgatctgcaccacgctgttctatcacctgggcctgtttatgaaatttgaccgtttacagctgttggcctttgtgccggcggtgtgggccgttaatctcctcttctcgcagttttggctgcgtcatttccgccaggggcccgttgagtggctatggcgtcagttaaccctgagagcctcagggacatcatccagagatacatctgtataa

SEQ ID NO: 105022 - DNA, 1023 bp, Enterobacter aerogenes
atgatcaccattcgtgatgtcgcccgtcaggcgggagtttccgtggcgacggtttcacgggtgctgaacaacagcgcgctggtgagcccggatacccgggaggcagtgatgaaagcggtcgcgcagctgggctatcggccgaatgccaatgcccaggcgctggcgactcaggttagcgataccattggcgtggtggtgatggatgtgtcggacgcctttttcggcgcgctggtgaaagcggtggataccgtcgcgcagcagcatcagaaatatgtgctaatcggcaacagctaccatgaagctgaaaaagagcgtaacgccattgaggtgctaattcgccagcgctgttcggcgcttatcgtgcattcgaaagcgttaagcgatgccgaactcggcgactttatgcagcatattccaggcatggtgctgataaaccgcattgtgccgggcttcgcgcaccgctgcgtgggtctcgataacgtcagcggcgcgctaatggctacgcggatgctgctcaatcacggccatcaacggattggctatctctcttccaaccacggcattgaagatgatgaactgcgccgcgaagggtggagtaaagcgctgcaggagcagggcattatcgcgccggatagctgggtgggctcgggttcgccggatatgcagggcggtgaagcggcgatggtagaactgctggggcgtaatttaggcctgaccgcggtgtttgcctataacgacagtatggctgccggggcgttaaccactctcaaggataacggcattgctgtgccgcagcatctctcgctgattggttttgatgacattcccatttcccgttacaccgatccgcagttgactaccgtgcgctatcccattatgtcgatggcgaaattggctaccgaactggcgctacaaggggcggcagggaaactcgatagcgaggccagccactgctttatgcccacgctggtgcggcgccattcggtgacgcaaaagcaaagtgtggggccgatcactaactga

SEQ ID NO: 105023 - DNA, 999 bp, Enterobacter aerogenes
atgaataagaaggtcttagctctgtccgccgtcatggctggcatgctttttggcgccgcagcgcatgccgcggatacccgtatcggcgttacgatctacaagtatgacgacaacttcatgtccgttgtgcgtaaagcgatcgaaaaagacggcaaatctgcgccggacgtgcaactgctgatgaatgactcgcagaacgatcagtccaaacagaacgatcagatcgacgtgctgctggcgaaaggggtgaaggcgctggccatcaacctggttgacccggcggcggcgggtacggttatcgacaaagcgcgtgggcaaaatgtgccggtggtgttctttaacaaagagccatcgcgcaaggcgctggatagctacgataaagcctattatgtgggtaccgactccaaagaatccgggattatccagggcgatcttatcgccaaacactggaaagcgaatccaaactgggatctgaacaaagatggtcagattcagtttgttctgttgaaaggcgagccgggccacccggatgccgaagcgcgtacttcctacgttatcaaagagctgaatgaaaaaggtcttaaaactcagcaactggcgttagataccgccatgtgggataccgcgcaagcgaaagataaaatggacgcctggctctccggcccgaacgccaacaaaatcgaagtggtcatcgcgaacaacgatgcgatggcgatgggcgcggtagaagcgctgaaagcgcataacaagagcagcattccggtgttcggcgtcgatgccctgcctgaagcgctggcgctggtgaaatccggcgcgatggccggtaccgtgctgaacgacgccaacaaccaggccaaagcgaccttcgatctggcgaagaacctggctgacggcaaagagcccgctgctggcaccaactggaaaattgagaataagattgtccgcgtaccgtacgtaggcgtagataaagacaacctcagccagtttatcggtaaataa

SEQ ID NO: 105024 - DNA, 1521 bp, Enterobacter aerogenes
atggtcagcaataatagcgtacagtcgggcgaatatttgttggaaatgagtgacatcaacaaatctttccccggcgttaaagctcttgataatgtcaacctgaaggttcgtccgcactctatccatgcattaatgggtgagaatggcgcgggtaaatcgacattattaaaatgcttatttggaatctatcaaaaagattccggcagtattctttttcagggaaaagaaatcgatttccattcggcgaaagaagcgttggaaaacggtatttctatggtgcaccaggaattaaacctggtacttcaacgttcggtcatggacaacatgtggctgggacgttaccccaccaaaggcatgtttgtcgatcaggataaaatgtatcgcgataccaaagcgatatttgatgaactcgatattgatattgatccgcgcgctcgcgtggggactttatcggtatcgcagatgcagatgattgaaattgccaaagcattctcctatgacgcgaaaatcgtcattatggatgagcctacctcatcgctgacagaaaaagaggtcaatcacctgtttaaaataatccgcaagctgaaagagcgtggctgcggtattgtttatatctcccataaaatggaggagatatttcagctatgcgatgagattacgatcctgcgcgatggtcagtggattgccacccagccgctggaggggctggatatggataagatcatcgcgatgatggttggccgttcgctgaaccagcgttttccggataaacaaaacaaaccgggcgaagtaatccttgaagttcgtaacctgacctcgctgcgccagccgtcaattcgcgatgtctcattcgatctgcataaaggtgaaatcctcggcattgccggactggtgggcgctaaacgtaccgatattgttgaaacgctgtttggcatccgcgaaaaggccagcggcacaattaccctgcatggcaaaaaaattaataaccatagcgctaacgaggcgataaaccacggctttgcgctggtgaccgaagagcgtcgctcgacgggaatttatgcttacctcgatattggttttaactcgctgatatcaaatatcaagaagtataaaaacaaggtcggtctgctggataattcgcggatgaaaagcgacacccaatgggttatcgattctatgcgggttaaaaccccaggccatcaaacgcaaatcggttcgctgtccggcgggaatcagcagaaggttattatcggtcgttggttattaacccaaccggaaatattaatgcttgatgaaccgacccgcgggattgacgtcggggccaaattcgaaatttatcagctgattgccgaactggccaaaaaagataagggcatcattattatctcttctgaaatgccggagctgctgggaattaccgaccgtatactggttatgagcaacgggctggttgccggaattgttgagaccaaaaccacgacgcaaaatgaaattctgcgtcttgcatcattgcacctttga

SEQ ID NO: 105025 - DNA, 1011 bp, Enterobacter aerogenes
atgagtgcgttaaataaaaagagtttcctcacttacctgaaagagggtgggatttacgttgtacttttggtcttactggccattattattttccaggacccgaccttcttaagtctgttgaacttaagtaacatcctgacgcaatcctcggtacgtattatcatcgcgctcggcgtcgccgggctgattgtcacccaggggaccgacctttccgccggacgtcaggtgggtctggcggcggtggtagcggctaccatgctgcaggcggtggataacgccaacaaggtgttcccggagatggcgaccatgccgattccgttggtgattctgctggtctgcgcgatcggcgcggtgattggcttgattaacggtatcgtcattgcctatctcaacgtgacgccgtttatcactaccctggggacgatgattatcgtttacggtatcaactccctgtactacgactttgtcggcgcgtcgccgatttccggtttcgacagccacttctcgcagtttgcccagggctttgtcgctttaggttcattccgcctgtcgtacatcactttctacgcgctgatcgctatcttcttcgtgtggatcctgtggaataaaacccgtttcggtaaaaacatcttcgctatcggcggcaacccggaagcggcgcgtgtctccggcgttaacgtggcgctgaacctgctgatgatttatgccctgtccggggtgttttacgccttcggcgggctgctggaagccggacgtatcggttcggcgaccaacaacctcggctttatgtacgaactggatgcgattgccgcctgcgtggtggggggcgtttccttcagcggcggcgtgggtacggttttcggcgtggtgaccggggtcattatttttaccgtcatcaactatggtctgacctacattggcgtcaatccatactggcagtacattattaaaggggcgattatcatcttcgctgtggcgctggattcactgaagtacgcgcgtaagaaataa

SEQ ID NO: 105026 - DNA, 717 bp, Enterobacter aerogenes
atgttaaagcgtgtgttatacagcctgttagtcctgctcggcctgctgctgttgaccgtgctgggtcttgaccgctggatgagctggaaaaccgcgccctatatttacgatgagctgcaggatctcccctaccgccaggtgggcgtggtgttgggcactgccaaatattatcgcaccggcgtgatcaatcagtattatcgttatcggatccagggcgcgctcaacgcctacaatagcggtaaggttaattatctgctgttgagcggtgacaacgccttgcaaagctataacgaaccgatgaccatgcgccgcgatctgattaaagccggcgtcgatccggcggatatcgtgctggactatgccggtttccgtaccctcgattcgatcgtgcgcacccgcaaagtgttcgataccaatgattttattattatcacccagcgcttccattgcgaacgcgcgctgtttatcgccctgcatatggggattcaggcgcagtgctatgcggtgccttcgccgaaggatatgtggaccgtacgtctgcgcgagtttggcgcccggtttggcgcgctggcggatctctatatcttcaaacgcgaaccgcgtttcctcgggccgctgatccccattccggcgcagcagcatgaagttccggaggatgcgcaatcctacccggcggtcacgcccgagcagttactggagctacagaaagaaaaatag

SEQ ID NO: 105027 - DNA, 885 bp, Enterobacter aerogenes
atgcactctcgttttcaagctgctttgactaatctggcggcagacctgcaggcggccatcgccccgatgctcgcagacccgcacttcccggcgctgctcgaagccgatcaggtagcgacgctacaacaagcaacaggtttggatgaagacgcgctggcctttgcgctactgccgcttgctgccgcctgcgcccgcgccgatctttctcactttaacgttggcgctatcgcccgcggcgtgagcggtcgctggtacttcggcggcaacatggaattcctcggcgccaccatgcaacagaccgtccacgcggaacagagcgccatcagccacgcctggctacgcggcgaaaaatccctgcgcgccattaccgtcaactacacgccttgcggccactgccgccagtttatgaatgaactgaatagcggtctggcgctgcgcattcatctgccgggtcgcgaagcgcactccctgcagcactatctgccggacgcctttggcccgaaagacctggaaatcaaaactctgttgatggatgagcaggatcacggcttccctctcagcggcgatgcgctcacgcaggcggctattcaggcggcgaaccgctgccacgcgccgtacagcaactccccttccggcgtggcgctggagctgaaagacggcaccattttctgcggcagttatgcggaaaacgcggcgttcaatccgacgctaccgccgctacagggcgcgctgaacctgctgagccttaacggttacgactatccggatatccagcgcgcgctgttggccgagaaagccgatgcatcgcttatccagtgggatgcgaccgtcgcgaccctgaaagcgttgggctgtcagaatatcgaccgcgtgctgttaggttaa

SEQ ID NO: 105028 - DNA, 696 bp, Enterobacter aerogenes
atgatccatgaaatgtggtggtcgctaccgttaacgctgattgtctttttccttgcccgcaagctggcggcgcggtttaaatttccgctgctcaacccgctgctggtcgccatggtggtcattattcctttcctgctggtcaccggtatttcttatgaacgctattttgccggcagcaaaatccttaacgatctgctgcagccggcggtggttgcgctggcctttccgctatatgaacaactgcaccagatccgcgcgcgttggaaatccatcatcaccatctgctttatcggtagctgcgtggcgatgatcaccggtaccaccgtcgctctgctgatgggcgccaccccgcaaatcgccgcttccatcatgccaaaatccgtcaccacgccaattgccatggcggtcagcggcagtattggcggtattccagcgattagcgccgtgtgcgtcattttcgttgggatcctcggcgcggtgttcggccatacgctgcttaacgccatgcgtattcataccaaagcatcccgcggcctgtcgatgggtaccgcctcgcacgccctcggcaccgcgcgttgcgccgaactggactaccaggaaggggcgtttagctcgctggcgctggtactgtgcggaattattacctcgctggtcgcgccttttctgttcccggtgatcgtcgctgttgtcggataa

SEQ ID NO: 105029 - DNA, 432 bp, Enterobacter aerogenes
atgatgaatggcagttcatcaagggttattaccatgagtaagtcgctgaatattatctggcagtacgtgcgagctttcgtcctgatttacgcctgcttgtatgcaggcatttttatcgccgggctactgcccatcacgatccccggcagcattatcggcatgctgattttgttcgtgctgctggcgctgcaaattatgccgccgcagtgggtcaaccccggctgcaacattctgatccgctacatggcgctgctgttcgtgcctatcggcgttggcgtaatgcagtactgggatttactgcgtgcgcagctgggaccggtggcggtgtcctgcgccgtcagtactttattagtctttttggtggtgagctggagctcgcatctggtccacggtgaacgcaaaatcatcgggcaaaaaggaagtaaaaaatga

SEQ ID NO: 105030 - DNA, 864 bp, Enterobacter aerogenes
atgctggtggcgctgggtgagcaaggcaatctcacgcaggtcgcgaaaatgatgaatattacccagcccgcactctctaagtggctgacgcaatttgaagaagaagtcggcatgccgctctttgagcgccacagtaagggcctgcgcccttcggaaggcggcaaactgctgcttcagcacgcccagcggctaatcaacgatatgtcgcgctcgcagtacgagatcgagcgctttaagcaaggcggactggtcggcagcctgatgatcggctgctctcccgtggcgacagactgcgtggcgcaggcgatcctctccctgcttaaagagatgccgaccctgcatctgaatatcgaagaaaaagtgatgaccccgctgctgcacgacctgctctccggcgtggtcgatgtggtcgtcggacgtgttggcggccgcgcgctggaactgccgctcaactatcgtgtgctctataccgaaccggtgtgcttcgtcgcccgtcccgaccatccgctggctagcatgccgcgtctgagctgggcggatctcgccgtctggcgctggatagtctggcctaccggcacgcccattcgtcagagcattgataacgcgctggtcgataacggcgtcatgctgccggagaatactatcgagtcagcctcaatgaatgtcaccagcaatttgctgcaaagcagcgatatgatctctattctttctttgcggctggcgcagcattacgccgaacatcggcagctgacgattctgaatttgccgcgtattgaacaaaaaggtagcgttggggtgttctggcgcaaaagcgaagtaccatcgctggcgctcactcgttttctgcactacctcgcagaataa

SEQ ID NO: 105031 - DNA, 1359 bp, Enterobacter aerogenes
atggctcaacgacgtgaactacagacgttacttaacgcagcgccggttggcgccctgcagtggcgtgtgattatctgctgttttctggtggtgatgcttgatggatttgacaccgccgccattggctttatcgctcccgatatccgtgttcactggcaattgagcgccagcgacctcgcgccgctgtttggcgccggactattgggattgaccgccggggcgctgctctgcggcccgctttccgaccgtttcggtcgtaaacgggtgattgagttttgcgtggcgctgtttggcctgtttagtctgctctccgcattctcgacgaatctagagatgctggtttttctgcgtttcctcaccggtctgggattaggcggggcgatgcccaacaccatcaccatgacttcggaatatctgcccgcccgccgccgcggtgcgttagttaccctgatgttctgcggcttcacgctgggttcggcgctgggcggcgtggtgagcgcccaactggtggcgcatatcggctggcacggcattctggccttaggcgggatcctgccgctgctgctggccgtcgcgctgctgtgggcgctgccggaatcgccgcgctggcaggttcgccgcggactgccgcaggcgaccatcgccagaaccgtcagcgctatcaccggcgagcgctatcccgagacccatttctggctcgacgaaccggcagccgggccgaaaggcagcattagccagctgtttgccggccgacaactggcgatcaccttgatgctctgggtggtgttctttatgagcctgctgattatctatttgctctccagttggatgccgacgctgcttaaccatcgtggtatcgatttacagcacgcttcgtgggtgaccgccgcgtttcaggtgggcggcacgctcggcgcactgttgctcggcatcctgatggaccgtttcaatcccttctttgtactggcgctaagttattgcctgggcgcgttgtgcatcgtgatgatcggtttaagcgaaaacggattgtggctgatggcgctggcgattttcggcaccggaattggcgtgagtggttcgcaggtgggcctgaatgcgctgaccgccaccctttacccaacccagagccgcgcgaccggggtcagctggtccaacgccatcggccgctgcggcgccatcgttggttcgctctccggcggcatgatgatggcgatgaatctctctttcgacacgctgttttacgttatagcggtaccggcggcgatcggcgcggtgatgctcatcatgctgatgctggcggttcgccgtcctggatctgtacccgacgcgctgccctctgcgggtgtcgcgaataaataa

SEQ ID NO: 105032 - DNA, 1038 bp, Enterobacter aerogenes
atgaccctatctactccgcaatcgaaccgcgaacgccagcagttctaccagcatattgccgggcagaatctgacgccgctgtgggaatccttgcaccacctggtcccgcaaacaccgaatgccaactgcgccccggcgtactggaactatcaggaaattcgcccgctgctgctggaaagcgggcagttaatcggcgctaaagaggcggtgcgtcgggtactggtgctggagaacccgcagctgcgcggccagtcgtccattaccgcgtcgctgtatgccggcctgcagctcatcatgcctggcgaggtggcgccgagccaccgtcacaatcagtcggcgctgcgctttatcgtggaaggccatggcgcgttcaccgccgtcgacggcgagcgcacgccaatgcgccccggcgattttattctgaccccacagtggcgctggcacgatcacggcaatcctggcgatgaaccggtggtctggctcgatggtctcgatttaccgctggtcaactatctcggctgcggctttgctgaagattatccgcaggagcagcagccggtgacgcgtaaagagggcgactacctgccgcgctacgctgccaacatgttgccgctgcgccatcaggtgggaaattcctcgccgatctttaactaccgctacgaccgtagccgcgaggcgctgcacgacctgacccatcttggcgaggccgacgaatgggacggctacaagatgcgctacgtcaacccggtcactggcggctatccgatgccctcgatgggcgctttcctgcaactgttgccgaaagggttccggtcgcgggtggcgaaaaccaccgatagcaccatctaccacgtagtagaaggtagcggccaggtgacgattggcgaacaaacctttgcattccaggcgaaagacatcttcgtggcgccaacctggcacggcgtatcgttcaacgccagcgaagagtgcgtgctatttagcttctcggaccgtccggtacaggaggccttaggcctgttccgcgaagcgcgttattaa

SEQ ID NO: 105033 - DNA, 705 bp, Enterobacter aerogenes; identical to SEQ ID NO: 89926

SEQ ID NO: 105034 - DNA, 645 bp, Enterobacter aerogenes; identical to SEQ ID NO: 89927

SEQ ID NO: 105035 - DNA, 1194 bp, Enterobacter aerogenes; identical to SEQ ID NO: 89928

SEQ ID NO: 105036 - DNA, 933 bp, Enterobacter aerogenes
atgcgtgtattactggcgccaatggaaggcgtgctcgattcgctggtgcgcgagctgctgaccgaggttaacgattacgatctgtgcatcaccgaatttctgcgcgtggtggaccaactgctgccggtaaaatcgttctatagactgtgcccggaactgcaccatcaaagccgtactccgtccggcacccgcgtgcgcgtgcaattgttggggcaatacccgcaatggctggcggaaaacgccgcccgcgcggtggagcttggctcttggggcgtggatttaaactgcggctgtccatcgaagctggtgaacggcagcggcggcggcgcgacgttactgaaagatcccgagcttatctatcgcggggcgaaagccatgcgcgaagcggttcccgatcacctgccggtgacggtgaaagtgcgcctcggctgggacagcggcgaacggcgctttgaaatcgccgacgcggtccagcaggcgggcgccagcgagctggtggtgcatggccgcacgaaagaggatggttacaaagctgagcgcatcaactggcaggccatcggcgaaatccgccagcgcctgactattccggtggttgctaacggcgaaatctgggactggcaaagcgcgcaggagtgcatggccgctaccggctgtgattcagtgatgattggccgcggcgcgctcaatgtgccgaatctcagccgggtaattaaatataatgaaccgcgtatgccgtggccgcaggtggttgagttactcaaaaaatatacccagctggaaaagcagggggataccggtttatatcacgtggcgcgcattaagcagtggctgggctatttacgcaaagaatacacggaagcgcttggcctctttaatgaaattcgcaccttgcaaacctcagcagagatagcgaacgccattgcacattattag

SEQ ID NO: 105037 - DNA, 834 bp, Enterobacter aerogenes
atgctaatcgccaaagtacttaataataacgtggtggtagtggtcaacgagcagcagcgcgaacaggtggtgatggggcgagggctggcctttcaaaagcgcgtgggcgactcgttggacgaaagtaaaattgaaaaagtcttcgccttacaaagcgatgaactggttggccgcttaggcgaattactcagtcagataccgttagaagtgatgaccacctgcgatcgtatcatcgacctggcccgcgggcggttgggaaagttacaggaaagtttgtacatcacattaactgaccactgtcactttgccatcgagcggcagaaaaacggcgtcgcgattcgcaacgtgctgctgtgggagattaaacggctgtatccgaaggagttcgaactgggtcaggaggcgagggccattatcgcccgccggctgggcgtcgagcttgccgaggatgaagccgggtttatcgctttgcatctggtgacggcgcagctcaacagcgaaatgccggaagtgatgcacgtgacgcgggtgatgcaggagatcctgcaactggtgaagtatcagctgcagcttaactatgacgaagagtcgctcagctaccagcgctttgtgacccacctgaagtttttcgcccagcgcatgttaacgcgaacggtagtgcaggatgacgacgtcacgctgcacagcgcggtgaaagataactacgccaaagcgtggaagtgcgcggaaacggtggcgaagcacttgcaaaagaattatcaacgggcgctgaccaccgaagagattatgtttcttgccattcatattgaacgggtaagaaaagaggggcgttaa

SEQ ID NO: 105038 - DNA, 1968 bp, Enterobacter aerogenes
atgatgcaggcaaaacctgagcgcgacgccaaccggcgtggttctcgggtttttttatttttaatactcagtcgccggttgtctgtgggcagcggcagtaaggaaaagagcatggaatataaagcactcgcgcaggatattcttcaccgcgtcggcggcaaagagaatattgtgagtctggttcactgcgcgacacgtctgcgtttcaaattgaaggataatgcgaaggccgatgccgaagggctgaaggcgaaccccggtgtgatcatggtggtagaaagcggcggccagtttcaggtggtcatcggtaaccatgttcacgatgtctggctggcagtgcgccagcaggcggggttaagcgacgacagcgaaccggtgccgcaggagaaagcggcgaaaagctcggtattaagtcaactcatcgacatcatctccggcatctttaccccttttattggcgtgatggcggcgacgggtctgctgaaaggtctgctggcgctggcgctaacctgcggatggctcacgccgcagcaggggacctataaaatctggtttgccgccagcgatgcgctgttctttttcttcccgctgtttcttggctacaccgccggcaaaaagtttggcggcaacccgtttatctcaatggtgatcggcggggcattaacccacccgctgatgattcaggcctttgaagccagtcagacgggggcgcccgtggagcacttcctcggtataccggtgacctatatcaattatagctcctcggtgatcccgattatcctcgcctcctgggtctgctgctggctggaacggaagagtaacgcggtgctgccgtccgcgatgaagaacttttttactccggcaatctgcctggcggtggtagtgccgctgacctttctggtgataggcccgctggcgacctggctgagccacatgattgccaatggctatcaggttatctacgtttttgccccatggctggcaggcgcagtgctgggcgcgctatggcaggtatgcgttattttcggcctgcactgggggctgataccgttgatgatcaataacatgaccgtgttggggcatgattctatgctgccaattattctgccggcggtgatagcccaggtgggcgccgtgctggggatactgctggccacgcgcgattcgcgtcagcggatgctggccggttccgcgttttccgccgggctgtttggcatcacggagcctgccatttatggcctgacgctgccgttacgtcgcccgtttatcttcgggtgtatcgccggcgcgattggcggcgcgatcaccgccttcagtaatagctacgcctattcctttggggtgccgaacattttctttccggcgcagatgatcccgtccggcggtattgattttagcgtgtggggcggattaatcggcaccggggtggctttcattctcgcctgcgtattgaccttcttcgccggcttaccgcgcagccaggcggaaggcgccgtcgtcgtcgcgcctgcggcggaaaacgatattctggcgccgatgtccggcagcgtgctggccctcgatcaggtgccggatagtaccttcgccagcggactgctgggtaaaggcgtggccattattccagcggtgggcaaggtcattgccccgttttctggcgaggtcgcctcgctgtttcagactaaacacgccatcggcctgctgagcgacagcggcattgagttactgatccatgtcggcattgataccgtcaaactcgacggcgtaccgtttaccgcccatgtcaaagaaggggatagagttcaggccggcgatttgctgctggagttcgaccgtcaggctattctggacgccggttacgacctggcgaccccaattattatcagcaacagcgatgattaccgtagcgttgaaattgtatccacgagcgtcgtggatgccggccagccgctgttgtccgtcagccattaa

SEQ ID NO: 105039 - DNA, 1395 bp, Enterobacter aerogenes
atgaaaacattcccacagggctttttatggggcggcgccaccgcggcaaatcaggtcgaaggggcgtatctggaagatggcaaaggtttatccacctctgacgtgcagccgcagggggtattcggcgacgtcgtggagcgcgttgcgggcgacagcggtattaaagatgtggcgatcgatttttaccatcgttacccgcaggatatctcgctgttcgctgagatgggtttcaactgtctgcgggtctcgatcgcctggacgcgtatcttcccgaacggtgatgacgccgagccgaacgaagccgggctggccttctacgacaagctgtttgccgagatggccgcgcataatatcactccgctggtgacgctatcgcactatgagatgccgtgggcgctggtaaaaaactatggcggctggggcagtcgcaaggtgattggctttttcgaacgctacgccaggacggtattcagccgctataaaaatcaggtcaaactgtggctcacttttaacgaaattaatatgtcgctgcatgcgccaatgaccggcgtcggtttgccggccggtagcagtaaaggcgaagtctatcaggctatccaccaccagttggtggccagcgcgctggcggtcaaagcctgtcatgaactggtaccgcaaggcaagattggcaatatgctgctcggcgggctgatgtatccgctgagctgcaagccggaagatgtctttgaaacgctgcagcaaaaccgcagctggcagttcttcggcgatgtgcagtgccgtggcgcctatccgggctacatgcagcgctatttccgcgaaaacgatattacgctgaccatcaccgacggtgaccggaaagcgctgaaagagaccgtcgattttatctcctttagctactatatgaccggctgcgtcaccgccgatgaagcgctgaaccagcaggcgcgcggtaacattctcagcatggtgccgaatccgcatctggcaagctcggagtggggctggcagatagacccgctggggctgcgtaccctgttaaacgtactgtgggaccgctatcagaagccgttgtttatcgttgaaaatggtctgggggcgaaagataaaatcgaagccgacggcagcatcaacgatgactatcgcatcagctatctcaacgatcatctggtgcaggcgcgcgaagccattgctgacggcgttgaactgatgggctttaccagttgggggccaatcgatctggttagcgcgtcgaaggccgagatgtccaagcgctacggttttatctatgtcgatcgtgacgatcgcgggcagggaacgcttgaacggcgtaagaagaaaagcttcgcctggtatcaggcggtgattgccagcaacggcggtagcctgcaggaataa

SEQ ID NO: 105040 - DNA, 735 bp, Enterobacter aerogenes
atgagtcagaacatttatgacgatcccggtttctttgccggttacgccacccttgatcgttcggtgaaggggcttgacggcgcgccggagtggccggcaattcagcgcctgctgccagcgttagacggcctgcgagtagtcgatctcggctgcggatacggctggttttgccgctgggcgcagcaacagggggcaaaacagataatcggttttgatctctccagccggatgctggagcgcgcgcgggagatgaccaccggcgaaactatcgaatatcgctgcgccgacctgcaaaccctgacgctgcccgccgagagctgcgatctggtctacagttcgctggcgctgcattacctgccggatgtcgccccgctgttcgccacgctctatcaggcgctggttcccggcggtacgctggtcttctccgccgaacatcccatctataccgcgccgctgcagcagggctggcaggtagatgaacaggggcagaaacgctggccggtcagccactatcagcaggaaggcgaacgtatcagcaactggtttgccgagggggtgattaaacagcatcgcaaactctcaagctggattaacgcgctcatcgccgccggttttgtgctggagcagcttgatgagtggggcccgagcgccgagcaaatcgccgcccaaccggcgctggaggaagagaaagagcgtccgatgatctttttactgcgcgccggtaaaccggcttaa

SEQ ID NO: 105041 - DNA, 1440 bp, Enterobacter aerogenes
atgaaccttacactgagcaaaagcgtgctggcggcactgccactggccatcgcgctggctggctgcgcgccatcccatgacattggcggccctttaaagcagcaaaccccggcatctcatgtttcgatggatcttcccgccgccgtaaaaaatggctggccgcacaccgactggtggaaagactaccacgatgcccagctggataatctgattcagcgcgcgttagccaatgccccggacatgcaaattgccgcgcagcgcatcaaactggccgaagcgcaggcgcgaatgtcgcaggcgaatcttggtccggagatggatttctccgccgatatcgaacggcagaaaatgtccgcggaaggcctgatgggaccgttcgctaccgataccgacggcaacaccgggccctggtacaccaatggtacctttggtctgactgccggttgggatctggatctgtgggggaaaaaccgtgcgttggtgaaagcgcgtatcggcgaagtgaaagcccaggtcgccgagcaggcgcagacccgcgagctgctggccagcagcgtggcgcgcctgtactggcagtggcagaccgaagcagcggtaaaaacggtgctgcagcaggttaaaagcgaacagaataatattgttagcgtcgataccgcgctctatcagcgtggtatcaccaactctgccgaaggggcggagaacgacattaacgtcagcaaaaccgatcagcagctggccgacgtggcgggtaatatgaaagagattgaagcgcggctgatggcgttaaccaacagccagagccagtcgctcaatctgcgagcggcgccgctgcctgcggtcagcgcgcagatgccgagcgaactgggttatgaactgctggcccgccgtccggatctgcaggaagcccactggtatattgaatcctcgctaagcgaagttgatgcggcgaaagcggcgttttatccggatatcaacctgatggcgttcctgcaacaggatgcgctgcatttaagcgatctgttccgccactcggcgcagcagatgggcgtcaccgccgggctgacgctgcctatctttgatagcggcaggctgaatgccaatctcgacatcgccagcgcgcagaacggcctgtcgatcgctaaatacaacaaagccgtggtcgatgcggtgaaccaggtagcgaaaaccgcaagccaggtagagacgctgatggagaaaaaccagcagcagcagcaggtggaaaaagacgcgcagcgggtggtcaatctcgcccaggcgcggatgaatgcgggaatcttatccggttcccgcgtgagcatagcgaagctgcctgcgcttcaggagcgaatcaccgcactgcgtctgcacggccaatggctggatgccagcattcagctgacttccgcactgggcggcggttatcaccagacgacaaaataa

SEQ ID NO: 105042 - DNA, 594 bp, Enterobacter aerogenes
atggatatcaatcacctgatttcccaatacggctacgcggcgctggttattggcagcatcgcagaaggtgaaaccatcaccatccttggcggcgtggcggcacatcagggtctattgaagtttcctttggtggtcatcgccgtggccctgggcggcatgatcggcgatcagctgttgtatttccttggacgtcagttcggcggtaagctactgcgccgcttctcgcggcagaaggcgcgcatccgtaaagcgcagcgcctgattcagcgccatccctatctgttcgttatcggcacccgctttatgtacggctttcgggttatcggcccggtcttgatcggcgccagccgcttgccgccaaaaatatttctaccgctgaatatttttggcgccatcgtttgggcgctgatttttactacccttggctatcttggcggcgaggcgatcggcccgtggctgcaccatctcgatcagcacgttaaacactggatctggctgatcctcgtagtggcgctggtggtcggggttcatctgtggctgaaacgccgggaagcgaaaagaaaagaggaagatacagaggatgataatcaatag

SEQ ID NO: 105043 - DNA, 588 bp, Enterobacter aerogenes
atgaaccatgtctggggactcttcgctcatcctaatcaagagatgagcgtgatcaagagtgaaaatgagaccgtttcgcaccactacacgcaccatgtgctggtgatggcggcggttccggttatctgcgcctttatcggtacgacgcagctcggctggaacttcggcgacggtacggtgattaagctctcgctgatgaccgggttggtattagcggtactgttttacgccgtgatgttagcgggggtggcggtgatggggcgggtgatctggtggatggccagaagctatccgcagcagccgtcgctgaaacgctgtatggtctttgccggctacgtcgcgacgccgctatttttaagcgggatcgtggcgctctatccgctggtatggctgtgcgcgctgataggcaccatcgcgctgttttacaccggttatctgttgtatctgggtattccgaccttcctgagtattaataaggaagaggggctcagcttcgccagctcaaccctggctatcggggtgctggtgctggaagtgctgctggcgatcactgtcgtgctgtggggctacgggtaccgactcttctaa

SEQ ID NO: 105044 - DNA, 948 bp, Enterobacter aerogenes
atgccgaattttcgaatttctttgctcagcctgactttgctgctggctgtgccttttgcgccccaggcgatagcaaaaaccactgcggtaaccgccgcttcacagccggatatcgcttccggtagcgcgatgatcgtcgatctggcgaccaagaaaatcatttacgccagccagcccgatttggtgcgcccgatggcgtctattaccaaagtgatgaccgctatggtagtgctggatgcgcatttaccgctggacgaaatgctgaccgttgatatcagccagacgccggagatgaaaggtatctattcccgcgtacgacttaacagccaaatcagccgccgcaatatgctgctgctggcgctgatgtcttcggaaaaccgtgccgccgccagcctggcgcaccactatcctggcggttataacgcttttatccgcgcgatgaacgccaaagcgcaggcgctgggtatgacccacacacgctatgttgagccgaccggcctgtcggtgcataacgtctccacggcgcgcgatctgactaagctgctgatcgccagcgaacaatatccgctgatcggccagctaagcaccaccaaagaagataccgccacctttgcgcatccggcgtataccttgccgttccgcaataccaaccatctggtgtatcgcgataactggaatattcagttgaccaaaaccggctttaccaacgccgccggccactgcctgattatgcgtacggtgattaatcaacgcccggtagcgttggtggtaatggacgcgtttggcaaatatacccacttcgccgacgccagccggttacggacctggattgaaaccggtaaggtgatgccggttccggcgtcagcattgagctataaaaagcagcgtgaagcgcagatggcggaagcgatgctgaaaggcggcacgcagaccgcgcagaacgattaa

SEQ ID NO: 105045 - DNA, 555 bp, Enterobacter aerogenes
atgtccgccaaggataagttacaagacgccgacttagagatccgcgaagcgttgcctgatgacgcgcatgcgattgccgcgctgtacgtctggcacgtgcttaacggccgcgcctcatttgaagagatcccgcctaccgtcgacgaaatgcgcaagcgaatcaaaaccgtgcgcgataacgggcttccgtggctggtcgcgctgtggcgcggcaccattgtcggctactgctatgccaccttttaccgccctcgcccggcctatcgctatacgctggaggagtcgatttacgtcgagtccggcatgggcgggcgcggcatcggcagcgcgctgctgacgcgtctcatcgcgcaatgtgaacaggggccgtggcggcagatgctggcgattatcggcgacggacataacaacgccggctcgattgccatccataagaaatttggctttaccgttgccggacagctgcgcagcgtcggctataagatgggcgactggcgcgataccctaatcatgcagcgccagcttggcgacggcgactggacgttaccggagtga

SEQ ID NO: 105046 - DNA, 1734 bp, Enterobacter aerogenes
atgtcatctgcaacaacaataaataaccctccctttttggcggaactggcgcggctggttggctcctcgcatctgttaaccgatccggcgaaaacccagcgttaccggaaaggtttccgctccggccacggcgatgcgctggcggtggtgttccccggtaccctgcttgaattatggcgagtgctcagcgcctgcgtccaggctgacaaaattatcctgatgcaggcggcgaataccggcctcaccgaaggctccaccccaagcggcaatgattacgatcgcgaaatcgtcattatcagcacgctgcgtctggataagctgcacctgctggataagggtgagcaggtgctggcctaccctggcaccactctctattcactggaaaaagcgctaaaaccgctgggccgcgaaccgcactcggtgatcggctcttcctgcatcggcgcatccgtcatcggcggtatctgtaacaactccggcggatcgctggtgcaacgcggaccggcctataccgaaatgtcgctgttcgcgcagattgacgccgacggcaaactgaaattagtcaaccatctgggaatcgatcttggctcaacgccggagcaaatcctgagccgcctcgacgatgaccgtatcaacgatgccgacgtgcagcacgatggccgccacgcccacgatcacgattacgtcacccgcgtgcgcgacgtcaacgccgataccccggctcgctataacgccgacccggaccgcctgttcgaatcctccggctgcgccggcaagctggcggtcttcgccgtccgtctcgatacttttccggcggaaaaacgccagcaggtgttctatatcggcaccaatcagccggaagtgctcaccgaaatccgccgccacatcctcgctgaattcaataatctgccagtggccggtgaatatatgcaccgcgatatttacgatatcgccgaaaaatatggcaaagacactttcctgatgatcgataagctcggcaccgacaaaatgccgttcttcttcaccatgaaggggcgcaccgacgcgatgctggaaaaagtctccctgttcaagccgcacttcaccgaccgctttatgcagaagctcggtcacgccttcccggcgcacctgccggagcgcatgaaaacctggcgcgataagtacgaacatcatctgctgctgaaaatggccggcgacggcatcgaagaagcgcagaagtggcttacggagtatttccagcaggccgaaggcgatttctttgtctgtaccgcggaagaaggcagtaaggcattcctgcaccgcttcgccgccgccggcgcggcgatccgctatcaggcggtacatgccgacgaagtggaagatattctggcgctggacatcgccctgcgccgcaatgacaccgaatggttcgaacatctgccggcggaaatcgacagccagctggtgtacaagctttactatggccactttatgtgccacgtcttccaccaggattacatcgtgaagaaaggggtagacgcgcacgaactgaaggaaaaaatgctggatctgttgaaagcgcgcggcgcgcagtacccggcggagcacaacgtcggccatctgtatgaagcggcggagagtttaaaacgcttctatcgccagaacgatcccaccaacagcatgaatccggggatcggcaaaaccagcaaacaaaaatactggggcgaggcgcagaagccgacggaagcacaataa

SEQ ID NO: 105047 - DNA, 2298 bp, Enterobacter aerogenes
atgaaatggttgtgtactgttggcgtcgccgtgagcctggcgctgcaacccgcgctggcggatgaactgtttggtaaccatccgctgacgcctgaggcgcgagatgcgtttgttagcgaactgctgaaaaaaatgacggtcgatgaaaaaatcggtcagctgcgcctaatcagcgtcggtccggataacccgaaagaggcgatccgggaaatgatcaaagacggtcaggtaggggcgatttttaataccgtgacccggcctgatatccgcgtgatgcaggatcaggtgatgcagctaagccgcctgaagatcccgctgtttttcgcctacgatgtgctgcacggccagcgtaccgtcttcccgataagcctcggcctggcctcctcttttaatctcgacgcggtgaataccgtcggacgtatctcggcctatgaagcggctgacgatggtctcaatatgacctgggcgccgatggtcgacgtctctcgcgacccgcgctggggccgcgcctccgaaggttttggcgaggatacttacctgaccaccgtgatgggtaaagcgatggtggagtcgatgcagggtaagagcccggcagaccgctattcggtgatgaccagcgttaaacacttcgccgcctacggcgcggttgaaggcggcaaagagtacaacaccgtcgatatgagcccgcaacgcctgttcaacgactacatgccgccgtataaagccggtctcgatgccggcagcggcgcggtgatggtggcgctaaactcgctcaacggtaccccggccacttccgattcctggctgctgaaagacgtcctgcgcgaccagtggggttttaaaggcatcaccgtttccgaccatggcgccatcaaagagctgattaaacacggtgtcgcctccgacccggaagacgcggtgcgcgtcgcgctgaagtccggtatcaacatgagcatgagcgatgagtactacagcaaatatctgccggggctggtgaaatccggcaaggtgacgatggctgaactggatgacgctacccgccacgtgctcaacgtcaagtatgatatggggctgttcaacgatccgtacagccatctggggccgaaagcatccgacccgcaggacaccaacgccgaaagccgtctgcatcgtaaagaggcgcgtgaagtggcgcgagaaagcctggtgctgctgaaaaatcgtctcgatacgctgccgctgaaaaaatccggcacgatcgccgtagtaggcgcgctggcggatagcaagcgcgacatgatgggcagctggtcggcggcgggcgtagccgatcagtcggtcaccgtgctgaccggcattaaagaagcgctgggcgataaaggcaaagtgatttatgccaaaggcgctaacgttaccgacgataaaggcattgtcgatttccttaacctgtatgagaaagcggtgcaggtcgatccgcgctcgccgcaggagatgatcgatgaagccgtggcggcggcgaaacagtccgacgtggttgttgcggtagtgggtgaagcgcagggcatggcgcatgaggcttccagccggaccgatatcaccctgccgcaaagccaacgcgatctgattagcgcgctgaaagcgaccggtaagccgctggtgctggtgctgatgaacgggcgtccgctggcgctggtgaaagaggatcagcaggcggatgcgctgctggagacctggtttgccggtactgaaggcggccatgcaatcgccgatgtgctgtttggcgattacaacccttccggtaagctgccgatgtctttcccacgttcggtggggcagatcccgacctactacagccatctgaataccggccgtccgtataatccggaaaagcccaataaatacacctcgcgttattttgatcaagcgaatggcccgctgtatccatttggttatggcctgagctacaccaccttcagcgtttcggatgttaaaatgtcggcgccaacgatgccgcgcgacggcagcgtgaccgccagcgtgcaggtgaccaacaccggcaaacgcgaaggggcgacggtgatccagctttatttgcaggacgtgaccgcgtcgatgagccgcccggtgaaaatgctgcgcggctttaagaaggtgaatcttaagccgggtgagacgcaaaccgtcagcttcccgattgatgttgaagcgctgaaattctggaaccagcagatgaaatacgttgctgaaccgggcaaattcaacgtctttattggggtggattccgcccgcgttaagcagagcgaatttgagttgctgtaa

SEQ ID NO: 105048 - DNA, 915 bp, Enterobacter aerogenes; identical to SEQ ID NO: 89941

SEQ ID NO: 105049 - DNA, 1158 bp, Enterobacter aerogenes; identical to SEQ ID NO: 89942

SEQ ID NO: 105050 - DNA, 936 bp, Enterobacter aerogenes; identical to SEQ ID NO: 89943

SEQ ID NO: 105051 - DNA, 738 bp, Enterobacter aerogenes; identical to SEQ ID NO: 89944

SEQ ID NO: 105052 - DNA, 732 bp, Enterobacter aerogenes; identical to SEQ ID NO: 89945

SEQ ID NO: 105053 - DNA, 1689 bp, Enterobacter aerogenes
atgtacgagttcgatctggtattgctgctgctccagcagatgtgcgtgtttctggtcatcgcctggctgatgagtaaaacgcggctgttcattcccctgatgcaggtcaccgtgcgtttgccgcataaattgctgtgctatgtcaccttctcgattttttgcattatggggacctatttcggtctgcatatcgaagattctattgcaaatacccgcgctattggcgcagtgatgggcggcctgctcggcggcccggtggtcggcggcctggtggggctgaccgggggcctgcatcgctattcgctgggcggtatgacggcgttaagctgtatggtgtcgaccattgtcgaaggtctgctcggtggcctggtgcacagtatcttaattaggcgcggtcgcccggataaagtgttcagcccgcttaccgccggggctattacctttttcgctgaactggtacagatgctgataatcctgctcattgcgcgaccctttcaggatgcgctgcacctggtacagagtatcgccgcgccgatgatggtcactaacaccgtcggcgccgcgctgtttatgcgtattctgctggataagcgggcgatgtttgaaaaatatacctcggctttttccgccaccgcgctgaaagtggcggcctctaccgaggggatcctgcgtcagggattcaacgaagagaatagtatgaaggtggctcaggtgctgattcaggaactggatatcggcgctgtagccattaccgaccgcgagcggctgctggcgtttaccggcatcggcgatgaccaccatctaccaggtaagccgatctcatcatcctatacgcaaagggcgattgataccggcgaagtggtttatgccgacggcaacgaggtgccgtaccgctgttcaattcaccctggatgcaaactgggctcgacgctggtcattccgctgcgcggtgagaatcaacgggttattggcaccattaagctatatgaagcgaaaaaccgcttgttcagctcaattaaccgtacgctgggggaggggatcgcccagctactgtcggcgcagatccttgccggtcagtatgaacggcagaaggcgttgctgacccagtcggaaattaagctgctacatgctcaggtcaacccgcactttttgttcaacgccctgaacacgctgaaggcagtgattcgccgcgatagcgatcaggccggacaattggtgcagtatctatcaaccttctttcgcaaaaatctgaagcgaccaacggagatcgtcaccctggcggacgaaattgaacatgtgaatgcctatctgcaaattgagaaggcgcgattccaggataatttacagatacgtatgcaggttcctgcatcgcttgaacatctgcagctaccggcgtttacgttacagccgatagtcgaaaacgcgatcaagcacggcacttctcagcatcttggcgtgggcgaaattaccattcgagccagtcagcatgagcgttggttacagctggatgtggaagataacgccgggctgtatcgggataaccctaatgccagcgggctcggaatgagcctggtggacagaagactgcgtacgcgcttcggcgccgactgcggaattagcgtcgcttgcgaagcggaacattttacccgcattacgctgcgactgcctctggaggagaatgcatgctaa

SEQ ID NO: 105054 - DNA, 720 bp, Enterobacter aerogenes
atgctaaaagttttaatcatcgatgatgagccgctggcgcgggaaaatctgcgcattctgctggaggcgcaaagcgatattgatatcgtcggcgaatgcggcaacgccgtcgaggcgattggcgcggtacataagctgcgtcccgacgtgttgtttctggacattcaaatgccgcgcatcagtgggttggagatggttggtatgctcgatccagagcatcgcccctatatcgtctttttaaccgccttcgatgaatatgcggtgaaggcctttgaagagcacgcctttgattatctgctaaagccgatcgaaaacgcccggctggagaaaaccctgagccgcctgcgccaggagcgcagcctgcaggatgtatccctgttggatgatgcccggcaggcgctgaagtacattccctgcaccggtcacagccgcatctggttgctgcagatggaagatgtggcttttgtgagtagccggatgagcgggatttacgtcaccgatagcgaaggcaaagaaggatttaccgaactgactttgcgtacgcttgaaagccgtacgccgctgttgcgctgccaccgtcaatatctcgttaacatggcgcatttgaaggagatccgccttgaggagaatgggcaggcggaattgttaatgcgcgccgggcaaacggtgccggtcagccgccgctatctgaaaagcctgaaggaggcgattgggctgtaa

SEQ ID NO: 105055 - DNA, 468 bp, Enterobacter aerogenes
atgatcagtaacgatattttacgtagcctgcgctacaccctgaaaacgaataataacggtctggtacgcatctttgcgctggcggatgcgccggtgagtgcggaacaactggtaccctggctgaaaaaagaagaggaagaagggtttgcgcgctgcccggatgtcgtgctgtcgaatttcctcaacggtctgatttacgacaagcgtggtaaagatgagtcggcgccgccgctggcggtcgagcgccgggtgaataacaatatcgtactgaaaaaattgcgtatcgccttctcattgaagaccgacgacattctggcaatcctgactcagcaaaaattccgtgtgtcgatgccggaaatcaccgccatgatgcgcgcgccggaccacaaaaactaccgcgaatgcggtgatcagtttttgcgctatttcctgcgcggtcttaccgaacgcgagcacgccaaaggctaa

SEQ ID NO: 105056 - DNA, 465 bp, Enterobacter aerogenes
atgaaatttaaccgcaagatggctggcgtgctggccgtatccgttctgctggcggccctcaccggctgcgataataaaaaagaagagagtaaaacctttgcgctgaataccaacggcgtcgaactcagctttacctaccactatgacggcgacaaagtattgcgtcaggatgccgacaacaccattccctataaatcgatcggcgccgaaaataaagaacaggcgcgggccattattgagccgattagcagcgtgtatcgtaatctacagggcgtagaacagaccatcgactataaagattcctatgcgcttgagcatctgaccgtggattttagcaaagcgaaaatcagcgagctgtgcaaactgccgggctcgatgttcaccgactgctcacagcagtttgtttcactatctgtgtcaactaaattgctggaatcgcagggttttaaagaggtgaagaagtaa

SEQ ID NO: 105057 - DNA, 2043 bp, Enterobacter aerogenes
atgcccactatgactcaagtcgcgaaaaaaattctggtaacgtgcgcgctgccgtacgccaacggctctatccacctcggccacatgctggagcacatccaggctgatgtctgggtccgttaccagcgaatgcgcggccacgaagtcaacttcatctgcgccgacgacgcccacggcaccccgattatgctgaaagcgcagcagcttggcatcaccccggagcagatgattggcgagatgagtcaggagcatcagaccgattttgccggtttcgatatcagctacgacaactatcactcgacgcacagcgacgagaaccgcgagctgtcggagcttatctatacccgtctgaaagaaaacggttttattaaaaaccgcaccatctctcagctctacgatccggaaaagggcatgttcctgccggaccgcttcgtcaaaggcacctgtccgaagtgtaaatctccggaccagtacggcgataactgcgaagtctgcggcgccacctacagcccaactgagctcatcgatccgaaatctgtagtatccggcgcgacgccggtgatgcgtgaatctgagcacttcttcttcgacctgccgtcctttagcgaaatgctgcaggcgtggacccgcagcggcgcgctgcaggagcaggtggcgaacaaaatgcaggagtggttcgaatccggcctgcaacagtgggatatttcccgtgacgcgccgtactttggctttgaaattcccaacgcgccgggcaaatacttctacgtctggctggatgcgccgatcggttacatgggttcctttaagaatctgtgcgacaaacgcggcgacaccaccagcttcgatgaatactggaagaaagattccagtgccgagctgtatcacttcatcggtaaagatatcgtgtacttccacagcctgttctggccggccatgctggaaggcagcaatttccgtaagccgaccaacctgttcgttcacggctatgtcacggtaaacggcgccaagatgtccaaatcacgcggtacctttatcaaggccagcacctggctgaaccatttcgacgccgacagcctgcgctactactacaccgctaagctctcttcgcgcattgatgatatcgacctgaacctggaagactttatccagcgcgttaacgccgatatcgttaacaaagtggtgaacctggcttcgcgtaacgccggctttatcaataagcgcttcgacgggatgctctccgccgaactggctgacccggcgctgtataaaaccttcaccgatgcggctgccgctatcggcgaagcgtgggaaagccgcgagttcggtaaagccatccgcgaaattatggcgctggccgacgtcgctaaccgctatgttgacgagcaggcgccgtgggtggtggcaaaacaggaaggccgcgacgccgatctgcaggcaatctgcaccatggggctgaacatgttccgcgtgctgatgacctggctgaagccggttctgccggggctgagcgcgcgcgctgaagcattcctcaacaccgagctgagctgggacgccatccagcagccgctgctggcgcacaaggttaacgccttcaaagcgctgtacaaccgcattgagatgaaacaggtcgaagcgctggtggaagcctctaaagaagaagtgaaagccgccgccgcgccggtgactggcccgctggccgatgatccgatccaggaaactatcgcctttgacgatttcgccaaggtggatatgcgtatcgcgctgattgaaaacgccgagttcgtcgacggttccgataagctgctgcgcctgactctcgatctcggcggcgagaagcgtaacgtcttctccggcatccgctccgcctacccggacccgcaggcgctcattggccgcctgacagtgatggtcgccaacctggcgccgcgtaaaatgcgcttcggcatctccgaagggatggtgatggccgccggccctggcgggaaagatatcttcctgttaagccctgacagcggcgcacagccgggtcagcaggttaaataa

SEQ ID NO: 105058 - DNA, 1110 bp, Enterobacter aerogenes; identical to SEQ ID NO: 89951

SEQ ID NO: 105059 - DNA, 474 bp, Enterobacter aerogenes
atgacggcgagatcttctatcatcgctaagtcctcgacgcaggcgcaattgcgcattcgccccggtcgcgccagcgactaccctcgcctgcgtcagctgtttcttgacgcgcgtcttgcctcatggacatggcttaacggcgatcaatggcggctggaagattttgatgccgtggtgcaagacgaacagctatgggtcgccgaatgcggcgatgtgctggcaggattcgcctcggtgtgggttatcgacaacttcctgcataacctgtttgtggatccgcagtggcaggggaaaggcgtcggtagcctgctgctggaacaggttcagcgctcattcaagcgcagtggtacgctgaagtgtctgtcgcgaaatgaaaacgccctgcgcttctaccagcatcacggctggaaactcgaagcccagggcgcgtctcctgacggagattattggctgatgcgttacacccagccttaa

SEQ ID NO: 105060 - DNA, 318 bp, Enterobacter aerogenes; identical to SEQ ID NO: 89953

SEQ ID NO: 105061 - DNA, 900 bp, Enterobacter aerogenes
atgttcaggctggaagatctgaccttatttgtccgcgcggcggcgttaggcagttttagcgaggcggcgcgggaggcggggcagcagccagcgcaggtgagcgcggcgatcaaacgcctggaaacgacgctcaacattcgcctttttgctcgttcgacccgtagcctgcgcctgaccccggagggcgaaacctggctgccctacgccacccagatgctcgataccctacaggccgggttacagaaaattcaggcgccgggggatgaagtccgcggcacgctgcaaatcgccgtgccatccgatcttggacgtaacctgctgctcaaggtgttttgcgcttttcgcgaacgtcacccggcgctgcgcctgcggctgcacttttccgatcatctgaccgacgtgtttaaagatccggtggatgtcgcttttcgctacggctaccacgaagacgcttcgtttatctcgctgcccgtcgcgccggaaaaccgtcgggtgttggtggcttcaccgcactgggttgcccgccacggtcaaatcagtagtctggaggagttatcccggcacagcgcgctgttgtacgtattacgcggccgcccttttgaccgctggccgctgatttcaggtaatgaagtgcataccgtggagatgaacggcgcgattatgagtgatgatgcggaggtgatccgtcggctggcggtagccggggaggggatcgcttataaatcgtttcttgatgtcagcgacgacctgcgggaagggcgtctggtgcggttgctgccggactttcagggcgatttaacgccgctgaacatgatttgtccgcaccgcaaacagctctctgccgcggtgcgtttgttatatcaagaggtgaaatcacattgtgaagcgcttagtgcttaa

SEQ ID NO: 105062 - DNA, 1344 bp, Enterobacter aerogenes
atggccgataacacacttcatacttctgcccgtagccactggctggagcgccgctttgcgctgcactcacggggcggttcgctacgcaccgaatgcctggccgggatcaccggctttctcgccgccgcctatttactggtggtcattccagggctgctggcgattggcggaatggataaaggcgccgccaccaccggcaccatcctggtctttgtcgccggttcgttattaatggcgttttatgccaacctgccgtttatcgtcggtccgggcattggcggctcggtactggtgggggtgacactggcgggcagcgaaggtattggctggcagattggcctcgggattgcctgctggtcggggatcctcttcttcctgttgacccaattcggcctgcgcgaagtggtcacccgctcggtaccgcagtcaattaagctgggactcacggcctcgatcgggttattcgttgcggtgctcggctttcgcaatgccgggctggtgctggcgaatgccaaaaccaacgccctgatgctcggtgattttcttgcccccggcgcgctggtggcgctgtgcggcctgtttctggcgatagcgctacaggcgcgtaaagtgccaggcgcgatattgtgggccattcttttcgccaccctggtgggtattccattcggcgtaacaaagctaccgggcagctttattgatgttcctcactcgctggctccggtgttcgggcaaatcgatctgttgggggcattaaatatcgccttcctgccgttcctgttcgtctttttcgcgtccgagtttttctcgaccatgggtacgacgctggcggtcggcggcgaggcgggcttactggatgaagaaggcaacatgccgcagattaatcgcccgtttatggtcgattcgattgccgcagcgctgggcccgtgggtcggtattccggcggccacggcgctgattgaatcatccgcggcggcggaagccggcggcaagacaggcctcaccgcgctggcggcggcggtgatgttcctgctgatgttgctgtttacgccggtggcgctcatgatccctaaagaggccaccgcgccggcgttaattttgataggcctgaacatgtttagcggcctgcgcaaagtcgatctggggaactttaccgacggactgccggtgttaatgatggtgatgattacgctaatcgccaacagcttcggcaccggtattgccggcgggctgctgttttacattgtcattaaagcgatcgccggcaagtggcgtgaaattccgattggcctgtgggtgctggcgatcccgctaatctattacttcgcgaccttagttaagcactaa

SEQ ID NO: 105063 - DNA, 1812 bp, Enterobacter aerogenes
atgtccagcaatgctgaagtccgtcgtcgcgccgtgcaggccgcacgcggcgaatccccgtttgatttgttgctcgtcgatgcgcagatcgtcgatatggccactggcgaaatccgcgacgctgacgtcggcatcgttggggaaatgattgccagcgtgcatccgcgcggcagccgcaccgacgcccatgaagtgcgctcgctgcagggcggctatctgtcgcctggcttgatggacacccacgtacaccttgaaagttcgcatctaccgcccgagcgctacgccgaaatcgtcctgacgcagggtaccaccgcggtgttctgggacccgcatgaactggccaacgtgctcggcgtcgatggcgtgcgctacgcggttgatgccagccgccacctgccgctacaggtgatggtggccgcgccatccagcgtcccctctacgccaggtctcgaaatgtccggcgctgatttcgccggcgctgaaatggaaaccatgctcggctggccggaagtacgcggtgtggcggaagtgatggacatgcatggcgtgctgaacggcagcgaacggatgcaggagattgtccaggccgggcttaacagcggcaaactgattgagggccatgcccgtgggctcagcggcgccgatttacaggcgtatctcgccgccggcgtcacctccgatcacgaactgacttcagcggccgatgcgctggaaaaactgcgcgccgggctgactatcgaaattcgcggctcgcacccctacctgctgcccgacatcgttgcggcgttaaaaacgctgccgcatctctcttcgcaaatcaccgtctgcaccgatgacgtaccgccggatatgctgctggagaaaggcggcgttatcgccctgctcaacctgctgattgcacacggtttgccaacggtcgatgtgctgcgtttcgccaccctcaatgcggctattcgcctgcagcgtaacgatcttgggctgattgccgcaggacggcgcgcggatctggtggtgtttgattcgctggagaaactcgaggctcaggaggtctatgtcggcggcaaacttatcgctcgtaacggtcacctgctaaccccccttgccgccgcgcccggcgtgacgccgccgcgtgataccttgcagttagcccccctcgatgcagaagattttattctgcgaattaagggcattcgccatggcgtcgcccgcctgcgccacatcagcggcgcgcgcttcacgaaatggggtgaagtagaagtacagatccgcgacggcgaagtacaactgcccgcgggctttagcctgatttgggtgaagcaccgccatggccgccatcaggcaacgccgcaaatcgccctgctcgaaggctggggcgagctgcgtggcgccattgccaccagctactcacatgactcacataacctggtggtgctcgggcgcgatgcgaatgatatggcgctggcggcaaatcagctgatcgcttccggcggcggaatggcgctggcgcaacagggcgagctcctggcccatgtggcaatgccgattgccggcatgctctccgatcttcccgccgccgagctggcgcggcagttccgcgagctgcgagatttaagcagtaaagtcgccgactgggagccgccataccgggtatttaaggcgattgaaggcacctgcctcgcctgtaatgccgggccgcatctaaccgatttgggtctcaccgacggcggcagtcgccagatagttgacccgttgatagcctgccgggagtctccggcgccaactcatcacaacaataatcctcagggagcctga

SEQ ID NO: 105064 - DNA, 912 bp, Enterobacter aerogenes
atgaacgaaccctggcaacgtttgcccgcgctctcactgaagcaactgcagtattttgtgaccctggctcagttgcgccattttaccgataccgccaatctgctggcgattagccaaccggcgctcagcagcgcgctgcggcagattgaaagtgtgatcggcggcaagctggtcaatcgtaccgcttcggcggtcaccctgacggaactgggggcggcgattttaccccatgcccagcggatactgagcgtggcccaggcatctttttttgatatgcaacagatcgtggaagcgggcggcgatggcacggtgcgtatcgggctggtgccgtcggtgagctcactgctgtttccgctgctgccgcaaaccctggcgcaggcctttccgcgtctgcgcatcgaatttcatgaccagaccaacgatgcgttaatgcgggcgctgcaaagcggtgagattgattttggtatcggcgcgatcgacagttcgctaccagctgagctactggtttatccgctacgcgaggatccgttcgtggtggtactgcaccgcgacgatccgctcgctgcgcagccaaatttaccgtggaagcagttggtaggccgtgatattgccgttttctcaaaggggaatattcagcggctggtggcggcgctggtggaaagccagcgtttgaccttaacgacgcgttaccaggtagactatatcgaaaccctttatgggctggtacgttcgcggctggcggtggccattctcccggcgctgtatacgacctatttgcacgatccggcgttaaaggtggcgcaactgcagcagccggcgctcacgcggacggtggccctgatgcgtgggccgcaggcgcttgcaccgttaatcgaagagtgtttttctctgttacagtccgcattgcgctag

SEQ ID NO: 105065 - DNA, 423 bp, Enterobacter aerogenes
atgaccgtttatcaccatgcgctggtactgattaatagcagccttgatggtgttccgttgctacaacacgccgccaggatggcgcaggaaaacgggatgcggattaccatcgcccacatcagcaccgactaccgggcgcttaattacgtgtccgacagcctgcagaatgatgaagtatcgcaagaggtcattcaggccaaagccctgctcaacgagctggcgacgaccgtcgccctgccggtacagacgctatcgctggtgacgacccgccgttttgctgatgtcgaagagtgcgtacaacaacgccatatcgatttaattatcgccggacaccataaccggctgctgggggtgctgtcctcgcactcgctggagtacatcaaccatttgacggtggacgtactgataaaacacctgccctag

SEQ ID NO: 105066 - DNA, 1977 bp, Enterobacter aerogenes
atgaaattaaatcagatcgctaaacatctggctctggccggtgttttaacttcgctgtcgctttccgccttcgctgccgcccagcagcaggacgccaccccggcaactcagcaggcaaataacgcgctgtacaacaaactgccgtttgccgataaaactgatttcgataacgcgcataaaggttttatcgccgcgctgccgcagaccatgattaaaggcgagcaaggcaacgttatctggaacccggcaaaatatgacttcgtcaaagaaggtgaaaaagccccggataccgttaacccgagcctgtggcgccagtcacagctgattaatatcggcggcctgtttaaagtcaccgacggtgtttatcagatccgtaatctcgatctctccaacatgaccatcatcgaaggcgagaaagggatcaccgttatcgacccgctgctgagcgccgagccggcgaaagaagcgatggatctctactacgccaaccgcggtaaaaagccggttgtcgccgtcctgttcacccacagccatgttgaccactacggcggcatccgcggcgtggttgatgaagccgacgtgaaggctggcaaagtaaaaatctacgccccggccggattcatggaagaagcggtttccgagaacattatggccggtaccgcgatgagtcgtcgcgccagctatatgtacggcaacctgctgaagcctgacgccaaaggccaggtcggcgctggtcttggcaccaccacctctgcgggtaccgtgacgctgctccagccgaccaactacatcactaaaaccggccagcaggaagtgattgatggcctgacctacgacttcatgatggcaccaggttccgaagcaccgtcggaaatgctgtggtatgtcaaagagaagaaaatgattgaagcggcagaggatgttacccataccctgcacaacacttactcgctacgcggcgcgaagatccgcgatccgctggcctggtcaaaatatattaacgccgctatcgaccgctggggcaacgatgctgaagtcattatcgctcagcaccactggccaacctggggtaatgacaacattatcaagctgatgaaaggtcagcgcgacatgtatcgctacatcaacgaccagaccctgcgtatggccaacgaaggcctgacccgcgatgaaatcgccgctaacttcaagctaccggaatcgctggaaaaacagtggtcgagccgcggttattacggctccgtcagccacgatgtgaaagcgacgtacgtttactacctcggctggttcgatggcaacccggcgaccctcgacgagctgccgccgcaacaggctgcgaagaagttcgttgaatacatgggcggcgccgatgccatcatgcagaaagccaaagccgactatcagcaggggaactaccgctgggtggcgcaggtgaccagtaaaatcgtcttcgccgatccgaaaaaccaggatgcgcgtaatctggaagccgatgcccttgaacagttaggctaccaggcggaagccggtacctggcgcaacttctacctgaccggcgcgcaggaactgcgtaacggcgtacagaagctcccgacgcctaacaccgccagcccggataccgttcgtgcaatgactccggagatgttcttcgactacctgggcgtacatatcaacggccagaaagccggcgcggcaaaagcggtcttcaacatcgatcttggtaaagatggcggtaagtacaagctggagctggaaaatggcgtgcttaaccacaccgctaatgcggtagcagacaacgctgacgccagtattactctgaaccgcgataccctgaacaagatcattttgaaacaggaaacgctgaagcaggctgaagataagggcgacgtcaagattagcggcaatggcgctaagctcgatgaaatgctgagctacatggacaaatttgaattctggttcaacattgtcaccccgtaa

SEQ ID NO: 105067 - DNA, 636 bp, Enterobacter aerogenes
gtgaattttcaggatatccatagctattatcagcaactcaacattgatgccttttttccgcaaataattgcgcaaggggaagccctgacggttgcggctaataaaaaattagcaattcagccaggatatatttatttttgcactgaaggttcgctgtcaatattaatgccggatagtggccttcatattggtaattccattgagtatatgccgatagggcttatggaaaggtactgcccgctggcgaagtttgaatatatcggtagcgcagcggtgaagctggttaaagtcacttatgatgtctttgaccaaatctttttacacggcggccctgaacgcgtgcaggagctggcgaccattctgacctatatgtcgatctttactatcgatcttcataacgaacgccgacagatgaccagctatcagaccatcaggccgatgctgtttcgttatctttatcgccagagtacccatcagggggaaaacgaaggcctggcgctgtttattattaagcgtactaatctgtcgcgcacgcatgtttttcgggtgctggcggatctgaaagccgggggctatatcacgatgaagcgcggcaaactggtttctatcgaccgaccattgccggaagcctactag

SEQ ID NO: 105068 - DNA, 399 bp, Enterobacter aerogenes
gtggtgaaaggtcctaccccgaacaccgccagcccggataccgtgcgcgcaatgacaccagaaatgttcttcgactatctggcggtgcacatcaacggcgagaaagcgggtaacgcgaaatcggtctttaatatcgatctcggcagcgacggcggcaagtataagctggagctggaaaacggcgtactgaaccataccgccaatgcggaagcgaaagatgccgataccactatcgccctcaaccgcgccaccctgaataagatcatcctcaaagaggagacgctgaagcaggccgttgataacggcgatgcgaaaatcaccggtaacgccgataagctcaatgaaatgctgggctatatggacaagttcgaattctggttcgacatcgttacgccataa

SEQ ID NO: 105069 - DNA, 597 bp, Enterobacter aerogenes
atgactgagcgcggaatgatttttaactccgagatggtgcgcgccattctcgacggtcgcaagacgcagactcggcgaccagtgaaactcccagtacatgataaaaaccttggatgcgagctggctggcaatgaactggccggggaattgtcggcagggaactatctgaacagcgcatttggcaagcaaggcgaccgcatctgggtgcgggagacttgggcacgctacaacatcgaccaagacagctacgatatggcgtaccgagctactcctccggcagactggccagaaggtgggcggtggagaccatcaattcatatgccccgctgggccagccgcattctgttggaaattacagacgtacgggttgagcggttgaacgctatcagcgaagaggatgcgcgagcagaaggcattattgacgggggctgtctgaattgcggggaacctgagccatgtggatgcgccaatccagagcctgatgctaccgatgcttttgcctacctgtggcaatcgatttacgggcaggaaaactggaatgctaatccctgggtttgggttatcgagttcaagcgcgtagaaggcggtgcagcatga

SEQ ID NO: 105070 - DNA, 222 bp, Enterobacter aerogenes; identical to SEQ ID NO: 93578

SEQ ID NO: 105071 - DNA, 438 bp, Enterobacter aerogenes
atgcagcagaatattcaggaactgaaggtattgtttatcgctggatttggccccatctcgcaaagtactgaattcagtacagagttttatgtacggacacttggtttaccgcttaagccaatggaaggtaattgcgattaccttataactgaagagggtcttctggagggcgttaagcattttgctgtctggccactatcgcaggcggcagattcatgtttcgggactggacattggccaactgaatacccaaaaccacagggatggattgaatatgaggtagaggatctagattcagccacaaagatcttaaaagagaaaggatataacctgttggtggctaatcgcgtagagccatggggacaaaccgtcacccgcttacttagccctgagggattgcttacagggcttactataactccctggcttcgtggctaa

SEQ ID NO: 105072 - DNA, 1032 bp, Enterobacter aerogenes
atggcgaccatcaaggatgtagcattgcgggcaggggtctctactgcgacggtttctcgcgtcatgaatcagactgcgtgggtggagccggttacccgcgagcgcgttgaaaaagcgatgcgcgagcttaactaccgacgtaacgccgccgctatcgcgttggcaaagcgcagcggcaatatgcttggcctactgaccggtaatcttgcagaccctttctttgctcacctggctcgtggtgtggagagcgttgcccgcaagtggcagtatcgcctgatggtgtgcagcggagggcatgatgaggcaatggaaaaagccggtctcgactttcttgtgaatcagggttgcgaggcgattgtcgttcacgccagccgtctgtcagaaaaagaactcctgcgctacagcgcccattttccggcgatggtaatagtaaatcgctatatcgccgggatggcgaaccgttgcatctggctggaaaacagcgccgccgcgcgtgaagccacccaccatctgcttgcacaggggcaccgttgcattgcctgtgttacctccgatcttcctatcatcgaccgtcaggagcgtcttgagggctatcgccaggcgatggcggaatttggcatcacgccggataaacgctgggtaatcagcgttccctttaatgaagaaggcggagaacgtgcggcgcacctgctgcttaatagcgctatcccctttaccgccgccgtgaccttcaacgacgtgatggccgccggtatcatgcgcgtactgcaccagcagggcatcagcctgccgcagcaactgtcgattgtcgggtttgatgatgtggtgctggcgcgctacctgcatccggcattgaccaccatgcattacccggtcgagcagatggcacgctgtgcagcacagctggcaattcagatccaggaaggggcagccattctgccaagcgccaacagctttgcggcagagctgattatccgtgactcagtggcgcctgcccccgcgtctctgcgtccattcaccgtcaagtgttaa

SEQ ID NO: 105073 - DNA, 1452 bp, Enterobacter aerogenes
atgagtgcatcagaaaacaagaaaaaaacgctatcatttggcctggccctgatcccgattgtcgccatgctgctgttgctgattgttggctacggcgtcatggggttacgcattgaaccgctgctgctgtgttctgctgcggtagcggcggctcttgcctggtggcagggatacggctgggaagacatcatcaactccgtggtggataagctcgcgaaagcgatgccggtcatcatgattttaatctgcgtcggcggcctgattggcacctggatgttcagcggcaccatcccctatatggtgtactggggactgaagttaattagcccggaatacattctgatagcggcattcttcctgacaagcgttgtctccgtttgtaccggtacctcctggggatctgccggaacggttggagtggcgctgatgggagtggcatcgggtctggatgtttctcttgcggcggcagcgggagcggtggtctccggcgcatacttcggcgacaaaatttctccactatccgattcgactaacttcgcggctatcgtggcagacaccacgctgtttgaacatattcaacacctgatgtggaccaccattccgacctttattcttgcctcgggggtgtatctggtcgctggtcacagcagcatgattggtgatgtggccacgccaaagcgcgtgaccgatatcatcaactcgctggaatcgctgtatcacttcaacattatccttattctgccgccggtcatcgtgctgtggggcgcaatccgcaaaaagccagttatcccgttgatgctgagcgcctgcttgctggcgcttattcttggcgtggtgatgcaaggattgagcgtgaaacaggggctggatgctttcatcgatggcttcactctctcgatgttcccgcaggggactgaagggatggttgcggatgttcctcgcctgctgaaccgcggcggtatgttctccatgatgagtaccatcctgctggtgttctgcgccttctcgttcgccggcgcgctcacgttgaccggcgcgctgaccatcatcatcaaccgcctgttgacggttatcaaaagcgtcggccaactgattgcagcgaccgtggccaccaccattctggtcaccggcgcgaccagtgacggcaagctggcgctgctggttccggcggagctgttcaaagacgcctatcgtcgcatggggctggataacaagaacctgtcgcgcactatcgaggatgccggcaccgttattgaaccgctgctgccgtggacttcggccggggtatatatggcgacaacgctcggcgtcagcactctcgacctgctgccgtgggccgttcagtgctacgcggctattttcttcgcattattttatggttttaccgggatcggtattgcgcgcactgcggctcctacagagcaggcgcagaagcgcgccgtagcggaataa

SEQ ID NO: 105074 - DNA, 1167 bp, Enterobacter aerogenes
atggattttaatcaaattattgacagacatgataccggctcagtgaaatgggatttcatcgagcgacacttcggcgctggcgcggcaaagctgctgccgatgtgggtttccgattttgatttcacctgtccgccggtggtgcagcaggcgctgcatcagcgcgttgatcacggtatttttggttatagcgaacggccgcaggcgtactttgatgcgctgattgcctggtccgctgcccgccatcagctcacggtaaagcaggagtgggtatgcagcgtggaaggcgtcgtaccaggactttcattgctgatacagatgctcagccagcccggggatggtgtcgtggttcaggggccgtactacggctcctttgccaaagtgatcaatctgaacggcaggcggcttctggaaaacccgcttcgcgaagaaggcgacgccgggtacaggatggatctggaacaactggagacgctgttccgcgccgaacgaccaccgatgatgatcctctgtaatccgcacaacccaaccgggcgctgctggtcgaaagaagaactgcagcagctgctgacgctgtgcgagaagcatagcgttattgttatttcggacgaaatctgggccgacctgctgctgccgggtgagatgttcacctcggtgctgcatctgcacgagcactggcataaccgggtgattgcggcaacctccgccagtaaaacctttgggctgtcgtcgctgcggatctccaactttcttattcccgatccggtattacgtgatgttttcatgcgccgtctggacgcgcacgggcttgatgtattcaacgcactgtcggtgcgggcggctaccgcagcctggcaggaaggcggaccgtggctggatgaactgctggcctatctggcggaaaatcgccgctggttcggggaacaggcagtcgcgcatctgccgtgggcgaagatcaccccggcgcagggaacctatctcctgtggattgattgccgcaagttgaacctcagcgatgaacaactcaaatgggtgatggccgatgtcgccagtattgccccgtcgatgggctgcggctttggtcccggcggtagcgggtttatacgcctgaatctgggctgcccgcgtgcctatctggaaaaagcgctggaagggttgaaacggatttaa

SEQ ID NO: 105075 - DNA, 504 bp, Enterobacter aerogenes
atgaatctttttaccgatgtgtttttcctgactaaacaaatccgcaggacatatacttttgctggtatggctgtccttctgtctgcatgtacgcagatggaatcgaaaataattccagaccatggtgatggaaaaaatcattatcctcttccgtatgtggtcacactttcctcaacaaaagataatcaaatgctgtgtgtcaactgtggtaatacaaaacaaacaacgttagtcacaggggggggaaaattaagtgcttatcatatgatggttgatactccctactacgccttcctgtgtactcgccaggaacaagagtgccggtcagggaagtggattgctatcaataaaaacttaccacatccggttgttaacaatattgatattagtagtcgcgctgaaattactgacttgcgtccatttaacacgtcggtgagcacctggttaaaggtgtactataaggatggaagtgtcagagactttaagtttgataatactcactga

SEQ ID NO: 105076 - DNA, 213 bp, Enterobacter aerogenes
atggttaaaattgtggcggtcgcccatagagcagaaattactgttaactacgatattcagagcggcatggtttctatcatttcggatgaatgcccaacggtagaggacccagatcaaggcacatggcaagagcttaagatccgcggagaagacattcctgaattgattagcgccttgcaaagagctcattcggccatcactgcggatttttaa

SEQ ID NO: 105077 - DNA, 984 bp, Enterobacter aerogenes
atggccgcattgccatatatgcagctctatatagctgattatcttgcagacactatgcatttgtctacagaggagcatggggcgtacttgctgctgatgttcaattactggcaaacggggagggcgatccctaaaagtcggctttcgaaaatagcacggctaactaacgaccgttggtcttccgttgaagtctcgttaaaagagttttttaacgataacggcactgagtgggtgcatgaacgtattgaaagggatcttgagatggttcgttcatctcagcgtcagaaatctgatgcgggaaaagcctctgcaagagctagaaaagttaaaaaatcagcagaagagaaacggaatggtaacgaccgttcaacgagtgttgatggggcgttcgaacagaatgctaacggcaattcaactaataaagatccagatatagatacagatctaaaagaaaacccctctctacgcgggagcgaaatgccagatgttcaggagccgcgattcctagcagggctggatattccgatcgggaaattcacgatgcacgacctgtggctaccgtcacaggactggccacggctggctgctacctgggggatatcgcttcccgaaccggcatacctgccgacagagctggcagagttcaccgcgtactggaaatccgaggggaaagtgttcactcaggttcaatgggagcagaaatttgcccgcagcgtgataaatgccagagccaaatccaaaccacacccagcaaccggaggtaacggcaatgcaagaattcaatcagttaacaccgcatcccgggcagtccagcaaattcaggaagccagagagctctgggagaagcaacgcggacttgctggcggcggatacggcatggcggctatggacggtcatgggggagatattctcgaaccggtggacccagaagaacggggcggcgccatcggatatgtggattgcccagattggatcgatgagtga

SEQ ID NO: 105078 - DNA, 450 bp, Enterobacter aerogenes
atgcaaaaaggagatttaactcagaatcgtctcctctatccaggagatattctgtttgtcccacgtaacgacgatctcaaagtctttgttatgggggaagttggcaaacagagcaccatgaaaatggaccgtagtggtatgactcttgccgaagcattaggtaacgcagagggaatgtcgcaatctcttagtgacgctacaggggtatttgttattcgtcagttgaaaggtgataagcaaggcaaaattgccaatatctatcaactgaacgctcaagatgcgtctgctatggtgctaggtactgaattccagttacagccatatgatatagtttatgttactgccgctccattggtccgttggaatcgcgtaatttctcagctagtaccaacgatcaccggagtgcacgatatgactgaaaccgttagatatattagaacttggccataa

SEQ ID NO: 105079 - DNA, 1818 bp, Enterobacter aerogenes
gtgggctcggagatgtgtataagagacaggcctggacaacgttttaatgaacagcagctcatggcgtttcaacagttggtcgagttgggacctgttggagttctgcagggaccgccaggaacaggtaaaacaacctttatttcaaaatttattcactatctgtatcaacattgcggtgtgaataatattcttctggtcggccaatcccatgcgtctgttgataatgtagccatcaaggctcgagagctctgccatacaaaaggaatggaactggatacagtacgtattggtaatgaacttatgattgatgagggtatgctaagtgttgcaacgaaagctcttcagcgacagattcagcataaatttcaccgtgaatatgacctgcgagttagctccctaggaaagcgtctagggatggctccattattagtcaaacagttatgtcagttacatcgtacgctgaatcccttgatggtgacatacggccaatatagccgtgagctgaataaagtagaccagacaaagagcagtagtattagtcatcaagagcgactgactgaattattagaacaaagcaatcagcttaaactgcgaacacaagaaattattaactcaatattcgatgacagcttgctgaaaactcttgtctatgatgagaccttgataagacggttggctgagcaaattgccatacaatgcggttataacaatccagagaaccttgaacgttttatgcagttattggaaatgagccaagagtggatggatgtattacgcggcggtgaggctggatttgatcgatttatgttcaaaagtaagcgattggcttgcggaactcttgttggtgttgggaatcgtcgactagagctagctgagtccagttttgattgggtaatagttgatgaggctggccgagcacaagctgctgaattgatggtagcgctgcaatcaggcaagcgagtgttgctggtaggggatcataaacaattgccaccattctatcatcaacagcatcttaagttagcctctaagaagttagaactcgggaaagggatcttttacgagtctgattttgaacgtgcttttaaagcaacagacggcgtaacactcgatactcaatatcgaatggtagaaccaattggcgagttagtatcggagtgcttttacgctcaagatatcggtaaactgcattcatcgaggaaagtctcgccagattggtattccgagttaccaagtccttggaacaaaactgttacttggatcgatagttcgagccctaatgaagcaggtgcagaagagcaaaagggtaatggccgttactataatcaacgagaagtccggctactgttagaggctttgcagtcattgtcgagcgatgactgcattgcacagcttgagcaaactattaccacagagcagccatatcctattggtataatcacaatgtatcgtcagcaaaaagaggaaattgacaatgctatcagtcgggctgaatgggcagcatcgttacgtggtttgattaagatcgataccgttgattcatatcagggccaggagaacaagataattatcctcagtctggttcgcgataatcccaacaaactacaaggtttcctacgcgatgcgccgcgaataaacgttgctatttcgcgagctcaagaaaggttattgattctgggagctaggcgtatgtggtcaaagaccaataatgattcagcacttggaaacgttcatgaatttattagtaaacaggttgccgtagatgaacccaactaccaaatcctgtgtggtcaaagtctgcttggagataacaactaa

SEQ ID NO: 105080 - DNA, 1548 bp, Enterobacter aerogenes
atgtcagaaccacgtctgggtaatctgattaccgttttactacctgcgcgtagttacaagatcaactgcgctttgaccactgaaaaactgatgcctggcattgaacagtttgcatgtcgcttgctgctgatttttgatcagctctatcccagcgagttacagaattactttggtctaaccgagcgtgaacgagaggtattgcttgatggcttgctggctaacagactgatcaacattaaccctgatgggcatattgaggctagctcattcctacgtaagcatgcagctagtaatggtgggaagccaagtttagttaagtatcaagaacgtacggaggaagtggcattcgacctactaactctttcgatatgtaaaccgcaaccgaatcgtcgttttatttctggactgccagagctattgcctcggcatcagatcgggggagatgctgctgcggtaacagaggcttttagctcacagtttcgccaccatcttttgctcagccgcaacagcgagtatgagcgtcaaaggactagattatataagataatgggctgtagttcgcatgagatggtgcagctcccaatagagatagaggttagctacgatgcttctgctggtagcattgagccgcagaagtttactcgctcctatgaatatttaggtaacacccggctgccgctttcaaacgagctggaggctcatatcgcagattttttgggagaacataaactagatgaatttggtatcgactgtgaagatttctgtaaactagcaaatgataaagtattgtcacaatttgctaatggttataagttcgactattccggctggatagaggctcgcgaacaacggaaaactggctacggtacttcattgactaccggcatgttaggggctgtttatttaccgcacaactctaagctgttcattagtatgttgcataatgcattacgtgattatgtaggtaaaacagctccaaaagcgctgtggtatagcagtaaagtaccactgtggggagctaatggcagtcaactttcgcgttttactcgcgatctaggcgatatacttggcaattattccgatgataagattgctcgcatttcgcttttacatccaagtgctgatgaaggtgagaaacgtcaagaacgtaagcgacacttaggtcgttttcctaccggtattggccttacttcagaggctaagtttgatcgtttggagatcctcttaattcctgatgtgattgctttggtgcaataccacggtcaacctaattctgatagtgcattaaccctgccgattggttatataaccgttgagccagagcgtttagaattacttaaaaacctaatgattaagcgaattgaaggggttgttgcaaccatcaattggtctgaatcaaaacttgaaaatttaacttcactattacctgttgagtttctgattaaactgaataagaaaagtggtgaagatgtggatgctgcaatacaaaaattacaaattgctaaccgtgctgaaaccgcacgggcaattttatcgctacgcaagtag

SEQ ID NO: 105081 - DNA, 1173 bp, Enterobacter aerogenes
atggtagatgatttaccgtggtcattattggataaacatcaactttccaaaataaaagtttacgtaaacgacaacattaatatctttgtaaaagatatttttatagactcaaaagaaagcagtaatgctattgtttcagtgattacacattcagatctcagcgatgaactcaaaatcttaatactcgaaaaaatgcaattcaccgtgaccgggctaaatgagttcccagaatatattgatgttgatggtaacgaattatcatatcacgatctgttctatcgatatgatcatgtaacgccaggatgggaagcgttattggcctatatttgcgaagagtgcaaccttgagatactaacgcagtatattgaaaattatgctgatgtattaagccaagaggcaataaatttgatggaaggagatcgctatgaccttctatatatgaaagttatctgcaatgataacctcagtgatagcgcgtatgctgccatattagagccagtttatattaatacccatcactgggatgagcgcatgagtttgaaaaacctttaccgcttgataaaaaatagaaaaatagaactggatcccgagacttttaaacaagccatacaatattttatttcaaataatgatttgaaaagaatcgagccatttgttttgtggttttcacaatttaaagacaattttttctccaatatagaatattatctttgcgttaatcaagatgatgttttttttaaggagtcattgattagaattaataattcccatgtgttcactttgcaagaaaaatcttcaattttattcaaatgtcgtgagcattatgagctatctttatttgaagaattaactatttctaatgaggggcttattgccttagttaatacatctacagatgataatttcactatttatgtaataattaaattattaaaaaatggttaccgtagcagaacggagattgcacacttcgtgagtaggttggaagaaaaagaatacacaaaaatattttatcaaaagagcgcaacattgaatcttgataaacctcaagaggcggagttatttctgtctgcgttgcaacaagcaaacctgatcaagaaatggacacttagggatgtgggtaaatattacgttcaatgccgatatgaggaagacgagagctatcttgattaa

SEQ ID NO: 105082 - DNA, 525 bp, Enterobacter aerogenes
  misc_feature (503)..(512): n is a, c, g, or t
atgaaaaaaaataaaattaatattgataaattgatatatctagatcaaaggatcattgttaatgagttccagcagaaaacccctatgatcaaacgtgacaaagattatacgttatgggttgacatcaacaatatcaaacctgtagatttatactgttacctgcaagctcgatttggaaagcctaacgggattcaatcattgttccgagagtacgactcatcaaaccttattcattgggattacacgtttgattacgaaggttatcggatcacaattatgtgtatgacctatcgcatagagatacataaatcaatagatttccaagaccagaaatatgcaaaagacgaattcatcaaagatttaaaagatgattttaggaattatggaaaaaaaatctccacattcaggactaaagtggaaacgtggcatctattcataaatcctttcaaaagaataaaaaccgctattgattcaaatttcgtagagttagataacttaaagannnnnnnnnngccaatacgttag

SEQ ID NO: 105083 - DNA, 348 bp, Enterobacter aerogenes
atgttacatggaaatgtaaacccaaatactaatcattttgataccgtatattttgatgacaggactccgctctttgctaaatttactgatttagcttttgactcctaccttgcatctcaaacaggaattgaatatcatactttactgacaagatatgagagcatacaaaacttcatttcttatgttttaacatgtttggatttaaatgccgccaaacaaattatggatatgttagatgaaccctaccctggatggaatccaaaaactaaaagattaggaaaacttttcgcagataaagcgatcgactttcaaatcgatataggcaaaaaaataaaaattatttattaa

SEQ ID NO: 105084 - DNA, 669 bp, Enterobacter aerogenes
atgcttggtgattctacttcattggcactagcagatggctacaacttaacacctcagtttgtagtcaatgtagaagttgcgcttcacaaaacgcagcaatggcggcatttttctcatgaaaaaaaggatgaggtgctttctgggctatatccttcatcgctctatgcgcagaatgacaaaagtggctatgaagtagccattggtgggcagtataccaccgacctttttagtgtgttgggcatcgagtactactatcaaagtgaaggttattcaaaatcggcatggcgggaacaggttgactttattaagttattaagtaaaaaaaccggttttgccagcttagacaaagtgtttgatgattataagtatctgatgggctcagaaataagtaatacagggaataaaggaatgctgcagggacggcattatattacttcatggctaagtttacaaaatgcagatcattcaacgcttcagccctatctggtgatgaacttagttgatggtagtgccttagtaggtactcattatatcaatccgttaaaaggattaagtgaccaagctgagatttatacgggtttgtatagcgcattcggtagtcatgattctgagttcgcactttttggcgagaccctcggagtttacgtcggatttaaatactatttataa

SEQ ID NO: 105085 - DNA, 276 bp, Enterobacter aerogenes
atggcaacctgccaagcaccacaccgctacgacacaatgtttactgcccttcctgaggatcagagctacccgttccgccataaatgtgccggatgtgcgtacgagttgggatttcaggccggagcgtcaaaccaagagcctagtgcagctacagctattgactcaatcttaaaaagccaagcggctgaagtacgtcatagaagcccacgggtagcctactaccaaggatacaccgacggtctaaacgagtattacatccaaaacccccgtggatag

SEQ ID NO: 105086 - DNA, 147 bp, Enterobacter aerogenes
atgctggtgagatacacaggctacgataattcgccgttgcggttttttttctccagtagcctgtcttactttgtgatttttatcacaatattttctccggtgactttcctctattatcagaaaaataccggaatctgtatgctataa

SEQ ID NO: 105087 - DNA, 159 bp, Enterobacter aerogenes
atgtgcgagtccggccttcgcacccaatcggcaaccaattcactcgaaggcagctttttgtgccggaaattcagtatctctttaaacactacgtgtaacgaatgcgaatactgcattcccactaaatacgctaagtcggctgcaaattttttcggataa

SEQ ID NO: 105088 - DNA, 3699 bp, Enterobacter aerogenes
atgaaactacttgataaaaagtattacaacctcgagcccaaatatgagtaccttaaggactcatttattttaggactggcatggaaaaaaacagatagttttgtaagaactcacaattggtatgcagatattttagagctggacaagtgtgcgtttgatattagtgataaagtcactaattggtcaaacgagatctcaaagaacgctctttccaaaagtgatattgaattgataccggctccaaaaggagcaagctggttcattaatcaaggtaagtggactaccaataaagataatagaaagataaggcctttggctaacatatctattagggatcagtcttttgctacagcagtaacaatgtgccttgctgatgctatagaaacaagacagaaagactgttcgttgagcaatcttggctatgctgagcatgtaaagaacaaggttgttagttacggaaataggcttgtctgcgattgggacaatgaaagggcaagatttcgttggggaggaagtgaatattataggaagttctcttccgattatcgaagctttctacaaagacctatctatataggcagggaaacagtaaataaagttagcggaattgatgatgtatatatcatcagtttagatctgaaaaattttttcggttctataaaaataaaccttctgttagaaaaaatcaaaaaaatatccgctgatcattatgcagctaaattcataaatgataatgaattttggactttggcgaatcggattttaagttgggattggcctgaagaatctttatctttacttgagagtttggatataaaagaaaaaaatgttggtcttccccagggattagcttctgctggtgctctggcgaatgcatatctcattgagtttgatgaatctttaatttccaagcttcgtactaagatagaagacagccaaataatactgcatgattattgtcgatatgtcgatgatattagattagtgatttcaggagaagcactagaaagtaataagattaaggaatctattcatgcattagttcagggcattcttgatgagacattggctcaaaatccgtcagataatgaaccatatttaaaaattaacgatagcaagacttatattcttgagctttcagacattgacaacggaagtgggcttacgaatcgaatcaatgaaattcagcatgaagtaggagcttcgagtatcccagagcgtaacggactcgataataatatcccggcacttcaacaattattactgaccgaacaggataatttttccgaggatgttgatagtttatttcccgggtttaaaaatgataagtcgataaaagtagaatctgtacgtagattttctgcccataggctggaaaaaagtttggctaaaaaaagcaagctaatttcacctgaggagaggaaacaatttgataatgaaacctcactgattgcaaaaaaattattaaaagcttggctaaaagatccatcaattatggttatcttccgcaaagcgatagctatcaatcctaatctagatgcttatagcaccattcttgaaattattttttcaagaatacaacgcaatcgtgataaacgagataaatatataatgctgtatcttctttctgatatatttcgtagcgtcattgatgtctatcgaaacctagaatcagaatacgtcgacgattatcaaaaattgatgggtgaagttacattgtttgcccaaaaaatagtttcctgcaaatcttttattccaaattacgcatatcagcaagcattattttatctcgcagtgatcaataaaccatttatagctagtaataaagcttcttttgatcttgcaaggcttcaatgcgtcttaattaaacagcatttagaaccgttgaatagtagtgatggatacctatttgaggtatctgctcaaatcagtaaagactaccgagcaaatgccgcttttctactttctcatacaaatagtaacaaagtagtagacttaattatcgaaaaatttgctttccgaggaggtgaattctggaatgcaatttggaaagaaattgttaggatgcaagataaagataggattaacgaatttagatgggccatatcaaaatatgggtcaaagccaaatagttcggagcactatctttcatcagtgatcagtttcaaggaaaacccatttagatatgaacatgcgcttctcaagctaggtgtaggattagttgaactctttgatgatacagagaaaaacgtatggcaacctgatggtaagcagtattccccacatgaaataaaagtaaaattagaaggtaactcaacctcatggggtgaattatggcgtccaaattttagtatttcatgctcgatagataagaaaggtgaacctggtaaagacccacgctatataagccctgagtggttggcaaattatccacagactcaaaatgatgaacaaaaaatctattgggtttgcagtgtgctaagaagtgctgctttaggcaatgtagattatactcaaagaaatgatttaaaacttgataaagctaagtatgatggtatccattctcagttttacaagcgacgtatgggaatgttacatacaccagagtcaattgttggttcatatggaactataacagattggtttgcaagttttcttcagcatggattgcaatggccaggtttttcttcttcgtatataagccaagaagatatattgtcaattactaatattattgagtttaaaaactgtttattggaacggctaggctacttaaataagcagatatgtatttcatcgaatgttccaaccttaccgactgttgtcaacaggcctgaaatagcatctaaccattttagaattgttacggttcagcagttatttcctaaggatactaatttccatccttctgacgtgactttggctaatcccgatgtgcgctggaagcacagagagcaccttgcggaaatctgtaagctaacggagcaaactttaaatgcaaaacttaaaactgagtctagggaacatacaagcacagctgatctaatcgttttttctgagttagcagttcacccagaagatgaagatatagttagagcactggcatttagaaccaaagccatcattttttccggctttgtcttctgtgaacaagatggccgaatagttaacaaagctcgttggattattccagactcttcagagtctgggacccaatggcgtgtccgtgatcaggggaaacatcatatgaccagtgatgaagtggctcttggcattcaaggatatagaccatcccaacatattatttcaattgagggtcaccctgagggaccatttaaattaactggtgcgatttgctacgatgcaacagatataaagcttgcggcagatctgagagatttgactgacatgtttgtcattgcagcatacaataaagatgtagacacatttgataatatggcttcagcactacaatggcatatgtatcagcatattgttattacgaatacgggagaatatggaggctcaactatgcaagccccgtacaaagagaaatatcataaattgatttctcatgctcatgggactggtcaaatagcaattagtactgctgatatagatttagcagcattcaggcggaagctacaaatatataaaaagaccaaaacccagcctgctggatacaatagaaaacattaa

SEQ ID NO: 105089 - DNA, 354 bp, Enterobacter aerogenes
atgtcaggaacagtacagattgagtcgtttaatgcagaatttctgaccagagagaaactgcacgacctgattttttaccggaaaagttttgatatcacgaatgttaccgacatcagtgaaaccgtcaaaagagtggagtatgcgattgaacatcagcagaagaaattaacctgccgcgtatacaccgaatacagaagcactgcggtggcaggctctctgtggtcaccaacagcacttctgggagcggtgagcgccgccgcaatcggtgtccataatctggcgacatggaacccggactatgaaattagtaagaattacgttaaacgaaccttatccgtaaggtataaaaagtaa

SEQ ID NO: 105090 - DNA, 1194 bp, Enterobacter aerogenes
gtgagttggccgttgggaaaagttaccgatattgccgaaattatatcggggtttgcttttaaaagtgaatggttcggtgctggtgatgcgaaggttattcgaatcggcgatctaaagaacggccgaattgatcttagtgaggctatggtctttgatgaaaaagttcataaagtccgcgaacagtatagggttaaaaatggtgatattttaatggctttatctggcgccactgttgggaaaatcgcagttgctgatttagaggctgaaggggcatatctaaaccaacgagttgccgttattcgaggaaagtgctatgaaaataccgagtttttgaaatacatatttactgggagtcgacttcaaaaactactcctaaatgcaggtggcgccgcacaacctaaccttagcccaaaaaatttggctgagatggaaattcccattcctcctctaactgaacgaaaacgtatcgcaaccattctcaacaaggcagataatatacgtcaaaaacgtgagcaagctatcaaactggctgatgattttttgcgcactaaatttctggatatgttttccaatgagaaaataaagaaatattcaattgttaaaattgacgatcttttagctcaggataagaatagcatacggacaggaccgtttggcagccaattattgcacagtgaattcacagaatcgggaatagctgttttaggtatagataatgcagttagaaatgagtttcaatggggaaaacctcgtttcatatccccgaataagtatgaaactctcaaacgttacactgtattacctggagatgtaattattactatcatgggaacttgtggccgatgtgcagtcgtacctgatgatatttcggtagcaataaatacaaaacacttatgttgtatttctttgaataaggataaatgtgcccctgagtttttacactcttattttcttacacacccgttggcgaaagaatatttagcaaagcattccaagggggcgataatggatggactcaatatgggagttatcaaacacatgccattccctgaaatccctcttgaacagcaatacgagtttgtaaatatcaagaaaaaaataaaacaattcaaaagcaagctcaattcatcgaaaattgcttgtgagtataatttcacaactctgtgtaatgatatattcaatatgcaaggatga

SEQ ID NO: 105091 - DNA, 180 bp, Enterobacter aerogenes
atggaaaatttagataggcttaatgcagaatggattactcttagtgccttccgtggattgatgaaaatcgccacgaaaggcgatatgaataaatcaaagtatgataatgttctcgccttttgcggtgatctgtatcctgaactacttggaaatgatgttagtctgctaaaagctgaatga

SEQ ID NO: 105092 - DNA, 510 bp, Enterobacter aerogenes
atgtattcccgcatgaactcccgaatgacctgcgcagcgggacgatcttgctcgcggcatatcttgagaaattcatcgcgaagctcccgctcgacacggattcgcattccggaatttttttctttcatggctccaagtgtagcctttggatacacatcaagccaagtcgaaagtccgctaggagtcaaaattatccggaatttcgctagcgggcgttttgcggcatatgaacgtctgagccgacgcagtcggtccggcagcttcgttgacggcttctcgctgtttaagaaagggcttaccgtcgtcagtaaggatgtttttaacgatcagattggccttcagggaatatttggaatgaactgtgtcaaagttgtttttgttcagattaacttttccacgctcttacagtggcacagactcctgaccgttactaatgtctgttaccaacggtacgaaagtgggtcttctgcaaattgcggtggaagaaaatcaatgaaactttttatttaa

SEQ ID NO: 105093 - DNA, 1416 bp, Enterobacter aerogenes
atgaaaaatgagaatatagttcagaaaatttggaacctttgccatatccttcgtggtgatgggatcagctatcaccaatacgtgtctgaattaacgtatctccttttcctcaaaattgcagaagagaatggtgttgagcgtcttctgccatctggcaaccgctggaaagacctcctaagtcatcctaaagatggcttgctgggcttctatcaggagatgctgacccaccttggtactagcgcagaaagtgaaacgatacaggcaatatatgcctttcccactacagtgttttcgcacgacgagaaccttcacgccgtagtaaatggcatcgccaaaattgattggaatgatctgtcgggtgatagatttggacacatctacgaggggctgatcgaaaagagctcgcaggatgtacgttctggagcaggtcaatattttactccaagagcactggttaattccatggtgcgagccatgaaaccaaaattgggagagataattcaggacccagcggttggaagtggcggatttctaattgcagcggaccggtttgttcgttcggagaatacgaaacaggcatatgagaaaacgcccccgaaatatcaaggcgttgaaattgaaaaaaatacccgtcgaatttgtttgatgaatacgtttcttaatggcctcgatgccgaggtcatatacggcgatgcgctgacggatgacgcaaatgggctcaagcccgccgatcttattcttgcgaacccgccatttgggagcaaggccgggagcagacgatcgcttcgcaccgatctcccacacaacaacgccaacaaacaattggccttccttcagcacatatatcttggcttaaaaccgggtgggcgcgcggcggtcgttttgccggacaatgtgctatcagatgacggcgttggcagaatagtgcggcgcgatctaatggataagtgcgatctacacacagttctgcggctcccaacgggaattttcgcaagcgcgggcgtcaagacaaatgttctgttttttagccttggcaataagaaggataataatacggagtctgtttggctttatgacttgcgttcaagcatgcccgtattcgggaaaactacgccgttgctcgatgcgcacttctctgaatttgagaaatgcttcggaaatgatccgcaaggtaagtcaaagcgcgtagatcaaggagaaactggccggttccgttgcttttcgcgacgggaaattgctgagcgagatgatagtttggctatttcttggctgcgcgatgaaagcggtgatgccgaggatgctgcggaaactccagaggagattgccgctctgatcctctctcatcttcaatcggcaatgaatgaaattgaagccgtcgtcggagagctcattgaaccttctgaggttaacgaatga

SEQ ID NO: 105094 - DNA, 144 bp, Enterobacter aerogenes
atgacaatgagggaaaaatttacgcaaataatccagtcggttttggtagttggagcagacgtactggagattaaagggttcaaaacagcgcagcttcgactggcaacatgtctgtgccgtaacatgggtggcgggcatgagtga

SEQ ID NO: 105095 - DNA, 1587 bp, Enterobacter aerogenes
atgagtgatttaccaaaggggtgggcgtctacgacactgaaaatggttgtcgagccatatgagagtattgatcccaggcggcaacctgagaggcaatttcgatatgtcgatatcggctcaattgataatcggatacagaagataacagagccaaagaaattcctcgggcgggaggctccctcccgtgcacgtagagtgatcaacactgacgatgttctattcgcaacggtaagaacatatctgaaaaacatcgctctagtaacggaggatttagatggcgaattaacgaccactggaattgtaccacttcgtgccaataacgcgataacaccaaaatatctgttcaattgggttcgttctgaaggctttatcgcatctatttcaaaatctcaaagtggaacgctttatcctgcggtatcggagacgcacattttagacgcaaaggtctctgttccccccctcgcggagcaaaagaggatagttgccaagcttgatgagttaaattctcgaactgcctccgctcgcgatgcactcgataaaatcccagcactgattgaaaaattcagggcgcgtgttttggctctctcttttaacggcggattgatcggaaagatggagagcgaaacaaccctacccgaaagccgatgctggaacttaccagcagactggcgctgggtaagatttgaggaggttgctgctgttgccgccaatttggttcgcccggatagcatacttgctttgccgcatattgcacctaacaatatccaaagcggcacggcgaagcttctgtcatatcagacgattggagaggacggcgtcacaagcgccaaacaacgattttatccggggcaaattttatattcaaaaattcgaccttatctccgaaaagcggttcttgtcgactttgacggcgcttgcagcgcagacatgtacccaataaatgttggttcgcaattagaagcaaaatttttgctttattggcttgttagcgaggatttcgcgcagttctctgccttgcgtgaaggacgtactgtactaccaaaaatcaataaaaaagagctcaacagcacgccgttgccgttaccaccaaaagagcaacaggcagaaattgtccgtcggattgaaatcgcttttgcttggctagaccgggtatctaacgaatacactgccgcatcaaatcagcttcctagacttgacgcgtctattcttcaaacagcattcaagggaaagcttgttccacaaaatctgaatgatgagcccgcctcaatcctgatcgagaggataaaaacagaaagcgcgccaataaaagaaaaaacaagctcaggacgcaaggcggcagcgcatcccaacaagccaattaaggaaggggcgaagatggcgaatttgattgaggttatgaaatccaaaaaaggttgggtttcagctagtcacgcagcacaagcgttgggcattggcgatggcgcgacatctgatgcggttgaggagttctacaacgagctgcggatacacctaaaaaatggtgaccttgaggtcgagcgcaggggaaatgaagactggctaaggctgatgccgagcagtgaggagtga

SEQ ID NO: 105096 - DNA, 1620 bp, Enterobacter aerogenes
atgcgtatcgattggctatggattggtgaatataaaaacctgaaaaacctgactattgacttcgctcaggggcacctgattactgtattgattggcagaaacgggactggcaagtcgaatgttctggaggcagctacagttcttttccgggacctgatcatgggtgaggatgggaaggggaacaaaaacaaaccgtcctttgcttatcgaatttgctatcagatcaaggataaatgggttcgcattgatgccgatccagcaggcaaagaaccatatcgcattaagctcgcaccatatgatcccgatgctgaacctccttctactgtcatcacctttgaggaaacccctggcgaagcaatggctctttccaagttgcgagatccagatgacggctatctgccgaggtttgtatttggctattattcaggccaaagtgaaaggatggaaaaggtatttctcaaatatctcgaacgatacgatagagacctgcgggctggaaaaaatcctggcttgaagcgtctgttctatgcgcttccagttcatagcaattttgttttgctgtctttcattgtgaataacgccgagttgacagacaagtttttgcaggaacagctcggccttgaagaggggggaatagaatccgttctctttgttcttagacagccatcatggacatccaatgacggcgatccacgcttctggaatgcacgtggcgtcgtatccgatttcttagcgacactttacgacatatctcttgcgccattgcggatcacccgcaaggaaaaggtcagcctgtggaactggcgaaaactggagttcttgtatctttttgtgaaagaccttggtgcactgcgcaagctggctggaggtaagagcaccgcccagttctttcaagatttggaaagtacctatgtttctgagttaatcgacgaggtacgaatcaggatcaagctacggaaaaacgatggatctgttacattccgtgaattgagcgaaggcgaacaacaacttctaactgtactaggcttgcttcgcttcacagcggaagaggaaagcctgtttctgctcgacgagcccgatacgcaccttaacccaagatggagcgtcgagtatcttcaacatatccgcaattttctgaatgtgaatgggacagaaaagcagagtagtcacgttcttctggcaacgcacaatccagttgccgtagctgagcttgagaaggagcaagttcagattcttacgcgcgataaggatacgcaggcgatctcggctgcggagccggacacgcacccgcgtggaatgggctatgcgggtgtgatgaccagtgaaatgtttggactaagtgcggccctagacacccatacccaagatctgcttgcgaggaagcgccatctcagcggacaggatgtgctaagtgaagatgacaggaaaacgctgaaggaaatcaacgaagagctccaaacttatgggttccgctatgaggtgcgcgatcccgaacttaaagaggcattgcgaaggctggatcaggaggcgatgccaataagtgaaaggaaagagctgcctgacgaggctgagaaagctcgccgtctaattcagaatgccttgaataagaagggggattga

SEQ ID NO: 105097 - DNA, 783 bp, Enterobacter aerogenes
gtgcggtatattaatctggaccagttggaattaccagatagctggcaggtgcgtgcagacgccgctatcgcagatgagcctggaaaaattaaagatcattccgatgtatggcgcgacctaaagcgaccattaatgaagctatcgcatgacaagtgttattattgcgagattgtgcaggaacggtctgatggagcagtagatcacttccgtccaaagagcaaatatccgtggtcggcttttagcccttccaattatagatttgcatgtacattctgcaacagtgtgcggtcggataaagaaagcgagaagacaggggggaaaggagaaaattttccccttcatgatgagaagaagcgggcaacttgctgtgcagatgaggcaaatgagagcccaatccttttggacccgtgcaagccagacgagcccggccttatagattttgacgaaactggaatgcctataccgacatattcgaaggagaaacacgtcggtcgcaataggcgagcagctgaatcaatcaggctttaccacttggatcactctgaccttgttgacaaacgcaagacgctcgctgtttcaataacacgaaagattgatgccgccgataggttatttccactaacagaatctggaaatgtggatatcgataattcgttttcagaacatgtgcgtgctcttgcggattatatttctgagagtgcggagttgtcggcctttgctcgaagaattgtggccggtcaccgagatgttttgtgggttgagaatttgcttcgctcggcctga

SEQ ID NO: 105098 - DNA, 504 bp, Enterobacter aerogenes
gtgataggtattactgatgttaacgaaccaggcgaccgggccggatgttttcccggaggcggtgctgcgcaccttttccgggctacggggtctgtagccccggtaagcgcagcgccaccgggggagatggcggcgcgtctgaccgcaaaacaccaaaacaaaaggcccggtctttcgactgagcctttcgtttacgttgctatggcagcgccttttccgggctacgggcctgtagccccggtaagcgcagcgccaccggggagatggcggagcgcctggccgcaaaacacaaaaacaaaaggcccagtctttcgactgagcctttcgttttatttgatgcctggcatttatggcgggcgtcctgcccgccaccctccgggccgttgctgcgcaacgttcaaatccgctcccggcggatttgtcctgctccggagagcgctcaccgacaaacaacagataaaacaaaaggcccagtctttcgactgggcctttcgctttatttga

SEQ ID NO: 105099 - DNA, 1926 bp, Enterobacter aerogenes
atggctcaacgtgataatctgtatcgccgtagcagcggtatttatgttgtccgtattgcagttcccgcccgataccgtctctacacgggacagcgtgagattcacgcttcaacagaaacaaacgacatcagaaaagcgagagcgattgccgcaggtttattggttgtctggcagcgatgtctgggtgagtatcaaaaattggatagagaaaagttggtaagcagtgcgcctgctttggctggcgaaggaatgatcagcctcgctgaattttgcggtttaacgagcgcttccctgcaacaagtggcgcagcgactacttgatacgaatatcccacttttttggcttgctgatgggcgtcctgcctactatgtagaagatctttcactcgttgataaggatgatcctgaggcttctggatttatcatcgatagtgccattaacatcgggataagaggttctcttaacggctatatccagcctttggttacttcacgtatattacgtcagattatcgctggtgagccgttagacgcagaaaccgcatttaaatcctcagaggcttcctccaaagccgcatggttcgttgactttcccggtgtcgaaatctcgctaggttcactaatgattcatcgtgtgcaagccgagcgcttacgattgttttggttgtcatatagcccctcactatctcctgcaactcctgagaagccaaaagcaatatccactgcaatattatcctcatcattgccggagaatgagtatgtaaatctcaaatattactcggtgaaaatgagcgagttatgtgaaaaatatattcgctacaagcgcgggggaaaattcacgggaaaggcagaaaatcgagttcgggaaggttttagcctactggttgaagtcatgggggattcaaagcttgtaaaagtagatcgtgactatctccgtgagtatgagaacttgctaaggtcgatacctgcacggcgtgatttggctaaaatccgatacaaaatcaatgacattcatgagctgatggttaaagcaaaagagaatggcgaccctctaatgagcgataataccgttcgtaagtatatgcgggttatatttgaagctttcaggtgggctgatggagaaggtatttttattaagtctccagcgaatcaattcttcgcacctgtagcaaatgaaaagatggatcaggaattcaaagctgatttcactgatgaggatttgcacgctatttttaaccgtccttggtttaaatgtggaactgtggatagaaatagagagggacgcttccatcattaccgtgcatttcattactggttgccactcatcggattctttaccggagcaaggattaatgagttatgccagctttatctggatgatattaagcacgatgatgccggattttatttctttgaaatcaacagcgaacgtgctgatcagtcactgaaaacgattaattcacgacggaaaataccgttgcatccgacattgatcaaacttggattaatccactattgcgaagcattgaagaaagcaggccatgagcgtttatttccagagcttccttaccaccctgtaaaaggatacggcgataaggcttcggactggtttaaccgttcgttgctgaaagtgcagttaggatttgaaaagggcagcaagaaatccttccattcgttccgtcacacgttttctaccaggctcaaacaagcaggaatcgacagcgagacgcgtgcgcagtttgttggacatagccgcggttctggcgagacagagaaccggtatagcaaagatcacccaccagcagccctctttgctgtccttgagagcgttacgttagggctaccggaagtcgctccgtttgtttgcgaagatggtgtagatgcggtagctgatgctatcagaataaaacaatctagagaaaagtaa

SEQ ID NO: 105100 - DNA, 1842 bp, Enterobacter aerogenes
atgaaaacaaggtctttttctatttttttgctaaaagcaggctacaacgcacagaactcccttaagccagatcatcaacttctcgatgactttcaggctcaaaatctcccacagggtgcaagtttatttgtttcagacagatttaaaacaacgccttggtgggtgaattatttctctattgacggggatttagaacaagaaagtaagggagcgttaatttttcttccagtaagagatcgatatttcgctctaacttttggccacatttatcacaatctactcgatgtttcctatgagtatgattttggtcttaaagtaacattaaacagccttgaacctaaagagttaaaaagcgctgacatagtagatcccggtgcttcaagaaggaaaagaatgcaagtcccagttatgtctgacttaacctatttagattttgatagtaatagcgagattttaaaaagcctgaccggaaaagttaaaccgcaatatgtcgacctatttaaaaatgcgaccggttccacaagcttaaaagtagggttgaaaattgaagctgatgagctaatagtattgtgcgagcaacttttagatttatactccagtgatgaatacttgcagtccttccctaatatacaaaaaatagtgcctgagaaagaccctctaaaaattgagcgactagatgattcgcttttagatgcgtttattaataaaagccctgatttatctttatcaatcccggagatcgtagattacagcgataacatttactgcacctttaaaggaagaaaaggggtatcccccatatatactgatattagccttcacgagttttatgactatttaggagaaattgacttaaacacgttcaatatagacaagattaaaagcttctcgcttaatctctgcaatgaagaaggcgttataaccaaggcgtataatatctacagaagctttatctatgatattcactttgacaatgaggatattgtttatcatctctgcgatggtgaatggtataaggttgatcaagattacttacagagtttaaaggattatatagatgcaaggtgcgaagatactctacttccaccatataatcatgacaacattaaggataacataagaaattatagtgaagaaaattataacgaagatgttgcaaacatctcacgaaaccatatctgtttagatcagaaagatatcagtcctgatggacacacacaaatagaaccgtgtgatataattagttaccatgataataagtgtatctttcaccatataaagatatcatccagatcatcacaactcagtcatcttttcaatcaaggagtcaattcaatagaattgttgattttggaaagcaggagcaaagaaaaactcaaggaactaatcgaagaaaatattcaagataaagatctggatagttttaaccgtgtgattgataatggcaattataaagttgagtttggtataattacaaaaaaaccagcgagattgaagtctgagaatcttcctctattttctaaaataagtttaatgcgaagcttaagaactcttgctctttatcgcacggaaggtgcggtaagttttatagaggatattagcccttctaaagaaagttatagtaaatacccacgtattacagttattgtttctcttggtgcaaatggtaaaaatgaagtccttgttgatcacaatcaaccttttcctcagggaaaaaaagtcgcgagatgctctcaagaaattactaatagtcctgtcggctcaagatatatgattcatgtcaaagctagtgaaaacggagatctcagcacaagccatgcctgggaaagcgaacgtatataa

SEQ ID NO: 105101 - DNA, 357 bp, Enterobacter aerogenes
atggcccggtccgatttaccttatattgctatcaacaagggagccgtccagagtcgacacggagataatgctttgagaaccgtcgagatactgcaatacaccttacgcaaaggcaccggtgccgcttttcacgccatcatgcaggaaatcagctttcccctacaccgccaccatgggatcgatgttgtttcgtttggcaactcgcttcatgacccggattgctactacctcattcgcgcctttgacagcgctgaaaaatggctgcggttctcaatgctttttatgcaagcgatgactggcgcagcggcccacgcgaagacattattcgcagcatcgaaaccagcattaaaacagtga

SEQ ID NO: 105102 - DNA, 927 bp, Enterobacter aerogenes
atgaacaactatcaacaaacagcggattcagccttgaagcaattcagggctaccgccgtcatcgactggctcgacgttgagatacgcaccgaacacccaacacaacaccaacacatccgcaaagcgctgaaagagataacgggcgttaatcgctggtgggttgaggcaattgatattcagcccggtgatgttactgacacattccgcattcgctttcatgacaagctggcaaacaactatcagcagctccgtgctgcgctccatgcgttagccagacggttcacgtttgcagccgaaccggctattgccgggatagaggttagttgcgacttctggcacagacaaagctcggttgaagcaacacgcgctctcacataccgattgcaaacaagcctgttcgcaccgggcaccaatcatcgccaatacaatggcaacaacagaagtaaccaatttcttgataagcccggcaatcgtataaacccggagtataacctgcggattggcaatgaagatgacgccatttcatggcagtgctatcacaaacgcaccgacaagaagcaaccgctgccgcttcaccagcaacgtgctcgcatagaggtgacattgcagggtgacgcgctacagcaacacggcttcggtcttctctccgggctgcaacacttcccgtttgaaacgctcgccagcctattcacgttccgccgtccgatagctacggcacagatggcaaagggggatctgttccgactcatttcaatcaactggatacgctcatacagagatgcaacggcagaacgcggcattcactcgttcagcactgtaggacaacgcgacaagaaaggcagaacgcgggcagagagtagccacctaacagcagacaaagaactgagtaacagggttagagcagcgttgcgaaacctacacccgtga

SEQ ID NO: 105103 - DNA, 330 bp, Enterobacter aerogenes; identical to SEQ ID NO: 82022

SEQ ID NO: 105104 - DNA, 483 bp, Enterobacter aerogenes
gtgaactctgaaccaaaaattagaacagccaagttaattaaagaaaatcgcacctcgttaaagcttgatgaaagcacttgggccgcaattgacatgcaggctgagaaacgaggcactgattggaaaggctgggcaaagatggtgcttaaagcaaatcctgactcaccaaataaggctgctttgctccgagccgcgttagtagaagaattgatgaccgagcagattcttaccctcgcggaagctgggccagttgaagccaatatcagccatgaaattatcggaaatggctattggcggttaaatgacgagcaactacagaacgagctagacggcgcaaccatcgtcacacgtgataactcatttgcggcgtttaccttactgactggttacagagacaaaagctacggcggatcaccattcgtgatcattcagaacgagttacgcggtcagctacaccttatgatcgctccagatgttgattaa

SEQ ID NO: 105105 - DNA, 666 bp, Enterobacter aerogenes; identical to SEQ ID NO: 82020

SEQ ID NO: 105106 - DNA, 1707 bp, Enterobacter aerogenes
atggatacatttttcccttttaatacctcgccaaaatataagatagaaaacaataaagaattagctgcactaatcggtattactactgctaagttaacttattacgcctattatttaagtgatgatgataagtatcactcattcaaaattcgcaagcgaattaacggagaaagattaattgaagctccaaatagagggcttaaagatatccaaaaaacaatttctcattttctggagagaaactatacacctcgttcttgcgtatttgcgtatgttaaagaaagaggcatagttgaacatgcctcaattcacgttgggcaacgatggctactacgcttggatttaaaggatttcttccattcaataagttcagctcgagtttcgggagtgttaagacgcgctccattttgctttgctaaatccccggcaaatactgtagcgcgtctttgcacaaaagatgggcgtttaccacaaggttcaccagctagtccagtgattagtaacatcatttgcaaaggattagattataaacttaagcaactagcttcctcaaacaagtgttactacactcgttatgccgatgatatatttatctctaataatggaagtgtattcccttcggcaatagcaataagaggcgacgatggtaatgtagaactaagtgaagcaataaaaaatatcataataaattctggttttgaagtgaatgctggtaagacgactcttcgtaaaaaatccgagaggcaacttgttacaggggttgtagttaacaaaaaaaccaatataccgaaggagtatataaagtctatccgtgcaggactttatgcgtgggagaaatttggcttggatgctgctgaggaatattggaagaaagaagtagaaagatctaataaattcgatgatcaaccgccacaaatgagattggtaatacgcggtaaaataatccatgttggtcatgtaaaaggatataccgatgcaactttcctaacgcttgttaagcgattacaaacacttgatagcgaatttaaaattgatgagcagaaatttcggcgagagataaccgacgaaattcatatttatactgaaggtgtgacagatacaaaacatttccaagcggcgctgaatgcatttcaaaatcgtggtgaattccttgacttgaaaataatattcaaaaactcaagcaagcctggaagcgcaaatcttaaaacgctgtgtgaaaacctgcgagaaacatcacaaaaacatctcactttatgcatctttgatagagatgaaagaaatatagtaaatgaaatgagtggttctccgggtaattacagagatcacggtaataacgtatttagtctaattatccctattcctgaatttagaaaggggaatgactcaatatgtattgagcatctgtatcaagactcgttactttttacttgtgatagcgagggaagacgtttgtattttaaggatgagttcgataaccttaattgtcataaaactgatcctaacctcttctgccggattaacaagagttctcttgtgtatgatgataatgtgattaatatctcagagaggaaaaatgtagcattgcctaaaaacaaatttgcagattatgtttgcagcggtcaaccaccttttaataatgtcgattatagtggttttcatgaggttttcatacaaatacttgaaatagcctctacgtataataagtag

SEQ ID NO: 105107 - DNA, 186 bp, Enterobacter aerogenes
atgcctcccaataattttgaagaaagcatcttaatggtgctttcttctttactaatagtaataaacaatgaaaacagtttaattaaaagtattcttcccagttacttatccattgttcatttgtcattaaaaacctacttattatacgtagaggctatttcaagtatttgtatgaaaacctcatga

SEQ ID NO: 105108 - DNA, 498 bp, Enterobacter aerogenes; identical to SEQ ID NO: 82018

SEQ ID NO: 105109 - DNA, 477 bp, Enterobacter aerogenes
ttgcacattcatggcatgaagaaatctttaagaatcctgtttggacaacgagtaaaagagttgcgtatcgctaccggaatgagccaggaagcttttgctgatttatgcggatttgcgagaagctatctgagtagaattgaacgtggtggctctaatgcgtctcttgatgcgattgaggtgctggctgaggctttaagtgttgagccttggcagttgttgacgttcgactcatccgaagataacgatccggaactgttggttccatatgctgccgatggttcgtgctttcatcccggactggcaagcactcgcgatggttcttttggcgttggtgataaagcggctcagaagcgttttgactcattttccgaagcactggagtatctccgtagcatggagacggcaaaatggcgtaggcccaatgccagtggcaactggggtatagtttcagcagtgcggtgggataaactgaaataa

SEQ ID NO: 105110 - DNA, 1182 bp, Enterobacter aerogenes
atggctggattaagggtctttgtttcctctacttgctatgatttatcgcttctacgttcgcaattaagaatttttatacaaaatcttggttatgaacctatgatgagtgattatagtgatcttctctatgacccaagacagcatactcatactagttgtattgatgaggtttcttccgccgatgttgttgttctgattattgggtcccgttttggtgggaaagtagttccagaagctttaacaaaagtagattttgattctcttcaagagccagggaaaacaatagagtttttaaaaaagaaagagaatatatcgataactcagttggaaattttaaaagcaattgagtctgggattcctatattcacttttgttgacaatgcagtatggcatgatcactctttgtatgagaggaataaagataagggtatcattaaagatataatattcccatccattgaaaaaaatgaaaccgcagtttttgtttttgaatttattaatttcctaaggcagagagcaaaaggaaatagcttattcccattttcgaaaactcaagatattgaagaaacattacgcaaacaatggtctttcttatttcaacggttgattcatgagcaaagaaggaaagccattgaaattaaaaagattgatagtcttacagaacagttcgaagatttgaaaaccgcaattttaacttcaattggctctagtaacgagagagaagttgcgagaggtgtagtcaaatatagacgattaattgattttatgaaggcattgagaatcggagatgatcaaatttttatccgttgtaaagactcatgggatgtgcttcttaaaaatcatgccggtatagagagagttgttgatataagtaatttatcaccagagttaattcaaagcattaaggaaagctcatcttatcatatgcgggggcggacgttcttaattaaagctgatgaaacttactttgagttacgttttccgattgaatatattaataatctttcattggactgggaagcatttattaagttgtctgaagatgttagagctattatatttgatgcgttgggtgatatgagaacacccttaggcttcattagatatataaaagaaccttttggtaagaaaacatccgaatggcaagaaaacggtgaattgctatccgataacgagagttga

SEQ ID NO: 105111 - DNA, 399 bp, Enterobacter aerogenes
atgaaaaaagtattattagcaatgctggcgacattctctcttgctggatgtaatgatccgtattctctcccaggggattacacttgcaaaatagaagaagactatcagcctgtaaaaggcattgtgcatgtgaacatcatagaagagaaacattcttttactgagtggcttaatacaccgtttggaaaagataacaaagtaaagcatgtagcattctcagatggcaacatgacaacattcactactccctatatggatatgaaaggctattatgtgaatgaaatagatcacattacagctaaggtgcaggggaaagtattagtaataagggaagatgagcagttaggaacacaaggggtatttcataaagaatatcattgtgtaagagatgccaaatga

SEQ ID NO: 105112 - DNA, 567 bp, Enterobacter aerogenes
atgggctggtcttcgttggttaggataaccattggtacatttctgttagctgggttgtcgttctctgcatacgcgaagaattgcaagaagggtataccatgtggtaattcgtgtattgcagcatggaaaacttgtggtggaagttctcgctcctcttcggcttataatagcaatttatactcttacccttcatcttcacttcaaagttcaattccaaagtcgtctgttcaatcttcaaagaaagtagatggaaaaagcacggcttcaacctctaaaacttatctctgtcagtattcaatagcagcaataaagaatggcagaataggcgctttacgagtgcagggaagcgccgaagtaacgttgtatgttgatagcttcaaagctaaccgtttaaacggtacatacctgctttcgccaaaattgaaacctaacggcaatatgatgacagcagatgataaaagcaaagtgtatgcttatgattcgtggttgaggaactttgcaataagcgaccgtatagcaagaagcactgagcaatgggatcattgtaaactggttcaaaataaataa

SEQ ID NO: 105113 - DNA, 489 bp, Enterobacter aerogenes
atgccaaatttttctgacatcgtagatgcttacaagaaaattccaacaagtttgttttttgcaattggttttgttttggcattgatcctgtttagtccagattcttggatagataaatttagtttgtctgagtttagagttaattatcgagtctggcttgggcctgcatttctatgtattttggctatcttggttagccgtgcattcacatttatcagcgagagcgtggttggctttcaaattaaaagagaacggctcaataatctaaaaactctcactcgtgatgaaaaagagtatctgaggatttttgtagagaatgacactgcaaccatctcaagagaaattagtgatggtataattggttctcttgagtcaaaggggattgtctataggacatcgaacttaagctctcattggaaaacttttccatacagcctccaaccttgggcaagaaaatgtctcaaaaatcagccgaaactattggaatag

SEQ ID NO: 105114 - DNA, 405 bp, Enterobacter aerogenes
atgacaggcgtactggcaagcacggcggcggctgtggggatcatcgataaagctgttggtatcgcgaagaagctcgctgatgatggcggtgagcttgataaagcaacgcttaaacttgagcttgctaacctcatgagcgaacttgcaagtgtgaagatggaagtgatcacaacccaagcacttctttttgaggctgaacagaaaaataaacagcttgaagagcagctaaaggataagcactcattcactttcaaagacggtttgtactggaaagagggcgatgaaacagctttttgcccaaaatgttatgaaactcaggggattaaaacccacatgaaattgttttcaagtgatgggagttttgaatcttattggttttgcaatcactgtcgcttatcaacgtga

SEQ ID NO: 105115 - DNA, 561 bp, Enterobacter aerogenes
ttgaacagagccgtagtgttagacgaacagcaagctaaagcgatcagggaatggctaaacgctcataacaagagcctgatagctgacgtatcgctaatgatgcaagccgccgtactgcgtgtgggtgatgccgtagcgttacgctttgacgaggtgatcaacggtgagattgatatcgaagagcagaagacagggaagcgtaaagccctcacccttccagctccagtggtgcagatgatcgcacgtcgccgtgctgagtttcccaatgatgtgcatgtgttcaggagtcagcgtaaccgctcaatgaacaagcaaacgcctgtacgacgcgaggaagtgagcaagcagatcgcagaagcagctaaagctatcggcattcatggcactgtatcggcgcacagcttccgcaaagctggcggcaatgccatctacaagcgttcagcaaacaacatcgcgttagctatgaccgtacttaatcacagcaacatcaccgataccaggcgctatctggacttagacaaacaagccgttagccggataatcaatgagatggatttataa

SEQ ID NO: 105116 - DNA, 390 bp, Enterobacter aerogenes
atgggacgaaaagaacgaaatccaattaaacggatagaacaagcaacacgcgccagcaaacgtaaatacacctattctctacaagacctcgcacgagagtctattccaggagaatggattaccgaaataatagaatgccctgcaacggtgcccgtaggggcagagtatgaactattgcaggatgttttagcatcttcggataaggtttattacaaacctcgaaaaagaaaagaatacataattgacagtagccagcttaaatcctggcaaattctcggatttgaacattacgccgatttttgtggctattcccagactaacggcctgagtggtcacactgccgatttggattttttatttaatgacgataaggaaaattataatgactaa

SEQ ID NO: 105117 - DNA, 225 bp, Enterobacter aerogenes
atgcttctcatgaattatgaccgtgtgatcactcacaaaggcgcttctcttattctttctgaaaagatgattaaacaagcggctgatgttctcaatgtggacgttgagactattcgagaggctacagaaaaattctggcctactgcgaagatcacaaaatcaaaagaaggttcccatcccttaacgggacttgaggaacgattaaaactattaaaaggaaaataa

SEQ ID NO: 105118 - DNA, 378 bp, Enterobacter aerogenes
atgcaatttggaacatttcaaactctgaacgggaataacagccacgcccgttataaagtagtggcttacgcatctgatgcaattatgcaggacaagctgatccgtgtggaatccggtattcctgccgatctcattgttggcgatctcgtaaccgcaacaggtgcaaaagctgccacccctggtgacattgcgtatgttgtcgtagaacctgcaaccgctggcgataaggcgtttattgtagcttctccagaacatactattttagccctggttggcgttgaatttggaagcctggataaatctctggctcaagcgcaattagcaacccttggctttactttcactgattttgacactgtagcgctacgcactacctaa

SEQ ID NO: 105119 - DNA, 1038 bp, Enterobacter aerogenes
atgtctaaagatttattctctggtgtagtgtacgacagctttacaagcccgtttactttcagcactcagctaaaccgtattatttcaaatttgggcttattccgtcaggagtcccataacgtaaatctgatttctcttgaaaagattaccgatctaaagaatctcgttgcgaaggagaactctccttatgcacaatcagattggaactctgcacaacgtccagaatttaccaatgccctgtaccagcttaaataccacggtattctcaacagtgtcacaagtttagatctgcaacagtacgccgcgcgtggaattgctgacactgctgatcaggtgagtattgctcttagcgatttttcagatagtcagtattctatggcagaaaatgccgttgaaattgatctggtgaatgctctgcttggcttgcgtgttgatagcgactatgccggacaaggcgatcttgatttcttagctggcggtgctcgaacagaatacaccctagacacttccgacactgcgaacatctttgaacaattaagcgaaattgcccgtattcagaatgtcgctcttggggatggcctggcacaacagaaacaaggcgctgtgatcctggcttctggggctgctgctaaagcacttcgctatcatccatctattaaagatttcatggtgtacaccctaagtgtcaatagctctgacaacttctacactcgaacagtagaaagtaatccggcttacgaggtgtggactctgaacgggatcaccgtaatggatgtaacagggtactccctgatcaccgacaaaatcggtgtggacgggttcgctgtcatcccacgcatgagtgaggggagtaatgcactggtgctgcacaccggaatcggagtgcgtcatctgacacttggaaaatctgcaactctgcataatcagtatgttgtttcagatgctaaatggcaattcccatctattgcaacagaaaccagctatctaccaattaataacatccctacggcgatagttttcgctagcgtctcagcataa

SEQ ID NO: 105120 - DNA, 642 bp, Enterobacter aerogenes
atgagtattgacgagaaattgatggggattgagcttctcactcgttttacttctattaccaagaaagctcaacatcctgaatttgttatttcatcctgggatttagataggaagcggattttcctatacgaacaatgcggtaacattgctaataaaaaaaagtggttcgaacgtaataatctgttttgcacattaaacattgatcagcaaatggcttttctgatccgtcatgactacatactgagacaaactttcgaatcgatgccattcatcaaacttgagctttctgagcattttcctggtttagataatggattaaaaagccccttattagagtcgctgagccagggtgtgaatgggctgtggctcgatgaccttggggcaggtaatgcgaatgtagttagtttgatagaaggttactttgaagtagtaaaaatagatcgaattttctttaatgaacaagtgaaaaaaacaaccttccaccagttaattgcatccattaaaaaacactgcgacaaaattgttattgaagggattgaggatagaaaaagcatggaaatcttgcgtgaagcaggcatttggggggtacagggttatctttttaaatccatcccatttgaaaacgtagattcgttggtatag

SEQ ID NO: 105121 - DNA, 1554 bp, Enterobacter aerogenes
atgaagatagaaagaccagttcttttcaggcatcagctcgcatatggagggggtaacttgctgggtagcggggcactggctattgccggtatctggttactttacttttacaccaccttttgtggtctgacactgctgcaggcttcggctattttttcggttgccagtattattgatgccatcagcaatccgctcatgggatatatttcagataatttcggcaaaacgcgtctcggtaaacgctttggccgccgccggttcttcattctgctgggcatccccctgatgatggtctaccccctgctgtggatcgatggatttggtttctggtattacctttgtacctatgtgttgtttgagttgatctacacctctgtcatggtgccctatgaaacactcgccactgaaatgaccgcagatttcgcgaaacgatctaaactcactggttttaaagctatttttggtaaagtagccaactttctcgccgctttcattccgggccagttcattcttgtttacggtaaagaatcggccaccccatttttttacaccgccctgacatatggggtgattttatgtgtggcgatggggacactctggtattactcgtgggagcgcccggccgcagatgcttcgccggaaagtgaagaaaacaccacgctcagccatgcaatgctggcattgctgagggagatgagatcgactttttcactgcgtgtttttcgcaaacatctgggtatgtatttgtgcggcttcggggcagagtggctgtttgcttctgtctttacctactttatcatttttgtcctgcagtatgatccgaccatggtatccggactgagcagcctgaactccgtacttcagctcttttccacagctatttttattgctatctgcgtaaaacatgggttcagcaagccctatatacttgcgctgggtatcgttattttttccgtactgtgttatgccgcgctcttttttttccacctacctcaacagtatgccactgcggcgatgctggcgattaccgttgtcttcgggatcggtacgggcggggtgtattacattccctggactgtgtatacctttctcgctgatgttgacgaagtctttaccggacgccgccgtgaggggatctatgccggcacgatgaccttctccggtaaacttgtgcgctctgtgattgtgtttactatgggagcgatcctgagtttctatggattccagtctaaatcgcaaacccagccggaaagtgcggtaatggctattgcgctggtcttttgcgtcggtgtgattgcactggctctcgcggggatttatttcagcgcgcagatgaagctgaaccggaaggcacatctggtggtgcttgctgaggtggcacgtatccgggctggtggccagatttcacatgtcacagcggatgttcgtgccgtcatggaagccctgatcggttttccgtatgaacaatgctggggtaacagtaccgtctgttgcgatggcagaaacaagcatcctgacaggacaccacttgtcggcacgacccgacaaccctga

SEQ ID NO: 105122 - DNA, 396 bp, Enterobacter aerogenes
  misc_feature (32)..(41): n is a, c, g, or t
atgcatgatgccctggtctgtggccgtcgttnnnnnnnnnncgacaggatcgcggcaaaccgtggctatccggccatgcttcgtctggataacggcccggaatttatctccctggcactggctgaatgggcagagaaacatgcaataaaactggagtttatccagccgggtaagccgacgcagaacgctttcattgagcgctttaaccggacataccgaacagaaatactcgatttttatctgttcagaacgctgaatgaagtacgggaaatcactgaaaaatggttatcaaaatataactgtgaacgcccgcatgaatcgctgaataatatgacaccggaggaataccgacagcgccattatttggccgggatctcaaaaagtgtatggaactaa

SEQ ID NO: 105123 - DNA, 963 bp, Enterobacter aerogenes
atgttggtattcattgatgacggttcaacaaacatcaaactacagtggcaggaaagcgacggaacaattaaacagcacattagcccgaacagcttcaaacgcgagtgggcagtttcttttggtgataaaaaggtctttaactacacactgaacggcgaacagtattcatttgatccaatcagcccggatgctgtagtcacaaccaatatcgcatggcaatacagcgacgttaatgtcgttgcggtgcaccacgccttactgaccagtggtctgccggtaagcgaagtggatattgtttgcacacttcctctgacagagtattacgacaggaataaccaacccaatacggaaaatattgagcgtaagaaagcaaacttccggaaaaaaattacattaaatggtggggatacattcacaataaaagatgtaaaagtcatgcctgaatctataccggcaggttatgaagttctacaagaactggatgagttagattctttattaattatagatctcgggggcaccacattagatatttctcaggtaatggggaaattatcggggatcagtaaaatatacggagactcatctcttggtgtatctctggtcacatctgcagtaaaagatgccctttctcttgcgagaacaaaaggaagtagctatcttgctgatgatataattattcacagaaaagataataactatctgaagcaacgaattaatgatgagaacaaaatatcaatagtcaccgaagcaatgaatgaagcacttcgtaaacttgagcaacgtgtattaaatacactcaatgaattttctggttatactcatgttatggttataggtggtggcgcagaattaatatgcgatgcagtaaaaaaacacacacagattcgtgatgaacgtttttttaaaaccaataactctcaatatgatttagttaacggtatgtatctcataggtaattaa

SEQ ID NO: 105124 - DNA, 354 bp, Enterobacter aerogenes
atgatggacaagcgcagaaccattgcctttaagctaaatccagatgtaaatcaaacagataaaattgtttgtgatacactggacagtatcccgcaaggggaacgcagccgccttaaccgggctgcactgacggcaggtctggccttatacagacaagatcccagggcccctttccttttatgtgaactgctgacgaaagaaaccacattttcagatatcgtgaatatattgagatcgctatttccaaaagagatggccgatttaaattcttcaacaatcattcagtcctcttcacaatcggagcaaaaaagtgatgaggagacaaaaaagaatgcgatgaagttaataaactaa

SEQ ID NO: 105125 - DNA, 453 bp, Enterobacter aerogenes; identical to SEQ ID NO: 7641

SEQ ID NO: 105126 - DNA, 210 bp, Enterobacter aerogenes; identical to SEQ ID NO: 7642

SEQ ID NO: 105127 - DNA, 855 bp, Enterobacter aerogenes; identical to SEQ ID NO: 7643

SEQ ID NO: 105128 - DNA, 819 bp, Enterobacter aerogenes; identical to SEQ ID NO: 7644

SEQ ID NO: 105129 - DNA, 1191 bp, Enterobacter aerogenes; identical to SEQ ID NO: 7645

SEQ ID NO: 105130 - DNA, 726 bp, Enterobacter aerogenes; identical to SEQ ID NO: 7646

SEQ ID NO: 105131 - DNA, 732 bp, Enterobacter aerogenes; identical to SEQ ID NO: 7647

SEQ ID NO: 105132 - DNA, 564 bp, Enterobacter aerogenes; identical to SEQ ID NO: 7648

SEQ ID NO: 105133 - DNA, 666 bp, Enterobacter aerogenes; identical to SEQ ID NO: 7649

SEQ ID NO: 105134 - DNA, 300 bp, Enterobacter aerogenes; identical to SEQ ID NO: 7650

SEQ ID NO: 105135 - DNA, 264 bp, Enterobacter aerogenes; identical to SEQ ID NO: 7651

SEQ ID NO: 105136 - DNA, 258 bp, Enterobacter aerogenes; identical to SEQ ID NO: 14880

SEQ ID NO: 105137 - DNA, 510 bp, Enterobacter aerogenes; identical to SEQ ID NO: 75628

SEQ ID NO: 105138 - DNA, 423 bp, Enterobacter aerogenes
atggcgctgacaaagaagcagcgggaaaaactgcgtatgaaattcggcggtcgttgtgcgtactgcggctgtgaactgccggaaaaaggctggcatgccgaccatgttcaggcggtgctccgcaagtcagagcagtgcatgaaggctgcagaaaagcgcattttcaggctgatatccaccggtgatgttttcagaccggaggccgactgtccggaaaacctcgtcccggcctgtgcgccgtgcaacctgctgaaaacaacatattcgctggagatgttcagaacgcaggtgtccctgcaggttgaacgggggcgcagaagcagcgtgaatttcaggaccgcagaacggttcgggctgattcaggtggtgaacaaaccagtcgtgttctggtttgagcaatatcagagggagagtgaggtatga

SEQ ID NO: 105139 - DNA, 372 bp, Enterobacter aerogenes
atgagtttacctgcaggctattaccggattgacccggacatccgtgcactggtggccgcgatgaacgttcacggatttcgtacatatgcgtcctgtcaggggcatggtttccctgttacgaaactgccgccttatattgcctttgtctgtccggtaaaaaaggcggctcttcttgagcagcgactgcggcaggatgcggagtccatgatgccccggttgctgtggggctggtccgtcggggcttcttttaacagtgaccttcagctctgtttccggcttcagcctgaaggccctcatcactggtatcaccggtactgtcgccgctcactgcgtgcagacttcaggacgctggtccgcttactgaatccgtaa

SEQ ID NO: 105140 - DNA, 639 bp, Enterobacter aerogenes; identical to SEQ ID NO: 17239

SEQ ID NO: 105141 - DNA, 519 bp, Enterobacter aerogenes
atgagttttttatcatttttacgaaagataagtaataaagaaaaagaaatttttatcagtgaggagcgttttttctccctgctggaaagggtgagtgcttttgatgtggtcagagaatgggctgaaaatggtggagcatattatcctctgctggagtgccgtcggcttacagatattgaagatgtcaggaaatcagaggatatactgaaccgactggagtttattgacagaagatttcgggaatttatcagcattatgtctgaatataatcgtaatgataaatctaaaaacaggtgggagagggaattgtctgaatatccaccggaaaaaatataccaggtccggagagagggaaaccatctgtcattaaaaaattacggtgatgattttactctggacagagatactgccgtggctacggtgcagattactgtcagcagaaaatgcattactcaggaagaaatggatgaattatatgcattgtctgagagactgaaagaaaagtgcgccggtaattaa

SEQ ID NO: 105142 - DNA, 297 bp, Enterobacter aerogenes
atggaaaagaaattaagcagtaaatacattcatatgtatatgagtatatcccgagtgttcattcgtttgacaggcaatgtattaaaactgtttccttttgctatggtgatatgccctgtggtgtggttttatctttgccctgaacatattatctcagacattgttaacgactggcaggatgcagatacactggaaaaaatactgcttgtcaaactgtatctgaagacggttcttattctgacagtggtaagcgttgttgtcttgtatctttcgtcagataagtttatgcgctgttaa

SEQ ID NO: 105143 - DNA, 348 bp, Enterobacter aerogenes; identical to SEQ ID NO: 75646

SEQ ID NO: 105144 - DNA, 219 bp, Enterobacter aerogenes
atgcatacctttatttttcttgtgctgataaaaaatattaacggtggcggaagctggaatgttacccccatgccaaatacggacgtatgcgtgcaggttcttcggacaatcgaagcacacggaggcaggggctttggaaatacaggggaatgtattgaagttaaaacaaatgaacctttgaacaacgtgatggaaacactaaatggtggtgggcaatga

SEQ ID NO: 105145 - DNA, 414 bp, Enterobacter aerogenes
atgcataaatcagaaaatgaaaaaatagattttattctggatgagcatgagcggatatccagaaaacagggttctttgtgtatggcactgggtaagggatttttagttatagctattctttgtggtgttgccacattctgtgtttctggcctgtatctgaaatccctgtgcctgtccgttgcctgctgttgtggggtattcagtcgtatttttaattattacagcgtaccggaggaatcacgcatggtactcagtcgtcaggaattactccggcttatgcgtctgactgaagacgtaccagatgtgagacaggaactgcttaaccgtttgttgtccggtaaaaaactgactggtcgggatgaacaggatatccggcgtctctggcaggaaacgcagaggaaacactatgcataa

SEQ ID NO: 105146 - DNA, 516 bp, Enterobacter aerogenes
atgaaacagatttctttatttattcctctgctgggaaccttattactttccggctgtgcaggaacgaactctgattttgagtgtgatgccaccacgtcagatacctgtatgacgatggagcaggctaatgagaaggccaaaaaactggagcagtcctcagaagcaaagccggttgcggcatcactgccgcgcctggctgaagggaacttccggaccacgtcggtgcaggccgttgcggcgacaacgccgtcccgcagcaggcctgcggtgacagcacatccggagcagaaactgctggcaccacgcccgctgtttaccgctgcccgggaagtgaaaacggttgttccggtcagttcagttgcgccggtaacacctccccgtccgctaagaacgggtgagcagacggctgcattatggatagcgccttatattgataatcaggatgtttatcatcagccatccagcgtgttctttgttattaaaccgtctgcgtggggaaaaccacgtattaattaa

SEQ ID NO: 105147 - DNA, 318 bp, Enterobacter aerogenes; identical to SEQ ID NO: 7542

SEQ ID NO: 105148 - DNA, 567 bp, Enterobacter aerogenes; identical to SEQ ID NO: 75652

SEQ ID NO: 105149 - DNA, 672 bp, Enterobacter aerogenes; identical to SEQ ID NO: 5292

SEQ ID NO: 105150 - DNA, 384 bp, Enterobacter aerogenes; identical to SEQ ID NO: 5293

SEQ ID NO: 105151 - DNA, 540 bp, Enterobacter aerogenes; identical to SEQ ID NO: 35480

SEQ ID NO: 105152 - DNA, 237 bp, Enterobacter aerogenes
ttgacgtttcgcgggaacctgctgctgtattccctgtggtatgaacttcacccgtttgagaaccttcgccgcaaggggcatcactgccacggcctgacgcacctgtcctgggcagaacgcaaaattttttaccggtttttgggtaaaaaattttgtgggctgttcatttaccctggacagtcagtgcggcaggttgtggctgtctatgcccccggcgacaggggcttaaacaggtga

SEQ ID NO: 105153 - DNA, 765 bp, Enterobacter aerogenes
atgactctccgtcgcctgcccgatgaagatccacagaaactggcagatcctgcttatcgccgtcgccgcatcattcttcagaatatgaaagatgaggaactggcgattgcacaggtcgaagagaagcaagcaatcgaagctgtgctctatgggaaatacaccatgagtggggaagcatttgagccagttgaagtggatatggggcgcagttccggcaataacattatccaggcgggggcggcggcatggtctggtcgtgataaaaaaacctatgatccgaccgatgacattgaagcctatgcgctaaacgccagcggtacgatcaacattatcgtgttcgatccgaagggctgggcattgttccgctctttcgatgctgttaaggagaagctggatactcgccgcggctcgaattctgaactggaaacggccctgaaagacctggggaatgctgtttcttataagggcatgtacggcgatgtcgccattgtggtttatgccggtcagctcgttgaaaatgacgtcaaaaaaaatgctctgccggacctgtctatggtactgggtaacacccaggcccgtggtctgcgcacctatggctgcatccttgatgcagacgcccagcgcgaaggtattaacgcttcaactcgctacccaaaaaactgggttcagtcgggagaccctgcacgtgaattcaccatgattcagtcagcaccgcttatgttgctggctgatccggatgagttcgtctccgtaaaactggcctaa

SEQ ID NO: 105154 - DNA, 906 bp, Enterobacter aerogenes
atgagatcacctaacagaatgcatgagcgttctacattttttaaatatatgtcattgaacacagccaatattgttcttgatacatgcagcctaagatggagttcccctatcattttcaatgatccttttgatgttcctagagaggtaatgccaggtatcaatgaagaaatcataggcaaagctctggcagagaaattaatacaggagttaataacccctcgagaaaacattgaaaatattaacccccaaattagagccctaatagaattttacaaaaaacttttcccgcacggtatccctgtggaattaatagaaaaactccagacagttgagaaatcgcctccagtaggacctggtgcaccttttgcagtacaacaaatgaaagacatttggaaaaaaatgttaaatgaaagaaggatattatgtttatcagagagtgcaacaatcccaccaatgtggaaccattacgctgatagttatagaggcgttgtaatcgaatttgattgcgtagatattcttgatagtgcatggctaattgcccagcccataaattacacaaataaaatgcctttaacgtatacagctaaaggcatggcggaactacttttcatgccacatcataaagctgtagaatatattaacaatgaaatcaccttcataaaaacagaagattggtcttacgaaaaagaatggagagtttcaacttatgcacgcccaataggacctatacattacagtgatttaaagtttcatccttttgagttaaaatcaataattctaggccctctttttaatgaaaaagacatggtaggaatagtttccaaagcaaaaaaatatcctagagcagcagtttacaaaagttcatttggagcagacagaaaaatatctataacacctatcgaataa

SEQ ID NO: 105155 - DNA, 351 bp, Enterobacter aerogenes
ttgacaaatcaggcgaggctctggccggaaggagaggtatttacccgtaaggtgttgataccgacaaactacgatccactacctgttgaggtggtatacgttgtcccaccgttcgatgttgttattgaaacgtggcagaacaaagacccgatgaagtcttacgatttgtttcgccagttcatcgttgactgggatcagcaggaaaaactgacagatgatattctgaaatgttttctgttggcctaccccggaactgatgaggccatctttgctggatggtgtgaatatatgaaaggttttttagtcgaaccccgaggatctcttcattgtgcgtggaatacaataaactga

SEQ ID NO: 105156 - DNA, 384 bp, Enterobacter aerogenes
atgcaagataaagataacagcctgatggtaacagcggatgcactctatccagatccggtggtgcacgaactgcaggagctcgcagataagatgaacgtcagcgaacgtctggttgatatgaatcaggtgattgaactcacgacgctaagccgccgtacattgctgaaccttgaggcccgtggtgagtttcctgtgcgcgtacaggtcactgagggccgtaaggcatggtatctgagtgaggtaatagagtggatcaataacattccgcgttgttctgacacctgccagatccctgttccagctaaaccagatgcttcgctgtgcctaaaggctgaacgggtacgccgacaggcccgaggcgggaaaagtgagttgattggctga

SEQ ID NO: 105157 - DNA, 339 bp, Enterobacter aerogenes
atgactgcgaattacattgagctggtggccggcactgaagcgctggtaactacgctgggtatgtttgccagcggtaaaggcgtaattccggcgctgacaccattgatgcaggatgacaatggcgctcttgtcgtatgggatggcgccaaggcagggcaggcagtctatgtctcatgctttacggttgatactgccagccagacgcaggcgcaggtctacaaagccggtgtgctgaatgttgatgcactcaactggccagaggcggtgacaaccctttccgcgaagattgccgcctttgttgggtccggtatttctgttcagcctctggcaatggtgtga

SEQ ID NO: 105158 - DNA, 1041 bp, Enterobacter aerogenes
atgcctgatttatattcaccggcccagcttgtaagagtagtaggcgcagaggatattcagaagcaactgaaaacactgtttactgatttattttttacgcgtgcagtcactttcgaaacccgcgatatcattctggacacaattgatgatccgaatatccctattgctgcgttctgttctcccatggtggggagtaaagtagcgcgtgatgagggttatgaatcgaaatccatccgaccgggatacatgaagcccaagagcagtattgatcctaataagctggctgttcgtccggctggagtgaccccagagcaatacagcactctcaatacccgcaacatcaaagtaaaacagtccattctgaaacagtcgatagccatccgggcgcgtatcgagtggctggcggttcaggccgtaaccaccgggaaaaacattatcgaaggtgacggaattgagcgctacgaactggactggaatatcaaatcccagaacattatcactcaggctggcgctgctgcctggtcaggcagggataaagcaacctttgatccgaatgatgatattgaaaactattcggaactgagtgaaggggtaacaaatatcatcatcatgggcggcaacgtctggaagaaataccgcgctttcaaagcgattaaagatgtactcgatacccgccgtggttctaatgcccagctggaaacagcacttaaagacctgggcgattcagtgagctttaagggctacatgggcgacgttgcaatcgtagtttatagcggtcgctacaccgatgaagacggtacagaaaagtatttcctcgatcctgatttgatggtgctgggtaataccgctttacagggcattgtggcttacggtggtattcaggatcccgagcttatccgcatgggaatcactaaagctgaactggcgccaaagaactacatcgtgcctggcgatcctgctattgagtacgtccagacccattccgcgccgcaacctatcccggctcgtattaaccgttttgttaccgtccgtgtggcttaa

SEQ ID NO: 105159 - DNA, 357 bp, Enterobacter aerogenes
atgcaacgactgaatgaaatcaaaaagcggcttgaaactattgatcgggccctcaacgaacagggagaccgtttcagggatgacccggtcataaaaacacaaatcagagacctgaaagattatgttgacgctgaacgcaagaaaatccagaggcaggatacaaatggagagcttaccgattttgaagcaaaatttattctgggggcaatcgatgatgtttatacggcctcgcttagtcagataagacgtggtgcgagtataaatgtagagttaagcgacaaaataaataatacattatactcactcgaacattggctatccgagattaatggtcatacgaagaaaaaatctgaataa

SEQ ID NO: 105160 - DNA, 1803 bp, Enterobacter aerogenes
atgaaaaacgcaccgaacgtgaagcagctgccgaaggacaaatttactgaggcgattatttttgctggtgctgacgcatggagtcatgccaaacaatgggaagagggattaggtaagcagatcgcggaagacacaacgcctcctgtttatctggggccgcggcaactggaggaactggacaacctgcgcattatcgatgatggccgccgagctgcgcgggtgtacctggctggcgatatcgagacgtcgatgattagtgccattggtgccaagctggcacaggccggggtacaggacgcaaaactttataagggtattcccgatactcatccggaggactggcgcgatcatcttaatcggattagggaaggaaaaagcacagtagtaaatctgccagtgacgaaaagagaaccagcgcatgatgaagttagcccggctctgaaccagatgggggccagtcaacgcgggcaagtgctgctggcgcattacgatggcgacctggctattcatgcagattcggacatggttcaccactataacggtgtgatctggaatccactcccggataaagagctgcaacgggcaatggcgcagatttacatcgatgctgaggtagcctattcgcaaaatgccatcaaatcggcggtggaaaccatgaagctgagcctgccggtgatgggaataacggcacgcaatcttattggcttcagcaatggcgtatttgatacccgaacgggaatattcagggagcacagcaaaaccgactggctgctgatcgccagtgagctgcccttcagcccaccagcggagggagagacgctggccagccatgcgccgaacttctggaagtggttacgacgttctgtggccaacaatgaccggaagacagatcgtgtattggctgccctcttcatggtgttggcgaatcggtacgactggcagttgttccttgaggttacggggccaggcggtagcgggaaaagtgtgatggcggaaatctgcaccatgctggcgggtaaggccaatacagtatcagccagcatgaaagcgctggaggatgccagagacagagcgctggtggttgggtattcattgatcatcatgccggatatgacccgctatgctggcgatggcgccgggattaaggccattacgggcggtgataaggtttctatcgacccgaaacataaagcaccatactcaacccgtattcctgcggtggtactggccgtaaacaacaacgctatgaccttcagcgaccgtagtgggggaatatcgcgtcggcgggtcatattcaacttcacggaagttgttccggaaaacgagcgcgatacgatgctggctgaaaagatagaaggtgagctggccgtcatcattcgccacctgctgacccgcttttccagccaggacgaagccaaacagctgctgcacgaacagcagaaatcagaggaggcgctggctatcaaacgtgaaggtgattcgctggtggatttctgcggttatctgatggcgtcggtagtgtgtgatgggatgtttatcggcaatgcggagattgtgccattcagcccgcgcaaatatctgtatcacgcctatctggcatacatgcgggccaatggtctgagtaagccagtctctctgatgcggtttggtaccgatatgccaggcgcaatggctgagtacggcaagaagtaccagaagcgaaagactaaacacggaatacgctccaacgtcaccctgcatgatgattccggagagtggatgccgtcatgtgcaactacttcagagagtggacggggagagtaa

SEQ ID NO: 105161 - DNA, 300 bp, Enterobacter aerogenes
atgagaaagaaaaataccggatttacctccggggaccttactcatcctgagatcctcccgggcgatgtttaccaggataaacggggcgagcgtgtaacggttttatctgcaactccaaaccgcatttgttttattcgcgacgggtatacgggggaatgtgcatttcctgcggctcgttttctgagggagttcacgccagtgaagcgccagacaatcgccgaatggtgcgacaccaacaatacagcagaaaagataaagaaaattcgcgcgatgattgccgctaagagagcagggaaatga

SEQ ID NO: 105162 - DNA, 201 bp, Enterobacter aerogenes
atgcatagtcagattcctgtgcttaatgtggatctccacgtctccccggacttttccggccgcatcatgctttatgtggaaaatggccttctgaaatctgaattgccattgctgccggatgagattatcggaacgccgaccctgttcaatcaattgcttgaacgtgccggatatcgcgtaaccccagtagaaaaggattaa

SEQ ID NO: 105163 - DNA, 126 bp, Enterobacter aerogenes
atgatcagcaatgtgaaatttaatgggctggcaggtcgtgttgaacaactggcgggcaaggtggaagacctagacaactgtatcaaggctcagatgctcgatgatcgagaggtgcgccatgcatag

SEQ ID NO: 105164 - DNA, 225 bp, Enterobacter aerogenes
atgattaatacataccgcactaaaatcgatcttctgacattggctcaagagatcgccgcgcttctgtcatgtgcttcttatttggcaacgatcagaggggatgaagagcgtctccatgtaatgagtttaactggccttgcttaccgccttgctgatgaactggcaaatgagctggatatctcagatctcgaccaagttaagtcttgcaaggatggtggccaatga

SEQ ID NO: 105165 - DNA, 273 bp, Enterobacter aerogenes
atggctggaacacagcatacccaaactcacccaaaatttacatggctctttctggcaacccctaagagccatcccgactgttcgccggtagttctgcgttttgatactgataccgaagagaatgcacgcgccgcattcccgggctgggaaatggtattcgccgccaaaattcgggctgaagcaccatgcagggtcgcgttctttgactacaacacccgtcgcggttgggcttttgatagcgcctcagacagagaggtagttggccatgattaa

SEQ ID NO: 105166 - DNA, 195 bp, Enterobacter aerogenes
atgtcaactattgttcaacgtgataaacagcctaaaggttctggtaaagcacctgcttttcagattcgtattaatccagaactgaaagagcaaatggcgaacgctgctgcaaaagaagggatgagtctgggtaattggatcaagcagttagtaagggctgaactgcttagacagggtataaaccctaaaggttaa

SEQ ID NO: 105167 - DNA, 1176 bp, Enterobacter aerogenes
atgaataatggcaactcaacagattataaaatcatgtctgacgcaaatatgccaacagaaccatccccaggatatattgagtcattatcagcttttgacagtgttctaaaagaaagcatccttttatctaaggaattttcaggcattccttcacctaccagtaagcatttttatgcgagcgtgctttatactgctatgattgttagagcagtgagtctcattaatttagctcctcacaacacctggtcatccaaatcaatagaacactgggattatgcgacttgttgcaatatagcaagaacaatattagaaataaggctttgctttcattatttatgtgtagagaactgcgattcaaatgaatgggattgcagatggaatatattaaaccttcatgactgcacagcaagaattagactgttcacagctctagaaaatgaagagcaaataaaacaattaacagtgcaagcagaagagttaaaagaaaggttaacatctaatttttattttaaatcgttgaaacctggtgagcaaagaaaatacttaaatggacaaacagcatatatgcaacctttagaggaaatagctgaaaaaatagatattgatcgtccaacgtttcgatggatgtatacatttttatctagccatgttcatgccttaccactctcattctatagaattggtctaagtgaggaagagagagggcgaggcctccctagtcctgttgaagagtcatatacgtcaatgtgcttaagcctatccagctctcttcttaaaggcgcggggatcgcattgacggaattattcaaagagataaaaacgcctgacataaaatatactaccagtgagtctactgatgaactggataaactttctaacataggtgaaaccattaccattgatgaaaataaatatgtgaaagtaactattttcattgagtctgagacgagattcttaacaagatattatcataagaaaaacaatgaacttgtccttgaattaatcaataatgaggatagtcaatttatcaactctctcgaccctactttttggcggatagattttaatggagagccagtaacttacaatcagctggacgattatttaaattcatctgaaccctccgcatatcaaattgatcacaataattattgcattagaataaaacaaaactaa

SEQ ID NO: 105168 - DNA, 231 bp, Enterobacter aerogenes
atgaaaaaaatggcagttattgataaaaagggcctcgagtacattcctaacattgaccgtatgatccgtgagaaagagtgtcgagagctgactactcttgcgaacagcactcgttggaagctggagaaggaagggaagtttccaaagcgaatcaaaattggttctactgctgttgcttatcgcctatctgaagtgcaagcttggattaggggggagtggggcaatatttaa

SEQ ID NO: 105169 - DNA, 642 bp, Enterobacter aerogenes
atgaccgatgttggacaggcggcaggtaagcgtgatcgggttcttgatgagaccgagttagggcagctctggagagctatttttgttgaacctgatatcaagttgatgtccgagtacgccagaaaaatgtttgtcctgtgtacggttttcggatgccgcatgagtgaggcccggttatcagaatggaaggaatgggatcgaaaaaactgggtatggtccgtaccaaaagagcattcaaaaactggagtggaaattgtgaggccagtacccgaagctctgaggcagtggatcacggacatccacgaggaaaccaagcatacaggctatgtactgggtggtctgcgtatcagggaaagcgtaagcaaaattggaggaaaaattggtaagcggctgggccatgaaaaacaatggtctttacatgatctcaggcgaacgctttcaacccatctgagtgatttgggcgttgagtttcatgtcgtggagcagctgttaggccatgcattacctggtatggcgggtatttacaaccgaagtaaatttatggcgaagaaactggacgcgttagatctctggacaacatatctcaatagcatctcaggagctgagtcaaaagtgataatcctcaaacaaaaggttggttaa

SEQ ID NO: 105170 - DNA, 243 bp, Enterobacter aerogenes
atgagtttcatttacaggcagatgcccgataaagggaaaaacatgtttacgaaagcggcccagagttacagcatgggttttacggcgaaccttgcagtaattttcgtaccagtaacagagagcgtcctgaacggttaccggcttaagacgctcctcagattgaatcttaatctggatgcggggatctcgcttctctgcaagccacgcccggcactcatcccgcttctccctggcttgttttag

SEQ ID NO: 105171 - DNA, 180 bp, Enterobacter aerogenes
gtgacgattcacagcgatttggaagcttacttattattgttacttaacatgtggcctgtattaatagtcgtttgtgttggaatggcattggcgttttatggcgtattcatgcgcaagacggccataattttagtcgtactagcaatcattattagtgtgttaggttggatgtatgcctga

SEQ ID NO: 105172 - DNA, 315 bp, Enterobacter aerogenes; identical to SEQ ID NO: 91466

SEQ ID NO: 105173 - DNA, 894 bp, Enterobacter aerogenes
atgtctaaattgtgggcgcggtatgaagaagaaaaagcaaaacagcacgatattatgacgtttaccaaattatggcatctgttcacggccagtccggcattttgcgctttgtcgcctcggacccagacagattatcgccaatacgaaaaaaatcttcttcccgtgttcgggaatatgcgtgccgatgatatcaagattgaaatggtgcggatctatatggacaagcgtggcgaacgcagcgtaaaccaggcaaatcaggagttgggtggtatgtcccgtgtttatggctggggatttgaaagggggtatgtgaaaggtaatccctgcaagggtgtccgaaaatttaccctcaaaccacgggaagtgtatgttactgatgaagagtacctggcgatctatgaggaggcctcgccggcgttgaaggttgggatggaaattgcttatctgtgcgctacccgtcttggcgatatattgtcattgacgtgggatcaggccagaaaggatggcttattcatccagcagggaaaaacagggaagaaacagttgaaggcatggacagaccgccttctgcatgcgcgtaatttggccgcaactctgggaggaactgagtatgtggtttgcagcagcaaaggggagaaatactcaaaaagtggatttagtgatttgtgggagaaagcacgcgcagctgcttcagaaaagttaggacgtaaactcaaagtaacctttcacgatttgaaggcaaaaggcatttcagactacgaaggttcgagcagagataagcaacttttctccggtcataagacagagagtcaggtgctggtttacgatcgaaaattgaccgtttcgcctacactggatctaccgattatcgaggattcggaagatgatgattga

SEQ ID NO: 105174 - DNA, 159 bp, Enterobacter aerogenes
atgcccaccggcagcaacatgctggcgatggctggcgcaattatcaggctgggaaaagtcggcatgaaaggggttatggccgaccgtgggaaatccgccgcgccagagtcctccagcgcgacaaacatctttgccagaactgccgacgtcacggcatag

SEQ ID NO: 105175 - DNA, 819 bp, Enterobacter aerogenes
atgggcttcactctgccgcgtacacccaatggctgtaacttccacctgattaaagttgtaacgggaagccagttccgggataaatgcgggttccatcgcatcagcataggcattagccggatcagaccacgaaaccagcgcattggtgtaccgcgccttactggtgctgctggaataacgaggactaccgataatattcgcgcgcgtatagttgaaatcgacatcacgcggcatatcggcctgcacgataatctgctcaccactccagcaggtcataccccggaaaatagcagcgaaatcgcgcaatacggtgtaggcgtcgttgcgttcctgcacataaacgttacaggtatggcgaggctccatgccatcgccgcccctgccatcgggtatcagttgatcgcaatactgcgcaatctggtaaagcgcccatttggagatattcgcactgctcagtcgctcaccaagaccgaagcgcccctcaacgacgatgtcgtaataaatccacgccgggttgtcagtccatgcccatttgaagcctccggtccatgtgccggtatattcgcgtgtttccgggttgtagttatccgggacgcgaataacacgcccacgcggctcgcaggagatttgcgggatagaaccattgaactggctggagtcgaattcgatgtacagcagcgcggtatgtgggtaacgcagtttcgcgtcaataacctcggtgtagctctgcagcgtcatgacgtcgccgattttgacgctgttcgcgtccggcgataccttgcgaagacgcagcgtccaggtgctgcctgcctgcggtaa

SEQ ID NO: 105176 - DNA, 1170 bp, Enterobacter aerogenes
atgaatttactttctgatctccattttaaaaataatgcggttatgggaatctataatcaccaatgcgtaccttcttcataccatgatattgttgaagaatataaggctgtgcgtgaaaatgccttgttggtggattattctcatatgtctatcaccagtgtgataggagatgatgcatgggcgttggtgaactacatagtttctgctgatgtatcaatcatccgtgatgagcagggaatttactctctactgctaaacgctgatggggatatccgtggtgatgcatatgttttgtgctccgctgatggttattatattttatccgagagccttacctctaaagaaattatagatgtactaaacgaagcactgactaaagctgaggagttagatattcaggagatccctgaaatcaaagccatggaggaaaataattggggggctattatgctggagggcccctatgcatgggagataatggcggaggtttatggctttgatatcattggtctaccatattatgaatatatgaataccgatgatgagttaatgattttccgctgtggaaaacatggcgaatttgcatatcagttgatcggcccacaagcaacactagtcacgatgtggatgaagttacaagaaataggtgctaagtatttgctcaaaaccggtggtttagattatcaacgtctggtgagagtggaaaacccgggatgggacgaaagcctttataataattactcccgtaatccagtagaactacaaatgcagtgggctattcagtatgacaaggaagactttattggtaagagtgcggtagaagaactatcgcggaagggggctgagcgcaaacttgttgggattgctcctgatgttggatgtagtcacatcgactcaaatgaccttgtgatggttaatggacatcaagtcggtgttattgttaaagcagcatattctcctgcgaaacagcattggatcgcgttggcacttattgacgaatgctatgcattagcggatatctccggttttactattcaaactgtaaatggggaaatcacagccaaaacccaaaatgtcccttttatttataatctgagtttattggttaacccaacaatccatagttatgttgatgaattgaaggcgaaaagcgcgcttgaaacggtataa

SEQ ID NO: 105177 - DNA, 717 bp, Enterobacter aerogenes
atggttgcgctcggcctcattcttacatgtatcccaaagaagtcatccaatggtagtcaaatatttatattatttatcattgctatatgctcaatccttacatctatgttattgaaaagtcagattgctaataacgacttgggatggagagcaattcttcccgctgttcttgtttcgtcttcactaatagcaatatcaattgaaaaattgaaaagggaagctatcacatgcataagcctcattgttgtagccattagtttaccatccgcaatagatttttctaaaaatttattgcaaggtgatttccgcaatgacaatgttgagattatttcaagcttattggatataactaataatacagagcctactgatcgaatactgataaaccctagaaaatttgaaggacgtgaggtttttgatgggaacgttcttccatccataataatagataggaatagttgctttacgaatctgtcttatgcatatgctttttctaaccagtggggtgagtccattggttattactggaatgcattaaaagaattttatgccggccatgcctcgaatgaagatctaacaaagatgaaaaagctgaaatgcactaagttagtcgttttgcctggagacggcatttgggataaattcccttataatcactcagaatgggtgctaaccattgacaaaaaagattataagatatatacgcaaagacaatga

SEQ ID NO: 105178 - DNA, 195 bp, Enterobacter aerogenes
atgttgattgactatgttctcagatatggttatgatgcaagcctaaacattcgtgatttgatgtgcatttgtgttatgatgtgtatttatgtgatgattttcagatttggcacttctaaaaaactatgtgattttatgttttctgattgtgttatgttaagatggcgtataggttggttagtcctcatgagataa

SEQ ID NO: 105179 - DNA, 354 bp, Enterobacter aerogenes
atgcagccgcgtgggctgccgcggccactgattgaccacggcacccagatgcttgttgcagaactcatcgagcgcgcttttacggttgaacttctgggtcagccgcgagaagggccagacggtagccatctgtggccgaaaggtatccagttcgctgtcttcgatcctttcctttttcaccgcatagcaaatgctgctgtaggttttaagcagcgcctggttgatacgatcctcaccgccgttggcaaacagctcgccatccagcgagtattcgttctcgccaatctccggaaagcgcgcgccacagccgggaaagtagtaacaaaagtaaccatcattctccgccttatctaa

SEQ ID NO: 105180 - DNA, 486 bp, Enterobacter aerogenes
atgttatctgattggtatgatttatggttttatacacccgaactacgcagacctattcctatttcgcgctcacaacgattaattggtcagatctccaatggggatgttatcgtcacgaacttcgagtatgcctatgattcgaccctggaaggggaggaaccctgcggcgataaaatttgctatcgactgtctctcactcgtaactctgaggccattacttatcctaaagtgatctacctggtggaaaaaaatgcagaatgccggccattcaaagcatcatattacactctcgataataaacttctcaaaagtgtcttatatacaaactatcagatggtattagggaaataccgtccaacagagatcattgtgcagaatgcgcgctatgaaaaggggtattctgtcatgaagtatagtgatgtccgcctggagtcgttacctgaatttcacttcactaaagagtttattcagagaggcgtgaagtga

SEQ ID NO: 105181 - DNA, 300 bp, Enterobacter aerogenes
  misc_feature (272)..(281): n is a, c, g, or t
atgaaaaccaatgcatggtatttattcataatagctatattttcatattcagcccctggacaggcgacgagtgatagccagcaagccctggagattattcgcaaagctgatgatgttcgctcaccaaatgaacctttccgctataacgtgactgtacttgagtataaagaaggtagaacagagcctgaaaataagcaatcgctggatatatcgatgcgatttattaagccggtaaacggtttgaaagctgatgctcgttcacttatacgttnnnnnnnnnncctatcctccgcgagataa

SEQ ID NO: 105182 - DNA, 537 bp, Enterobacter aerogenes
atggcgttgtgcgaacacttgactatggatgccggaagacttgacgtgttggtgaataatacgggaattgttaaagatagcctctttgcatcaatgaattttgatgatttttattcggttatcaacatcaatttacttagcctgtttcgattaacgaaagaagcgctaatgttattacgttcagcggaaaatccagttgtcatcaacgttgcgtctgtggctgctttggtaccaagcgttggccaggcaaactattgtgcatccaaaggggcaatattaagtttcacccgcactcttgcggctgaactggcccctcggggagtccgtgttaatgcggtagcgccaggaatgattgaatctaaaatggcgaaaaaggttccacgtaccgttgttcgtgaagtgactaactcaattccattaaagcgactcggaaaatgtgatgaggtagcaaacgtcattgtttatttaagttcttcagcatccagctatattgtagggcaaaccatcgtggtcgatggtggcatggtaatgcggtga

SEQ ID NO: 105183 - DNA, 291 bp, Enterobacter aerogenes
atggtgaccgtcgacccggcttccaccgtcccgctcagggccggcgtcgcatcattggtcagcccgccgctggccagcggcccggtgtgctgcgccacgtcatccgtcacctgcagatcgctgaccggcgccacggtggtgtccaccgtgagcacaaagtccggtgagtggccgctggtgttccccgccacatcggtcaccgtggtgctgaaacggtgctccccttcacccaacggttccggggtgaagctccagtgcccgtcctcatccgccaccgcggtacctatttga

SEQ ID NO: 105184 - DNA, 4461 bp, Enterobacter aerogenes
atgaaaaatataaatgtgacagcaaaagatacaggtgttaaatacaccgttgatggcaatcaagttaacttaaacacgcagtcggtggtggtattacatattaagcgagaggatattagttcctacgccaggcaaggtaatgatcttgttctgaaaataaatgacggtagcacccttacgctaaaaaacttttttgttaatgatgctaatgggcatcatagtgatttagtgctacaggatgatgacactggcgcattgtggtggcttgacggggctggaaccagcgatgcacattattctctcatcagtgatatttcaggacttctagccgcaggaagctctggcggcagtatcgcgccatgggtaatggcgggtgcggctttgcttggtgtaggggcgatgattgcgggatcttccgataaagatcactcctcgcattcttcgaacgatgatactgactctgatgccgacagtgactcggactctgacagtgactccgatcttggcggccacgaaagtgatgctgatgcggactccgacagcgattccgattctgacagtgactccgactctgacagcgactcggattcggacagcgactccgactccgactctgacagtgattccgactctgacagcgactcggactctgacagtgattctgactctgacagcgattcggactccgacagtgactccgactctgacagcgactcggattccgacagcgattcggactccgacagtgattcggactccgacagcgattcggattctgacagtgactccgactccgacagtgactccgactctgacagcgattcggactccgacagcgattcggattccgatagtgactccgactctgacagcgattcggactctgacagtgactccgattctgacagtgattcggactctgacagcgattcagattccgacagtgattccgactccgactccgacagcgactccgattctgacagtgattcggactctgacagtgattcggactctgacagcgactcggattccgacagcgattccgactctgacagtgattcggatagtgacagcgactcggactctgacagcgactcggactctgacagcgactcggactctgacagcgactcggattccgacagtgactccgattcggacagcgactcggactctgacagtgattcagactctgacagcgattcggattcggacagcgattcggactccgacagtgattccgattccgacagcgactccgattctgacagcgattcggactctgacagcgactctgattccgacagcgactccgattctgacagcgattcggactccgacagcgactccgattctgacagtgattccgactctgacagcgattcggactccgacagcgattccgattccgacagcgattcggattccgacagcgattccgactccgacagtgactccgactccgacagtgactccgactctgacagcgattcggactccgacagcgattccgactccgacagcgactcggattccgacagcgactcggactccgacagtgattccgattccgacagcgactccgattcggactctgacagcgactcggattcggacagcgactccgactccgacagtgactccgattcggacagtgactcggattcggacagcgactcggactccgatagcgattcagattccgaaccgcaggcaaatgatgatacgcatacggcagctatcgataccgtagaaggcaatctgaataacgtgaccggcacagcgagccagctgttgggcgtcaccttactcaatacggttgatgtttcgctgctggcagcaaactcgacaaaattctcggtcagtgagggaacgaccgaagatgtgacgattgctgtcaccggttcaacattgctgagtctgcagtctatactggcgctgctggggcaattggtgggaggcgcatcatctattaccgccgatctgtcgattgtgaataccgacaccggggaggtggtgcagattatcccagatgccgtgagcctgacaccgtctctggctttactgaacctggtttactccggtagcgcgaccttcagcgacttgccggcagggaattatgcggtggtgatttcttcaccgcaggcatccggcggcctggccgcagtggttgatgaactggcgtcggcaaatctgttgtcggtagcgcaagcaacgatcacagattctacggaatatacctcgactgctattgccggcaatgttctgaccgcagatgcaggcggcgatgtagcggataccggtgagggtattacggtaagcaaaattgcctccagcgtgcagactacaccgcttgatgtcacggcagcaggtatcgtaatcaatggtctctacgggcaacttacgatccatgccgacggcagctatacctacaaagcaacgggggatgcagacgctgttgggcaggcggatgtctttacctacacgattgtggatgcgaatggtcatactgcgacggccacgttgacaattaatatcgtggcaggaagtgatatcggagaatctgatgctgatgcagattcggacagtgactcggattctgacagcgactcggattctgacagcgattcggactccgacagtgactcggactctgacagcgattcggattccgacagcgactcggactctgacagtgactcggattctgacagcgactccgattctgacagcgactccgattctgacagtgattcggactctgacagcgattcggatagcgacagcgactcggactccgacagtgattcggactccgatagcgattctgactccgactccgactcggactccgacagtgactccgactctgacagcgactcggactccgacagcgactcggattctgacagtgactcggactctgacagcgattccgactctgacagtgattctgactctgacagtgattctgactctgacagtgattccgactctgacagcgactcggattcggacagcgattcggactccgatagcgattccgactctgacagcgactcggattctgacagcgactcggattccgacagcgactcggactctgacagtgactcggattctgacagcgattcggactccgatagcgattctgactctgactccgactctgacagtgactcggattctgacagcgactcggattctgacagcgattcggactccgacagtgactcggactctgacagcgattcggattccgacagcgactcggattctgacagtgactcggattctgacagcgattcggattctgacagtgattccgactccgacagcgactcggattccgacagcgattccgattccgacagcgactcggactcggacagcgactcggactcggacagcgactcggattctgacagcgactcggattcggacagcgattccgattcggacagcgattccgactctgacagtgattctgactcggatagcgattcggattctgacagtgactctgactcggatagcgattcggattctgacagcgactcggactccgacagcgactcggattctgttgaggcaatacctgataccaacagttctgaggttgtgcagcattacggcaaccttaatggtaccgaaggtaatctgtcgcagttggttggcgtctcgctgttaagcacgattaatgtgtcactgctgtctggcagtagtttccgcttcaacgtggataacaacaccacagaaaatatgactgttgatgtcagcggcgtgtcactgctttcaaccggcggactgctaacttcgatagtcaatctgttgggggctggaaatacgttgacggccgacctctcggtgattgatgtcgcaactggacgagtggtcgcaattgaccctggaagtgtgaatatcagcgcgacattacttggcgggctggtttatagcggtacggcatccttcgagaacttaccggcaggaaactatgcgttggcgatttcctcaccgaattctgatggggtattggttagcttgattaatacgctcgcgggagcgggtgtagccacctttgtcgaggcaacggtaaccgattcgttgggttatagcggaagcaccgtcaccggcaacgtgctggagggttctgaaaatggcgacatggctgatagcggtacgggtctgtcagttaccactgtcaccgcgacatctgcggcgggtgaacctcactcagtcaacggcggcacaatatcagtaacgggggcctatggcgtactgacgattaatgctgacggtagctatacctatcaggcgtctggtaaggcgggttcggcaggtaatgcggatgtattcacatacaccattacggacagcaatggcgtgcaatcaaccaccacactgaccatcaatattggccaggaggttgaatcggcccaggccaatccggatacctag

SEQ ID NO: 105185 - DNA, 663 bp, Enterobacter aerogenes
gtggtcagagtctggatccgcgagcgggtggtcgatcatctggcgcatattgatatcgggctggcggaagcggtagccaacaatctcggtatcgaactcagcgatgagcagcggaatatagcgccgcctgcgccggttaacggcgtggagaaagacccgaccctcagcctttacgccgatggcgatggcgacgtaaaaggacgaattgtcgcggtattactcaacgagaagacctgcgcgcaggatgtactcaacctgctacaggcgctacaggccagaggcgttcacagcaaactgctctattcgcgtatgggcgaagtcagcgccgatgatggatcgcagctacccatcgccggaaccttcgccggctcgccgtcgttgacggttgacgcggttatcgttcccggcggcgacctaaccagcatcagcgataacggcgatgcccgctactatctgctggaagcctataagcatctgaagcccattttactggcgggcgatgcgcggcagtttagttcgctgctacaggtgcccgctgcgggtgaagaaggggttatcgaatgcgacgcgattaatacgcttagcgtcgataaactgctgacgctactggccgcgcatcgcgtctggtcaagaagcagtaaagttgcggccatacccgcataa

SEQ ID NO: 105186 - DNA, 801 bp, Enterobacter aerogenes
gtggcggagagcgagctgttcggccatgtgaaaggggcatttaccggggctatcagcaaccgcagcggtaaatttgagatggctgataacggcaccctgttccttgatgaaatcggcgaactgtcgctggcgttgcaggcgaagctgctgcgcgtgttgcagtatggcgatattcagcgcgtcggcgatgaccgcagcctgcgggtcgatgtgcgggtgctggcggcgacgaaccgcgatctgcgccaggaggtggtggaagggcgctttcgcgccgatctgtaccatcggctgagcgtcttcccgctgtcggttccggcgctacgcgaacgggaaaacgatgtggtgctgctggcgggctatttctgtgagcagtgccgcctgcggatggggctggcgcgggtcattttggctgaggcggcgcgaaacaggctgcagcagtggtcctggccgggcaacgtgcgcgaactggagcatgctattcaccgggcggtggtgctggcgcgggccacccaggccggtgatgaagtggtactggagccgcagcatttccagtttgctgtgacggcgccgatgttgccgaatgagacggcggcagcggcgccggcgacggaaaacgtcaatttgcgcgaggcgactgactcttttcagcgagaagcgattagccgcgcgctggaggcgaaccagcgcaactgggcggcgaccgcccgtgcgctggaactggacgtcgccaacctgcatcggctggcgaaacgtctggggcttaaaggatccctgcctggtaaaagttctgcaggttga

SEQ ID NO: 105187 - DNA, 552 bp, Enterobacter aerogenes; identical to SEQ ID NO: 80554

SEQ ID NO: 105188 - DNA, 480 bp, Enterobacter aerogenes
atgcccgtcgattttctgaccacggaacaggaactgaattatggtcgctatgttgcagagcccaatgacgtgcagctggcgcgctattttcatcttgatgagcgggatcttgccttcattaaccagcgacggagaaggcataaccggctgggaattgcgcttcagctcaccaccgcccgttttctgggcacttttctgacagatttaacccgggttctgccgggtgttcagcattttgtcgcggttcagcttaacatcagccgtccggaagtcctttcccgctacgcagaacgggatgccaccctcagagagcatactgcgctgattaaggaatattacggttaccatgaatttggcgatttcccctggtctttccgcctgaagcgtctgctgtacacccgcgcatggctcagtaatgagcgacccggtctgatgtttgattttgccaccgcgtggctgcttcagaataaggtcctgtga

SEQ ID NO: 105189 - DNA, 396 bp, Enterobacter aerogenes
atgcatggcgcagcaaaattcagcagcagaaaacggcggatcctgacgcagctaaaccggggagaaggccgccatgctgtggcgagggcgatctgctacgggcagcgcggtgagatcagaaagcgctatcgtgaaggtcaggaagatcaactgggtgctctgggcctggtcactaacgcagtggtactgtggaacacactttatatgcaggaagccctgagctggatgcgcagtaatggagaagaaatcggtggtgaagatatcgcccggttatccccactgatgcacgggcatatcaatatgctggggcattatacgttcacgctaccggaggatattttgaagggggaactgagagcattaaatttcaatttaaacaatgaattaccttcttag

SEQ ID NO: 105190 - DNA, 681 bp, Enterobacter aerogenes
atgtcagtcaggaaagaatttttaaaaaatagcctttttaatcaggttgatgatagcgtttcagcccctatatcgatccgtcttccaacagttttaaacaatgagttagacgaactatctttaagtcttgatcgctccaagagttcacttatcagcgagtttataaaagccggaatagctgctgcaaatgagctgctaaaagagcactcgctgattagcgatgaaatgaaagagcagtttgtagatcagcgtgaggacaacgctgcgagtttcatggatagaaaaaccttcatgctaaacacgaactacaacaacgatgaagaaacacatttcgatatgctgaaaaaccaagaggccgcagccttttgcaaaggctggaaggagtacatcagccagctttctaaaggcgatacggtttatctgtatcagagcggtgttggcatcattgcttctggggttgtggatggtgagctggtgaaaagtgaacattatggcgttgctgatgataagtatgccaagtcacttaaagactttaagactggctttaaagctatctctgctcgtcgttttaaagagttaaccggggggggagctaatttccgtagaactatggttgagcttaattcgatgcagtcttatgcagtagctcaagagatcgagagacttacttctgcaccctaa

SEQ ID NO: 105191 - DNA, 369 bp, Enterobacter aerogenes
atggtgcctaagagactgaaagaagccaggatggaggcaggattatcgcaggcaaaattatcccagcttctcagcgtagaagaaggggttaacacacgctctaggttttctagctacgaggtagggagaacggagccgccgtttagtctggttaaaaaaattgcggaattactcgactatccagcgaattatttttacaccgaggatgatgattttgctaaagctgtcttgcaatttcaccgagagcgcaccgatccagagtcaaatccgcattacaattcggtagtaatagaagcaagaaaattatcatcaaagcttgataaggtgagaaaaaccgtagcccagttgaacgaatacctgaaagagtga

SEQ ID NO: 105192 - DNA, 1740 bp, Enterobacter aerogenes
atggaggttaaagagttctccgaagagaccgccacggggatgatggactcccttctttacgccccctgcgattacgtgatcacgcagtcctatacctgcatgtcacgcgaggaagcgaagaaagccattaagcgtacccgtcgccttttgatgagtgccgacgacgatgctgtttcccagcggctggatctggatgtggcgcttgacctgctgacatcggggaaaatcgcttacggaaagcaccatttttccatcatggtgtattccccgtcgctggaaagcctggttgctgatacgaacgaaatcagtaacgcgctaaacaacatcgggataacgcctgttccggcagaaatatcgctttcagcggcgtatatggcgcaactgccaggcaactacaacctgaggccacgtaaaggggagctgagtagccagaactttgtggagctggccgcgctccataatttctatccgggcaagcgcgataaagccccctggggggatgcgatggctttactgcgcaccccgtcaggcgatggctactatatcaacctgcataacacactggcagataaggacgaattcaacgagaagaacccggccagtacctgcatcctcggtacgaacggttcgggtaaaactatgttgatgacgttctttgagatcatgcagcagaaatacgggcgcgaggatagcttctccccggatgccaaaaccaaacggctgacaaccgtttacctcgataaagaccggggcgcagagatgaacatccgggcgctgggtggccgttactatcgggttatcagtggtgagtctacagggtggaacccgttctcgttgccagcaaccaaacgcaatatcaatttcatcaagcaactgatgaaaatcctttgtacccgcaacggctcgacgatctccccacgcgatgaacgccgtctgagtgatgcggtcaatgctgtgatgaatgacgagccgcaatatcgcgtctacggcattacccgaatgctggaaaatttgcctgagccggctacgaaagaagcccaggaaaacggccttagcattcggttgtcacagtgggcgcagggcggtgagttcggctgggtgtttgataacgagtctgacacgttcgatatcagcaactgcgataacttcggcatcgacggaacggagttcctggacgacgcaagcgtatgtgcgccaatctcgttttatctgctgtaccgcattaccagcctgcttgacgggcgacgcctggtcattttcatggatgaattctggaagtggttacgcgacccggtgtttaaggactttgcttataacaagctgaaaaccatccgtaagttgaacggaatgctggtcgtcggcactcaatccccggctgagatcatcaaggatgatatcgccccggcagtgattgagcagtgcgggacacagattctggcggcgaaccccaacgccgaccgcgcacactatgttgacggtatgaagtttgaaccggaagtgttcgacgtggtgaaaggacttgacccgcaagcccgccagtatgttgtggtgaaaaatcagttcaagcgcggcgataccaagcgttttgccgctcgtgtcacgctcgacctgtcgggtatcggcagatacaccaaagtgatgagtggcgatgcgcccaacctcgaaatattcgaatcgatttaccgggaaggaatgcagcctcatgaatggctcgatacctacctggctaaagcgctctga

SEQ ID NO: 105193 - DNA, 276 bp, Enterobacter aerogenes; identical to SEQ ID NO: 91793

SEQ ID NO: 105194 - DNA, 426 bp, Enterobacter aerogenes
gtgataacgcgtcttttgattttactgcttgcctgcatctgttttgccgaggctcaggccggtagtcccgctggcagaaataccagcgtggcgttcgccttcgatcgccagtctcctcctgcccggttggatatctggctgcacgagtccggcggttataattccagcgatccgcaaaaatggggacgaaataccctgacctgccagtcgcgtaccgatacaacctatggcgcctgcatgaccgcgccggtatggttttcggcgaacccggccgcgccctatccgataaacctgcgttttacccacgctataaccaacaaaacggtggacgtaaaagtctatggcgaacaccgtatgtttatcaataacaaaacctttgttttcgccagctacgtaacgggcggtacagtagatttgccagcctag

SEQ ID NO: 105195 - DNA, 1389 bp, Enterobacter aerogenes
atgacactattttccagccaacctggcgatgacggcctgccaggcccggcgcgagcacgggttatggccgcggtaatgaccaccaccttaatgggcgtctttgatggcactatggtaaacattgctctgccgtcgatggcgcaggaactacaggcgtcagccagtaccgccgtctggttcgccaacgggtatctgctggcggcggcgatgacgctggcgatattcgccgcgctggcggcgcgcttcggctaccgcccggtgtttctcgccggactgacgacatttattgtggcatcagcaggttgcgcgctggctacgacgcctgagctgctcatcggcatgcgggtgctgcaggggatcggcggtgcggcaacgctcagtatcgcacccgccatattgcgctccgtttttccggcgcgactgctggggcgtattctcgggatacacgccctgcttatcgcttcaagctccgccatcgggccggtactgggcggcacgatcctgcatacttttagctggcaatggctgtttgcaataaacgtgctccccggtaccgtcgccttactgctggcggtcagagcgctcccgcggccgacagttgacaggcaagccgctttcgatactcccggagcgatattgtcggcgctgctattgggttcaacgatcatggcggcgaatagcatgcagagcgcttcgcagcatatcgatagtctgtactggacgttgctcgcagcgataagcggcaccgcctttatctggcgcatccggcagacggacaacccgctgctgccgcctgcgatgtttaaaaatgaacgctttaccctttcggcctttacgtcgctgatcgccttcgtaagccaggggatcacttttattgccctgccgttcctgttccagaacgagtatggctatagtccggtgctctcggcgctgctgtttactccgtggccattagggatagtgctgatcgcaccgcacgccggccgctgggcggactcaatctccgctccgctcatctcgacgctgggactgatgatttttgtcgcgggtttaatccttctggcgatgctgcccgctacgcccgccgcgtgggatatctgcctgcggagcctggtatgcggtattggctttggctgcttccagagcccgaataaccgggaaatgctgtcaaacgtgagtcgcgaacaggcgagctatgcctcgggcgttttatccatcatgcgcacgttcgggcagtgtctgggagccgccgtgatgggcgtactgttggcaaaagacgaaagtgccgttcatattgcgctgtggatcgccgccgcggcctcggcgttgtcggtggccgttagcgccagccgactgcggagaatagcttttcctgcgggagcggaataa

SEQ ID NO: 105196 - DNA, 252 bp, Enterobacter aerogenes
atgcccgacaccgcagactccacgctgaatgccctgaaggcgcttattgccgcctttcagaccggtgccactccggtcacggttaaagcctccaccgcagaagcggccagtttaccgccgaagtttcccgggctggatgataaaaaggggaaagcgccagctgatgactccacgcagcagaaaaccgaatacaacgagcgcggccgtctgccggcgagcagaacgcagactgaaggaaactatgcctcttag

SEQ ID NO: 105197 - DNA, 1020 bp, Enterobacter aerogenes
atgttaaatagaagaaattttttaatatcaatgagttgcgctcttgttctttcctcgttttcagtcctgtcatctgagaacaggcgagtgtcaaaggtagacattggcatgtccccccaacgcattcgtgctatcgtatctgctggtggggttatactttttaacaaaggaacataccgtgttggtgagttaaagccaccgtctaattgcattttaagcggtggtgggcagttgacatacacggagggaaaaggatgggatgaagaaggaactttgcttgtaggcggggttaactgtagtaattcgacaaatgtaacagtgaaagacttaaccatagacagctttgattcaaaagggaatgctctttgtggtatgactccaaggactggaaatattctaatagaacgggtaactaccagagcaaataaccatgggcaattgtgggaagctaacgattcaaacccacaaaacaacaatgctatagggaatattaccgctaaggattgtgttcactatcacgggccaaatggttttgtaacgaagcataaaaatgtttcttttataaattgcaaagctattgatgttgatgtgcaagcatttgtagttgcatcagataatataaatttaaatggcagatatagcagagctacaggaacaaaaataatttctggcaaagtttattgtaagccggggtcgtcagctttaaggatttattcaagaacttatgaaagcaatataaacgttttgggtgtggatggtgttaagattcttgatttttatgcatcaggtgagaaaagtaagttgttttacattggcgatgctgctggtagaaatggacgtggaaaacgggagtatattccgttaatatctcaaaatgtttatattgaatgcaatagccaagttgatgtaaataaactaaaaatgagagtcgcattttgcgaaaatgttattgtcaaggctccaaccatcggtacgaccatagaaaagggtgatgaaataagcaagttaaaaaccatttga

SEQ ID NO: 105198 - DNA, 1101 bp, Enterobacter aerogenes
atgataattgaaaaaactcgtaggaaatttgaaagcattcaatttttacggttcatcgctgcattccttgttctgattacccattcaacattttacgtccatgagagatacgaccaaagcgtgagggtgattaaagaaggctctattggagtggatattttctttgtaattagtgggttcgttatacttctttcatccataaaaagagatggagggtttgaagatgggctatcttttactatcaaaagactaataagaatagttcccatgtattggatcgcaactacagtgaaagttatagctttggttgcagtccccgcagctgttctacatgccacgttggacccagaaagaattataatgtcatatttctttcttccatctgtaacacctgatgggcgttgggaacctatacttggggtcggctggactcttgtttttgaaatgttcttttatttactttttgcattagcattatttaccagaaaaaaccctgtttatctttcatcgtttataatactgtcatttgcagctatatccactatgagaacaccagaatggaccgtgcaaacgatgtatttcgataaaatacttctttactttgtaattggaatgctttgctatattttaattactaagattaatcacaaatcaatgagaataataacatactcgttattatctgtgagtgctatattcttagtgcgtaaactaacatatcacgaaccgatcataactaggctcagctttgaaacgtttgtttttgtcacgacgtttttccttggggtcattcaatgtgagccactgttccgcggttggttcgcgaaagtaacgggtctcttcggtgatgcctcttactctacatacttgttccacccactaattgcgccagtagtccctgctatctttagtaagctgtcaaatcacggtatacacttccatcctatattcgtaatagtagttacgatcatcgtcgctttcgtaactactatagtgatccatcttctagtggaaaagaggatcaccaatatattaaaaagagtaatcaataggaaaacaaccagcaatgtaattactgctcaggatgccgttttaaagtag

SEQ ID NO: 105199 - DNA, 270 bp, Enterobacter aerogenes
atgaatattgaaattattaaagcgtctgacatcatcgaaggcgaaaaaatcattcttggtggaaacgaagtgtgtgatgttgtatcaatcactatcgaagacttttctcaaaacgaacgagattatcaatttgggagtgatagtacacattattttattgagtcaaagaaagttagtgtggatgcaatgggggaaggtggcgaagaaataagaatgatcttcgcctcaacagataatgtcgctactttaaaacggcatcctgagcagtaa

SEQ ID NO: 105200 - DNA, 2337 bp, Enterobacter aerogenes
atgtcggtacctaaccaaattccttacaacatctatacgtccaacggtcagacaactgtatttacttacgaattctatatcattagcgccagtgacttagaggtaagtatcaatggttccgttgttaccagcggctataccgtatccggcgttggcaataaagacggtggcgatattacctttctgacgccaccggcaagtggcgctgtcgtcatgcttgaacgtgtggtgccaacgtaccgcctcactgattaccaggataacggcgacctgttggcagatacggtcaataaggatttcgaccgtatctggatggcaatacagcgtgcgtttatcgacctgggatttgcattaacacgcccattccttggagggccattcaacgcaaagggatatcgcattgaaaacctcagcgatccagttaatgatcaggatgcagctacgaaaaaatttgttatcgataatagtaaaacaaatttaattcgcacgttgcgagtgcctgaaggcagcatacccccaatacccggtatacctgttcgtaaaaataagttactggctttcaatgaatacggggatccaatatcggttttgccagagtcggggtcggcatccgatgtgatgatagaacttgcaaaacccactggcgccggtgcttccggaactttgcaaggaatgacggtacaggatgctattaataaatccttatctttaaacactattcatattgagaattttttcttaggtaaaaactcatatgacgattggtcagatattattgaagtgctgactttagcgaatcctaatgcaatatttgtattcggctcaagtgttggtatttccagaccaataaaatactggagttctctaacattgcagggtgatacccgtgccagacgctcgacgttaagattactcccggggtttagtggcactgcggcttttgaaccgatatccactgaaaaacaaggcgtaattaacgcggcaataaataatttcttaattgttgatggcgacgcaaccgctgactctatagtgcttgccgatgggcgtattattcaagggcgtggaaccacttcacctcgcaaaggaatcgacattacggggacgtttaattttagttgtgatgatatcgtcggaaatttccttgatgctattatctatgccggtccgggagcggatgaaactgtatggcaaacaacccaacgaccacgactttctcgacttgacggtagtaactgtaaccgcatcatcgatatgccaggatgtgtgtcagcaaataactatgtatatggggatgttgttgttaacgatataaagacaactggctcaacaaaatatggtgtacgcattcatgatgttgatggactacaattgcgcgggttggatggatttcctagttttcaggttagtgtaagcggtacacaaatcacgctcgtcgacattaagccattcgatgctaaagccagtatatcagatgcaacctcaaaggggttatctgctgaaaccgttgttatcccagagcgggccgggaaagggggatctagtatcattcatcttataggaatttgttctatccacgcgggtagattggcggatactacatcaggtaatcctgctcctaataacatcggggcatttgggataaaggcaacaaacgtagagggtttgtttattgatgcggatattacggatccttcaatgggagcagtctcccttactagctgtcgtcgagtaaatggtaggttgaacattcgtagagtcaatacgcagaacctaggaagtggcgcattgccaaacgggacttataatagtattgaactcgatggctgttatcaggttaatctggatgtaaatgatatgagtcctaaccgtaactacttcttacactcgaaagatagtaactctgtaagggttaggggaaatgtgggacgtggggcaacgcttggccgttcgtggataattgacaataatgtcggtactcatgatatagaaatagttctagagactgatgttggatatagttggagaaaaacaggtgattcaggttattacccttatattgccgcgcttaattcttcaactccagtgaatataccatctttaaacaatatattaattcagtttaataactccgctgatacttcggttacagacattccatctgtcgccccaaatcaggttgtaacagtgcagatccgtgataacggggcgacaaagttaagaaacgatgtagccggtggtggtaaatttaaaggaatccccgattatactcagggaagggggacaattctacgtttcatgcgtgaccctgatttgggcttccttgtgaaggtatag

SEQ ID NO: 105201 - DNA, 192 bp, Enterobacter aerogenes
gtgattgataagaaaaatgcaggagaccttctccccgatgacggcgacgtattgataagatgcaaaagcggtaaggccagaaagctccgcgatgtgcatccggatgaacatgtcgcaacacttaacgcgttgtttgaattagctaaattgtctggttacaccattataaaaccagacgggactgtgctataa

SEQ ID NO: 105202 - DNA, 231 bp, Enterobacter aerogenes
atgatgaatttccgatgtagatctttcattgtgttactttatctatgttttgctatttttagcatgttgttaatcatcacaatttcattcagtttgcttggttactggatcggcggaggggaaaatatactctcgttttttattggtaaattatttacatattttaaagtatctctttctggaatattaataggttttattctgtggtttttttactatcggaatatttaa

SEQ ID NO: 105203 - DNA, 309 bp, Enterobacter aerogenes
atgaacaaacatataaatggcgcagttcgtttatccgcagcaatcgcagctctgttactgacgtggcaagcgagcgccgctgaacagccgaaggaattaaatctggggatcctcggcggtcaaaacgccacgcagcaaattggcgataaccagtgcgtgaaacagttccttgataaagagctgaaggtcgataccaaattacgtaactcatccgattattctggcgtcattcagggactgctgggcgggaaagtcgatgtcgtattaagtatgtcgccttcttctttatgcctcggtctatatcaataa

SEQ ID NO: 105204 - DNA, 567 bp, Enterobacter aerogenes
gtggtcatcgtcaaagctgacagcccgtataaaacgctggacgatttaaaaggcaaagcttttggcttcgccgacccggattccacttccggttatttaattccaaaccacgcctttaaacagaaattcggcggcgacgcggataacaaatacaataacttcttctccagcgtgaccttctccggcggccacgaacaggacattctcggcgtgctgaacggccagtttgccggcgcggtcacctggacctcaatggtcggtgactacaacagcggctacagcgtgggcgctttcaatcgcctgattcgcatggatcatccggatctgatgaagcaaatccgtattatctggcaatcgccgctgatcccgaacggcccgatcctcgttagcaatgcgctgccggcggacttcaaagccaaagtcgtcaccgcgcttaaaaaactggataccgacgatcatgcctgttttgtgaaagcgatgggcggtactcagcacatcggcccgggcagcgtggccgatttccagcagatcatcgatatgaaacgcgagctggttagcgcgcgttaa

SEQ ID NO: 105205 - DNA, 492 bp, Enterobacter aerogenes
gtgagatacaatcagaataaaaaatctgcgctgaaagttgataatcctttgggtatgagatatcaaggacttttgcgttgcattacacatgtatgcaaacggcgtgggtatagtttcaatgagataattagaagggttgacactggtttaaaaacggagtttatttccgatgtggcctcatccaagataattaaatccattgaactgttggatgctgaattggtatctgcaggttctattttcagaggaactagaaaaaatatagaggttgatgaaagaaatattgaattttcatttggtgagttaaataactttaattacaagaggaagttttaccgtaaattcagaagttttaatatttttgaatggaaatttttatttggtatcaaaaggctgcacaaaaccccattaagcaagagggatataaatactattttccgtccacagtacaatgaacttactcctttactcctgtctcttatacacatctga

SEQ ID NO: 105206 - DNA, 720 bp, Enterobacter aerogenes
ttggctattcttgtgtatttttcttggccaattgaagaattgtccattaggcaagcggccttgttgggggatagctttggtattgtgaattctcttttttctggtttggcttttgcaggggtaataataacaatagcacttcagaggcaagagcttaatgaatcaagagcggtgttcaaatcgcaaaagtttgaggacgccttttatcgattgttagatttttataaagaaaacttaaatgacataactgattataatggtgatatctcacccttaaaagggattggggtattgtctagtcagataaaaaaggtatcgcctgccattagacagtattcaggcgcctatagtttagattatgaagtcgaagaaattaacactcagttgttgtttgctgagattaataaaaacataatacatcaatcgagatatctcggaactctggaaaatatactttaccttatagtaaatgaacttgaaaataacagggagcgccatttttatttaaaaatattatcatctcaactaacaatacatgaggtgagatatgtgttttatcgctgcctggtttcaaaaacggagtcatcgcttgttaaattaattaatgactctaaacttatagaatccagagtttcggagtctgggattaatggccggctaattgatttgtataataaaaatcatgggacagaacttcatttttacatgcctggtgattaa

SEQ ID NO: 105207 - DNA, 351 bp, Enterobacter aerogenes
atgaataccgcattatccccggtgtcgtcgcagcctgaactctttccactgacggttatggcacaacatggttgcctgctccccgtgactcccgaactgacaccctatgcccaacggaccattcgccgggctatcaacctgctggataaatatcttcgtcagcccggtatagttttttcctcaagcactgcagcccgtgactggctctggttacagctggccagacaggagcgggggggggttatggtgctctatcatgataatcaatatcgtttactggaaagcgcagtccgttatctgaggattgaagtacatgatgcgttaaagaactctgaatcaattgaagtctaa

SEQ ID NO: 105208 - DNA, 444 bp, Enterobacter aerogenes
atggatacacagcaccttcagttcgctgagcagggagcaattacagcctcagtggtcccggacgagttacgcattgacttctggccgaaacattttggctccatcccgcaatggataacccttgaaccccgaatctttacctggatggaccgcctgtgcactgactatcacggcggtatctggaacttttcgacgctcagcaacggcggcgcgtttatggcccctgaggcagagagcaacgagaagtggacattgttcaacagtatgaacggcaatggagcagaactcaccagtgaagctacagggatagtcgcctgcctgatggcatacagccaccatgcctgtcgtaccgaatgtaacgctatgactgagcactattatcgcttacgcgactacgcgctgaaccatccggagtgcagcgccattatgcatctcatcgactga

SEQ ID NO: 105209 - DNA, 570 bp, Enterobacter aerogenes
atgaagaaattactggctacgacagcactggcagtaagtctctgcaccggtgctgctttcccggctgtcgctgaaaacgctgtgggtacagttaaggcctggtcttatatgcaagcggatggctggaaatcgagcgatgacatggatgataacaccctgcacaacatgctctatcaggctacggtgatcgataattatccttggacaaaacagttcctgcttcgtcagcgtggaggcggtgcctattttctcgccgacaaaaaaacgcacactgttcgcaagctgaatgtaaaaccggccagcggctactactcggatctgatctctgtctatcagggcgagaatcaagggaagggatgttattttaccatcgtcgacacccagtatcagctggagctggcaaatgagccgcaccatccccaagtgcttgccgcaattccggaaaactgtgtcaataaacagcagcaggctgctctggcggcgaagcgttctgcatcagaacagaaactgcaggagtgggtagctcaacagagtctggcagagttgtgtcgacgcaccggcaattgctga

SEQ ID NO: 105210 - DNA, 876 bp, Enterobacter aerogenes
atgcaaaaaattgactcccttctggccattgagaagtctctggcttcactgcctcctactcttcgcagtcttattcttaaacgtcttcgtagtctcacacagtacgagccggtgattggcatcatgggtaaaaccggtgtcggtaagtcgtctctctgcaatgccctgttccaaggcgaagtcacaccggtcagcgatgtgagggcctgcacgcgcgatgtgctgcgcttccggctccgcaatggcaatcacagcctgatgattgttgatttacctggtgtgggtgaaagcgagcaacgcgacgaagaatacgccgcactttatcgtcacatcctacctgagctggatttggtgttatgggtcatcaaagctgatgatcgggcactgtcagtggatgaacacttctatcgtaaggtgatgttggcgtatcagcatcgggtgttatttgtggtgaatcaggctgacaaagctgccccctgccatcagtggaataccaccagcaatacaccatctcatagccaacaatcgactattgaggccaagcggagcgcagtacagcagctctttctgccgcaccatccagtcagtgttatatcggcccaaactggttgggggctggatgcgatggtagagacgatgatgcacagcctgcctgaccgggccaccagtccactaacgacacagttgcatggcaggctctgcacagagccagtaaaaaagcaggcacgcgagcgctttggtaatgcagtggatgaaatgattggcactgtggagtcatcatcttttctgccagagcctgtaagggctgtgattcgaaccgtacgggaagcagtggtgactgtagcccgtgccgtctgggactggattttcttctga

SEQ ID NO: 105211 - DNA, 207 bp, Enterobacter aerogenes
atgtttgccaaatcctttctcgctctcgacggtgacggtggtctgaacggtgcacgtaccgcgcagacagctacttatgatcgcgataccttccaactctgcggtagtgcgctgcaataccatcctggatacgacacagaacgcccatggtttgaacacattgatgcgggtctcatcagcgatggtcaacagcattgccctacgtga

SEQ ID NO: 105212 - DNA, 1053 bp, Enterobacter aerogenes
atgaaaaaagtatcttgtgttgatttattttgtggtgcaggcgggttaacacatggtcttgtacttgagggagtacctgttgtcgcaggtattgatattgatcctgcctgcaaatttccctatgagactaataatcaagcaaaatttattgagaaaagcgtaagcgatttcacatcttcagacttgaatgacctttacgctgattctgatgtgaggattctagctggctgtgcaccttgccaacctttctcaagctatgcaagacgttatgagcacggtggtaaggatggaaaatgggggttattgtacgagttttctcgcttggctgaggaaactcgccccgatttgattaccatggagaatgtcccctccgttgcaaaacatgaagtttttaacgactttgtcgacaccttagaacgcattggttaccacgtttggtttagtgttgttgattgcactcaatatggcgtgccccagatgcgtaagcgcatggtactgcttgcctctttacatggtgagataaagctctctgagtcaacatgtactcagcctgttaccgtaagacaggccataagcaatttgcctgctttaaaagcaggagaaactggtactggggataagctacatgtaacttcaacgttgtcggaaaagaatatgcaacgtatcaaagcctcaaaaccgggtggaacatggcgtgactggcctgaacatttaattgctgattgccatcgaacggatcgaggcaaaacgtactctagtgtctatggtcgaatggaatgggataaaccggctccgactatgactactcaatgttatggttttggaaatggccgctttggtcacccagaacaagatcgcgctatctcgttgagagaagcggctattcttcagagttttccccaagattacgtatttatacccaatgaaagtaatgtaaaccttagagttctgggtcgaatgattggaaatgcagttccggtaaagctcggtcaggcaatcgctcgcagtataaattcacaccttgatgatttgaacttagtcgcaacaaagtga

SEQ ID NO: 105213 - DNA, 3141 bp, Enterobacter aerogenes
atgaatatttcaaatcaagcagatcagtctcaacaaattactcctgagccaggacagctcgttgaagttcgccgacgccaatggcttgttgtagaagtctcatcctctcaattaccaaccgcttcatttcagcagcatgcagtgactctttcttctattgatgaagatagtttaggggaactacttgaggtcatctgggaaattgaaccaggagctcaagtaattgaacgtgctggtttgccatcaattactggccttgatgactctgacacccttgaggcctttcttgatgctgtgcgctggggggcagtaaccaaagcagaccaccgtaatttcttacaagcaccttttcgtagtggcgtcagcattgaggacttccaactggatcctttggtacgtgcaattgacatggctcgtgtcaatttactcatcgccgatgacgtaggccttggtaaaaccattgaggctgggttaatcattcaagagatgttgcttcgacatcgtgctcgtacggttttgattgtctgtcctgcatcgctgcaggagaagtggcgtttggaaatgctggaaaaattcggtctagaatttcatatcgtcgacaccagttatatcaagagattaagacgtgaacgaggaattcatgccaatccgtggacatcgcatccacgattaatcacttcgatggactgggccaagagcggcgagggcctacgcgccatgcgtgatgttctccccttaaaggtcagttatccacgcaaatttgacatgctggtcattgacgaagcacacaacatcgcaccagtaggtggagcaagctacgccatggaaagtcagaggactcgattcatccgttcgatcagtcctcactttcagcatcgtttgtttctaaccgctacaccccataatggctataccgaatctttcacttctttgctagaactgctggacgatcaacgcttcgccaggaacgtacttccagacgagaaactgctgaatcaggtaatggtacgtagactcaaaagtgatttagtcgattctgagggtaagctgctctacgctcaacgcaaactcgaagccctatccgtcgcatactcagcacaagagcgctccatccatgatcaactaaatgaatactgcaaaagcagagaacaaggtgcagagaaagctaataaaatctttgggactgcctttgtcaatcagctactgaagaaacgactattttcctcacctgcagccttcgcatccactcttgaaaaacacatagcaactttaactcatggcaaacaaaccagtgacaagaacgctatggcagagcgtattctacgtaaagcaattcttcgggccgaagaagattacgccgacgatcaagaggtagagaatgcccaagcagaggccgttgaagaagcctctcgtcacaccctaccgctcacgcccaaccagaaacagatattgaatgatctgcgccaatgggcacaaatagccaagaaccaagtagattctaaagctaagggtgttcttgattggattgacacaaatttaaaaacacatggtcagtggaatgaacaacgggtgattctgttcaccgaatatcgaaccactcatcaatggatgcacgagattcttgccagtcatgggcttggtggagagcgcttggctattcttcatggaagcatgccgcaggatgaacgcgagaaagtcaaagcagcattccagacatcacctaaaacctctgccgttcgcatcctacttgctactgatgccgcttcagaaggtatcgatctgcaaaattactgtaattaccttatccatctagagattccttacaaccccaatgtaatggaacaacgcaatggacgtatcgatcgccacggacagcgccagaaagaagtcgtgatctggcatcccgtggatggaagtgaaaacggtgatcttcgtatcggtggtcacggtgacgacatccttcgagctctacgaaaactcgaatcaatgcgagcagacatgggcagtgtcaatccagtcatcgcaccacaaatgtcaggtttgattgaaggctctatcaaagaaattgatactcgtctggctgaacccagaatcgcaaaaaccaaacgcttcattactgctgagcgcgagcttaaagaacgaattgctaagctacatgatcgactcctgtctgctaagcatgattttcatcttacacctgagcatatccacatggccgttaataccggtctcacacttgcaggccgtccaaatctagagccttttgagctaccggatatacctcctggctctgtattcaagatgcctgctctgtcaggtacatgggcacgctgtcttgaaggattgcgacacccctacacccagcagattcgccccataacatttgatcactcagtggctaaaggtcgcgatgatgtcgtattggtccacttgaatcaccgtttggtgcagatgtgcctgcgtttactacgagccgaggtgtgggcacatgatgatgtaaagaacttgcatcgagttacagtacgctcagtaccagacacattacttgatagtcctgctgtggccgtcgtctcacgattggtcatcactgggggtaatcaccatcgacttcatgaagagttgacagtagcgggaggctatcttggtgacaaagcctttcgacgtgaggaaggcgtcaacaaaattcaacaatggttcgaacaagctaaatcattgaccactgaatttgcgctatttgatgccttccgcgttcgttttaatcgtgcacaaaacagcattcttcagtctgttgaggccagatcaaaagaccgtctgcaaaatctaactaatacccttcagacccgtaaagatcgtgaattggctgatatcagtaatgttctcaacgaacttgaaagaactattactgctgagttggcgaaagatcaacaacctatgcagttttcactgttctcagaagatgaacgaatacaactcagacgtgataatgctgccttggaagctcgtcttgcacgcataccgacagagcgcgaacaggaaatacaagcaattgaaactcgctacaccaaaattgatgaccgcactttcccagttgcagtcatttttctcgttcctgaatctactattcagaggggtgtagcatga

SEQ ID NO: 105214 - DNA, 4062 bp, Enterobacter aerogenes
atgagtttgactaatttacacgctgattggctatcactgatcgacatttcaggaccctttctcgcaattcccgtactgatggaagccttccctcaggggctagaagaactcaacggaaccaaacgcaaacgggtacgccaggcctatgatgaatggcgtgaagcgctggaacaggaagatcctctgttaattgaattgcactatgcatggcttgatgaggtcctatctcgagtccttgatcttgatgaagatggtaaaagtgatgtactaaaacgcgttgaatggtgcgcaaaccatctggaatctgtgctaccggatcatggtgtagcccagtacccagatttagccgttgttgatgagcaacgtgcaaacaagccattgatgctcatacacacctatacaccggacgtggatcttgaggccacgatgaaacaggatggatggctaactaccccggcagaccgcatggtccagttatgccgctctcttgattgtcgtctcgggttagtgactaacggtgaacgctggatgttagtagatgcaccagttggtgcggttacctccttcgccagctggtatgcacgcctatggaaccaagagccaattacattgcaagcttttgtgcacctgctcggaatccgtcgtttcttcgttaatgaattcgaacaattaccagcattgttcgactgttcgctgaaataccaggacgaagtgaccgacgctttaggtgaacaagtccgccgcgccgtagaagtattaatacagtccctcgacaaagctgaccaagatcgtaatcgcgaactactgcacaacgttaaagagaccgagctttatgaagccgcactgactgtcatgatgcgtctagtattccttctctcggctgaggagcgcggactactactcttgggcgacgaacgctacgagaccaactatgcgatttccactctacgcatgcagttacgtaaagagtcttcagaaatcctcgaacgacgttgggatgcctggtcacgcctgctggcaatcttccgtgcagtttactgcggcgtagagcacgagaacttgcgtctacccgcattgggtagctcactgttcgatcccgaccacttccctttccttgagggaagggccaaagggtctaattggcgaacagatgctgctaaaccattgccaattgataaccgtactgttctgctcctactggaagctattcagcagttccaggggcgcacactctcttatcgcgcattggatgtggaacagatcggttatgtctacgaaggtctgctggaacgcacagtcaggcgcatcggggaagtcacgctagaactagatgcaacaagaaaagcgcaatcaccttgggtcaaattatctgagctggattctgcaagcatggatggtatcgaatgcttggtcgaattgctgcaagaacgctctggtagttctgtcagtagggtgcgaaaagatctgactaggatagttgatgacaccttagccgatcgcctcttaatagcctgccaaggcgatatacaactacgcgaccgaatcaaaccctacgttcacctccttcgaaccgatacttggggttatcctctgatctatcctgccggggctttcattgtcactagcggctctaaccggcgggagacgggaactcactacacgcctaaatcccttacagaaaccatcgtagctgaaacgctgacgccgttggcctacgtcggcccagcggaaggtacaccgcgtgaagggtggcaactcaaatccccagaggaactactggacctcaagatctgcgaccccgcgatgggatcaggggcctttctagtacaggtttgtcgctggttggcagatcgactcgttgaagcctggtccttagctgaagcaaccggcaagtcgataaatgtggatggccaggtgctagacgagctgcatgccaaggagtcgctgccacgtgacactgatgcccgcatcgttattgcccgccgtcttattgccgagcgatgcctattcggcgtagacctaaacccactggcagtagaactcgctaagctatctatctggctggtaacgctggccaagaaccgtccatttggctttctcgatcacaatctacgctgcggcgacagcctactcgggatccatcggctggagcagcttactcagctttcgatgaagccaaccgggcaatctaaactgcatctatttggtcaaaaggttgaacaagcgttacaaggagttattgaacttcgacagcaattgcgcgaaatgcctatccatgacatccgcgacgtggaagtcatggcgaacttgaacgccgacgcacgcagtaggctagaagtgaccaagtgcatcgccgatacatttattggggaagtatttgaggctagcagcggtagcatctcagcgatggaaaaagggctggactcgttggccatccaagctgggcaagccttaaggggcgagtgcgaccaggttgcattattgcgccaaagggctgttaaattgctctcgacaaacctttctgccaacaagccaacgcataaaccgttccattggcctctggaatttccagaagtattcgctcgcggtggcttcgatgggatcatcggcaatccacctttcttgggcgggcaacgcattactggggttgcaggtacggctttccgtgactggttggtaacacacatcgcagagggtcggcgtggctcagcggatctggttgcctattttttcctgcgagcatggagtttactccgtgaggatggcagcttcgggttgcttgcagtcaacacaatcgcggaaggtgatacgagacaggtcgggttggaagccctagtcagtgcaggtgccgtcgtccatgcagcttatccaaacgaaccatggcccgggaaggctgctgttgttactagtcgcgtgcacattcacaaaggcgagtggaagggtgaacggatactgcttgggagaccagtatcattcatttcagccttcttatctgatcgtgaagagtggagtccaaaaaggttgaaggttaacgaagggctggcgtatcaaggttcaattgttttaggtatgggcttcctgcttatgccagaccaagctcaatctatgttggatgctgacccaaagaattccgatgtaatcttcccgtacatcaacggtgatgacctcaattctgacccagagcagaaaccgagccgttgggtaatcaacttctgggattggccagaatctaaggcgaagagttataccctgccatatgagcatctggtacaaaacgtcaaagaggagcgtctttccaacaaagacaagggagcacgggaaaaatggtggcaatttctgcgggctcgttccgaattgtatcacgctataggtaagggtaaatattttgaccgtcaccccaaaaattggtattcagaaactagccagatggaaagggtgttttgtctatcacgagtcaccaaatttatagctccggcgataacaccctcaaactttatctggtcagacagcatggtcattttttgttcttcttcgtttgattttctggctctcttatttagtcaaatacatgaagtatgggtccgtaaaaacgcttctcgtcttgaaagccgattgagatatacaccaagtgatgcgcttgagacattgcctcttcctcatgcattttcagatgagttgtgtgttattgcagagcaatttgcaaataatcgcactgcgatttgcaaggacaagaaaataggcttgacgaatttatacaaccgttttcacgacgataatgaacgagatccctgtattgaaaaactacgagtgttgcaacgtgacatagattctagcatagcaaattcctacggctggcatgacctcaacctcgaacatggattccacgaagttccatatttgcccgaaaatgaccgggttcgcttcactatctcagatgctgctcgtatcgaagtgctacagcggttgtcgaaactgaatcacctgcgctatcaggaggaactcgctgctggcttacatgtaaaaggggctaaagccaagacattaagtacgccacgaaaataa

SEQ ID NO: 105215 - DNA, 3996 bp, Enterobacter aerogenes
atgataaatgataaaccaaccagatcacctaatgcatggttcgccattgaccatggccaagtgaaagatcccaccttagccctctatacacagcgcttaaaaggtgagcgagcactcaatcaaggcatttcgaatgacgattggatcgtgagtttggataccttcggccatatcactagaatcgcacgtatcctgcgtattcgttcagacctcgaaaccaccacactcttttttgatcgaatgttgcaggttgaaccgccagtatcaattggtatgacctctatcaagctaccttctaaaggaagttctggtcgtattcaatggaaagaattcatagaaatgctccccgatgtactacatacgagcattgctgaaataccaacgatcaaagatcaaacatatattcgcgaattactacaattagcggtgatggatgacttgctcggtccggcagccggtcctaatgaacttatagtcgatatgggtgtgagagaccactatttggtcggtaagcttgcgccacgtgaagctgcggaaaaaggaatggagattccagtaaatcctgaggatgcggttgataaccctccagacctgattgtgaaagctcagacagcaaaagttaaatcaccgactgaaccaggtcgtggagaacctgatgcaccggaagaaattgatgccgctagcaaccaatcattgataccaagtagcctcggaatgactttctgtgtagacggcgatgttgctcaaatcgaaatcgaagctcgttggggacgttacgaacgcagcgaagatcatgagatctacagaactcgcaaaaacaaggaaacaggagtcgaagagcagacgaaagccaaagtctggcagcgcatcccttgtggtgggaaaagagtattatcgcttaccgaaggggttatttcaccagaaccactagactgcaccattccagaagtcctgatacaaggtaccatccgtcccaaaaatgagaatggcgatcggctagtcacactattccttgtcaataatcaggaagaaccgccttctaatcgtgactcggcatgggttttccaacctgaattgattgctcgtccaatacaagatgctgtcgacccatttgtttttaggcgtaaacctgttctgaatgctgacggtatggatcctgaacgcgaagcattagaaatgatttaccagaaccgcgtagagtttgcagtagggcatggtgttgcggtacatgctgaaactgcggataacgtagaactagcgacagaaattcgtacgactgtgatgcctcagcacgaggtacaaagaactgagacgcctggtcttgatatatctgatcggccagcgctgcagaaaatggtaagtagtggtttccttgatatgcagacactggcgactttggatatagattcgctcgttaatgcattgagtatgctgaccaaggactacgatgcgtggataagtgagcagtactcaagcatgggaaccaaggctacaagatttgacgctcaagcccaagcagccatggatagatgcaaagaaattcttatccgcctacaacaaggtattgacacacttaaacataatgaaaaagcgttgctggctttccgtttcgctaaccgggcaatggcagcacagcgcatacgcagtttatacgcactggataaacgtcgtggaaaagatgttacggtcgaaaaatataataaagaaacaaaccgtagctggcgcccttttcagttggcattcctgttgctctctatcccatcgttggcagacccgtgccatcccgatcgagtacaacctgtaaatgcttatgctgacctactgtggtttcctactggtggcggcaagactgaagcctatttaggtgtagcggccttcactatggccatacggcgtctacagggtaatttaggtgggtatgatagctcacgcggcttagccgttatcatgcgatacacacttcgcctgctaacactgcagcagtttcagcgtgcgacagctttgatttgcgcaatggaagtattgcgccgcgaagcacaagataatggagataaatcccttggtatagaacctttcactataggtctttgggtcggaaataaggtgaccccaggttctaccgaggacagtcatcgagccgttgaagatgcacgcaatccaggtaagtacaatgcaggtgcagcttcacccgcccaactaaccagttgtccttggtgtggtaccgaaatagcaccaggacaggatgtagaggttcacaaggacaaatcgggtggccgaactttcgtttactgcggtgacaaaaaggggcgttgtgacttttcaaagggcaaatcaagcaatcaatcacatcccggtattccagtattggtagtggatgaagagatctatcaccgccctccaacgatgatgattgccacagtggacaagttcgccatgatggcgtggcgcggtcaggtacggacactctttggccgggggggacaggaatgtacgcggcatggtttgctctggccaggagccaactgcaacggcaatcatccagccgccaaggggcaaccttccaccaaggcgaaaactatcggccctatccggccaccagacctgattatccaagatgaattccatctaatcagtgggcctctgggcaccatggtaggattatacgaaaccgctgttgatgagttatgtagttggacacttgatgacaagaacgtcaaaccgaaagtcatcgcttctacagcaaccgtccgaaaagctaaagaacaagtaaacagcgtcttcatgcgccaagtagcagtgtttccaccacatggattagatgttgaagataactttttctcggttcaacgtgcaataaaagagaagtatggtcgtcgttacctcggcgtatgttcacccggtagctcaaggcctgcaatgctgattcgcgtttacactgctttcttgaccgctgcacaagagttatttaaccacttcggtgaaccagccgatccctacatgactatggtcggttatttcaactcgctacgtgaattaggtgggatgaaacgacttgcagaggatgatgtacagacacgttcttatcgggtccaaatgagtatggttgagcggcctgcactggcacaacgcagcataagcaacattcgcgaactaacttcccgtgtatccagtcaagacattcctaaataccttgataacttagaggttaaattcaagtctgaatttgatacaactaccggtaaatatgttaccagatggcaggagggtgatactcgagccattgatatagtactcgccaccaacatgttatcagtaggcgttgatatcaatcgacttggcctcatggcaatgaatggtcaacccaaaggaacagcggaatacattcaggctaccagtcgcgtgggacgctcatttcctggtttagtttgcacagtactcacatgggctcgtccgcgagacttatctcactacgaaacatttgaacattatcacgccactttctacaaacatgtagaggctcaatcggtcaccccattctctcctcgagcaatggatcgcggtttaacaggaactctgttaagtcttgtacgtctggagaatgaagcattcaacccgaatgaaggcgcaggccaattgagtacgtctaatcaattcgagatcagcaatgccatcaaagtgctggcaacaagagcaggtaatgttgcggaagacaactcgcgtaaaaaattagcagagaatgaattgaaagaacgtgccgatgaatggatgaaaaaagcatctatgggcggaagaatcctcggatatgaaaagcgtgggcctgaaaaggataagacagttaatttaattgaatctccaggcctgaagccgtgggataactggacggttccaatgtcaatgcgagaagtcgaaccgggcgtacgactgataatgaacaaaaaccatatcactgatgataaagattggaagccacgtcccgcaacgaaggatgaggattga

SEQ ID NO: 105216 - DNA, 1863 bp, Enterobacter aerogenes
atgaatattgatgagaaaacacctgtgggtgaagtacgccccagccaattactttggacctatgggcctggagcgctaattgatcttccaaatctatctgtcgtaacgcttggaatagaccggtgggaaaagaaccgttgccagccaattcaggaaatccggctgcttgaagcagttcggaagaaattgggagatcaagttgaaagcttgcgtatgccaccatttcagaaaggtgaagtggtcgatatgtggtctgctgaagcaaatataggagttcccgttcgtcctttcccacggtggctacgttgcgtaaagtgcgggcttctttcaccttatgatgctggattatttgagatcaaagaaaatcggtatagacccgaacgcactcgctttctccataaaggctgccgaggttctaaaggagatcagcctgccagggacgcggatgccgtacctgcccgtttcctgttggcctgccgtgatggtcatcttgatgattttccttggcattactttgttcacggcggcaacagctcgtgcaaagggacgctgcgattctttgaaagtggagcctcgctacaaaccgaaaatctatgggtaaaatgcgatgaatgcgaagcctcgaggagtatggcacatgcgtttggtaaggcaggcaaagagaatcttcctgcatgcagaggacgtcatcctcacttggattacttcgacaccgaatgcgatgtggaaccacgtgcagtattgttaggagccactaatagctggtttccgataacgctgtctgcactcgcgatccctctgttgcatgtatcaccattacatcagattattattgattattgggatgatctcgctgatgtggaggatcgttctgagctgaaggggatactcaaagcgctcaagaaaaggggtgaggctcaaggcattgagaaacatgacccagagacaatttggatagctattgaagcacatcggtccgataattgtgaagaatctgtcggtgagatcgatatcaaagggccagagtgggatgttctaatagaaccgaatccccccgcagactacccacatttcatgagtaagaagacccacacaccgccacgtttttcatcatttatcgaacgcgtattgctcctagaacgcttacgtgaggtcaatgcattaataggatttactcgagttgaagcgcctgaagaatctgacgatcctagtgaacgtgttccaatggctaatctatcacgaaacagacctgactgggtgccagccagccaggtacatggcgaaggcatcttcctccaatttaatgaagaagccctagttgcctgggagtctctggatgcagtcaaaaaagttgacagaatgctccgtggtggacataccggatggcgaaattcacgtcatcttgatcccgaggagggctatccgggtattcgctttgccatgctacacacactttcacacttattgattcgtgagatggcactagaatgtggatacaacgcctcaagtattcgtgagcgaatctatgccaatacaagcaatgataaccctcaagctggtatccttatctatacagccgccgcagattcagatggaactttgggtggcctagtcgatcttggtaaaccagaaaatcttggaagattactggaacaagcgctgaatcgctcaacgatttgttcctctgatcctctatgttctgaacatgatcctgagaaggaccgttcgttacacggtgccgcatgccatgcgtgcagctttgtagccgaaacgtcgtgtgagcgtggtaaccgttatttagatcgcgcattactcgtgccgacacttgagcatactgccgccgcgttcttcaaggatttctga

SEQ ID NO: 105217 - DNA, 762 bp, Enterobacter aerogenes
ttgcataaactactagatacaataacgacgttaatatgtctgatttctttggaaaaagttgaggctattgctgcacgtattcgtcaaaccgaagcttgcaaagccacagcatcgttatcaggcgtggtaggaacacctgcagcaaatattgttattaagcagcttataatcgactgggaaaatacaaagattagttcagatgagcttgcgtccatgctcctcgctgcgagctatatatatacaaaagttacgtcagaacaatcaactgagctcgtatggactggcccaacaacacctttcgtatcagctcgccgtaccgaacaagctcttctacaaatcattagcaatgccaaacagtcattatttattactagttttgtggcttatgatgtatctagtattgtcaatgctttgaacgtagcaataaaacgtggcgtggttatcaccatgttattggaatcatcatcagaatatggcggaagcattaatttcgatcatatttccaagatgaaaacacttatgcctcatgctcgaatctacttatgggaaaataaaccctctgagttttcagatggtcgcgtacatgcaaaagtgatcgtcgccgatagtaatacatgttttatcacaagtgcaaatctcactggatatgcaatggaaaaaaatatagaggtcggtgtgcttattacaaatggaagtattcctgcattgttgcatgaacatctgaattaccttataagcacaaaggtaatcactccagtttga

SEQ ID NO: 105218 - DNA, 672 bp, Enterobacter aerogenes
ttgttattttatccaacatttggtgcaggtaaaactgaagtcgaattctataacagtatgaaaaactatagggatcgttttgattcctggctgagtgatgtgcgcagaggttggagaaacgctgatggttcgccaagtgatctttcattacctgctattgatgttatgaacaaaatgaatgggttacctattttcttagttgaacaaaaaattttatattggcaatctccaaacccttccatacaagaagcggtcggtttctcttgccccctagacgatgaaactctgaatgaaacaatgagagagcgattaatctcagcacgacttgggcagggagagttcagaaaaaattgtctacagttatttccagcttgcccagttacaggaatattttttcatccattactaagagccagccatattaaaccctggtctgcatgtgagaatgctcatgagcgtttagccccttataatggaataatgcttgctgcacacattgataccctttttgatcaaggatggctttcgtttagaaataatggtcagatattaatcagtactgaactcaacaatgaagtaaaagaatacctaagtcttccagaaaaaatatcaccattttcgattttatcacataattatcttgagtggcatagggataatatactgaggtag

SEQ ID NO: 105219 - DNA, 612 bp, Enterobacter aerogenes
atgatgagatacaaggggaataatatgttcaaattattcagaaaaatcccggtcattgggacaatgatttttattatcaatagttatgtctacaatggcgaccttagctcaggcgataagtttgctccacttgccatgtggataaaaaaactttttggtaagttcgtcatggcttcacttttaacaggtcttgttttttgtaatgaaataacatcatgtttaaacataaatacttttattgaaggttctatcaatgctaaaaacccaggcagcataatcgtatcgacttttccatctctcataggctttgggataggagtgtatgctttaacattggtacttagtgaatcagttgtaagcaactttcaaaaaataatatcaggaaaaaataatacgtctggcagtgttttgatgttgagctcagatttagcatatcctatgttaattcttgttctaacactttctgttggtattttacagggtgtatttatcgacagttataagttatgcgtagtaacatggtttatgctttggtatagctttattgttattattgagatgctgggggtattattcggtttgtcaaataatagcttgctggataagctttag

SEQ ID NO: 105220 - DNA, 906 bp, Enterobacter aerogenes
atggctagttttattttctataacattcaagttcttcctaatgaaaccgctgaagaaataggtgttaagggatacaaaaaaatcttcagcttattaaaagaaaaaaacaatgaagagctgaagtctgggaatcatttaagttatcattttaaagttgggaaaaactcatatttcggcccgtatgagttttttagtgagcagggtggggttaatggaaacttcataaaatataacgacagtgatgatgtaactgatttgttgacagataaggttttattttcaaaaagtaaaaaaaatgctgctgtttcaggtaaaaagaaaatccctttcgtatttgatgccaaaaaccatattttagcaatagatcaatctgcggcaccatctcaagaatatgataagttacttgaaatattaatgtattacattgacccaatagtaaaaaacttattccatgaatatacattaactatcaacttattatctctccctagtgctcttgatgaagtttttgcaaatgctatatcctataaaaatgttgaagttagcgtttttgcccctaatggagatgatgcagaagatattttagaagaaatgagaaagagcaaaatgcaaaaactacaattgagtggttcaagcggcgatagtagtatgattagcatacctaatttcttgaagaaaattctaaaatcagcacaaactcatgggaagataaaattaagatatagagttcaattacaaaattctaatgaaacaaaattaatgacatatgactctgaaaaatccccactcaaactcaatctccgccataataaatctgataaagacgaccgaggtttcttaagaggttgtttaagaaaaatcagagagttttgtgagctgaaaaatgatgagatacaaggggaataa

SEQ ID NO: 105221 - DNA, 669 bp, Enterobacter aerogenes
atgaaaaaagctatttccacgccgcatgacgcagtatttaaaacctacctttcccattcggataccgcgcgtgattttctccggttgtatcttcctgaagcgctaaaggagatctgcgatctgcgcacgctacatttagaatcaggtaattttatcgaagaagatctcagaccttactattccgatattctctactcgctgcaaaccactgcgggcgacggctatatttacgcgctaatcgaacatcaaagtagccccgaccgacatatggcctttcgcctgatgcgctacgccgtcgccgtcatgcagcgccaccttgatgccggacacgaaaaacttccgctggtgatcccggtgcttttctatcacggcctggtgacgccctatccgttttcaatgcgctggctggatgagtttgccgcgccggagctggcgaccacgctctaccacggcgaatttccactggcggatatcaccgtcataccggatgatgaaatcgccactcatcaacgtatggcaacgctggaattactgcaaaaacatattcgacaacgcgatctggcgcagttactcgacaagctgagcgaattattattgactggattagccacgcaaacacaggtgcaggcgctaacctggtgctcgcgggaaatagccgcgaaccgataa

SEQ ID NO: 105222 - DNA, 696 bp, Enterobacter aerogenes
atgtcacaattaagattgaagtggatgagattgaaaatcaggaccagccctgaggctgtctttgattttatcaaaaacacgccttattctgatgctattggtgctggttttactaagtatgaaaccattcataatggtatgactgcaactttcaataaaaaatctgttgttttagagccggttgccgatccatttggtgagttgctggaattcgaaagggttgtatttgatcagattagtttttctatccaaaccctcagcaataagatatgtttgttaactttttacaatcctccaaaaacagttaaaccttttattgattttttgtctcaggccgaagggttaaatgtcgcttatggaaatttaaccgtagatcttaaagcttttatgagggtcattcgagaaaatttcggcgtaaaggtgtttggcatttcaaaagtgaaagtgtcaaatcttcctgttactgaaaaaacaagagcatgtttggaattgaattctagtggcgatgctttgcacgacttgaaggtttttgttggagatagtgaattcaagctcgataaaataaaagctggaggtttttaccttgattcaaagattagttttgaattaaccagtggagcttctgcagtggttcctgatgagcatttttcgattttcaatgatgccatttcatgtatggaaattgataaattttag

SEQ ID NO: 105223 - DNA, 1065 bp, Enterobacter aerogenes
atgaaaaatattcacagcgtaactgataaagctttgtatgatgctttaaaccaaaagcagattaccctaaatgaaattcaagaccttttcttagagagaggaacgattatatgtaaaaaaactccccgaaaagaattggcgagaaactattctcgaatgactcatgattattacgagcatcaaaaaattgcgaccctattaggtggccaggcaaggaccgaaaaaattacatgtgtaagaattgagagtggtatagataagaaaggtattatagacgcggcagaaaaacttaagaaagaaattactgagcaggatgattattgtaaaataatcgtggatggaccgcgcgttctgattaatattaggtatctttcaactaattatggcaaaagtgatttcaaacaggctattaataaagaagcgttaattgaaattgagcctcttgctgatggttacagtatccgccgtccagataatgaaaaccttgaagattacgaggggcttttactggggcacatcagcgctatacagaacgagcaagcggatgatagtaaccttgatttaaaattaaacgaaatttctctctctcacaatacatctgctgatgttagaactctattcttcgataaattaatccgtacacttgatggttatgagttactggatgttactgatgcttatgtatatcaccctaagcctgaaactatagaggctgaagatggtaacaccgaaactggagtgcacgtatcgagggcatcacttaagggggagggggtacttaaatctgatgaattaagcgatctttatgatagagggttctatatctggaaaataaaatggaaggtcaaggagaacttggcagatccagatatatttgagcttgaggcccaatttggtgatcctctcaattgtactaatttctcatatttagttaagggagttagaaaatataaggcaaacggacaatatttcagtaagccgcaaaaactctctggtagagaagctgagcgattcaataaattaattgaaaatagagcttattctattataatggaaatcagctaa

SEQ ID NO: 105224 - DNA, 1065 bp, Enterobacter aerogenes
atggcagagaacggccctattgaagatttggcgaaacgcatatctgaggatctactgagtcgatttaagtggcagcagcatggcccctgcgaccgagatttcctttgtgatgatgaggctaaacataagcctgaaggaaagaagcagaagcacacgcatcctgtagatgttgtatttagttataaagacccatatttaaacaaagtcatttatttaaatactgacttaaaaagttataaagcaggttcaataaatgcgtcaaaaatagaatctgcattggagtcattagcaaaaactattgaatgtgctcgctatagtcctgagtggtcagaaaaatataatttctctcaaattgactgtgaagttcgcggtttattgtttgtttttaatcatgataatcagctgcagcatgatttttatgagttttttaatcctcctaaacccgctaaaggaagaagagataaggctgtcaatttagaaaagattcctttatccgcaggtcagcaaattcatataatcgatccgtttctgattaattatatgttggcaataacgaatgatatgaatgatttgattgctaagaaagagtttcctgatgaagaatatggattctattaccctcaattgacttttcataaggttgctgtcactgaaaaatatcttccagccactatagaggtcttgtcatcacctttcatgattatcaaacatggtgctgtttataaatttaacagagctaaaggtattgaggaggaagtttatccagaagggtttgttgtctattacaacaaaaaaggtaatagcgacaatgaattcttttatctgttggatattttgtcaaattatcaaatccttgatggaataaataaaataaggataaggctggcatatcgagaaaaagatgagaggattctctcacactttcaacggggagttgaaaaatatgcacatgaatatggattagatgaagaagctaaaaagaggcttgaagatttagacgttaaagttgtgtctacagtaaaagaattcttttctgcagaagttatttcttgggagccgaaatga

SEQ ID NO: 105225 - DNA, 1275 bp, Enterobacter aerogenes
atgaagctaatagatgaacttattgatatatacgacaccttaaataaacaccctttattacaaccaccttatgaacacaaaggaaatttgatagatgattttaacgagcgtattgaatgttatttgagagccattgatgaaatagctttgaactaccctaacaacaacttaataaaaaaaatcaagaaaagaaaaataacgattacaacgttttcagaaaaaataactgatactttaacgcaatatttaagagggaatattagagaagcatactcaacttttgaccaagccatcacacgcacagcaatgaacactcacatatataatatgacaagacctctatctaaaataggtaatgaagacaatctattatttcgagtaagaagcagtgacacaatattgaaagaacgcaaagaactatttcatataccttttgaggatagacatagagtcggtgcgatgcgtttttctgtctctggattgccgtgtctttatcttggttcatcgatatttgtttgctggcaagaaatgggaaaacctgattttgacaaactttatatttcatcgtttaagactgatgaagaaacagatgatttaagaatattagatcttggttataacttaacatcagcagtaagaacacagccgttagatcgattcttctattatgacatcaattataatgaagatactgaaatagaagaaatcaccgatattgaagtcgataatcaggaatcaaatggaaattatggttcccagggaattaataatattatttccaagctgttagcatggcctttagtactcgcgtgtaactatagtaaatatcacaccaccgctaactttcacaaagaatacatcattcctaatcttctaatgcagtggataagcagtgacaaaaacaaaaatatttcgggcatatcatatcgctctacaaaaatacttaatcaaaaaaataaaagcatcggtataaatgtgataatccctcctaaaatggaagctttacctgttgacttttcaggccattgccccgtactcaaaagaacatttttaatgacaaatccagtatcatggaccgtgttcagtactctggacatcattccagacaaatacaagggagatagtgctaaagctatggacgatgaacatcgatttagttccaacactaaaattgaaagcctagatgaatccttagttgaactctatgaaaggtcaacattcaaaaatgtagagctcctgatagatcaaataatgaactataagcggatatcctaa

SEQ ID NO: 105226 - DNA, 594 bp, Enterobacter aerogenes
atggtttataagatctcaaataatgaaagcgaaagcattgaacttgtaaataaggcatccaaatatatattgttagttgtggttgcactgttctgtttggctgggttgttttcttgggtaattgattttttcatacctgaaaattatagtaatgttaaatttattttattggcatgcctcggatatcccttattatatactttatcggaaacgacagttgtaggaatcggtattagtaagaagacatcatattctatgttcgcatctgtacttgcactctgtattaatttcggtcttaactatgcatttgttccacttttcggggcagctggggctgctgttagtacttgtgtcactttctggtttttcctggtgtttagaacagagttttcaatattatgctggaaaactataccccgttttgaattgtatttttttacttttttatgtgttgctggcgcctcttttgaagctattgttggagaacgctattctgttcatttgaaattatattggtgtggggttttatttgtgcttatttataggaatcgtcttttattgactgatttaattaagtgcagaatattagggtga

SEQ ID NO: 105227 - DNA, 528 bp, Enterobacter aerogenes
atgctcagtcaaatacaacgctttggcggcgccatgtttaccccggttttgctgttcccattcgccgggattgtggtgggtatcgctattatgctgcgtaatccgatgtttgtcggcgaagcgctcaccgcacccgatagcctgttcgcgcaaattgttcacatcattgaagagggcggctggaccgtctttcgtaatatgccgctgattttcgccgtcggcctgccgattggcctggcgaagcaggcccagggccgggcctgcctggcggtactggtcagttttcttacctggaactacttcatcaacgccatggggatgacctggggccacttcttcggcgttgatttcaccctggatcccacggcgggaagcggcctgacgatgattgccgggattaaaaccctggataccagcattatcgggccatcgttatctccggcatcgtcaccgcgctgcacaatcgttacttcgataaaccgctgccggtgttcctcggtatttttcagggatcgtcgttcgtggtga

SEQ ID NO: 105228 - DNA, 567 bp, Enterobacter aerogenes
atggaaatgagagagcaaatacttgcgagtgcacagcgcttggtgcagacgcgtggcttcaacggtttcagctatgcggacatcgccaaagaggtgggcatccgtaaagccagcgtgcaccatcattttcccaccaagaccgaccttggcgtagtgctggtcgagatgtatgccgcaatgctggatgccgcacttctcaacattagcgcatcgtctgcctcagtcgatgaaaaattggcctcttacgtcggcatttatcgcaatacccttgaggctaatcgtgtttgtttaggcggcatgctggcgtccgaggcactgacgctggaccaggcaatattgcctggtctgaaaaatttcttcgcgcggaatacccaatggttaaccgaaattcttactgaaggtaagaaaaaacggatatttgtcctgagtagtacggctgctaaccacgcacatttgtttgtttcgtccttgcagggcgcattgatgctcgcacgtgccacaggtgaccgcaaggcgtttgatcaaaccgtttcgttattgttaaaaagtttgctgaggaagggctga

SEQ ID NO: 105229 - DNA, 450 bp, Enterobacter aerogenes
atgtcaaactgcaaaacccgcaacggaaaaaactttactgcctatgaaagtggtgccaggaaggagtggccagatcatgtcgttcagttacccggccttgaactcccaggcaaacattttctcaaggatatgctgggcttaacaggctgtgaaatatccattaactcgctgaaacccggtactggcatgcccttttaccatacgcaccagcaaaatgaagaggtctactttttcattcagggcaaagggcaaatgcaggttgatggtgaagtgattgaggtgcaggaaggttccgttgtgcgtatcgcacccaacgggttgagaacctggcgcaacaattcgaacgagccactgttatatctggttgtccagatgcgggaaaattcgctaaatcaatacggtagcggagacggcgttgtaccggagaaggccgtattctgggcgaattga

SEQ ID NO: 105230 - DNA, 513 bp, Enterobacter aerogenes
atgccggtcattgtcctgctgatcgtgaacgtcctcccgcacgatgtgaagtccatgctcgtgtattggaagccgcttggtgtgctgccgggttgcgaggctttcacgaagtacggcccgcgtgacccgcgaatcgacatggctgcgctcaagaagaatgtgggcgcattgcctatggaatcgaccgagcagaattccaagtggtacaagctctataagcaggtgccgaacgaacccgaggtgcaggaagctcacaagctgttcctgatgtaccgcgacatggctgtgctgtccctgccgcttgtggcgctggtgccgctgtccctgaacgtggcagatatctcgaattcaaccctcgcgcttgctgctggcctgttcgttgtccagtacctggtgacggcgttgagtgctcggtggagcggcattcggtttgtgtgcaacgtgctagccatccattcagcacgcaagatcacggcggcaaaggcgacaattcccaagcagccagccgcgtag

SEQ ID NO: 105231 - DNA, 867 bp, Enterobacter aerogenes
atggcgttacagggcgagatggttctgcgagtgtgggatgtggagcacggcgcgtgcgctatggtgcagcacgttacgagccagtatggcggcaagctggcaatgattgattcgggcagcaccgtcgattggcgtcccagcaactacatccggggcgaccttggacgcacgaatctcgactacctgttcatcacgaatgccgatcaggatcacatgagtgacctgcaaggcttgtggaatgccggaatcaccgttccggtgatgtatcgaaatccgagctatacaggcgagcaaatgcgacagatcaagcgccagagcgggccactcactgctgatgcagaacgctatgttgcatcgtgttcctctttcaatcagcctgttggcgagccattcaacttgtatatgggcggtattacggccaccatgttctggaacccttacccgaccttcacggacacgaacaacctcagcctggtcgtgttcatcagctttgcaggattcaagattctgttccccggtgacttggaaaaagccgggtggcgtgcgctgttgcagcggcaggactttcttgcagagcttagcgggactggtgttctggtggcatcccaccacgggcgcgaaagcggtttttgtcaggacgtgttcgatcacttcacgccgagtgctgtagttatttcagacaagcccattgagcatgaaacgcaacgcacggtgcccgattaccggcgcgtagtgagagatcagggtgtccgggtccgtaccacgatgaagaaccggcatgtcctcaccacacggcgcgatggctgggttcagttccgtgtcagtgctaacggcgattactttattgatacggagtacgcaggatga

SEQ ID NO: 105232 - DNA, 150 bp, Enterobacter aerogenes
atgaagaataacggcgaacgctccttgaagtcactcaacatgaagtggcttgtgctgttggcggcagccgatgtgcttttcgtgctgctgtttgtcgcacctgaccctgaggtttccccacgaatcaagaaagcacagggagtggattga

SEQ ID NO: 105233 - DNA, 1263 bp, Enterobacter aerogenes
atgcgaacgaccacgattgtgtcgcgagtcatcacggattgcaaagactatatgcatgccacgcgctggcaaaggctcgttgatctgagcagtgccgcactcaacgggcaagccttggcgctcacccaattggcgctgggcagcgcatcgcagaccaccttgcggcatcgggtcaaagcggtggatcgattattaggcagcgcctcgtttgccgctgagcatctggacatctatcgcaccctggcggcacgctggctcgggggagatgctcgggcaagcccgctgctcatcgtcgtggactggtccagcctgtcggcagacatgcactggcactggctgcgcgcttccgtggtcgtggaagggcgctcggtcacgctttacgaagaagtccatccgcgacggcgtctggcagcttatgctgtccatcagcgctttctggaacgtctggccggtgtcctgccgatgcagatgagcgcaccggtgattctgaccgatgccggatttcgcggcacctggtttgcgctggtcaagacgcagggctggcactgggtgggacgtatccgcaaccgtgagtttgtctgtcgcgttgccaacggccagcatcgggccgctgacaagaagagcccacgctggtttcccgccaagacactctaccttggcgcacaggccgccagcgaagacttggggctgtttgacagcccgcgcaaccgacccaatcgttgtcgcttcgtgcgcgtcaagcgcttgcccaaggcaagaacacggcgctatgccagcggcaaggcgcacggcaatagccaatcgaagaagctggctgctgctgcccgcgaaccttggctgctgtcttgctcgccgggtttggcgcacttgagcgccgaagccattgtgtcgctttacgcgcagcgcatgaagatcgagcagggctttcgggatacgaaaaatgagcggctgggcctgggattgacgcgttcgctatcccatgggcaacggcggcttgaagccttgctactgatcggtcatatcgcgggcatcgccaagcgcttgattggcgaggcagccaagtccatgcagttgcaattcgccttggtcagtcgcaagcaggcaaagcatcatcagcgcgcggaaatatccgtgctgaccctcgcggcaagagtaatcaagagtcctgctttgttacgcaaaatcggtgatccgttagcccacatccatcgcctacgattgcaggccatggcagcgatcaatccactccctgtgctttcttga

SEQ ID NO: 105234 - DNA, 885 bp, Enterobacter aerogenes
atgttaaatttcaaagaattatccattgacggccaagatcttgagcttctagtaagagaaattttgttcggattaggtcatagtgtttattggagtgggaaaggccccgatgcaggcaaagatcttatcttcacagagaatttcaaaagtgactttgttcccgcctcacgtaaatggcttgttcaatgcaaacataaagcggtaagcggaaattctgtcggtaatggcgatttagatgacattgttgatagttgtgcccaacacgaatgtaatggctatcttttagtcacgtccacttatccctccgcggctgtatctcagagactcgaagatattacaaataacccaagaaacgacgttacggcgacatattgggattatgttaaaattgagcaagtactttcctcacccgatttatggtctattgctcaaaggttttttcccggcagcaccgaaaaatggaagatttatgcaacaacaagcccaaacacttggatagcaaattattcaggatattatttccatataaacaatagaattggttcagaatatagattctatctgagagatattgaaaataaaatagttgaaattaatagagctattgatagcataccagaaaaccatttctttaggttaaggagtgtttactatgatgataaacacggcactttcacatggtacattgattatatgtatccatatggagaaaaaccaataacagaacatatgaaactggaaatgttttttgatgatgattggaatcaacattatgattttaaatcaataaaatactccggttcaagcgatcattatgataaagaccactatgacttttatgatcctcatgtaggtcaattccttttgggtatgagaaggtactga

SEQ ID NO: 105235 - DNA, 306 bp, Enterobacter aerogenes
atggccacagccaacaaaaatacaaagtctcaacttactactgtcagagtcccgcacgacgtcatgaaagaaatggagtccgttaagctagatgatgagagcaatgcaggatttattgttgctgcaatgcgcggcgaaattgctcgacgaaaagttggggggtctgtcgaagatactattgtgtcaacgttagaacacttaacccatatgaaagagaaagcaataaaagccggtaaggaaattgaagaaatcataaaattagctgatattgaattgaataatagggctaattcgcataaggattaa

SEQ ID NO: 105236 - DNA, 579 bp, Enterobacter aerogenes
atgtctacattagttgatttagtgtcggtactgatttggcctggagtaactgtatggttcattaaaaaatacggtgacgatgttaaggctctcatactgagactatctcgtatcaaaatgggaggagcagaagctgaatttgctgcgaatcttggtgtggctgaggcacttgctgttgatactccagctataaatattcaagatgcagttactaatgaagataccgagttttcccgcagattatctactttgcaacggattgcagatgtttctcctcgtgctgcaattctggagtcatggctcttggttgaggaggccgcaggtaaagctgggttcgtccagggggcaacaataccgagagtaaacctcccgctctttctagaatggttggttcgtgataataaaataagtaaaaacactgcgaggctggtagaaaaaatgcgtcatttaaggaattcagccgctcatttaaaagacttcgagttaacaagagatgaagctgaacgttatctgaaattagccgctcagctttctttaatcattgttgaaccggaagatgacctcgaaaatagagattga

SEQ ID NO: 105237 - DNA, 558 bp, Enterobacter aerogenes
atgaaatcctggtacaccatcaaagcagccagcgatgccgccagcgccaatatcagtatttacgaggagatcggcggctggggtatcactgctcagcagttctccgaagacctgaaagcgctgggcgatatttcccatatcagccttcacattcactcacccggcggtgacgtgttcgatggcatcgctatctacaaccttctgaataaacacccggcaaaagtcacagtgcatatcgatggtctggccgcctctatggcctcagtcattgcgatggccggtgaccgtatcgttatgccggaaaacgcgctcatgatgatccacaagccgtggggcatttcaggcggtaatgccaacgatatgcgcgactatgccgagctgctggataaggttgaaaacgtgctaatcccggcttacgcccgtaaaactggcaagtctgctgaagtgctggcggccatgctggaggatgagacctggatggatggtcgtgaatgtgtagcgcagggattcgctgatgaagtgttaccggcggtcagcgcaatggcctgtattgaatag

SEQ ID NO: 105238 - DNA, 1332 bp, Enterobacter aerogenes
atgccaaaagaaattaaagggatgatcaccggcccgaaaggctccaccggcagcaaggtaccggaacagaatcgaatcaacgggattaaagacctgtttgctatgttcggcggtaagcatgattcactgaaaattcagtgcctggaagatgtggactgcacgccggaaaaagcgaaagacatgctgctgactgccctaggcaagattgcgaccccatcgaacaaaagcactgatgcacacatttatgctggtaacggcaacatcaccggcgacgctatccgccgggggctttattcccgtctgggtcacgaacgagccgaacgcgggaacccttatgccatgatgagcctgtttgatatggctcaggcatcgctggtggatcgtggcattagtatcagcggctttggcaaccgctcgcaaattgtgaatctggcctttacgcacagtacatgcgacttttcccatatccttgctggtggcgctgagaaatctgtacttacaggctggcagaacagtggtgaaactttccagcagtggacgaaaaccggctcgctatccaacttccatgaagccaagcgcgttgggctgaatggcttttctgagctggaaaaggtgccagagggggctgaatacaaatatgtcactaccagtgacagcggtatacctatcgctcttgcgacgtatggcaatatcttctccattagccgccaggccatcatcaatgacgatttgagccaactgacgaccgttcctcaggctatgggccgtgctgctgcgcgtactgtagggaatctggtctatctgaacctgactgcgaacagcaagtttacagacggtaagccgctattccatgccgaccataaaaacctcatcgctaaagggatggatactgacggacttaatgaagcccgtaagactatgcgcctgcaggaagacgctaacggcgatccgatcaatgtcatcccagcctatatcctcgtccctgcggcgctggaaggggcagccaatcgcgcggtgctctcatcttcctcgctgttccctgtagaccaggacggcacactgaaccagaaccccggcatcattaacgtggttaaagatatggctcaggttgtggttgagccgcgattggataagtcagacaacaagcagtggtatgttgcagcggcgcagggcactgacaccattgaggtagcttacctggacggtatggacgtgccgtatctggaacagcaggaaggcttcaccgttgatggtatcgcctggaaggtgcgcattgatgcaggtgtggccgcgctggattaccgcgggctgggcaagtcaagtggggcataa

SEQ ID NO: 105239 - DNA, 189 bp, Enterobacter aerogenes
atgatgaaaactatacggctgacaattactgaactggccgacgtcaccgggattcaccgacagacggtgtcaaagcgcctgcaggatattccacctgagtcgggcagcagctgtaagagaaagtattacgacctgaaattagcattggcggcaatttactctaacggagaaagacagaatgcaaagtaa

SEQ ID NO: 105240 - DNA, 603 bp, Enterobacter aerogenes
atgcaaagtaaagaagtgatgacccgtattgaacttagtggtgtattggctaaaactttcggtcgtgttcaccaccgattaatcagtacgacccaggaagccggaagagcactagcggcgacgatcccgggttttgagcgattcatgattgatagcaaagataaggggctgacctttgctgttttcaggggcaagacaaatattggcgccgatgatttgggttatccggtaacgggtgacgctatccgcattgtcccggttattgccggcagtaaaaaagccggtttgcttcaaactattctcggagcagtcattgtcgcggcggggtttatttccacattcacgcctgctgctgctgctgctgctgcaccgtatctttatagtatgggggcatcaattatgctcggtggcgttgtccagatgctttcccctcagctatcgggtttagccagtaagcaatcggacgaaaacaaagccagctatgcctttggtggtgccaccaatacggcctcacagggttatcccgttggtttgctttatggtaagcgacgaattggcggcgcgattatgtctgcggggatctacgtcgaagataagatgtaa

SEQ ID NO: 105241 - DNA, 1017 bp, Enterobacter aerogenes
atgtactatttcaaatacttcagaaatgatgcgaactttgataaatcaatacgttataacgaacttttttttgccgccaatagttcgctaaatgatccaatggacttatggttcaatcccattttttgggatgatatagagttatggaaacaatttattggccgttatggcaatggcttactttatttaactgattatatttccgagccaaaagacgatgatttctatatttcaataaataacctatttaagggaaaaagtctcacagaagtagtcgaaaatagaaacacatacaagcaaaacataatagaaattataaaaagaaatgaactggccacaggaacgaatgttacctccgcagcctcatttttaatggataaattcactcaaaccaagaatgatgcaaatttcatttccgtatcctttagcagggacccatttaattatcttatgtggtcccattatgctaatggttttaaaggatgcatattaatatataattttgaagacaataagatcaaacttaagacacatattctcggaaagactgagcatgatgttaagatgatggatgttagatattcgaacagcccagaaaaaatagacctttggaaactcatctccgaaaatattatcgacaacggtagttattttttcactaaaaataaccattgggaatacgaaaaagaaagtcgccttgttttccactccccacgcaaatccaacggtgagatatttcaccacaatccttcacttgttagaggggtcatcttcggttctagaagcgatgcctactttaaagaaagaacaatacatacattaaaagaaaatagagaaatctgtggtatcgaagattttttatccttcgataccattcttaatgataaaaatgagatagagttgaaatcaggtatcaaacatactacaaagaattttttaaaccctccattagggatggatgtgattgatgagtggaataagctacttaaatttaaggaagctaagacgactaaatga

SEQ ID NO: 105242 - DNA, 216 bp, Enterobacter aerogenes
atgaacaaacctcagtccttacgccgcgccctgaataagtcggttcagtatatcaggggcaacccggacaagctgcatctgttcgttgataacggctcagtggtggcaaccggcgcagcgtcgttgttctgggggtatagcaataccctgaacgtggtgattgtggatttcagcagcaatcagggtttgctgatggatcatcatgcaatgatttga

SEQ ID NO: 105243 - DNA, 348 bp, Enterobacter aerogenes
atgcagccgcgttggctgccgcggccactggttaaccacggcacccagatggtcgtcgcagaatttgtcgagtgcgcttttacggttgaacttctgggtcagccgcgagaagggccagacggtggccatactgttccgatatctggtcagttcgctgtctttgatcgcgattttgttcaccgcatagcagatgctgctgtaggttttaagcagcgcctggttgatacggtcttcgccgccattagcaaacagctcgccgtccagcgagtagtgctcttcgccaatctccggaaagcgcgccccgcaaccgggaaagtagtaacaaaagaaaccatcgttatcagctga

SEQ ID NO: 105244 - DNA, 951 bp, Enterobacter aerogenes
atgttttcaaaatctaaacaactaggcgacattgtaggaaaaagcaatgttgcaaatggcattcagacaagtgcaaacaactactacattcataaagcaataaaatatgaaaatggttttatttattttgaatataatggagttgaataccacattgaaaaagaattgactcgcccttactttgaaacaaatcgttcgggtgacgatattttctatacttataaagacgttgaacctaattcatttgtcatttatccatacaaaagaatgggcgaaagaatccagtttattgaatacgatgaactaaaacgtcaatatcctaagttatttgagttcctgctcgttgtaaaagtccatttgaatgataagaaacgctctattaagcctgacccaactggacctaatgagtggtacagatacggacgtagccaagcattagagaactgcgatgttgatcaaaaactgattgtcggtgttctatctaatgggtataagtacagcattgataatcatagaacttttgtttcttctggcggcactgcgggttatagtattataaacgtccctaatgacgttagatactctatctactatatccaagcaatacttacatcaaagtatcttgagtggtttgcttcaatatatggtgagatttttagaggtggatttgttgctcgtgggacaaaggttcaaacgagaatgcctattcctactattgattttgatgatccaaaacagaaagaaacacatgataagatcagtttaaagcaacaatctttgaataaattgtatagccaaactcaaaaatcaggtgatagagataaaatcatattcaaaagacaatttgaaaaagaaaaaaaacaaatggatgatttaattaagaatctttttgacttgggggatttagattcagagattccgacagtagaagacctatacaaaagcttataa

SEQ ID NO: 105245 - DNA, 1626 bp, Enterobacter aerogenes
atgaaatttaaagcagatcaaacctcacaaaaacttagaggtggctattacaccccacaaaacctagctgattatgtaactaagtgggtattaagtaagaatcctaaaaccatacttgagccgagttgtggtgatggtgtgtttattcaggctatagctaataatggttatgaccctaacattgagttgtcttgctttgaattgttcgacacagaagcatctaaggctctcgatcgctgtaaactgaacaatttttctaatgcaacgattacagagggggattttctagtctgggctaatgaatgtcttaagaaaaataagccgatatttgatggtgttttaggtaatcctccattcatccgttatcagtttcttgaaagaaatttccaagaacaagctcaattggtcttcgaacatctcgacctaaaatttacaaaacacactaatgcttgggttccattcctactttcttcattagcccttcttaaacaaggtggaagaatagggatggtcataccatctgagattagtcatgtaatgcacgctcaatcattgagaagctacttaggtcacgtttgctctaagattgtcatcattgaccctaaagagatttggtttgaagacactttacaaggggccgttattctcctagcagagaaaaagcaatatccagatgaagcatcgcaaggtgtaggtattgctagtgttagtggttttgaattccttcaagaggatccaaacgttctttttaatgatacggtcggtatcaatggtgaaacagttgaaggtaaatggactaaagcaacacttgatattgatgagcttcagctaattaaacgggtaattgctcatccagatgttcgtaaattcaaagatatagctaaagtcgatgtaggtattgtgactggtgctaacaattattttcttgttgataatgaaacagttaagtcatataagctagagcgttttgctcaccctatgtttggcagaagccaacattgccccggcattatttatgatgagaagcagcacattgaaaatcaggagaagggtttaccaaccaatttattatacatagatgaagagtttgaagatctttctagaagtgtcaaaaattacatagagttaggtgaggcggaagaataccacaagcgttataagtgccgtatacgtaagccttggttcaaggtcccatctgtatatagtacagagattggaatgttaaagcgttgccacgatgcgccacggttaattcataataaagttagagcatataccactgatacggcatatagaatttcttcaacagttactagtattgagaacttagtgtgtagttttttgaaccctctaacagtcattacagccgaactcgaaggacgcttttacggcggtggcgttcttgaacttgttccatccgagatagaaaaactatatattcctatcgttgaaggattagaacacaacgttgaagaaataaacctattgattaaaaatggtcaaatagagagagtgattcgacaacaaggtttactaatcctagataagcttggttttactcaggaagaaaatgagaaacttgtagaaatatggaaaaagcttagggatagaaggctacgtaagtag

SEQ ID NO: 105246 - DNA, 1131 bp, Enterobacter aerogenes
atggatgtaaaaatctgtctgccagcactttatccgcttaggtatctagttgatcatcttgagtatcgctcgctttcaactcaatcagcttctctccaggcgattaagtttttttatgagttctggtacatgaagcatagagccacattctgctatagcttttactgctcgggacatgaccctgcaatcgctattcaggagatgacagatttttttcaatacttagaaaatggtcgcatggtcagcttcgcaccacgattactgccatttaaacattctagcggcatgacaaatgcttctagagtacgtgcagtgattagattcataggctacctgattgctacctatgtatctccgtactatcgaaatgaaacgcccaaagaattgtctcgtcatgcatcccatctcaacactcgattgctgatatgtaaagacgactttaaaactctggaaagaagcaatcagcggtattattctcgagtcactcaaggatttcagagcatgactggtgatatggttgaaaatgtatatcgcatagtcgtaccgagttcaaaacataaaaataaccttctaaaccccttcccttcaggatttattcaatttcgcaattatttaattatacggttaatgctcaactatgggttgcgtgttggtgagttgttattgttagagtgctcatcggttaaagctagtatcagtggagataaatttagcttaatcattagtatgcctcaaaatatgaccgatccaagaacacatgcaccatcattaaaaaatgagtactcacatcgagttttggaactagataaagcagattatgaatttcttatgatttacatgcaaaaaattaggagaaaatcaataactcacaacttcatatttgcatcaagacaaaatcctgaaagccctttatcctataatgcagtacatttgattttctctgagatagataaggttttttcacttaactatcctgaatgtaaatcagcagagcgctttgatgctctaatgaaatttacacctcataatgctcacaatccactaatttctatccacgaaacaacgcagatcgaagtcaagtcagtaatagcccgttgtcatttgcatcacgtcaaaggttgtgaacaatga

SEQ ID NO: 105247 - DNA, 1458 bp, Enterobacter aerogenes
atgaaaaaaaatattgagaactttgacacttttattacggaacaaaaagcctggttcggtgagaatctggcagcagattttgcagagtcatgggatagccgtacatgggtatgtgggcgcaaaggctccggctggttacgtggcaatggtgatagtgtattgcgtttcgatgaaattaatcggctcaaagggatcgacgagcaccatactttatccgagccttatcagctgttcatgaaagccatgttggtactcgtctaccgagctagaaatcgcagtatttcccctgcggttgctgttgcaacgctggttattttgaaacgctggtactgcgctctcttcaagttaaccgggcaaacgcatcccatctatctgactacagatgtcgtacgtagcgcaatggatactctgagtgctgcatcccggccaggtgatcccaatgttgccaattacaaggggcgttgcgttaagattcaaaaattagtaaaccatcacgccttcacattagtaacactgcaatatgtatccgatgatcgttataccaatcagactaatttgacccgaaaagcccgggaaacaatcgctctaaaacaaaaagacaagctggatgatacggccactgatggtgaagatgctctgattacaattagagggttcctcaatatagtgtcattaatccagcgagtcgaaagcagcactgaaaagattgctctcaattgccttctgttactgatcgtcaccggatttcgttctgtcgaagcattcaatctcaggcaggatgcgttagtcaaacgacaaatagatagccaagatattagtaggcgcctgaaagataaggggttaccggattattttcttggcatccgttatattggtgctaagggagcaggtgaacgaacacattgggtcgagcccttagcggtccctttggttgagagcatattcagctcggtaaagtcgctaacagttgagttacgaaagcatctcgcaaatttacgctcaaaagaatttgctgattatttacctgaggcaatctgtgaatttgagggtgaactcgttgaacttgatgatattgtagaacacatagcccagtcctcatcagagcttcgtggtcgtgcaggattacgtgataaagtgtcgaaagcgttagcaaaacgaggctgtatcccgactcaagtcattcttggaacacgtaatcagaaaggaaaatattactcaaaatcagaccttagcctttttcttaaaaatgaatttggtgataacagcgaaaatactccctgtactcacgcatggatagaaaatggcaaaagatatgaggttatgtatgaggatttattgttccttttccctaaaggatctctgactttaaaaagagggttggagctgaaaacaacaccacagccacttagtaatgctggactaaacaaatttctcggtaacttgctcctcacgttctga

SEQ ID NO: 105248 - DNA, 1728 bp, Enterobacter aerogenes
atggctgttatccgccacatcagcatccaaaacttccgggcagtacgacaggccgaatggtgccctggtccaggcctcaattgtctgattggaccaggagattcaggaaaatcgaccatcattgacgcgattgacctggtacttggcgcaagaagatcgtttacgttcagtgatgcagattttcatttgatgaacacagccacgccaatctgcatcagcataacgtttggacagctcgatgacggattgctgaatctcgaagcttacggacgctattttcgtgggttcaacattgaaacgaaagaagtccatgatgaaccgctggcgggtgatgagactgtactcacgctaagaatggtcgtgaaagatgatcttgaaccagactggctactattttctgaacgaacaactgaggaagggttggagaaaagactgcaatggaagcatcgggagcaattaagccctacacgccttggcgctgcatcccaccaccacctggcatggggaaatcgctcagtattaaacaaactttcagatgaggatttcaatgtcagcgcaacgctggccgagctttcccggcaaacacgacaaagctttgctgcccgggaacttccacagcttgatgccattctgaccgaagtaagaaccattgcgaattcacttggggtaccggtcggtgaactgaaggcgcttctggatgttaatggcgtttcactctctaacagcgccatcagcctgcataacaatgacaatacgccgctgaggatgcttggcacgggatccacccgtttactggtaagcggattgcagaaagccgccgggtgtcctgggaccatactaattgatgaagcggaatatggactggaaccctacagaataagtcaactgttgcatcaactgggctcccgcgatcctgagcctacttcacaggtgttcatcactacccattccccatatgttctccgggaactcaaagcaacccaactctgtgtactgcggaaagtacatccagcggctccagagccttcacacattttccttacactaagcggagatgatcaggaacaggcaaccttaagggcctgcgctgaagccttctttagcaaggctgtgattgtcggtgaaggtgggactgaggttggttttatcagaggactcgacttatacaggcaaagcagaggaagaactggatttcatgatcagggggtttttgctaccgacggtgccggcggggaaaattatttcaaccgcgcagaggtttttgcacgactggggtaccgcactgccctactaaaagactcagatattatctcgcgtgcacacaggcaaaagacagaacactgccgtgccagtggcgtgactatttttgaatggggtaatggtttttcaacagaaggagccctactagcctggtgccctcttgagactatccgtgacatcgttcttctcgctgcggctcttaaaagccaacaacaggtggatcagcatattcagaactgctcccagggagcttataactttgaagcatgcactggggaaccaacgcaagaaatgagagaacccgtggcgcgtgcggcaagtgaatatggttggtttaaaacgatcggcaaggctgaagacctagctgaaaatatcgtgggcccggctatcaatgatttttcacggccgttcaaggcgataatcagagatttgctggggtgggctgcagaagacggtgatcaacaatga

SEQ ID NO: 105249 - DNA, 603 bp, Enterobacter aerogenes
atgcagctttttcacggaacaagacagcggtttgataagtttgatgtggcatacaagggaactggtgagtccggaaacatcgctgcctgctggtttacggataattttaaaggggccagcaatcatgcgttattcaaaaacagaaatcccggattgccactggtttgccgatgtgaactgaacgccggggcgattatcgctaatcaccggctgccgctcgcagagcaacccgatatcgcagcacgtctgagagatggacttccagtcagcatcagtagccaactcggtgaaggctgggactggcatgccctactcaagcctcagtacagcacttacaaagggagtatgctttatgtgggtaacaggcgtgttgattcagatgaaatgatccgcctttacctgaattgtggtattcagggcgtttatgactgggaaggtatatatacggacagctatcttcacggtacaactactgtgatatttgataccagtgcagtgagtattattgacaaaatcgagtacggatctgacaactggcatagctggctgagtgaataccgggagaagaatggtgttctggaaaggaaacaggaaatacagtag

SEQ ID NO: 105250 - DNA, 489 bp, Enterobacter aerogenes
atgccaggcataagaaagcatcgttcttttatctctctttcgcgtcgaaaacgtcggcaaaaagttattcaactgaaaaatagactccgaaatactcttcagatttatggtggtgttttctacgatgaatgcgatataaatcaatatgataacaacgagaatattgtctggaactggagcgacatctattttttaggtctccggcctgacgtattatggaatgctgaaatcattaccgcgcagacggcttttaatgatgtagttggttcattagcctttgaagaagcctatagtttgttgaatgcacatcagcgtgaagaagaatttaggctagataccatgcaacgcgatagtccaaggcatcttactcgctatgcagtattcaatggattaactttttctgaatatctttcgaagcgagaacaagaaatagcgcttaatactccgatacaaatttacagagagtaccgttacttacctggctattaa

SEQ ID NO: 105251 - DNA, 720 bp, Enterobacter aerogenes
atgactcagcaggctcttgtcaggtatattcagtacagcattctgaaaccttttttcacgtcaaaacaggttgctgagtacattcgtgaggctgttttttataattatggctctgtctgtataaatccagcctataccagtattgccggagacctatgctctggtacccaagttaaagtttgcgttgtgtgcgacttcccttttggtctctcaacaatcgatagtcgccttgaacaggctcatcatattgccagtttcccgtcagtcgactccatcgatattatttcaagatatgcgcttgtaaaaggagggcgatataaggagtttgcccgtgatttagcttcaatggcagaggtcatccattgcgagggtaaaacggtcaatgtaatccttgaaacggatgcattaaccgagtcagagacgcttgctgcgatgtcgattgctttggctgttggggccgatacgatcaagacgtcatcaggcttctttgctccatccagtgagggggccagcattcgccttattagtaagatggccagagaatcaggctgcgtctctaaaattatcccgaccggtaaaatccgaactcaggaacacttctttagccttgtcgacctgggtgttcagcagattggtgttgggtacttatctgcgcctgtagtgcttgggctgcctattacaagttcgatgtcattcttttttaatgaaattcttaaatga

SEQ ID NO: 105252 - DNA, 984 bp, Enterobacter aerogenes
atgaatatcgcactggttggttctggtaaaattgtccagtcttgtcttgtcgcactcaaccaagtatctggttatactataactgcactctgtgttcgcgaggtgagtcgtgctactggcgagaatttatgtcagcagtttggcatagataagctctacaccagttatgatagccttttactgaatacagagatagatgtaatttatattgggttgccaaatcatctccactttgattatgtatctaaagcacttctgtcaggaaagcatgttatctgtgaaaaaccttttacagcatcatattctcagctcattaagcttgccacactggccagaacacgaaacttatttatgtttgaagctattacgtccattcacactcctgcctttaagtttatctccgagaaaatacatgacattggtgatgtgaagcttgttcaggccaattattcacaatattccagtcgttacctcgattatctaagtggtcgcgcccatgcttcacttgatccatcccaagcaggaggtgcgctttatgatattaatctttacaatgcatatattctttgtgctctgctgggtagtgcgcagaaaattaattacatatgcaataaaggttacaatggagctgatacatccggagtcctggtaatggattatggagatttccaggctgtgtgttctggtgcaaaagactcggatagtcctggtcactttaccgtacagggtaccaaggggtacgtcagaatttccggatcacctaatatttgccgttcagctgagttctgctcagaggggcagtatctgcattttgaggacaagactgagaagagtcatatggtatatgagctggcagtttttcacgatatggtaacaacaaacaatatccagaaatgcaatagatttctggatactgcttttctggtatctcacactttagaaaaagcacgtcaatacgcccaacttcccttcccggtagtttaa

SEQ ID NO: 105253 - DNA, 771 bp, Enterobacter aerogenes
atgaatttatcatgcgaagcaattcgcgatctcaatgtgctgtctgactggttgtcagtagacgatttttccggtcgggaggatgccctgcatgacatattaattctcgccgggcacgccattatcccaaatatttacggagccttatactttgccagtcaggctaatattccagtcctgcttagtggtggtattggtcattcaacacccttgttaaaaaaggcaatgcaagagtcttcactggttaatgccaatgacgttgaagggaaaagtgaagcggaactcctatcaatgattgctacccgagtattccatatttcagaagaaaaaatactgattgaggatcaatcaacaaactgtggacaaaatgctgattttagtcgtgatttactgctgaaaggcagatatgaggtttcctctgcgatccttgtccaggatcctctgatgcaaagaagaacatttgagtctttctccttcagctggaagcaaaaagatattcattgtcagtttaccaactggccagtatttaaaccacggttgctgatgacccgcactggcctgcacattaccggaggtcaactacctggtctttggaactctgagcggtacatatcgatgatctttggagaagtgaaacgattacgtgatgatgtaaccggttatggaccaaaaggagcaggctttatcgaccatgttgatatgcccacacaagtcgtggcggcatggtatcgattaatggctgaacctgctatggcggggttggtgcgttaa

SEQ ID NO: 105254 - DNA, 2007 bp, Enterobacter aerogenes
atgaatacacgaagacatctggctaacgcactccgcttcctcagcattgatgctgttcaaaaggctaattcaggccatcccggtgcacctatgggtatggcggatattgcggaagtgctctggcgtgactacctgaaccacaatccacataacccggattgggtaaaccgtgaccgttttgttttatctaacgggcatggctcaatgcttatctatagtctgttacatctgacaggttacgatctgcctatagatgagctgaagcgcttccggcagttacattccaaaacccctggacacccagaaattgggtatacgccgggtgttgaaactaccacgggtccgctagggcagggaattgcgaatgctgttggaatggctctggctgaacgaaccttagctgcacagtttaaccgcccgggtcatgacattgtggatcactggacatatgtcttcatgggcgacgggtgcatgatggagggcatttctcatgaagtctgctctctggccggtaccctgcgcctgggtaaactggttgccttctatgatgataatggaatatcgattgatggtgaggtagatggctggtttaccgatgacacagcgaaacgatttgaagcatatggctggcatgtaatacgtgatgtggatggccacaatgcgtattcaattaaacgggcaattgaagaagcccgcactgtcactggcagaccatctttaataatttgtaagacagtcattggatttgggtctcctaataaatcgggctcccatgattcccatggcgctccgctgggacaagctgaagttgctgcaacgcgtgagtcactgggctggaatcatgcaccatttgagatcccccaggatatctatgagaagtgggatgccagccataccggccagattagagaaagctcctggaaccagaaatttgcagaatacgcgaagtcatatccccatgaagcagttgagtttttgcgtagaatgaaaggtgaacttccggaggatttttcttcgaaggcaatgaaattcatcgtttcgctacaggcccagccagcagacattgccagccgaaaggcttcccagaatgtgatcgaaacgttcggggcgtggctaccggaattcctgggaggatctgcagatttagcgccctccaacctgacacagtggtccggttcattgagtgtcgctgatgacacctcaggaaactatattcactatggtgttcgtgaatttggtatgacggccattgcaaatggtgttgcgttacatggaggtttccttccttataccgccaccttcctgatgttcatggaatatgcacgtaatgccgtgcgcatggctgcactcatgaaacaacgtcaggtgttggtatatacacatgattccattggtcttggggaagacggacctacacatcaaccggtagagcaaatagcctctttaagattgactccgggggtgagtacatggcgcccttgcgatcaggtcgaaacagcagtcgcctggaagtatgcagttgaaagaaataacgggccgacagcgttgattctttccaggcaaaatcttgtccagcagagccgttctgtcatacagctggcagatattgctcgtggtgggtacgtccttaaagacagtcgtaaccctccggctatcattatcattgccaccggttcagaagttgaacttgccgtcagcgcgtgggaaaaactcgatgcggaaggtattgcagtccgggttgtttccatgcctgctccggatgtttttgatcgccaagatgtacagtatagagaatccgtattaccgaaatccgttaccgccaggatggcagtagaggctgggataaccgattactggtacaaatatgttggtcttgatggtgtgatcatcggaatgtgctcatttggtgagtccgccccggctgataagctctttgaacttttcggcataacttctgatcaggtttacaaacaggcgaaagaaatgctgaaagcaacgacacattaa

SEQ ID NO: 105255 - DNA, 951 bp, Enterobacter aerogenes
atgagccagctaaatgaactcaaaaaactgacgaccgttgtggccgacagtggtgatatagactcaattaggatctattccccacaagatgcaaccaccaatccttcactgattttaaaggccgcccctcttccacagtacaagcatctcactgaagacgcgattcggtatgcgaatgagcagggaggagaaaaatcaacccgggttttgaatgcctgcgatgctctggcggtcaatattggtgctgaaattcttaagtatgtcccaggccgtatctcgacggaagtggatgccagattgtcatttgaccggggactctgtgtggccaaggcccggaagctcattcaaatgtacgctgagaaaggtattgataaatcccgtgtgctgatcaaactggcttcaacatgggaaggtatccgtgccgctgaagaactcgaacgtgaaaatatcaactgtaatctgacgttgctgttttcgtttgcacaggcgcgggcatgtgcagatgctggcgtgtaccttatttcgcctttcgttggtcgtatttacgactggtatcagaaaaatactccagccgccgaatatgtccctgaacaggatccgggcgtggtgtccgtcagaaatatttatgaattctacaagaaattcggatatgaaacggttgtgatgggggctagtttccgtcgtaaagagcagatcattgcacttgccggatgtgatcgactgaccattgcgccgcagttcctggatgaacttgaaaaaagccagggggccctggtacggcaactgtcgccttcggtagaaaaagagtatcgcccgttaccactaaccgaagctgaattccgctggttacataatgaagatccgatggcgaccgaaaaactggctgaaggtattcggttatttgcccgcgatcaggaaaaactcgaaaccatgatcgccgacctcctgtag

SEQ ID NO: 105256 - DNA, 744 bp, Enterobacter aerogenes
atgaaaccgaccaaaaaagctgcacaaatgactcccgctgagctgggacagtacattgatcagtctgtacttaaacctgagttcactgttgaagaagtacgcaaatacattcaggaaggcattgattacaaatgcaaaactgtatgtatcaaccctgcatatatcgatattgcacgtgagatgtgtaaaggtactggcaccgggatttgcgttgtatgtgatttcccattcggtgtttcttccaccgaatcgaaagcacgccaggcagaagtaatctgtaacaagggtgacgtggaagatctggatatcgtcgctaactacggtttcatccgtagcgggatgtgggatgagtttgaagcagatctccgcgccgttactgttgttgcgcatcgttatggatcactggttaaagttatttttgaaaccgatgccctgacgactgagcaggttgcgctcgcaactgaatatgcctgccgtgccggtgtggacttcgtaaaaacatcaaccgggttctttaccggtggggaaagcaaaggtgcaacacctgagattattcaggtcatgatcgatgcagccaaagggcgctgcaaagtaaaaggttctggttgcattcgtacccgtgagcacttcctccagttgatcgacatgggtatcgaccgcatggggattggatatcgatccacgccagttgtactgggcctggatgttcagtccggtagtgctgatacaaaaagttcttattga

SEQ ID NO: 105257 - DNA, 819 bp, Enterobacter aerogenes
atggatactgggcaatatatcaaagagaattttcgcttcagtgaggattcaactacgtcaatgtattctcaactggcgtcgtttgtcagacatcaaatcaagcttggtgtgttcaagaccaatgacagaatggtgactgaaaacgaactttgcgacattctgaaaataagcagaacgacggtcaggctggcaatgaatgaattgctggaggaaggcctgcttgttcgccaacgagggaaagggtcttttattgctgacagaaagattaatcgcaagctgaatacactctataactttactgacagtatgcgagagcagggtattacgccgcgatctgaagttctgctggcaagcgtgatcgatgcggatgatatggtcgcgaacaaacttggactgccatcaactcaacgccgtattttcatgctgaaacgtgttcgttacggggacgaaaccccacttcttctggaaacaacgtgtattccctataacctctgtcagggaattgaacagtataattttgaaacgaattctctctacgatatcctgaaaaatcagtttggtatggatattgttcatgcaacagagaatattgaagccatcatcatcagtaaagcatcagcgcagtaccttcagtgtgataacaaagtaatggccggttacaggattgaacgggtgtcatatctggatactggctatgtgttcgaatataccacgtcaataactcgcgcggacaagtgtacattccgtattgatctcttcaatgagaacgcacattccctcaaaccgcgtatcggtttctcccgccaactccagcgatag

SEQ ID NO: 105258 - DNA, 1077 bp, Enterobacter aerogenes
atgtcagctttactttttgaacccatcactatcaatggtgttgaattccgtaaccgtattgccatgtccccgatgtgtatgcattcggcctctgatgacggccacgttaatgatttccacgttattcactatggcgcccgtgcactgggaggcgcaggcctaattatgctggaaaccgctgctgtactgccaaacggtccaatcggccctggtgacattggtatctgggatgacagtcacgtaaatggactgtcccgtgtgactaacgcgattcaccgttttggtgcgaaagccggtgcacagatcggtcatgctggtcgtcagttgggtattgatctgccatccattgcaccgtctgcgatcccgttcacacaggagtcccgtgtgccgcaggcaatgagtattgagcagatcaacgaagtcattgaggcattccgccagggagctcgccgtgcgcgtgaagccggatttgatgttatcgaaatccacggagcccacggctacctgctgaatcagttcctgtcaccgctggcaaacaagcgcactgatgagtacggtggtaaccatgagaatcgctaccgtatcgttcgtgaagttattgatgtagtacgtagcgagtggaaggggccattgttcctgcgaatctcttcaaccgattatgttgaaggcggaaaccgtcctgaggatttcctgatctacggccagtggatgaaagaacagggtattgacctcattgactgttcgagcggtggaattgcgatggtacaggtaaacacttatccaaattatcaggtacccgctgctgaactgctgcgtcgggaactggatattaaaaccggggctgttggtctgatcgaaacgggccgtcaggcagaagagattctgcaaaacggtcgcgcagatatagtcttagttggccgagacatgctgaaagacccgttctgggcccgtactgcagccgacgatttgaacgttacccttccggttccagcccagtacacacgctatggttctggctggcagcgctcgcagccacgactgccggcagttgagctgcaaagtactgtagaacattag

SEQ ID NO: 105259 - DNA, 399 bp, Enterobacter aerogenes
atgaagaaattacgcaactacgattcggccccagggtgttcaatggaagctgcattgcatattatgggagggaaatggaagggggtaattctctatcacttgtttaaagacggaacgcttcgttttagcgaactacagcggtttttaaccagcatcaatcagcgtttactgaccaagcaactgcgtgagcttgaagaggatggtctgattattcgccaggtttaccctgtcgtgccgcccaaggttgaatattcactcagtgacgaaggcagggaactgaacaagctggttctcgatctaagcatctggggaagaaagtggcttgaacgtcgcggtcttaaaacggctgtcgaagaggatatcgaggagctaaagaaggtcctcggcaatccgaaatga

SEQ ID NO: 105260 - DNA, 885 bp, Enterobacter aerogenes
atggatcggtttagttgcatgaagacgttcatcagaattgtcgaggctggcacgatttcatcagcggcaaacgagttggggcaatcctcccagctgacagggaagcaattgcgcactcttgaacatagccttggtgtacagcttatcagtcgtacgacccggagtcagagccttacagacagcggacatctattttatgaaagagcgaaaattattctggcagaaatggaagaagcggaaaacttgatttccgaaacccgggcaatcccccgtggcaatcttcgaatcagtgcaccaataacctttggcagtcaggtgcttgcctcgaagctgccggaatatctcaaaaaatatcccgaagtttcgcttgaattatgtttgtcgaaccggactgttgatctggttgaagaacgctttgatgccgtatttcgtacgggggaactgcctgacagccagttgcttgccagggcactggcgccttatcagatgattatttgtgctgcgccagaatatctcagacaggcgggcaaactccgtgtaccacaggatttaaaaaagcaccaatgcctgatatttacacatacttcaatgcggacggaatggatatttcagggtcccgatggacaagtatctgtccccgtcaccggcaggtttaaaaccgacaacagcgaagccttactcgctgccgcactctcgggactagggataattatgcagccgtatccgctgatgagtgcggagattgctgccgggaggcttgttcggatacttccggattatgaagtgccgggccggccggtccatgttctttatgctcaggacaggagaatgacaccacggttacgcagttttatcgatttctgcactacccattttagccagtag

SEQ ID NO: 105261 - DNA, 768 bp, Enterobacter aerogenes
atgaaaaacgtatccctgtctttgttgatggtggcagccatgagctgctcggcaatggcaacaactcctggcgaaacatcaaaaaaaccgaccgtggttcttgtgcacggcgcctttgcagacggctcagcatggaacaaagtcattcccctgcttgaggctaaggggctggacgtggttgccgtacaggatccactcaccacgctgtcagatgatgttgcaacgacacgacgtgcgcttgcacggatcaaagggcccattgttctggttggacattcatatggtggggcagtaattactgaggcaggtgcgaataacgataacgttaaggctcttgtctatgttgcagcattcgctccatcggtgggggaaactgtaagtgatttgaacaaaaactatcctacatcttcaggcttcaaccacatagaggccgatgacggcggttatctgaagcttacccgtgaaggtgtagctaaacatctggcgcaggatgtgtcggccgagcaagcagctttgatgtatgcaacccagaaacctacaaatggacaggtatttggagaaaaaataactgatgcagcctgggagaaaaagccatcctggtatatcgtcagtctccaggatcatatgcttaacactgatctgcagaaagccatggcaaagaaaattcatgctaacgtgacgacactggacgcaagccatgctcctcatatctcgcagccagatgccgtagcgaacgtgattcttgatgcggtaaatacccataagtaa

SEQ ID NO: 105262 - DNA, 561 bp, Enterobacter aerogenes
atgccatctgtatacacgctcaatgagctgctcgggttgcttgtgttttcaggaaaatatcaatttcttcacaatgacctggacagcatgatcattgcatgggctgaagatcaaattatcgaaggaaatgattcggacactcttttaatcctcgcttcactggggcttgataatcaacctgtacgggccgaggttgaattatatatgtcacggtacatggcagagcagcagataaacctaccaccgctaaaaacagcagcattggtctggatcacgctatttatgagtcaactttcccaatgcgcttccatccatgatgcagagcagaaaatgtattttctggtgtgtcattggcttgaacctgacgtaaagattttcactgcagtggtcgataccttgaaatcgctttactggcatctatttgatgaatgggagggacctggaacaagcgaagccgtaaggatggaggagtcagaattctttgagttgattaatagtgcaatgttgccctattcacgtaaaattgagaacccagattggttggatctgcttgttcggtaa

SEQ ID NO: 105263 - DNA, 933 bp, Enterobacter aerogenes
atggaatggagatttttaggttctatatcagatgccagaaagttcggctgtagtggggtttatcttatcgttcatcaagggatttttaatcgtgttgtttatgttggagtgagttgtaatgtagggagaaggataagtgaacattatgaaggttacctgagaggaaatcgaacaatttacaatgcaggtcacaatgatgacgtatatcgacttatgtcaacttacaaaattcgaaatcatataaaacactatcagtccttggcaaaggattatgaaatatggggttcaactacactgcattttgattcacccataaacatattagcaaaaaaacagacttttgatgccaaatgggagagtattgcatttgaaaagtacatgcctcaactggtcgtatgggctctgccaatggccaattactgttattcaaatgcaactaaaattgaaagtgtaatccaatcaaagctaattaaatcttttgatttaagaggtttttttaacgctaaagatttaagcattttgggtgaaattgagaaaccttatttagaaaatattaaatattttattattgattctcctgatgtagatgcagcatccaaacttatttttgataatttatttttaaaaagaatcgatcgcaactttgtcaaagaattctattcacaatttgaaagtgaaatttttcaaagggaaaaagaaaccctgagaaaacgaacaactaggaatcatatggtttctctttatgaaaattatggaaaaccttggactctaaaggaaatggaaaaactaagagtcatgttagtagattttgagttgtcaccaacagaaatatctgattaccttggaagggatcctcgctctatttctaaaaaaataatcgaaaatgataaagttactaatcataagtggcgaaagagcgtcggatggttatga

SEQ ID NO: 105264 - DNA, 1149 bp, Enterobacter aerogenes
atgtcaatgaacgaaaccatcgaaaaacttatagccagtggaaaggaagggccatggtgggattttaaacaaatctaccaccaaaacaatgcaactcttgttcacgatattctctgtatggcaaacgttctgcatgacggagaccggtatctgatttttggcgtcactgatgaagggctgattgtcggcttgccggaagatggtaagcaattttaccaagcaaatctaatcgacttgttaagaaaagtgagtttttcagaaaaccaatgtccggatgttcagctccaccacataacactccagcataagttgctagctattctacaaattcgtaacgtcagaatgaaaccttactatctgacccaggactatagaaaggagggaaaaactgtcagagccggtgtcgtttacacccggcaacaggatgccaatacgcctgtagatggctgtgccagccctagagatgtcatgggaatgtggagagagcgctttaacctggatctgacacccgctgaccgtattgtcagtctacttctggattatgacaactgggaatacgacggtatcagcgagacctattatcggttggacccggattatgcgattcatattagcgacacagaaaaagatatagggggacaacactggtggtcaacgattagcattgagctaccttgtcactatgaatacatcctcaaataccgtgggcgtgtacttgaacgagtgccaattgtacattacagaaatgaaggtttaaagtttccttttcctgagatggacacgctggcttatccagaaaaaagagatggatccgtgacagattactatgcagacgttttttactttgtgaaaaacacactacattacaatctcttgagccatatcagagaattctgctctctgcctggacgttgttcaagcataaccatgccgttaaccacccagaccaagccgccgattatcgagctgccgttcatggtgtttgagaatacaagggaaaaagatgagaagatgaagtttattcaaagtcatcttgctgatttttgtccggatagcatgccagatacaatgtcgatgaaaaataacctggaactaagaatggacgtagagaggcaattttcctggtgggtttttaaccatctacgttga

SEQ ID NO: 105265 - DNA, 804 bp, Enterobacter aerogenes
atgtccagcacagcgccaaattattcgttcagattaaccccatacacagcttttgttaaagggttgaccgatgttaactccaatgactttgatatttctgatgagtcagactccgacatcggatgcaacgatctacacgtattaacatcaccacatataaacagtctcactgatgagaaggaagttactcggaagctaaaaggtttgcttatgctaattaatggtgcactctcaataaattttggatttgaaagatttgaaaggttaggcccattaggaatagatgcatctgagggcatcagtttatcgcacattactaatattgaatctttggatatagagcagtcatctccattcgcttccggcgttgacatgaagcctgccaccaatgctcagggatattccaaattagtctatgcagcctctcaacgatatgatgtcagggttattttaggtatgtgctcaatgaggcatgactgggttaatttgtacagattatgggatacactgtcgcacttcatttctgaagagtacagcaacgataatgcatttatcccggacataaaaaaaacaaaaccacaaaccaaggatttagtttcggcgctctgcggcatacctttagccgatattagcgcattcactgctacagcaaacagcttcgaattgcttggtctcgcatcgcgtcatggaattggtggtaccgggagtggtggaaatccccaaaaaacaatgaatcgttcagaggcgatgaagtttatctggaccatctgtcaacattacttgagacgaacaagagccctttga

SEQ ID NO: 105266 - DNA, 675 bp, Enterobacter aerogenes
atgtcgtcgctttctctgaaaagcctgaaaacagattatatcgatctcttttatcagcaccgtgtggatccgaatgtaccgattgaagatgtcgcgggaacgctgggagatctaattaaggaaggtaagatccgtcactatggcttatccgaagttggcgctgcaaccattcgtcgggcacatgcagtcactccagtcgcagccgtgcaaaaccagtactctttgtggacccgtgagcctgaagcagaagtattgcccgtttgtgaggaactgggaatcgggtttgtgccatggggacctctggggaccggattcctgacgggaacgattgatacctcaacaaaattcgatagcgcgactgatttacgagcaaacttcccgcgcttcaccccagaggcaataaaagcgaatatgccgctagtcagcatgcttcgagaggtagctgccagaaaaggagcgactcctgtacaggttgctctggcatggttattggcacaaaaaccatggatcgtgccgattcccgggatggataaagtggcctatatcgacgacaacctgaaagcgattgagcttgaattgagcgcagaggatttggctaatatggatgctttgttagcaagcattaagatccaaggtaatcgcctggatgatggtttgctttcgatgtcagaatga

SEQ ID NO: 105267 - DNA, 1065 bp, Enterobacter aerogenes
ttgaagacaatcttaaaaacgctgggcacctgcatcatggcgggtggcctggtggctcagtcggtatatgcagaaccgctggtcattcaggaacagggaagcttctctgcgggtggcactatcatcaccgcacctggaaaatttgacgcgaaaaagccgctggattcagcggaccaaacctatcatggcgatcatgcgtctgtgttctaccaaatccctgagaatccgcataaataccctatcgtcatgctgcacggtgctggtcagttttcccggacctgggaaagcacgccggatggtcgtgaaggttttcagaacatattcctgcgtcgcgggttttccacatatcttgtcgatcagccgcgtcgaggcaacgccggacgtactaccgtagaaggtaccgttacgcctaagccggatgagcagatgtggtttaatcagttccgcgtaggtgtgtggccaaagtattttaaaggtgttcagttctctcacgacaaagaagccctgaatcaatatttccgtcagatgaccccgaataccgggccgtttgatatcaatgttatctctgatgcgatgtccgccgtcgtagataaatccggccctgctatcctgttcacccactctcagggtggtggacctggctggtacacggcaatgaaaaacgacaaggtcaaggccattgtcgcttttgagcctggcagcagctttgtcttcccggaaaaagaactgcctgcccctatgcctagcgcattcgacacgctgaagggtgtgcccgtgccgatggaacagtttttggcactgaccaaaatcccgattctgattatttacggcgataacatcccggataaacctgtcgccatgcccgcacaggacagctggcgagtacgcctggcaatggcgcgtgaatggcgtgacgtggtgaataaacatggcggagatgtcactgtgacgcatctacccgaggtagggatcaaaggcaatacccacttcccgttctccgatcttaataacgtgcagattgctgatttggttagcaagtttcttaaagacaaaaatctccagtag

SEQ ID NO: 105268 - DNA, 852 bp, Enterobacter aerogenes
gtgcaaacggtaaaactgaacaacggtattgaaatgcccctggcaggtttcggcgttttccagatgacggatgcggctgaatgcgaacgtgcggtgattgacgccatcgaaacgggttatcgtctgatcgatactgccgctgcctatcagaacgaaactcaggtcggaaatgccataaagcgtagcggtgttgatcgcaaagatctgtttatcaccaccaaactatgggttcaggatgtgaattatgagggcgcaaaagcccagtttgagcgttcaattaaccggctccagctggactatatcgacctgtatttaatccaccaaccctacaatgatgtccacggtgcctggcgagcaatggaagaattgcttgctgccgggcgaattcgcgctatcggtgtcagtaattttcatccggacaggcttgccgatcttatcgcgttcaataacgtcgtaccggcggtcaatcagattgaagtaaaccattttaatcagcaacttcatgccgcaccgtggatgctgagcaggaagatccagcctgaagcctgggcgcctttcgccgaaggaaagaatggattatttgagaatccggtgctggcggccatcggccagaaatatggcaaaagcattgggcaagttatcctgcgctggctttatcagcgaggcattgtgtcgctggctaaaacggtcaaaaaatcacgcatggaagaaaatatcgctatttttgattttgagataagtggtgaggatatgcagaaaataaccgctatcgataccgcgacgagcgcatttttctcacatcgcgatccggcgcgagtggaatggattgcggactggaaactggatatctga

SEQ ID NO: 105269 - DNA, 990 bp, Enterobacter aerogenes
atgcaaaaacgaattctcggtaattccggacttgaagtttcggccctgggcctgggctgcatgggcctcagtcatggctacgggccagctacagaaacgcgtcaggcagttgaacttattcgggcagccgttgagcgcggggtcacgttttttgataccgccgaagtttatggtccatatgtaaatgaagaagtggtgggcgaagccttaaagcccttccgcgaacgcgtaatcattgcaaccaaatttggttttactttcggcgaagataataaacagcaaattttaaatagccgcccagagcatatacgccaggcggtggaaggctctctacaacgccttaaaacagattacattgacctactttatcagcaccgtgtggatccaaatgtccccattgaggatgtagccggtacggtgaaagaccttatcaacgaaggtaaagttaaacatttcggtctgtcagaagccggagctcagaccattcgtcgcgcacatgccgttcagcctgtagccgcacttcagagtgaatactcaatgtggtggcgtgagcctgaacaagagatcctgccacttcttgaagaactcggcataggatttgtccccttcagcccgttaggtaaaggatttctgacaggaaccattaccgcttccacagcctttgcagagaatgacttccgccgtaaagtccctcgcttcgagactgaagcactggaagccaatgaacaacttattgctcttttgaacgtgattgcaaaagacaaaggcgtcaccgcggcacaaattgcgctggcatggttgcttgctcaaaaaacctggattgtccctattccgggtacaacaaaacggcatcgtttggaagaaaacatggccgcagcggatatatcgttttctcatactgaattgctgaagataaaagccgccctcgatacggtcaaaattgtcggcgatcgttaccctgcctcattgcaggctcgcgtgggccgttag

SEQ ID NO: 105270 - DNA, 1056 bp, Enterobacter aerogenes
atgattaagacgatcaaagccattggtaccgatgcggcaacgaatcctctgaaagaattcagcatcaaacgccgtggattattaaatgatgatgtggaaatagaaattctgtactgcggcatctgccactcagatttacatcaaatcaaaaatgattttggcggtacccattatccggttgtgcccggacatgaaatcgtcggccgggtgatagctgtcggtgagaatgtaaccaaatttaaacccggtgattttgccgctgtcggctgtatcgtggattcttgcggcgaatgccctgcctgccgccacgatctggagcaattctgcgaatctgggacgacattgtcatttaacacgccagataaatatctgggtggcatgacctacggtggattttcacaaacctatgtttgccgggaagactacacgctgaaagtaccagaaaatttagatcttgccgccgcagcgccgttactttgcgccggaattaccgtctattcgccactcaaacactggcaagctggtgccggtaaagttgtggggatcctgggaatcggcgggcttgggcatgttgcgataaaaatagcaaaagcaatgggcgctcatgttgtggtctttacgacatcgcagactaaagtcgaggatgcgcatcgcttaggcgcacacgaagcggtgctctcttccgatgcggaacaaatggcaaaatttgccggtaaactggacctgattttagataccgtatcggcaaagcatgatgttaattcatatctgaaattattaaaaattgatggttccgttgtgcttgtcggactacctccagagcctattgagatttccgcatttaatgtcgtaaaaggccgtcgtagcttctcaggctccaatattggcggcattgctgaaacccaggagatgcttgatttctgtgctgaaaacaatattaccgcagatattgaactgattgatgccagccagataaatgacgcattcagcaggctggaaaaaggtgatgtaaaatatcgctttgtggtagatatgacaacattgaaatctcaataa

SEQ ID NO: 105271 - DNA, 366 bp, Enterobacter aerogenes
gtggtcggcctgctgacaaccatcggtttatcggcgaagaacgcgattcttattgttgaatttgccaacgacatgatggtgaaggaaggcaaaggtttgattgaagcgacgcttgaggcggcacatatgcgtctgcgcccgatattaatgacctcactggcctttatcctcggggttctgccgctggcattaagccgtggtgctggttctggcgcacagaatgccgtcggcactggcgtaattggtgggatggtcgctgcaacgctgctggctatctactttgtgccagtgttctttgttgtggtacgccgccgctttaccggcaagcgtatcactgatgacgaggatgatgaggatgatgagtaa

SEQ ID NO: 105272 - DNA, 894 bp, Enterobacter aerogenes
gtgcttaaagaaaactttaatgaacttcagctctttctggccgtggcgcgggagcgaagttttacccgagcggcggccaaacttggtgtttcccagtcagccctgagccatgccatgaaggcgctggaggccaggcttaatatccgtctgctgacacgcaccacgcgcagcgtggcacctacggaagcgggggagaggatcatcgcctgtctggagcctcgtctgacagagctcgaacaggaactggaacagctggtacagctcaacggcgtggcggccgggaatatccgtatctcagccggagagcatgcggcgaaaagcctggtgtggccgaaactcaaaccgttcctgcgtgaatatcccgaaattaatgttgaactggtggtggataacggctttgtaaacatcgtcgaaggccgttttgatgcaggcgttcgactgggagaaagcctcgataaagatatggtcgcggtgcgcatcgggccagacctgcggctggtcgtggtgggttcgcctgactattttacccgctatggcattcctgataccccacacgatcttcagcaccatcgttgtattaatatgcgccttccgacactgggcggcttatatcagtgggagtttgaaaaagacggaaaaccgcttcaggtaaaggtggagggccagcttacctttaatcacctctcggaaagaatcgatgcggcaaaagacggcttcgggctgtcgtttgttcctgaagacatgattcaacagcagcttgaatcaggaacactaattgaggtattgcaggagtggagcccggtatttcccggctattacctttactatcccagccgaaaacagcatccacctgcgtttgcgttgatgattgatgccttacgttacagcgcttaa

SEQ ID NO: 105273 - DNA, 771 bp, Enterobacter aerogenes
atgaaagtcttaattgttggcgccaccggcagtattggtcgtcacgttgtagaaatgtcgatagaaatgggtcatcaagctaaagcccttgtccgctccccgcaaaaaagcaaactgcttccacagggaattgaaattgtttatggcgacgtctctgtaccagaaacattgaccggcattggtgatgacattgatgccgttattttcacactggggtccgatggattaggccgcattggcgcgcgagccattgactacggcggtgtcagaaatattctgcaacaattaaagcatcggtcagtcaaagtcgtgctgatgaccgctatcggcgtgacagaaagagaaggttcctataaccgtcagacgcaagcgcatgactggaagcgacgcgcggaacgcctggttcgcgccagcgggcatccctataccatcgtcaggcccggttggtttgattacaacaaaccgaatgaacaacacatcgtcatgctacagggagacagacgtcactcaggtaccccggctgatggcgtgatttcccgtacacaaattgccaaggtactggtttgcgcattaacagacgacgacgctaagaataaaacgctggaactgattgccgaaaaagggaaagagcagcagagccttaccccgcttttttcagccctgcaacaggacagcacaggtaaaaatgatggtattcaggatataaacaatatgcccctggactcagagcctgagtgcgttattcgcgatctgagtgcgatggcgcaataa

SEQ ID NO: 105274 - DNA, 567 bp, Enterobacter aerogenes
atgtcagatacagcgttataccaaaagttatccgcaggcgagccggtcaacatgcggtctccagaataccgtgaagctattcaggatatgagccattcatggtcaattaatgcgtcaattaatcgggcagaatatgcatttttggacggttctttgcatccgttatttaccgcactttttggtcgggaaatggagagtaccagccagattttaccgcctgtttatatcgattttggtcgccaggttcaggtcgggaaaaatgtattcattaaccataattgcaccatgatgtctgctggcgggattgtcatcgaagatgatgtccagataggccctcaggttacgttgacaaccactaatcatgatttcgacgatcggtttaccctgctgtgcaagccgattcaaatcaaacgtaatgtatggatcggtgcccgggcgcttattttacctggcgtaaccataggtgaaaatgccgttattgctggcggcgcggtggtcactaaagatgtggaaccgaatgttgttgtcggtggctctccagcccgagtcctgaagcgtttggattaa

SEQ ID NO: 105275 - DNA, 906 bp, Enterobacter aerogenes
atgttagataaactcgatgcattaaagattttctgtacagcagcagaaacattgaaatttcgagaaacggcaaatcgacttgggcttgcgcctcagatggtgacaagggctattgctgagcttgaacaacagctgggggaagtcctgttccttcgcaacacccggcaaatgacgttaacccctttcggacagcaactgtggccaaaggccgaattacttctttcagaaagtgagtctttgttcgcgggagggagaaaacaaaacagccaggatatgaccgggcgcgtgcgcgttacattgccgccgctgttcgaaaatcaggatattgtgcgccacctgctccgttcgcttgaaccttaccctgatctaacgattgaatggctccctgctgatgcgcatctcaatattattgatgagcaaatcgatattgggattcgaataggtgcaattccggataatcgatttatcgtaaaaacgattcgacccgttggcatcagtatcgttgccgcacccgatttagttaagcggctaggaatgcctgattctttgaaaacattgcagtatgaataccccctcagcgccctgagtaacagcaactccggccgtgtatggccctggcagtttgctgatggcaattcattttttcctgcaaagcccaaatttatcgccagtgatattggcagcgaactggctgccgcactggcgggaagaacctgtagccaattgccggatatcaccgttcgtccatatttacagcgcggagaactagttaatattttccctgagctaaattattccccctggcagctatacatattccggccgcaccagcccttgattcctatgcgcattcgggttgtttttgataatctgactaaaatccttcatgaactgttcagagaatag

SEQ ID NO: 105276 - DNA, 933 bp, Enterobacter aerogenes
atgtatgcccgcgagtctcgccccacgcgcccgcgcaggacgctttttaccattttttcttgccttccccttatctacagcgcgcaaggttttgccaggccggatatgcaaccgctggggccgaatatcgccgataagggttcagcgttttaccacttcagcgtccatcagttcgattccgccgacggcgctcgccactatcgggtatggacggcggtaccaaacaaagccgcgccgcccaccggctacccggtgttatatatgcttgacggcaatgcggtaatggaccgtctgtctgacgagctgctcaaacagctggcggcgcaatcgccgccggtgatcgtcgcggtcggctatcagaccaacctgcctttcgatctgaagggccggtcctatgattatacgccagccatcaaagggaacgacaaagcaccgaccgatcgcaaaagccgcggcagtgaagacttccgtcaattactggaaacgcgtatagccgctaaggcggagcaagggctgaaaatcaatccacagcgccgcgccctgtggggccactcttacggcggcctgttcgcgctcgactcctggatttcgtcctcgttcttccattcatattacagcgccagcccatcgcttggccgggacaactttgccctgctgaacagcatcacagcagttacacctgcgtcgtactgcgccaaaagtctgatcattatggaagggtcagcgacgccgggcgataagcgggattcgaacgctgatcaagtgctaacaaaagtgaataccgcgataacgaccctaaaagagaaaggcgtcgatgccgctgtttgggatttcccgggcctgggccatgggccgatgtttaatgcctcgtttcgcagcgcgctgttagatatcagtcgcgaaaaggctgaaggcaaacaaggctgccactaa

SEQ ID NO: 105277 - DNA, 981 bp, Enterobacter aerogenes
atgtatacatatcaacaggctttagaaactttacctgatggagaaaaaccatcattattgatgggtaatggtttctctcaagcatggtcttcagcaatttttaattatcatagtattttcgacaagtctaattttggtgatcatgacgaattaattagacgattattcgcggagttaaatacttatgattttgaatccgtaatggataaattatcatatgcaagtagaatactccaacattacgatccacagagcgctatcctgccattgatcagtgagcaccaaaacgccttaaaaagagcattaattaatgccatttcagaatcacaccctttgaatcctaatgaaatatcagatgaacaattttcttgtgcaagaacatttttatcaaaatttaaagggctttttacattgaattatgatttgttgatgtattgggctagaaataagaaagaccttgaacctcgtggattcgatactgatgatgggttcagggctggacgcatctggcaacgttatgatacagatcaagaagtctttttcttgcacggagctatacatctttacgaacagggttccttaataaagaaacacgctaatggtgataatggaaacaccataattcagaatgtacaaataaatctttatgaagatgcgtttccattatttgtgtcagaaccaacaagtgataaaaaattagagagaattttacacaacccttatctcaactattgttactcggctttaagaaagttgaaaggcacattattcatatacggtcattctatggatgaaaatgacagccatatatttagccaaattcaaaacagccaaattacaagaatttttgttagcatttacggcgatgaggattcggtggataatagaagagtgaaagccaatgcccaaagatttctatccaaagctgggtgcgtggttgagttttttgacgcaggaagtactcctatatggaatgtttga

SEQ ID NO: 105278 - DNA, 150 bp, Enterobacter aerogenes
atggcgagatcgattcctgtgaatgtagatgataattatttatgcctcagtccaaatccggaatgggtgacggaacgcaggcaaaaagcgattctctcgcagcaattatgtcggtttaatgacgtcaagctggttgattcttttgtgtga

SEQ ID NO: 105279 - DNA, 1263 bp, Enterobacter aerogenes
atgaagctaactgataccaaaatacgcaaaacgaaaccagattctgagaacgggaagattatcaagctaagtgacggcaacggcctgtattgctggatagatccgaacggttcccggtactggcgtttcaggaaagtaatcaacggcaaagaaacaactcgcgctttgggtaagtacccaattatgtccctggccgaagcacgcgccgcccgcgatgcttacctggctgatcttgctaagggaattgatccccgtcgtgtcgtcccggaaaaaataatcacgtttgaagacatcgcccggacctggcatgaaaggaaaaagaaaggatgggacgaagaccacgccgctagcgttcttcgtggcctggaaaaacacatttttcctgttattggtaatgcttcgataaaagacctgacaacccccgatctgttagtaccattaagaataatggaagaaaaaggtattcttgaaacaactgcacgccaaaaacaacgaataaataacatcatgcgttatgcggtccagtctggttatatcaagtataatccggcacaagagttagagggcgcgatagaagttaataaaacaacacatcatcctgggttaactgctgatgctttgcctgattttttaaagcgcattgattgttattttgataataataatggaaggttgctcacccaatatgcgctaaatctgaatttattaattttcattcgctctagtgaattacgctttgcacgctggaatgaaattgattttgataacgcattgtggacaattcctcctaagcgtgtacctatacccgatgtgaaattctctcaccgtggcagtaagatgaaaacaccgcatgacatccccctaccccgtcaggcggtaaaattattaaaagagataaaaaatatatcaggtgattacgagttaatttttcctggtgatcatcatgaatcaaaaccaatgagtgaaaatactataaataaagccttacgcaatttaggatatgacaccaagaaagatgtttgcgggcacggtttcagaaatatggcctgcgcagcgctgacagaatcaggcaaatggacgcgggaagctgtagagcgccagatgagccaccaggagcgtgacgacgttcgcgccgcgtatgtttatcaagcgcaacacatgcaggaacggcgcaaaatgctgcaatggtgggcggattatctcgatcattgccgaaacggtttcaccccgccctatgagttcaaatggcgttaccgtaaatga

SEQ ID NO: 105280 - DNA, 1326 bp, Enterobacter aerogenes
atgcaacatttccaagctcactctaccgatgacttgcgtcatttaatcgctgaatatgggcaaaatgcgctatttcgtggacaaaccacccactacggccagccaggtcacccctctgttgtcgcatcctccgatcgtcaagtatgtcatcctagtacaatgttaaaatggtgtacctactctcgaaatgtccttgagactttccttggcaggcataaaaacgagccgcattttgtccaagctcttctccagcattatggatggcggtcgttttacgttgattgttccgcaaattccgcagtcagcacatggtttgctagtcatatataccgcgaagataaacatattgagatgagtgaagactgtaatgaagagccagtcttacttctcaaacgcctcgcatcatatgattttgaggacggtgacggtcatctctacattatcgacaaagaggaggccttaaaaattggattagtcgatctttcttcagtgacgcttcctggttgtcgccctcgtacaatcgctcaggaagcttggttactaggaccactattaggaaaccccgtccccaaagaatgttttcgtgctcagatcacagccccgcgttcagtcttacgggactatgcattttcctctggctttacttgcatagatgatatatttccatccacagtagaagatccaatcctcaatgctttactgagtttgccttggagggaaatcaaagaagcatgggatcctgatttccctattccttggttcaaacgaaccctgagcctccctgaatatcaggatagttttgtaaaaatagcatggcctcataccgcatttttccgaggaacacgtctgtctgaacgatttagttcggtcgatggaaatgcttctggcggaattattattccagttccggacgtcgttttttttggaactgcacctgaaactatccctcttcgttttcctgaactcgaagccttattgcttaagtttggttcagtcattcttgaactggatgaacttatccagcataccagtatgcaaaacctcacctactaccaaaaaggtgtcagtgtcgtaatgattgaagccgaccttattcaggtatcagaactcatggttgaacatcccggacaagaaatgacagcagcaggattagtctatggctggtattaccgaaaaagtgaaagcggattatggtcaagagttgcacatcctgatgaatgtccctgtaatgatgcctttacacacaatcgacatttatcagcactgaaaattgctgagaattttctccatagctcgccatttgtggaggaaactgatacaccgtga

SEQ ID NO: 105281 - DNA, 1515 bp, Enterobacter aerogenes
atgactacatacgaaaattacaatggtatttttttgacaaccaacagccaattttccggaatactcaagattgcaggtgaggacagtattctgagacttgttggaaagactttctgggaatgccccgaaactgaatgtctcgatattcatggcatgctgaatgacggcaaaaaagtttcgcttcttgactgcgtacttcacggaaatacacaacaccgttttgatgagaactcacaattcgagagcatattttttccgcactttattatcgtgggtgaagaatatttgcggtcagatgaaccggtgatcaaggcagtacgctaccattttgaaaatgttaactgtcttattggcgggcacgaaacctttcaatcattgcatccggatgtagacgaaatccgtcagattttaaatagtgagtataaacgtgaggagaagatcgcgacaaagtatggctggaaaaaacgtccgttcaaacctcagattggggaacatcctcatctactgtatttcagtggcctatgggagatcattgcgagcgagtcaaaacttggaaaagtctcattaacgaatcgtacttctcacagtccgggaagtgctgccgggatcggtatcaaaaacgaagtcaccgctaatatagaattcacggaacctaagacgctggatcttgcggtctatgcacttaagtcattacacggattatttgaattgagcctcggatatcgtcagcgcttctgttggattgaattagaactgactcatcgttcaaaagatactgtaaacgatatacctcaaacagcgcaactgtactggagcctatgcaataatcgggttgatggcgaatcaaaaccccttcgcaatgacgttctaatttctcctgagcgtcaccccgaagaatttgcgaaagtagtgtctggatggatgaatagcgtggatgaactgggtgacccaagaacacggtttgggactgcgttttatggatcttacagcatcgatcgtatcgtcggtgccgcaaacatgtttgatttgctcccagcaactcacgtacctaaaacgctggaagctgatgtcgccctaaagcaggcagtaaaacaatgccgcgagatatttctaggactcccggacagtccatcaaggcagtctattctctcagccttgggacgcgttggccaagccagtctacgagataaagtttattaccgagctaagaaagttgctgaggcggctgaaggcaaattccctgagctaaaactaccatgtaatcatgcagttctggcacgcaatcactacgtgcatggcagtaaaggagcgttcgattatcaaaagcattttggtgaattcgcatttattatcgacacattggaatttgttttcgccgcctcagatctccttgatctgggatgggaccttaagaaatggatggataatggcacatcaatgactcatccctttggtgcttattttgttaattattctcataatatcagaaacctaaaagctcttgtgggaaagtag

SEQ ID NO: 105282 - DNA, 2700 bp, Enterobacter aerogenes
atggtcgttggttcaagatggtacagattcgatttccacaatcacaccccagcttcagatgattatgctgacgacgcactgacggacagagcatggttactgtcatatatgcgccgacaggtagatgtggtgatcatcagtgatcataacactggcgccagaattgattcgttaaaagccgagttgcatcgaatgacgcttgatgctgatgaaggaggggtggaagggtttcgaccactgactcttttcccgggagttgagcttactgccacgggaaatgttcacattctggcagtattgaaccctgagtgtaacggtgtgcacatagagcgtctcatcggacaatgtaatggttcagcctccatcccgagacaactacccaatcatcagttggtattgcagaatagtcctgccggaattgttggaatcatcaggcaaaatccagatgccttgtgcatcttggctcatattgatgctccgaaaggtgttcttaccagccagcggaatttagctgagttggaggcgacctttgctgccggtccacacgctgtggaaattcgttctgatcctgcggagatagtgaatggtacccacattaggctaataaaaggtcttccttggcttaggggatcagatgctcatgagcctggtagcgccggtattcgtacatgctggttaaaaatgtctgagccaaactttgatggacttcgcaacgctcttctcgaccatgaaaattgcgtactcttcgataaacaaccgccagcagacccagccctgcatattcgcagcctcagaatacgaacccgactatgcaaggcagaaaacggagcaccagcatcggtaagttttagccccttttataatgctgtcattggctctcgaggtagtggtaaatccaccttgattgaaagcatccgtctagttatgaggaaagttgatggcttgtctcaaaaccactcagagttacttcagctatttaaacaagacgggcggggaatggatggcaattcagaaatagaatgtatctaccgtaaagatgggacagatttcaaattatcatggcatccaggcgatatccatacccttcagacatggcaaaacgggcattgggaggacgatcatcactggtcgcctgaccgtttcgctatttcagtattcagtcagaaaatgctttttgagctggcgtcaaacaatgatgctttcctccaggtatgcgacagcagtccaatcgtggataaacgaacttggactgaacactgggaacagcttattcgcgatttcaaaaatgaacgtattacttaccgtgggctactttcccgacagagtacggcctcggcacttactggtgagcttggcgacattagaaggtcaatcgcgcagctgagtgaaagtgattattttccagttcgcaaccgcctggttagtgctgaaagagagttaaccgaaagcaatgacggtctggacacataccgacagttattagattcactttctgagctgctgccagataccactgagcctactgatgtagaagaggttgtgcaaaaatcagcagcatatgcttccttagaggaacaacttcagtctgctcaggcttccttatgtgtgagcatttctgacattgttactgaacaccgtgcccgtttggatcaattgaaagttaatgcggaatatatgactctggcagagtcagttgacactgaaaaagagaatgtactgaaagaagccgaacagttacgtgcgcagggactaaaccctgatacacttgatgatttagttgaacgagacgaaagggttagcactgcacttcgtgaatatgcagatcttgatggattggtttctgcttcatcaacacgcattgaacaactgatggaactcttgcaagtacatagaagggaactgacagcacgtcggcgggaattcatcgctaccctcaatcttaaagatctggacgttaaaattttaccactttctgcgccaccggaagcggttgtcactagctaccagagcactacaggtattaataatttcggcgatcgtatatacgatacggaacaacgtagcggactgcttgccggattaattaaccttaacaccattgatcaacgccctgctgtgacagaacagaaatacgccctcctgcaaacgctaaaaaatctgcacacggatataaaggaaggtgtggaaggtagtgcacaggacattcatggtgctttttccagacgactgggtcagctgactgatgataacctggatagtattatgtgctggttccctgatgacggtatttatatccgctatcgtgctcacagtggaaatctggaagatatatcactggcctctccgggacagaaaggtgctagcatgctgcaatttttgctttcttacggcacagatcctctgatactggatcagcctgaagacgatcttgactgtatgatgttaagccagagtgtgattccggcgattgtttcgaacaaacaacgccgacaactgataattgtttcgcattctgcccctatcgttgtcaacggcgatgctgaatatgtcatcagtatgacacatgaccgtcatggattaagacctgcattgtgtggtgcactacaagaaacagaaatgaagcaactaatttgcagccagatggaaggtggtgaaaaggcatttagatcccgatttaatcggatcctgagtatcagctaa

SEQ ID NO: 105283 - DNA, 603 bp, Enterobacter aerogenes
atgaaaccaccgtatgtacgctatattaaaacatctgttatagctgttgctataatctatggcatcggtaatctcctgtacgctctggcaaccactccagaccaacctaaaatgcctgaagcaaaggttgtggaaaatatcccccctttacaccaaccagcggaaccatcaaaaccacagacaatcgacatatttccgagaatgtacacaaccggagaagtgtatgcacgatttcaagaacatgaattccgcgcaaaaaatgacttcaaaaattgccgattgatgattacagggaaaataacagatattggtactgttactttcagcaaaaagcctttggtaacattaagtattcccggttctgatgaggggctgaagttcatattcgaagatacggactccaataacgacgaagtagctgcattggatatcggaaaaccgatagtgatagccgggaggaacgcacgctcaggatcctttggtggcgtatttctcgatgattctatactaatgtcagacatgatctccaaggaactacataaacatcgacaaatccttgttcccagtggtggaatttttgacagagttgtttgtcataagtaa

SEQ ID NO: 105284 - DNA, 351 bp, Enterobacter aerogenes
atggaaaataatggattagtcagagtattgaaaaacgaatggttagaatcatcaccgggtaaatgttaccacgggaaatatacgattggacgatttcatctaacagatgtgttcatcgtaaagtatatgatgctggtacatggagttgatatacctaattcatgggttagtaatagtttcactaacataccagatatcaatacccgcaaggttatgtatatggaatgcagtgatctgttatcgaatgacactatgaatgatatccgtatagcggttaaatatccaccagacaacatgagattatatcgtaatagagatcaaataactaatatagaaatcatggaagaatga

SEQ ID NO: 105285 - DNA, 924 bp, Enterobacter aerogenes
atgtcgatcgaatttgacccttatagtttagttgtttctataaacaatcttaatgctaccttaaaagaggttgattattttaaagattatattttgcctatagttagcctgattgtaagtggaatgtttggatacataatcgccattcgcgggtataaatggcaagaatgtgttcagaatgaacgaattaaggttgatacaattaataaaacgataatgatgtttcaggatatgcaaaataatcttgttgcaatcaaagctacatattctgacggtctgagtcatcacccgcttcaaagggcaggttatatgccttttatcatatgtgatgaaacaattatgtattgtgaatcagaacggttggtgcaggttggattaagtgataacactggtagcaaagcctggaagttgttacataaaaagaataagtgtaatattaaagcaacgccgtggcttcaggctcctacaatttttacagttgtttctaattacaatcatctgattgtactgttaaaaactagaaatcaattagatcttgatgttaagtcaatgctatcggaaaagtatggtagtgaatatggtatgggaatgactgaagataaattatatgaggcattaggtaggtctttatttgtgaaatatttcgatgcaacagaattattgatattgcaagtggataatatgattattagtattaatgatttccttactcattatcctaatgaagtgtctttaaaagttaataaaaaatatctatccaactataaagtaattgtaaattacataaacgaaactgctccctatatatctatgcttaaaagaacgccagcgctagatataaaagttatgtcttccttagtaaggatggatactgttgaagcaatgcgaaaatatagggattatacaactatacaaacaaattaa

SEQ ID NO: 105286 - DNA, 255 bp, Enterobacter aerogenes
gtgtggtcagagaagacgggcgtatggggagagaaaggggaggtctacgccgatcgtatcagcaacccgctgcgttttcagggccagtattttgacgctgaaacggggctacactataatcgacatcgttactatgatcctgaaattgcgggatttattagccaggatccgattggattagccggcgggctgaatgtttaccagtatgcgccgaacccgctgggatgggggggatccgtgggggctgagcgctga

SEQ ID NO: 105287 - DNA, 873 bp, Enterobacter aerogenes
atggacctgattaatcacatcccttttggcctcagagcaaaagaccagcagtttgtagacgttgcagatgttccaaaaggcagaaaatgtgggtgcatttgcccgtcatgtcacatccctcttatagctcgccaagggagaattaaccgctggcatttcgcgcacgccagcagaaagatcgaagacttagagcagggctgccagtattcgttttttgtttccgtccgtgcaatggccaaacagattattgagtctggttttcagctttccacgccaggttgcaccttgtgggtttcagagcgccgttatggcatccccttctctgagccattttacgtgacgaaaccagatacgatcactctgagcaaggttcacaaagaatgtctgtttgaagaaacaatggtggatatccgggcagaggtaaatggctatcctcttgtgatttatttctctcacccggaacgcagtgttccattggcactagaggaacctcgcaataaccgatgtggtgttcttgagataaatttggtcgagacaagatcgctgtttcttgccaaaaaagccacatatgatcggtttgaggatgaaatcagatcgttcattaaggagaacgatcatgcaaaaaaatggatctttcatccaagaaaatctgcagccttgaacaaagccagaacaagactcgaagagcagatcacaaactggaggcccccacagcagcgagcaaaaataaacaaaaatacttatgctcgttttgaacagggcgtagaggttcattacgaatgccagatttgcaaaacaaaatggtctgcgcttaaaaacgataagcctatatgccctgtttgtcagattcatttctacgcccggccaatctaa

SEQ ID NO: 105288 - DNA, 957 bp, Enterobacter aerogenes
atggctgcggattctaagtacactcgatttcgttcgtacatgcttgaagataaaggtggttcatattcttactttgatggaaatctttttacattaattgaagcaagactcaacaatgccaatagacagaatttaaatgatgaaatggcattatgtggagtatctaaaatacattgcctccatattacttcttgggatagtgatcattgcaaacattcagaactggaagaaatacttggcagtttcaagccaagaaaaatagaatacccaggatatgagccgcatactgataatggtgaaaagtgtttggagacaatatttaaatatcagaacgaaaatctacgccagagaaataaaaaaattacagcaatttcaataacaccttcttatatcaagagtcttgataaagcaagagcactaaagtattctgatgttgtctataacccattagaaatagacactaagaatgcaaataatagatccacagtaaaaatattcaggaccgggtcatttaacgtgctaagtttaggtgatgttgagagtgaaaacattgcttcatacttaagagagttatccactataaaaaatgaagtggatgtaatgataatggctcaccatggagcagataatggtttcaccacatcggctttcttaaagaaagttaaaccactggttgcagtggttggttctaattttgcgaatcaatacgatcacccaaaacaagaaataagagacatcctgtatcaggaaggtatcaagctttgtacaacaaagacaggtgatgtagttatttattcaatcaaaactaacactggtgaattccgagtagataactacattgcgaaaggtcaagtaattaacagcacgaaagatttcattgcaaagaaaagagagttactaaaacacagtcctgacactcttactgcgaaactaaaatacagcaaaagaatttattga

SEQ ID NO: 105289 - DNA, 1080 bp, Enterobacter aerogenes
atgatttacggaactttcaataaaaaaatatcgttggctttatcaggtggtgggacacgagcaatggcatttcatgcaggtatgttgagattacttgcagaaaagggaaaacttgaaaacataagcaaaatatcaacagtttctggaggcagtttacttgtgagtttaatttatcagaagtctagtggggaatggccttcatccaattattacctctctcatgtttatgatgaggtaagaaatgaaatgtgccaaaaaagcctacagtctggtatgatgaaaatgctcttgaaacctaaaaactggaggtttgcattctcaagagccaatctactttctcaggttttaaataaaaaatggggggtaatatataagctttctgatattcaaaaatatcctgagtggtctatcaacggtacgacagcagagacagggaaaagatttagatttcgtaatgatagcattggtgattatactttaggatatgcacatcctaatgattttttactctctgatgctgtatcggtttcagctgcattccctggtggaattggtccgtattcattgtctacggatcattttcgttggttaaaaagtgagtggggcgataggttaaatagtaacgaggtaagtcttccttataaaaaacttagaatctatgatggtggcgtatatgataatttgggccttgagcctttttttgatcatagcaagcagatcccaaaagaagatagtgaaataataatttgctctgatgccggagccccactgcaagttggatttgatgctttttcactgagcccatggcgattaaaaagggttgctgacataatttcagaacaatcgagatcgttaaggattagggcttttgtaaactacatcatgaagtctcaaaatggattttacttcggcataagtaaccctaatgtaaaaaaacaacatggtgagctttctagtttttcatgcggttattcgacgtcacttaaaaaatttagaactgaagatttcgataaaatcgcagagcatggttatattgttgcaaagaatataaccgaaaatgctaatttttcagggtggtga

SEQ ID NO: 105290 - DNA, 156 bp, Enterobacter aerogenes
atgccaactgttttcccgtatccgaggtgggtgagtcatctcaggattaagaatggcttaggtattattcttctacaggtttacgaactgactgatttcctgaaagtctttatgagtatcggtcagttcgttagcccaaattttcatccattatga

SEQ ID NO: 105291 - DNA, 1671 bp, Enterobacter aerogenes
atggacaatagtttcgatgaggattatatatctggtctgacggaccgagttttcctgataaagagccaactcgaggctggaaaacttcatatcgccagccatctaattgatggttttagagagagttttgataaaattaaattaagaagtgatggcaaagttgatccaaccactgttgatggtcgcatcagagcgatgggagcagctgtaaatcatttttttgaacggaatgaaataaagaaaaaattcaatataactgattttcaagaggcttattatagaattctttttggtaatttttaccaattttatgacgattttattaaaagtaaggcagagccttatcaagtggctcattttatttctgaacaaagtgattttgtagagcatttagatcagatctttcctgatttattatctgatgttaaagggttttgggaggcttcttatgaaattggtgagattcatctacaagatggtgaacaactgaaagcgaattttgcaggtgatctttttcctgcgtatacagaaaacgcggtatcaagtacaggtctttacatagacacgatgatattaccatgtcctattttgagagtaggaagattacatggtgttactaataaaaaacatttttgttttttacttatgaaacatgttttaacatgtatgacctatcgggatttagctttggaagatattgagccagcaatagtactagtacttccagataaacgtgattttcgtgacgaacataacgaaggactgcatgaacgagcaacaccttttattctttctcacgctcaatacttatacgatagaaggttcgagagtaaggacgaattacttgagtttagttcatcgttaagtgatgtggataaagtttttaaagaactaaaacgaccagaaagattagtctttgatgcggaatgggggccaggcggacgggcacaattggaacgacatttagctgatcctgagcgattgaaatcgccaattctggatggtaaccccggtatagaggtgatgtttacatgtaccgggcgtatgccacaggctcttgccgcaagaataaattctcaagattttagaagcacgccttttattaatgcagaaacatcttggatttattatacttggttgatggaatatgaagcacttgactttaaggtcgatgatgaaacattaaaaaatttacatatggttaatgctttgacaaagggaatgcaaggtgagttttcttggttaggagatattccactgaaaaatattttagaaataagacgtaatggattgatgccagaagtgagagatgttttatccagtggggtttctgaggtgattaattcttcaccctatgattataatgcatcttcgcagagagtaattgataatgtagataaagcatttattcaacatcagcgtttccttgataaagttaaacgagaaaaattacgtatcttaggcgttgaggtcgcaccgtttgtcgttaatggtgttttcggtatagcgtcagcattaattaataagccagaactggctatgacaagttttgcacttggaacattaggcttgcctagtctgaaagatataagaactagttttaaaaatagagaagaaaaacttgccaattataaaaagactgctacaggattgatgttcagtaagaaataa

SEQ ID NO: 105292 - DNA, 1659 bp, Enterobacter aerogenes
atgttttttaatatgcttaataataaacaaaaaaagcgtctttttattaatcaagtaaatgtgttttacaattattcgttaggttttgaagttcattcggtagacttattgaagactgctaataaacttcttaaatcagggttttctaaatatgtttgtttttcagattttaagtttttatatctcaatgaaaataatcaaataaaatatagtaatttacatccagaaggaagaaattgggattcttcatgggacataaattttgatgatgatataccaaaagaaataattcctgatttaatgatttcttccgagttgtttttccatgaaaatagactcgtgaatgataatcaggcttacataagaacatcattacctccctttgttctggagataagtaatgagcagtaccctatgtatccgggagtaaagatctaccgagatggaatcgctatcatttattttcaatttgatggtaaatggaatgggattgatgatgacagtttcttatcatcaattataaacatgagtcaaagatattttgataaaatatgggttgatgcgaaacttcaaatgctcgatggtgaagtagttttagaaaatagctttgaagatgttttttcaattggtggaaattatcttgatggaagagaaataagaaaattaaaacaaaagatgcgagataatagcatgaaagtattaactgaatcttttgagaaagaaggttgtactttttcgttcgataatcatagagaatggattttgcaccagattgcaggaacggaggagaatgaatcatgggaatctacgattgaaatgtgtcgttctatatattcaaacgttattggcagtatgttggttccacaatataaaactaataaaactaagtcatatagttatctttggcacggacggccttctgtttctcttttgcgtttcgataagcagcctcaggataagagtgctttgctgaaaaatttttctgaatcgttggctaagtttttgaatagagctgatatcagcgaaaaggaaaactcgttgccgccagatttacggaagtttaatgattattgtctacatgcaaatagatccatttacttatggacttggttaagaggagagaatgagtcagaagatatttgggatgacagaaatacctcatcaagaatacttgaaaatcaggcaagagttgagcaggttgaatatcataacatgagtatttctagagcgtgctcttgggctagtaacccgccatctgaacaacatctatttatctcctatacaacattggcagaaacagaaaataacattcatcatagtagtatatctggcgaaatttccgatacgctttcatatctcattaaatcttttggaaccgagagcttaatttcttctgcgaaagagatggctagatttcgcatggacgaacttaaatacagatcagattcagcaagaaattctagcaactattggttaacatttatcttcggtttggttggtgtaacaagtttcgctgagtttgcagttaatccactaattcttaataaatggagtggaatgaataaagttatagcgccatttatttcttttgggatctctgctgttttaattttagcaatatctgcaattatttggtattacacaaagaaaaaatactag

SEQ ID NO: 105293 - DNA, 1254 bp, Enterobacter aerogenes
atgctgactgatatcaaactgaaaaacctcaagccaaaggacaaactttataaagttactgaccgggatggtttgtatgttgcagtgctgacgtcaggcacagtctcgtttcgctacgattacagcatcaacggaagacgagaaacactgacattaggaaagtatggtaatgacggtatttctctggctgaagcaagggaaaaactccataccgcgaaaaagctgctcaagtcaggcatatcgcctgctgtagacaagcgttacggtaaaaataagctccgggagagtgagacgctgacggtatataccgacaattacatgaagcatgtaacactggcggacagtaccagagcgatgaaagaagccgttattgagcgagatatcctgcctgtgctgggcaacaaattaatgaccgaaattactacggcaatggtgcgcgacctttgcgatcggataatagatcgaggaggtaatgcaacagcggtacaggttcgcgagataatcagcagtgtctatcgttatgcaaatgatcgagggcacagtttttctaatccggctcaggatattaaagctagttctatcgcaacgttcactcccaggctcagaagcctttccccgcgagaagttggcattttcttcaatacactggataccgttgcagggatgccaacgctcaaactggcgttgaagattatatttctgacaatggtacgtaaaagcgagttcactttagcgacctgggatgaggttgatttcaaaaccaacgagtggaccattcctgctggccgtatgaaaggaggccggactcatgtcatctatctttcgcgccaggttaatgatttgctgataggcctgaaaatgtgtgccggaggaagtccttacttacttgcagggcgctataacatcaacaaaccactgtctaatgcagccctgaacggcgttatcactacaaccgtaaaagtggcacagtcgcaagggaaggagctggagcactttactgtccatgacatgcggcggacggctagcacgttattgcatgaggcagggtatccatcagactggatagaaaaatgcctcgcgcatgagcaaaaaggggtgagggcaatttacaacaaggccgagtacgcgcgaccgcgagcttacatgttgcagcagtgggcgaatatggttgatggttggattgctggaacaacagcgacgctcactccgttttcaccgaggaagcacgaggagtggatgaaccttgatatgtaa

SEQ ID NO: 105294 - DNA, 273 bp, Enterobacter aerogenes
atgaaaataacgaataccgaatttaatgtattgaaagtcatggcagaaaaagacatcgactggacatggatgatactggatcgcacccttgctacaagagggattcccgggtttggcaatgttgcgaacatagtaaccaatctgatgaatgaagggatggtcgatgctgtttataacgaaaactcatcgagaccacgttatcgcgtatcagagcaaggtcatcagttgttgggacaaattgacgaggttacaagggattacgatatctcatga

SEQ ID NO: 105295 - DNA, 1047 bp, Enterobacter aerogenes
atgcttcatcaatatcaggcaaagtcactggacgatatctaccttgatgactttccccacatcatccacccggatacggcagcacgctaccttgaggagactgcccagccaaatagaatcattcgggagtgggatttgccgggtaactatggtttttttgtcagtcgatatcgtcagtttcattatcagcagccctggatggcataccgggacgtgctgaatgatatacgctccgggaaggttgttttactgagaaaggtcgcaatcggtcatattatcacgggggtgcaaacatcctctggcaacctccgcagcgatctgcccctgtttctccactctcgtcttagttacctcatctcacaccagataaaacgcccggtatactacgttcgtccgccagcacccgttcaacatgctcaggcggcaaaaaccatcaacagcaaagcagcgggtcggcttctggccgcaggcggtatttacaacggtaatgttgaggggttcagaaagaccgcagagcagctcggcggggatgctccagtgggttacgatcaggtaatggataacaaagggttactcatcgccggtgcgtcagttgcagctgggttgacaatgggaataatgcgatttcctaagttagaggagcttgagcactttggagccaggggcgctgcatccggaagacactttaaccctgagctagccggaggaccgattgaaaacctgacaacggatggcgctaatataacccatgaagggatcgcaaccgttgaaaaacatatctctcgtttcgatcacgatcctgcaaatgacgtaatgataggtaggctgaaaaacatcgcaaaaggacaaatgccccctgagcaagtagatttaaactactacactcatgaatgtcgggaatatcagcgttactgtaacttgggatgggaagcaggtgaaccagacggtgtcgcaggttatgatatgtggaacaatgcccatacggcaacgctggaagattttaaacttaaagacggtgatttattccacccggatgcactgaaatga

SEQ ID NO: 105296 - DNA, 204 bp, Enterobacter aerogenes
atgcgccagggtgttaatcagcctcttattcttgctcagcagcgcgaagtgttcttcgtcaaagcctcccgctatgtgataggccttcaattttgggggagggagcagttcctgccacgcttttctatgtcagtaacgattgtaacgaatatgcttattaccttcctaccaacggtgtggccttacagcagaattttccggtaa

SEQ ID NO: 105297 - DNA, 1350 bp, Enterobacter aerogenes
atggctaaatataaggcgtatccagagtataaggattctggggttgagtggtttgatgtgaggccattgagttggaaagtaactcgcttaaaacttgaaacgttcatgaatatgggccaatcacctagctcggatgattgcaatattgagggcgatggcttggctttccttcaaggcaatgctgaatttggtaaagtaaacccaatagaaaaacaatattgtccggtgccaaaaaaaattgccaatccaggtgatatattgttttctgtgcgagctcctgttggagccatgaatttcgcagataaaaaatatggtattgggcggggactatgtagtatcgctgcttcagcgaaacttacatctccttttttatggtggttacttccaacatataaataccaacttgatactatagcgacgggcagtacttttgaggccgtatcagcagaacaattaggtaacttgtgtttcgctttgccttctatttctgaacaaagtcagattgcagctttcctcgatcacgaaaccgcaaaaatcgataacctgatcgagaaacaacagcaactaattgaactattgaaagaaaaacgtcaggcagtgattagccatgccgtcaccaaagggctaaaccctgatgtgccgatgaaagattctggtgttgagtggttggggaaagtgccggagcattggactatcgctcaattaaaattcaatactattgaaatgcaaactggcccatttggtagtcaattacatgctgaagattatgtggtagatggtattccattaataaatcctgcgcatatgaatgcagggatgattataccagatccgaaagttactgttgatgaagcgacccaagaaagactagggcgacataaactatcagaaggtgaaattattttctctagacgtggcgaattagggcggtgcgctgttgtaaagaaaaataacgaaggttggttatgtggtacaggtagtttgaaagctaagcttacaaaaaaaataattccagactacgcttatactctgatttcttctgagggcgttgtttcagaactgacattggaatctaaaggttcgacaatggcaaatttgaataccgagactttgggtagaattcgattgccagttcctccgattagtgagcaagaggcaatattggattatattaagataatttcagataaatatgattatctaattcgatctgcagacactgcaatcagacttatgcaggaacgccgcaccgccctgatctccgccgcagtcaccggaaaaatcgacgttcgcgactgggttgcccccgacactcagaacgttgaggagccacaggaggccaccgcatga

SEQ ID NO: 105298 - DNA, 384 bp, Enterobacter aerogenes
atgctgaattctttcgagatataccaggcattgaatgaattgggttaccggcttgaggctggaaacttcgagccaagctatgcttctgaacatgcgctcgggaatggaaagtatctgtatgtcaaacgcagtcgggacggcgtagttaacaagagcccattagttcttgcgccagaaacccttgtcttaaaggcagaaattgatcgtattgcgggtatccactgcctttgggaaaaagtaaaaatcaccagccaccgccgttacccgaaagataatggtacgtcccagtatggtttcgcggctgctgttgagtcagttgaagcattgcaaacgctggtggctttgctgggtggtaaatcatctttaactacccaaccggactaa

SEQ ID NO: 105299 - DNA, 309 bp, Enterobacter aerogenes
atgtttttttctgtcggcatcgccattcataatgagggtgaaacagcatattcgctggtcgtccctgctttttcaacgtttaatatatgttatagctcagcatgtgatacacaggaggacataggtccgactgtcagaaatattgttttactttgctgcgaatggatgcataatgaagaaggcgtatctccggacattattactgatgcgggctatcttacttatgcggctgatccggaatataaagattatgaacattggttattagtggacgttgacatttccggttacactgcttccaatgcataa

SEQ ID NO: 105300 - DNA, 513 bp, Enterobacter aerogenes
atgactgcaaaaaaaaacttgaaaatgttaagtgtcttaactcttgttgctgtctgtggcttgttttttttgtttgcctccaggtctgagactcaggttagtagtaatgacagtgagcataatgataagcgttatgttatgtctgttaaccatcttcgcgatgaaatcacacagttgaatcagaattcggtaggaaagcaaatctttaagaatacgcggttggactgtgccagccttaatgaagaagataaggttgccgtatatgaattgacgttattggatgtatcactgagcgatattaatcttgttagtcgttcgcggaaagctgagttgaagaaagtcgtaaagcagaatcttatccaaaaaattaacgctgaagggcagtcagtacctttgtttgaacacggctggtcaatggagtacattcaaaaaacgaatgacggttatgttattagtgatattactattagggcaggtgatttatccctaactgaacgccacgatgtgatttaa

SEQ ID NO: 105301 - DNA, 627 bp, Enterobacter aerogenes
atgaaaaaggctactgatttttacctctatagcgatgatgattttgatgcatttattgattttataaaatctcagggagtgcagcgcagatatagtaaaggagaacggttaaacttagctaaagcggaagtgggattcgtgctcgatggacagcttggtgtatattacaaagggaatgggaagtttattgataacgcattttacgccatgcccctgataatgttaaacaacaaaaacattacagggcatccatttttctactgcgtcgaaagcgatgtcgtaatttctattatgccggtcagcaaaattttcgaaacacacaacggcaccaggaatagccatggtcttgttttctcctcgctggcgtattctattctggaaaagctagcaatgacatatgacataagacacggtggcaatggttaccagatagtgaaagaattgatagaactctataatatcgagccacatgctactcaaggtttggcaaattacattctgaatcgcacccagttatccaacagttatgtgtttaagatccttgcggcacttagagaacaaaaatacattgaaatgaaaaatgcaaggctgacaaagataattaagccattgcccgataaaatttaa

SEQ ID NO: 105302 - DNA, 885 bp, Enterobacter aerogenes
atgttcaaaaaaaaacttgtcgtgtgctttatggcttctatatttttttccaatatgagttatgccgcagagaaagacgatctgacgcctgctcaaatggaaaaaatagccaagatgacggctaatcctattggtgcggcgtggatgctatggacacaatatgataacacccaactacgaggtgataaatttaatggaacggtttcacgtactacgtttcaacccgtcatgtcgtttcctttaaaatttggccagagtgactggaactttgtcgtccgccctgtactgcagtactataacacgccaaatatgggacacgtctcccccaatggagacggttcagtgtttgcccatggccgaataagcggtatgggggatactggactgctaacccttcttggtcctaacagagaagatggttttatctggggcgtaggtgcaactcagctgttcgatactgcggacaatgagtttcagggacaggggcattatcaagcagggcctgcactattagtcgccaaactcgcccctcatccaggaggaacgaatattggtatgctggctcagcactggtggtctaccgatcataaacgtgacagaaaggataccagccataccgatatccagtactttattaattaccgcttaagtggtaccgaacttatcgggatgagccccgatatcactatagactggaaaaagaagcgcggagaccgtttaacatttccggttgggctgggttattccaacgtggttaaacttggcaaattgccggtacgttttgccgccgaattacagtattcagtgatctcacctgatgatgtaggggcccgctggaacatgaagttcatgttcattccagttataccgagtccgtttctctga

SEQ ID NO: 105303 - DNA, 786 bp, Enterobacter aerogenes
atgaaaaagatacttggatttagcgcaatggcattgcttgcgagcaactgctgggctgctgatggcggagcagggagtgcagcacaggcaaataacccacttgccaatatgactgcattcaacatgcaaaactattacattggcgatataagtgggacggataaagatgctaaccaattctggttccgctacgctactcccttttctttaggcgacagtaactggttattacgtgcatctctccctatcaatacttatccttccccgccaaccggaggtcaccagactggaacgggtgatttgaatatctttgcgtcatggcttattgacaccggtaaccctgctgtcagtttcggctttggcccacaagtcaccttgcctactgcatcagaggacgcgctcggtacaggtaaaacatcagcgggtctggtcaacgttctgtttgatgccagtaacccaaagttccagtatggctatcttgcatcctggcagcacagcatcggcggcgaaggtgatcgtactgatgtaaatttggcaacattccagccatttatgttctatcaattaggcggtgggacctatttacgttctgcccctatatgggtctataaccttcacaatgatgattacagtgttccgttggggctcggcattggccaggtcattaaagatcagaaaactgtctataactttttcattgagccacaaggtagtattgctgatcgtggggatggtcaaccccgttggcagatttttgcggggcttaaccttcagtttctaaattaa

SEQ ID NO: 105304 - DNA, 1482 bp, Enterobacter aerogenes
atgtcatcacctaccatgatacaggaatacccggaactcaatactcttaaccccctactgaacagcattgttgataaaaccgttgataatgttgctcgaaaaatgatcggcggttttcgtaataaacgaaattctctaccgaataacaaggcccacaacctcagtacaacggtggatgatacgcttaacgccacatcatcatcgagtgtgcttgccgtggcgaatcggggtgttcagtggaaggaaatgataagcaaaagtttcactcatggcatttcctctatttccaccatgaagtttgatgggcagttcaccatcaagaatggcgtgccggaaggtcttaaagatgtgccgaattctccaggtgtttatgtagtttatgacagcgccggtgaggtgcggtatatcggcgatgctaaggatttacagaaacggtggcatgccgggcacctgaatgagaataaaaacgccggaaagaatggcatgccatacaaaatggcggcggagtttaaagagggctgcaccgtcaaatttatggtcatggattcggtagaaacggcggcagcggtcgaggctaacattttaaaaaatgagaaacccccggttaataagaaagaagagctgagcacagaacagggtacgcgttcgaatatcgaagccaaaaaaatgaaagatgcgtcaaacgaggcaggagggttggcctttggcgcagggaaagaggcattaaaaaacgtcggttgggatgtgtttgaaacgctcagtaccacaatgattaaagcactgaaagatgaggttgttgacctgtttatcacccggaaagcgcaggtgaaaattcgtctgaaacgcttttttgataaaatatggcaggttatcgttaatctgctcaaagccccgttaaacttgctcagaggcttattcgagttcgtgttaaatgcactgtctcagaccattgggaaaatttatcagttagcaaaaaatatctacgatctgggcatggcggcactctcgctgatgaaggggagcaaaaccatgaccagggaagaaaccatctataagatctctgaggtcattatcaccagcgggacgctggtgttctgggatgcggtagaacccgtgattgaatccggtatggtggctcttttttctccactggctccctttgccccatatatatctgccgccctgtgcgcgatgggatttgggcttagcagttaccttctggccgacatcgtccctaaagccgtcaaccttatactctcaacggaatctgcctataccgcaaaaggacgggaggcttttcagcaactggttgctaaccatgaaacaagtgtggatatggtggcggaactgcaaaaatatgcaggtagtacggtgaatctgatgagtgaaaccagagagcatacggcagagctgaacagtgatgtcatcagactgactcgtttctctcttgccgatgaaattaaaaagctgggagcgcagtaa

SEQ ID NO: 105305 - DNA, 858 bp, Enterobacter aerogenes
atgacggttgtcacgattgttgagaagaacaaagactccagcatcgccagtttcagaaaaaatattcacgaaataggcaaaatgctaaaagatgaactagagagaagtaacgagataaaaaaatcggcagatgacttcaataatcggggttttttcgggctttggagtggcagtctcacctcgagaaatgacactgacttagcgacgatgattgcaagcctggggggcagtttgaatatcacccaggaagtgatccagtgtttattacaaatccagtcagaaaaaaatgtcgtgctgaaagagtttcatctggcgttaatgaatacgattcgagacttgaaacacaacgacacgatgctggatctcagcagccgtgaaaactcactagttattcttgaacatctgaaagcccaggtggaagacaaactggaacaggcacagcgtgtcgaggaacatgaagaggtgattaaccggttacagtcattgagctggaagcaggaggagatgcttcaacgcttgcaggcaagtcaggatgagcacgcaacacagcttgccctcctgacgcaggttgtcccaaaactcgagcgacagcagaaagagcaatggcaacagtcagggaagctggctctggccctagaagagcaggctgatcagtaccagcaacagttggccttactgatggacaagctggccgtgcaggaaaacggcgcaacaggcatagcagcgcgggtcagagaattagagaggacgtctcgattaaaacgtgcaggactgcgcgattacttgctgtttgcgactagcgctcttgccgccggactggtcgttatcgaagtgatgcgttttaacggcgttatttag

SEQ ID NO: 105306 - DNA, 609 bp, Enterobacter aerogenes
atgtcacgtgtttttgcttattgccgggtatccactctggaacagaccactgagaatcagcgacgggaaattcaggctgcgggttttgatgtcagaccccagcgattcgtagaagaacatataagtggttcggttgctggatgtgagcgaccagggtttctccgcctgcttgaccgcatggaaaatggtgatgtattgatcgtcaccaaacttgatcgccttggtcgtaatgcgatggatatccgaaaaacagtagagcagctggcaacttccgatatccgagtccattgtctggcgcttggaggcgtggatttaaccagcccggcaggaaagatgacgatgcaggtgatttctgctgtggctgagtttgagagagacttgctgcttgagcgcacacattcaggtattgcgagggcaaaagcagccggaaaacggtttggccgtccctccgcactgaacgaagaacagcagcgggcagtgattgcacgtattgattcaggaatcagtatcagcgccatcgcccgcgagttcagcacgacgagacaaaccattctcagggtgaaagcagcacatttagcacctgataatgcttcctctcgtcctgtttga

SEQ ID NO: 105307 - DNA, 333 bp, Enterobacter aerogenes
atgaatatcgaatcggctgcatccgccctaaaagaactcggtcatcagactcgattggcaatctataaagaactcgtcaaagccgggctaacagggatgtcagttggtgaactacagaaaagaattgagatccctgcatctacgctaagtcatcacctgtcagctctgatatccgtcggcctgattaagcaagaaaggcagggcagaactcttttctgccattctcgctacgagaaacttgaagaactcatggctttcttggttgaggaatgctgtgcaggcgtatcttgccctcgttttgaggaaaacctgactcaagggaatagcaaatga

SEQ ID NO: 105308 - DNA, 522 bp, Enterobacter aerogenes
atgcatattatcaatgctaaagaacagcatagtactgcgatacgcaatatttatgctcaccacgtcctgcatggtacaggtagcttcgaaaccgaccccccggacgcacaagagatgcttagccgactgagaaacgttcagtctcagggattcccatggtatgtcgccctgctgggcgataccgtcattggctactgttatatttcgcgttaccgcgaacgccatgcttatcggtttacggttgaaaactcgatatatattgatccggcttatcagcgacagggcgtcggaaaagcattgcttggtcatgctttaaaatgggcccagtcccggggatatcgtcagatgattgctgttgtgggggacagtgcaaacgtagcttctgtatcgttacatatccgtgcaggatttactgaaataggcacactgaaggacattggtttcaagcatggccgctggctggacacggttttgctacaactaaatcttggtgaagggagtagtactcagccaaaagattaa

SEQ ID NO: 105309 - DNA, 312 bp, Enterobacter aerogenes
atgttagcaaggctgtttacttaccaaggcggggggcattgtctgtttggtgcggatatcctgacaaaactgacggaactcactccacaacaatatcagtcctggtcgctgatgcgccgtttacaccctcagccccgagctatgcccaccttgattgtgcgtaaaggggagttgcataaggtgaatgatttgataagcgaacttggaatgttctccgtgcagacagataacaatccctccagtgctgagcacagttttgctggatatctaattcgtagcaaatcagctgaatcgacagagggaggggtctga

SEQ ID NO: 105310 - DNA, 546 bp, Enterobacter aerogenes
atgatcacaaacaagcaaattttgagtgaagtggaacaattgaaaattttatttcaggaaggagagaatgaaattccttctttgtggaaatgcttttatccaggcctttgtgtcttggcttggcttgtaatgtggcccgtcattttttatggctataagttttattccttggacctacctaatgctgcacatatgggggttgctatatctgtattaatagcaatggtggctgggctgtttattatgctttacatcgcaaatggaagggctttgtacttgtctatacccgaaaagttccgcaaagactcattgctttgtcagttcattgttaccaaggcaaaaagatatggtgtgtcatatcttatatggtatgcagtgttgattgttttatgtgcttatccaacatatggtgcaatctattctaccgttttgtttatactttcatcttttggcttcatggtatttatgaacgtggatttgaatagataccaactcactgctttaacttcgttgcttgagtcaatgaaatcatccagtgaaaaatag

SEQ ID NO: 105311 - DNA, 222 bp, Enterobacter aerogenes
atgtcgaacgttagtgcacaaaaaacacactcgctacgcatcctgcgcatgactgagttgacggcgattcttgggatctcgcgctcaagtatctacgaaaaattgaatccgaaatcgaggtactacgatgctgagttccccaaaccggtccgactaggagcagcatctgtcggttggcgatctactgctattgacgagtggatcgcttcccgaaccgtttaa

SEQ ID NO: 105312 - DNA, 1509 bp, Enterobacter aerogenes
atgagcaacaaaaatgaaattaatcatgagcttaacctgaattttgatattctgccacgtcatatcaggcgatggactttgtacctacaccacatcacaggtgtggctgttgagattatcgtcgttacgttattagcatttttggggttggcctgccaggatctgttttgcgttcagttgggcaataaacagcgatttcctctggcgttatacctgttgctgctctccaggtctggtagtggtaagtcaagaatatacaggttgctcaagattcctgtagagcaacaggagcggcgatttgaagacgagtattgtgtcgagcttgaggagtatgaacgaagggttattatctggcaggctgagtttaaagtattaaataagctttacaaaaaagcgctgagtcaagggggagatacggctgaaacacgcagaaaacttgaagagtgtatcagccgccaaccgcagaaaccagtaaggaaatccattattttaacaaacccgacaagcgaagcgctcactaaagaaatcgggatgggatatcagaataaagctctttttaacgatgaagcagcaggtgtgtatacgagtagtttgtacaacgaccccacacctttcaatacattctggtgttgggataaagtcaccattaacagggtatcacgggaaagctttgttattgaaaattatgtattttcatctttattaatgatgcagcctcatccgtatgacaattccagcaaacggaaaagggccagtatcagattcacaggattgctggctcgtaccctgatgatagatatggagcagattacagagccatatactaacaatgagcacagtgctagggatgaaagcctgcttcaggagctgtattctgtcatgtcacagcttatggacgccggtgttaagcgaagagaaaatgacgatgagtatattgcacttacccttgccccggacgcgcaggatctaatggatgaaacgtcgttgagtttgcagcagctgatgaagcctggcggtgccttatatcactatgatgatatagctgctcgttttatcgagcagagcctcaggattgcaggtatttttcaggttactggtgaccctgattcgacagaaattgtaagggaaaatctgttgtctgctttaaatctgactgactggtttgtaaatcattccattacaaaaattgattccacaagagagcttagcgatgaagagaaaatattgttctggttagagtcgcatcttgtagaaaatagatctttcgaattcagaagaaatgaccttatcaaaaagggtccgaattcagtcaggcgtgctgagaggttgataccagcgctggaaaaacttgagtcgaaagggaaggtgcaactattcgaagtggcgggtataaattatgtcaaatttactggttcagaaatggatcctgttgaactagctgagaaaactaatacgcccatataccagtctggatcactggcactgagtaagctggctaagcctgaataa

SEQ ID NO: 105313 - DNA, 699 bp, Enterobacter aerogenes
atgagatcaccttatgagttatctgaaaaagaatttgaatccctgctactggcagcagaaaagaaatatgactcccggttatcacgctatatgcttcgtcgctcacttgctgtgatatctaattatctggaaaactataaccgggtatttgcattacgagctgacctgagatttgctcagtcccatgtgccagatgagccagacttaccgacatgctttcagaaagatgatgagaaagccattactcgggctatagaatcccttaaaagtcagctaagggaagagcacaagcgttctggcagggctggtgagcctgtgccactcggttatatctgggccagagagcgtgttaccgaggaacaccctcactaccatctggttctgctatttgacaaagaggtttatgcctatctggggaactacactgaatctgatgctgataatatggcgacccgtattcagaaagcttggtgcagtgccattgggcttgattatcctgaatatgcttatctcccgcattttccgaagaaccacagcatttggttcactcgacacgacgcgttaacgttaagtgatgattattatgactttttgctacgggtggcctatctgagcaaagactacagtaaagacttctatgatggttatcgcaactttggtgcgagccagctaatacagcggtccttaaacgacaaatag

SEQ ID NO: 105314 - DNA, 474 bp, Enterobacter aerogenes
ttgttaaccgtccaggtaatacgcaaagaggccatcagatttcgggaactgctcgaaaaatgtgatccatcgaaaacttaccttgtacctgacagatttcctgtcatgagctgcaaactttgctcaatgctactctccttccactttctgaaattatggcctgatctggaattgaagggtgtctcaggagtcaccggtaaaaatgatatgattactcactattggctggaagtgggtgattatgttattgatatcacaggagatcaatacaatatcatcagcaccagcgaactaaacgaagctatcgtaaataacaggccttttgtgcctgttcacgtcgctcaccggaaggacagctatctctataatttatttaaaatacaagggagagaactcttaacttatggttttccgacaatcggtaatgattttattgatgagatggaatgcgattatcgccagcttgtcgggtga

SEQ ID NO: 105315 - DNA, 1209 bp, Enterobacter aerogenes
atggccttacttaccgataccaaagcccgtcatatcaaacccgaagacaaaccgattcctcatggtggtgtcactggcttaacattgcacccgtcttccactaaaggacgtgggaaatgggtcctacgctacgtcagccctgtcactcagaaacgacgtaatgccggtcttggctcttaccccgaaattagcattgccgaagcggctaaactcgcgcaaaccatgcgagaacaattatcggctggagatgaccctcttgaactcaaaaaagcagaaacgaccaaaatcgtaatccctacttttgaagaagctgcaagaaaagttcatacagagttgctgcctggatggcgcaacaagaagcatgccaagcagtggatatctacgctcgaacagcatgtgtttccagctatggggactgttcctcttgatgcgattacgcctgccaatgttgcggatgttttgcgtccttcgtggatgactatccccgaaacctccggacgggtaaaacagcgtatccataaagttatgcaatgggcatgggctcatggattctgttcggccaatcccgtcgatgttgtcgatcatctccttccccagcaggtcagcgccagtatacgtactgaacatcagcctgctatgccctggaaagttataccgttatatattgccagccgtgtttacactgaggatcgttacaacgttacccgaggattgctattgtttgtcatactgacggcatgtcgttcaggtgaagctcgcgcgatggaatggtgtgaaattgattttaagcgcaaaatctggaccatcccagcgggtcgaatgaaaggaggtgttcggcacagagtaccactatctaagcaggcgcttgagttgcttgaacagatgagagggttacatgagacgctggtatttccttcccccagaaaacaaactgttctctccgatatggttttgacatcatttttgcgtaaaaccaaagccatcagcgatacccagggacggtttgctgtcgcgcatggatttcgatccagcttccgtgactggtgcagtgaacaacgctatccgcatgatttggctgaacgtgcactggctcatactatcaggaataaatcagaagcagcctaccatcgtacagacctgctgaatgaacgacgtccgatgatgcaggcatgggaggattatgtcatgtctgcggtctctaaaacctga

SEQ ID NO: 105316 - DNA, 1647 bp, Enterobacter aerogenes
atgctgcctcgtagtcctttaagtggatgtcgcgttcatctctctggctcaatttcagaaactgctgatgaagagagcatttgtcaattcgttcaccagcttgtaatgctggtattgcgggagggtggttctattgtacatggcagtcacccttctcttgttcctgttattgaggctgcagccagacagtacgttggtgcaggtggacaacgtggtgacattctcttagtccgctctcaagcgttctccaaaacaactgaacaaactgctgagatcgaacgccttcgccagtgcactaccgtacatattgttccggtaaagggggacggcgcaacaactgatgcaaatgaaatgttgctttcaatgcgtgagtggattgccgaaacaagcgatgtaattgtctgcgttggcggaaaatggtgggacattaataaaagcagagcaggcgtgcctgctgaacttggctgcatgttgagtctcggcaaaccagcatttttggctgcgggtcttggtggcgcaacgcagggatacgtcaaagaccaccctgaaatcctgtcacaattacaaaacggactcagcgaagacgcaaatagaatgcttgcatccgaggtggacacctcaaatattgccaatgctgtagtaaaccagctaaaacttttaccccgtgttcgccacaacatcagcagtggccgaaattttcgaattctggcgctcgatggtgggggactcagaggtacatttaccgcatcagtactcgctaaatgggatgatatgttgggacgagggggagacaataaccttgcctcgcattttgatcttatagccggtacttcaacaggcgctattcttgcgattggcctcgctatggggataccgccggctgaaattctacagttctatcgggaacgaggaccgtccattttcccgcagcagggaatggccaaacaatttctgcgttccaagcatgaatcatcgaccctaagagagatgctcactgaagtattcggtgatcgcaatctctccgaaaatgcacgctctaggctagtactaccaactgtcagggcagtaagaggcgaatccgatactatcgtaaccgctcatagccctgatcggacacagtacgagcatataagtgctgtcgatgccgcacttgcttcttcggcagctcctacctattttcaggaagccagcatacaggatgataccaaaaccgcactcgattatcttgacgggggtttatgggccaataaccccattttgccagctatatcagaggctgttcgttatctgggtatccctattgaccgtatcgatatactgaatatcggtaccatttcccatgagtacgatttttcttcctcgttgggtaaaggctttgctggctgggcattacaatttactgatcttttcttctctacacaggagcatgccgctcatcagatcgcccggaatctgattgggcctacacgtatgttaagagtgaaccaacaatcatcggaggaaataaaactcgatgacgtttcatcaattgaagagatggcacagcgaggaaatagtttagctgtggatacattcgctgaagtgaggtcgcgtttcttggatggaaaccttgcagatgactggcgcgagaaaaagaatatcttataa

SEQ ID NO: 105317 - DNA, 849 bp, Enterobacter aerogenes
atgtttgttgatattggaattcaaaattttgatgcccgtgcgttaaatcattcatcgtccgaaatctcgctattcaggaagaaaagcaatgcagcattcaacagagagaaacttcaaagttttctcctcggcagcgaaaatgtacttaacgctgaagctatagttgacgcctgttttcctgaagttcatgctgacgttttcctctctcatgctcaccgtgacgaagaagatgtcattaaactggcactgagtcttgaaaaattaggactgaatgtgtttgttgactcatgcgtctgggggtgggcggacgaaattctgagggtcattgatgaggaattctgctataaaaaaaccagtcaaacctttgactatgatctccgaaatcgaaccacttcaaatgtttacatgatccttaactctgcacttcaaaatatgattgcgagcactgagcttctgctatttcttcagaccaataactccgtcaaaatcggtgagtatgtaaaaaacaagactcatctatcctcaccatggatcttttccgaactgatatttgctaaactgggccagcgtacaaaacgccggagggtcaaaaattatgcttttgaaagctatgcatctgatagtaaacaaacagaactgaacaaaagctttgaagtggcttttccaaaccctgggagccgctatgaactcgcgaataacgaactgcaacaatggattcaccaaggctacgagaaaaacatctctgacgaattttctgcgttgactcaccttgatgtgctttaccgccgagcggggatttcatctgatgagctttcagagtcaaggttgctatttcctccaaagcattaa

SEQ ID NO: 105318 - DNA, 921 bp, Enterobacter aerogenes
atgaaccgaagtgttgctattttaatggctgtaagagatggtcaggaataccttcagtctcaacttgattcgtttgttagccaaacatataaaaactggtgtttatatgtttctgatgatggctcgaccgattcgacaatagaaatcgttaataatttttatctttctcatccagggatttctggctttttaaaaaaagggccctgtctcgggttttgccaaaattttcagtccttgatcaacgatgaaaatatcaatgctgattattatgctttttctgatcaggatgatatttggttacccgaaaaaatagaaaatgcagttcgctttttggatagtgtaccctcagatactccggctctctattgctcggctaccactcttatcgatcaggctgataatattattggggaatcactttcaccctctaaggcactcagttttgccaatgctctattgcataatgtagctagtggcaatactatggtattcaatcataaagctaggaaattattaatggccgcctcgtctgaagaaatggtggtacatgactggtcgctctatcagatagtaagtgcatgcaatggacgtctttattttgatcacatcccaggagtgttgtatcgccaacataataataatgtgattggtgatgggcgtaatatttttttacgcgtacgtaatttcttttcatcttttaaaggaaatcgtgcagactggaataaacggaataaaaccgttctcgataaaatcgtggatcattttggtgaggatgaaaagcaggtttattataattataattatataagtaaaagtaagtttttgaaaagggtttatttttacataaaatctggtgtttaccatcaatataaactcggtacattatcaaccataatttacgtttgtgttgggaaaatgtag

SEQ ID NO: 105319 - DNA, 174 bp, Enterobacter aerogenes
gtgcagtttgtctacaaagcgacaaattactatgcgccgcagtccgagcgcagcattctctggagcgatccggaaattgggattaagtggccagccctgaacgcttgcgaggtgtcgctgtcggagaaagatctgcaggcgcacacgctggccaacgcggaagtgtatatctag

SEQ ID NO: 105320 - DNA, 423 bp, Enterobacter aerogenes
gtgcgccgacagctgcgtcaggatctcgctcatcgactgattcaggttgatgctaaccacattgccttcaccctgttggcgcaggtgttcagggatatatttccccgggttgctctccagtttttcgatccagatgccgtcgcggttgattttagctttgatgttgcggtcggcggagcaggagacgcccataccgataggacaggacgcgccgtggcgcggcagacggataacgcggatatcgtgggcaaaatatttcccgccaaactgcgcgccgaggccgagattttgcgcttcctgcagcagctcttgctccagctgcacatcgcggaacgcctgaccgtgctcgttacccgcggtcggcaggtcgtcatagtagcgggcggaagccagcttaacggtcttcagcgtcgcttccgctga

SEQ ID NO: 105321 - DNA, 219 bp, Enterobacter aerogenes
atgcatccccagacaacattatccggattacaaggtaagaaactgatccgtataaacaaagtgattgaaattactggccgcagcgctcccagtatttaccgcgatatcaaaatgaaacgttttccgaagcctgttaaaaccggcccgcaatccgttgcatggcttgaacaggagatcgtcgaatggatcgatagcaaaataaaagaacgtgaagaataa

SEQ ID NO: 105322 - DNA, 873 bp, Enterobacter aerogenes
atgaataccgacaaactgttaaaccatcgcatatatcgtgatgtggatctgtctgtcattaaccacacttattttattcaaccttatgacgcctctcaccgtgggctgtatgaaatgcgtgttattgagctttaccgcctgaataaaatgatgccccttatccgggaatatgagtccatttctggggaaagcgtgggcattccggcggctaaagcggaactttttacgctggttaataaagggcatgaactttgcctggctgaacaggaaaagctgaccacacttgaggcagaattacaggccctgccaaaccccgtcgaaatagcggcaccaaaaacgattaaagaggcacaacaggcccgaaactcagtagaagatgaactttacagactgcattatgcgaaggttaaaaaccaggtcagagcgcagcaggaaagattatctatcaggcaagctattctggcattgcttgcgccggtgatcgatgtactactggccgtggaagatgtcgaactgctggatctgcgccgttccctgccgaaatcagtccaggacacgaagacattcagtaaggcgatttctgaaattgaatgcgccgatcttgcctggaaaaaaatggagaaactggagcgcgcccttaataacgtggtaaataactgtacttatcgtccggaaggaagcattaacccccgctgggttaatcctctgaacgaggataaacgggtacgcgccgaaatatcacgagaatattacgcatctgaaatgacatcaattcattcggtcataagtgcagatgaatacatcaattatatgttgccgatccgtcatgcctactgcatacagcagcgcctattagaaagaaacattgactaa

SEQ ID NO: 105323 - DNA, 1008 bp, Enterobacter aerogenes
atgtcttttgtaacaccgtcatatttacatcagtatcatgaaaatctgatgaattcgtttagcatcaaatataaaaacgaaggtacagggtatttcagcatatcagaaccagaagacacgaagccggacgtatggggatgttccacgcttaatattaaaggtgtatcctggctgattgataatatttcatttctggatgtcaccggcgcagatggaacaacgatcgccattggtgatggttccctttataccggacgagctaaagaaggtcgtttctataaaaaattaaaaaccaacggcaccccttttttattatctgaaacagattcctgcgcttcgttgacttatgccgaaatggcgtcgatggcaaatacagataacttcagtaatgaaatgattaatttttttaaaaagacggtggcgcgggatatgttacgcgttggattcaatggcaagatgattgccgagaataccgacccggaacaatataaaaacggagaggatatcaatattggctggcatgaactggcaaaaaccttcaataacggctctcaagttatttctgatggtttttcgctggggaatggcggtgattttgctgatgttcacgatctggcggattgcttgattacatcaaaaattccggaaggtcagcgtgaagatccgggccttgttgttctggttggcgcgcagctcgctgcccgtgaccacctgaagctgttcaacatggccgatcagccgctggcactgaccgctggggatatgctggaaagtagcgtcgccggtcgctttgcctttatcccaccgtttatgccgggtaagcgcctggccgtcaccacgctgaaaaatttgcagatcctgacgctgaaacacagccagcactaccgcgcggaggatatcccggtacgtggcgtttatgaacacggttatttacgtgatgaaggttacgcgctgggggatggttatctttatgcggccagcgacgagaacgccataacgctgctttaa

SEQ ID NO: 105324 - DNA, 696 bp, Enterobacter aerogenes
atgaattataccaagaaacaaccgatgctttcccgcgaaaacgcgccgctgtttgtgcagctgacaccgtccgatctgacggtgttttccggaatactgaggggctattcctttgcctttttgcgctgttctgctttcagctttcgcccgcaggcatccagcacccaggcggaaaagttcgcatccgggttgtgtactttttcgcgttctacactggcatcaatctcttcgattatttcatgtgggaatctaattcccttcttgtctgatttattgtttttgtttcctgtagccactatcccccctgtgttctacttgattggtggttgcacactatacagacaaaaaagaaacaataaaagcttgacgtgtgcacccaccagatctaaagtgtgcgcacaccttgttttgttccaaggtgataaaaacaaagcccggcagtgcggcaacactaaccgggcctctgaccaacacgttatacgaggtaacgctatggctgatgcacagtctaaccaaactcgccctaaaaatcgcgtatttctctttctcgcggtatcaagggttgatatgcagagtaaaccacaccgcgagcaaatcaccgcgcatagcgaacgggaagcccgttccatgcttgctggtcgctttatcctctgctttgctggccgtctgccagtgcagggggcgcaacatgattaa

SEQ ID NO: 105325 - DNA, 423 bp, Enterobacter aerogenes
atgattaacccgatctctttgccgctgccggcggctgcggatctctttcagaccggcgatttatgcgggcatttcgtcgcccggttgacggatgaaaattgcgttgatgatgtggagcgcttcgcgctttgcgggcgcctgggttatgccctgcgttctcttacaaccctttgtgacgcggataacccgccgcatattcaggcgcagctaacggcggcagatattcctgccccctgcgtacccgacgagtggatcgacgcgacgatcatgacgggctattgcaccgccttaaatgatgctctgctcagccattccctgcgtgttgacgtcgaggcgcaattacgctggctgttacatgacatggttaatttacttgtcagatatctgaaacaaccctgcataaaggggggaacccatgtttaa

SEQ ID NO: 105326 - DNA, 249 bp, Enterobacter aerogenes
atgtttaacccactggacaaccgcaaagccgcggcgctgaatccttttcatgatggcagctataacccacccgcctttatccagcctggaaaaaaggtaacggtagaaattgattcccgcgaaatggagatcgcaatctttgcggcttttgattacggtctggatgctctcaacgatgaagggcgggaagtattaaaccgcttatttgcggacctgaaggaccagataaagggggccggtcgtggataa

SEQ ID NO: 105327 - DNA, 270 bp, Enterobacter aerogenes
atgcctgattcaaatgttatcactgttaataatcctgaaaaacatcttagcgttgaatgtttccataagctcaaccgcgcccgaaatgtatctttccagatgcatttacagatccgccagtgtgaggtaaacggcctaccgcttttatgggtgccggatatttttagctatatcagcgaagacatatccgccgttctggaggaagttaaaacacttggcctttgcgataactttaccggcggagcccggatcaatcaggtcagtctttaa

SEQ ID NO: 105328 - DNA, 2733 bp, Enterobacter aerogenes
atgcaaggtaataaagtttcacagacagcaggacgcgcggcgggccagtgggaaaatattcttgaacacctggggattattgttcctgggggtggtctgcatggcccctgcccggtctgtggcggtaaagaccgttttcgctttgataataaaaacgggcgcggaacctggttctgcaatcagtgcggccacggtgacgggcttgatctggtcaagctggcccttaacctggacaccgggccagccgccgatcgtgttgctgaattacttccggcccttcccccgcctgcggtcatgcagcccaccaggaaagaagccgcaggcgaaggacgcccgcatgaatactggcagcgcctttttgcccatacccagccaggggaaagcccctaccttacggcgcgggggctgacgggttttgaactgtcgctgaccgctcaggagatgaaaaccgctggcggtatttttccgaccggttcgcttttactgccgatcacagacactgaagggaagatgaccggcgcgcagcttatcggcccggacagggtgaaaggcttgtgtgcaggcaccaggaaaaagggccggtttatctctgtcggcccgttcccggaggaaacgccggggcggatcattatctcagaaggctacgccactgccttaagcgcgtccctgctgtcagagggctggagcattgcggcgctggataaaggcaacctgaaagacgttgctgagcagatccgccaaaaatggccggacgtgcagatcgttattgccggtgataatgacttttctgacggcaagcccaatcaaggaaaagagtctgcgatcaaagctgcgctggccgttaagggatggatgaccattccgcccggacggatcaaggctgactgggatgattaccgccgtgaatttggcctgcaacgcgcccgcgacgcattcgcggaagaactgcttaacccggcagacaccgaaacgcgtttaccgcatggtttccgcctgacgaaagattatctctggttcgatcgcccgctcagtgatggcagcgaaagcggccagactcgccaggtgaagatatgcagcccgcttaaagtgacggccatcaccagcgacggcgaaggcggtaagttcgggcgcctgcttgagtgggaggactccagcggattacggcatgaatgggcgatgccaatgacagtgcttgccggaagcggtcaggaactgcgggaagtgctgcttgataacggaatacactttatcagcgtaaacggcgcggcgcgtggctatctgatggaatacatttctaactgtcgcccggttcgccgcgttacctgcgttgaaaaaacaggctggttcagcggcgcgtatgttctccaggacgaggtgatcggcagcgatgccggatcggtgatcctccagtctgcattatcgtctaaaaatgacttccgggtgagcggaacggcggcggaatgggcgctacacgtcgggcgctattgtgccggaaattcccgccttgtgttctgcgtcagcctggcgctggccgcgccgttgctgaatcttatcggcgtgggtggcggcggttatcaccttaagggcgaatccacggacggcaagacaaccacaatgaaggtggcggcgtctgtctgcggcgggcctgatttctggaaaacgtggcgggcaaccggaaacgcgctggaaggtatcgcgctgcggcgcaatgatgcagccctgatgctggatgagatcagcgaagttgacggcagggaggccagccggatcgcctatatgctggggaacggccagggcaaggcaaggggccgtgttgatggcagcgtccgcgatccggcgacctggacactgctttatctgtccaccggggaaatctctatcgcagaacatgccgccgaagccggggaaaagcgaaccggcgcgggtgtcggcgtgcgcatggtgcaaatccccagtgataccggaaaacatggcgctttcgaaaaccttcactgtatggaaggtggtaaggcgtttgcggaatacctggaacagacctgtaaacagtatcacggcgcgccatttcgtgaatggctgcgctggctggcggcaaacctgacggaaaccgcgaaccgggcgcgggcaatgaaaaaagagtatgaacggacattgttaccggaggactccggtaagcaggtcggacgcattgtggatcgctttgcgctgctagccgttgcgggggaactggcaagcgaagcggggatcaccggttggcaacccggtgaagcgtacaacgctgcaagaagctgtctggcggcatggcttaacgatcgcgggcatgctgccaaccaggaagaagccgacgcgctggagaaggtgcggcgctttattacggcgaatcagtacacacgctttgctgactggtatgacgagaaaaaccgcccttcaaatatggtcggctttcgccgggtggagaaaggcgggaacggtatcggcatgagcaaaaaagaaaacagcagcggtactgttaaagatggagacgccagtaaagaggcggaaactacattttatattctgcccagcggatggaaggagatttgcggaacgtcagacagcgttaaaacggcgcgtctttgcgacgaggccggatggcttgtaaaggatgaggatcgccagcgtctacaacgtacagtaagactaccggaaattggcttaaagaaagtgtatgtgttcagcggcgaagtgatcggataa

SEQ ID NO: 105329 - DNA, 306 bp, Enterobacter aerogenes
atgccaaaaatgaaagacggggatctgctctataaagattacgtcaaccatgcccgatcagctggtgacgacccaacaaaaattatttcagatgctaagcgctttaacaggcatgaaaagtatgaagttcttgattttcttaatgcattacatggagagaacggggcggatctttctatcaaaacacgtcagatttgtgagtggatgattcgcaactacttacccggtacgatccagagtaccaaggcggttgaatcatggatagtttcaaattacacagcactatcccaaaaatatccaaattaa

SEQ ID NO: 105330 - DNA, 246 bp, Enterobacter aerogenes
atgcaacacgtaaattacaccgatgctcgacagcgtttagctgacctgatgcagcaggccaatgatgatcgtgcgccgatcctggttacgcgtaagggggctaaaagcgtggtaatgatcgacgcggaagagttcgcatcgattcaggaaacgttgcacctgttcagtaacccggcgaacgccgcacacattgaagccagccttgcatcgctcgaacgcggcgattacgaggaactggacatttaa

SEQ ID NO: 105331 - DNA, 261 bp, Enterobacter aerogenes
atgaaagtcaaaatatccccgcaggcaaaaggcgatcttgagtactgggccgagaatgacccaaagacgcataacaaggtaatggagttaatcaaatcggctaaggaaagccccttcaaggggataggaaagccggaggcgctaaagcatcataagcccctctggtcacgtcgaatcacgaaagaacatcgcctggtgtactacgttgaacaaggcgatctgtacattgtcgcgtgtcgttatcactacactacgatttaa

SEQ ID NO: 105332 - DNA, 846 bp, Enterobacter aerogenes
atgtcagagcttactctcaccgaacccgaagtattaaccggccacaccgacgtgatttgctccaccagcattgagcgtattgtcacgggacgtaatgccgctctggcgcagattgaagtgctcatgcaacaactggacgatgtttcgatgctgacccgcagtatcgggggaaaaaccgcgctggactgggctatgaagcaggatttccgttgcggctgctggttgatggagaaaccagaagcagcgatgaaagctattacccgtaatctcgatcgcagcatatggcgagacctgatgaagaagtcgggcatgctttcgctcatggatgctcaggctcgtgagcagtggtacaacagcctggaaaaggatgatattcccgctgtcagtgaagccaatatcctcagtacgtttgagcagttgcaccagagcaaaggcgaggtgtttgaacgtggggtgatcaacgtgtttaaagggctgagctgggattttaagagcaataacccatgtaagttcgggaaaaagatcatcgcgacagggctggtgaaacatgaccgatggggatttgggcttaactggggctggcaacgtgaccgactagcagaccttgagcgcatgctggtgctactggatggaaagcctgtgcccgataaccgcgctgacgttacccgtcgtctcagcgatcatatccatgagaacaggcacagtagccgttacgaggatgagatgtttgtgattaagtattttcagaagggaactgcacacatcgtattcaagcgacctgagctggtcgataagctgaacgacatcatcgcccgacactatccaggagcactgtcagcgagatga

SEQ ID NO: 105333 - DNA, 204 bp, Enterobacter aerogenes
atgccggaattaaccaccgaagccgctctcaacattctgattgagtggctgcaggacaacatcgattgcggtacggggattatcttcgacaatgacgaagacaacaccgattcagcagtgctgttgccctggattgaacgtgcgcgtcaggacgttcgcgatctccgtcatcttcaacttctgcgacagaccagtacagattaa

SEQ ID NO: 105334 - DNA, 492 bp, Enterobacter aerogenes
gtgaaaatatcgatgaatgttgaagccgacagtatcaacgtactggcactcaatatgggaaaaattgctgttgaagtggaggggattgagctggctgagctcatcaatatcgtcaatgacaacggctttacgctgactgtcgccgatgaaccgggtgagattatcgttgaagatcctctgtccccctctgcccgcgttaacggcattcagtgcagtaccgcgcatattacggaggaagacaacgctctgctgtttactctttcacaccagtatgaagactttggtgagtcggaatggattagttacaccgggtcgggttatctgctccacctgggtgccaggtcatttccggtcttacgtctcaaacgtctcggtctgtcgaaagcctgtcgtcggttagtggtgacgcttatacgtcgctacgccgttggtattgttcatctggatgcctttggcgaagtgctgccgggctttgccacctttgactggtaa

SEQ ID NO: 105335 - DNA, 381 bp, Enterobacter aerogenes
atgcaaacctcaagcttacacccgataagggcgagcaagccctgcccgtcacccgttgaaatctggcagatgctgctgacccacctgctggagcagcattacggtctgacacttaacgacacgcccctcagcgatgaaagcgtgatcctggaccatatcgaagcaggtatctcgctatgcgatgctgtcaacttcctggttgaagaatatgaactgatacgcactgatcgcagtgggtttactgtcatggagcagtcgccgtttatcagcagtatcgacattcttcgcgcccgtaaggccacagggttgctgacgcgtcacagctataaaaccatcagcaatataactggtggtcacggctcaaaagaagataaaccgtaa

SEQ ID NO: 105336 - DNA, 354 bp, Enterobacter aerogenes
atgtcagaggccaaaatcactaccgatatgccagtccctaaatggggactaaaacgcaacattaccccgcagtttggcgcaagactggtacaggaaggcaacaggttgcactatctggccgaccgcgcagatattgccggtcagttcagcgacgctgaagcccgtcagcttgaccaggcgtttccactgatgctcaaacaacttgagctgatgctggtttccggtgaactcaatccacaccaccagcactgcgtgaccctgtaccacaatggtctgatctgcgaagccgacacgctgggcagctgcggttatctgtatctcgccatttatcctgcgcaacctgcgtcactgtaa

SEQ ID NO: 105337 - DNA, 528 bp, Enterobacter aerogenes
atgaataccgaatctgcaccggcaatggtacagcctgacttatttccgcaccatgaagccttttctcagccacccgctccgctgtcaccctgcgcaaagcgtactgtccgacgggcattaacccttctggagcaacaattgcgcgaacccggagcagcctttacgtccaccagcactgtgcgtgactggttgcgtctgcagatgacgttgcttgaacatgaagagtttacagtgctctggatggacaaccagcaccgcctgattgctcacgaaacactgtttaaaggcaccatcaacagtacccaggtacacccccgtgaagtggtgaaatccggtctcagacacaacgccgctgccgccatactggcgcacaaccatccctccggctatgccgaacccagcgataccgaccgccgtatcacacagcgactgaaagaggcactggcactcgttgatatccgtctgctggatcatctggtcattggcgggatggaggtcgtgtccttcgctgaacgtggctggttataa

SEQ ID NO: 105338 - DNA, 444 bp, Enterobacter aerogenes
atgcatatactaacttttcactctacggcgcaggcagcagttacagcctcagtcgtacccgatgaattacgcaccggcttctggccgcagcattttggcagcatcccacagtgggtaacccttgaaccccgtatctttgcctggatggaccgcctgtgtaccgattatcacggtggtatctggaccttttcgaccctcagcaacggcggtgcctttatggccccggaaagcggcagcgatgaaaaatggacactgtttaacagcatgaacggtaatggcgctgagctcagcagtgacgctgccggtattgcgatctgtctgctggcctacagccatcacgcctgtcgtaccgagtctgacgcgatgacagagcattattaccgtctgcgggagtatgcattaacccatgctgaatgccgtgccattatgcgcattatcgattag

SEQ ID NO: 105339 - DNA, 939 bp, Enterobacter aerogenes
atgtctcttgttttacgtaaattaaaacaggtaatactaatatcctcgctttcttttatttccaccggaatttacgccgctaatattgcaaaaacagcagcagatgcaatgcgctgtgatcctgatgcaggtgatcatgaaaacggatacggttcctgccccttcctgggcagcatttacgatgctgacccggtatttaagaaagaccttgatgatgcactgaagtcagcaggactcaccgggttaacgggaaaacagggggcaatgaatggtccggacagtggattaattccggtggatgttggtggcgagaagtggctactggggtctgtctgtgagcggggtaattgcggtgatcattatctgaaaatactgtatatcccctcagaacatgttattgccggtttttattacaacagcggagaggaaaacatgtttggcgatgtcgggggggcagaagcacgaatattacgccgcgatgtaccggacgttacgccagtgcagcaggctccggcaatgccaacaacacctgcggacagctcaccggctgacactatctgggcttttaagggtgacggcggaaaatcgttatggcaggtctgcggcggtcagagcaacagttgcaccattatcgccaacacgaaatattacgttgccgttctgaaccgtaaatcagcaacgggctgtgctttcggtgatttttatgttgccgcccgcgataccgcatcatggcggcagtacgataccggcacctgcagcgcggatgcatatatccgcaaaggcagcatcaacaacggtcagtatctgtccgtcgatattggtatcaacggggtgctggtgaagcagtttccgattggttactggtcaatgcagaaggaattttccggcaaccgacgcccttcatggtcaaaagttaaagagaaaaatcagcagcattaa

SEQ ID NO: 105340 - DNA, 411 bp, Enterobacter aerogenes
atgaaagcattcatattgccattaatggtttcagtttttttattgagtacatcagttaatgctgcagcggttaaattaccccggacagtaattgatgtgacagacggcagtgagcagatgtgcggaagtgaggacgtgaaagacgagacgtgccgcctcatcagtacttctgacgatggtaaatatgctttgttgagcagccccggaggttcggcctgttatgacccctacatcatcgttgtcaaccttgccaccagcaagggaaaaatgatggattataaccgtcatgcgacatgcagcggtgaagccactgctaagtttgtccgctctccggagaacggtcaccttactgtcgttatttacgaccccaccatcaaaaagaacgttggccttaataccattgatttttaa

SEQ ID NO: 105341 - DNA, 216 bp, Enterobacter aerogenes
atgggattctgggatagcgccggaaaactggctaaagaagtggcaaaagacgctctggacagcgcacgggagataagagcgattcatgaccggctggagagcaggagcagcgcagagctgagaaagataatcaccgacaacggtatattcagcagcgcaacggaaacggaaaagcgcctggcacgcaaggttttgcgtgaccggggcgaactctga

SEQ ID NO: 105342 - DNA, 147 bp, Enterobacter aerogenes
atgaaaatcagaaatatcacacctggttacccgacatctggcaaacgctgcccggactgtggctctcacgacaccattccctgggccgatggctggatgtgccgcgactgcggctgtgaatggggtaaggacaatggctatctgtaa

SEQ ID NO: 105343 - DNA, 708 bp, Enterobacter aerogenes
atgactcaggctgaacgtcgtcatgatcggcttgccgtcagactatcgatgattattggccgtctggtggcaggtgagacgctggatatgcgcaaactggccgccgaatttggtgtatcggtgcgcaccctgcgccgggatttccgcgaacggctgatgtatctggacctggagtatcgtcagggccggtgtcgtctgctgtccggtagccgtcagcgggaactggctgtaatgacctttgcccgtcagtcgggcattgtgaccctgtttccgggactggacgggcatctggtcagctcgcttctgggtgggcagggtgagtccccctgccttatctggcagggagaatctgcacaaacagttaccgacagtggggtttttacccgactggtgaatgctgtccaggagtgccggaaggtaactttgcgcagcaacggaagctgtcatacggatatcgctccctaccggctggtcctctatgccggtaactggtatctgacgggggcacaccatacccgcatcattgcgctgccgctgactgatatccacgctgtcacgcttcaccccgacagttttaccccggacgctactgtgcgcaacatcctagcacgtccagattttttacaggcattacctcatttccggttcatcggtgaagtgctgtccggcttcgcccctgaaccacatccccccatagcagaaggataa

SEQ ID NO: 105344 - DNA, 231 bp, Enterobacter aerogenes
atggttttcccgcaatccatcaaaccaaagacgccaacggttctagtcctgaacaagcaattctggttcactctctgttgtatctgtcgtggagtactgattgagatatctaagcttaggcgtgaaatatctgttgttggtaaaaagccaccagtcaccatgagcggtactttaaaagtggcactgctgcagttacaggtttctgcttatatttcaaataaattcagatag

SEQ ID NO: 105345 - DNA, 2778 bp, Enterobacter aerogenes
atgccattggagatctgtacgcaaatgaacgccgtagaaattgaacaagccatcacggatcttgcagagcaaccctttgatcctatagattttccatatgcctttcttgaagcctttggtaacaaggaaacgactatcaaacggttgcgtgctggggcattgaacaagtccgacttgggcggagttcttcagaccaacaacattcacattctggttagtgaagaaaaccaagtaacgcagacattggcttcactcaaggccagcccggcgacaggcaaggcaaaggccaggttcatcctcgccacagatggcaacgattttgaagccgaagatctcacaagcggtcagacaatcgcttgcgcctttaaagactttcccgaccatttcggcttctttttaccgctagcgggtattagcactgttagccagattagtgaaaacgccttcgacattcgggctactagtcgcttgaaccgcctgtatgtcgaacttctgaaagacaaccctgaatggggcacgacggagcgtcgtcacgacatgaacaagttcatggcgcgactaattttttgcttctttgccgaagataccgacatatttatcggcaaggggcgtttcaccgaaaccattgcgcagatgagtgagcgcgacgcttccaatatgcacgacgtcatcgccacgttgtttcgcgctatgaacaccccggacaatgagcgtgctaccgttggtacaccgcgttgggctgaagaatttccttacgttaatggtgctttgttttcgggcagtgacgaggtgccgcgctttagccgcatcgcgcgctcctatctactgcacgttggcagtctggactggactaagatcaatccagatattttcggttcgatgattcaggccattgccgaagatgaagagcgtggtgagttaggtatgcattacactagcgtccccaatattctcaaggtgcttaacccactgtttctcgacgaactgtgggcgaaactcaaggaagctggagacaacccgcgtatgttactcaatcttcgcaagcgtttggctcgcatccgcgtatttgatcccgcgtgcggttctggaaactttttagttattgcgtataaggaaatgcgtgctattgaggccgagctcaatcggcgacgtggcgaggtggatcgtccctctgacatccctcttaccaactttcgagggatcgagttgcgtgattttccagcagagatcgcacggctcgcgttaataatcgccgagtatcagtgcgacgtgctttatcgtgggctgaaattggcactagccgagttcctacccttgcgctacgaaaactggattatctgtggcaatgcgttgcgtattgactggctgagtgtttgtccgcctacggggattaatgtgaaggttcgggcggacgctccgtttgacctcccccccgaccaagctgagatcgaattcgagaacgaaggcggggaaacatatatctgcggaaatcctccctacctaggggccaaaaaaaagtcgaaagatcaggctgaggatatggcagtggttggcttaggcaatctccaactcttggattacgtgtcgtctttcatcgtcaagggacttgacgttattcagaaaactcactgcggaatggctcttgtatcgaccagttccataagtcaaggggaacaagtagcactattgtggcccattatacttgaaaaagcgtcaatcaagtttgcgtatcgaccattcaagtggtccaactcggccgcaaacaatgctggcgtatggtgcaccatagttggattggaatcttcagcgtccggtgtaaaacaacttttttttgaagataaagttcaattctgcgacaacatctctccctacctgtttgcaggaccgaatacgtatgccgccccagttgatacccctatcagtgacttacccccgatgaagatgggaagcaatgcggtagacggaaagcgactaattttggagagagaagacgttgagcgaattatttccgaaactccactcgcgcgaaaattcatccgccaatatggcggtacccaagagttgctttccggatctcatcgttggtgtgtttggattgaagattcagatgtttcaaatgctatggaattgaaacctctgcgtgaaatcattcagagttgcaagacttatcgagagggggccggtagagatgctaagaaggccgctcgtcgtccccattcattctgttattcaacatttgagcaaagagacttcatccacgttggaaacactattgggaacgcattgccatatgtgccagccgatttaaaacccgctggttatgtgtccaatcataacgcattcactatctatggaacgcaccttgatgtatttgcgatagtggtttcgaggctacatcgagtatgggccgatactatcgctggtcgacttggaaacggaactcgatatggaaacacggttgtctacaatacttttcctgttccggctttgacggaaaagaataaagctgacttggctcgttgtgctgagggcattttgcttgctcgggaacaccacttcccagcgaccattgctgacctgtacgaccccgcgaacatgcctctcgatctgcgggatgcgcatgaccgtaacgacgaagtacttgagcgcatttacattggtcgtcgctttaagaatgacacagagcggcttgagaagctgttcgacctctatactaagatggccgcttcaactgcctcgaccaaaagcaagaagcgtaaagtgggaaccaatgcatga

SEQ ID NO: 105346 - DNA, 2046 bp, Enterobacter aerogenes
atgaataacaaggttaaatcagtaccgtccgtttccgttacctactcacgcagcggagcatcgaccaaggctaatgcctttgggatgaggcctatgcaagaaagggcctatgagaagcgcggagaacaatatcttctcatcaagtcgccgcccgcctccggcaagagtcgtgcgctgatgttcatcgcactcgacaaactcgaaaatcaggggatcaagcaggccattatcgtcgtgccagagaaatccattggcgcgagtttcaatgatgaaccactgtctcagtacggcttttgggctgattggcatgtcaaacctaagtggaacctctgcaacgcaccgggtaacgacaacggtggcaaggtaaaatctttcggctcttttcttgaaagtagcgataaggtgcttgtttgcacacacgcaacctttcgcttcgcggtcgatgcctacggcatagaagcgtttgacgatcgcctgatcgcggtcgatgaattccaccatgtgtcagctaacccagataataagcttggtcagcagctggggcagtttatcgcgcgggacaagacgcacatcgttgccatgaccggctcctacttccggggggatgcggaggccgtgttggttcctcaggatgagtctaggtttgataccgtcacctacacctactacgaacaacttaatggctacgaatacctcaagcaactcgacatcggctacttcttctacagtgactcctacgtcgatgacatcctcaatgtactcgatccagacaagaagaccattatccatattcccaacgtcaattcgcgtgagagcacgaaggataagatcaaggaggtggagcacattctcagtgagcttggcgattggcaaggtacagaccctgcgactggtttccagctagtcaaatgcctcgatggtcgaatgttgcgtatcgctgacttggtggatccaaccagccaaggtaagattcaggacagccttcgcgctgtagaaatgaagacaaaccgtgattatgtggacatcattatcgcactcggtatggcgaaggaaggtttcgactggatctggtgcgaacatgctctaacagtgggttaccgtgctagcttgactgagatcgtgcagattataggtcgtgccactcgcgacgcgccgggtaaaacccgcgcaagatttactaacctgatcgccgagccggatgctgtagagggtgcggtcaccgaggcagtcaacgataccttgaaagccatcgcggcaagtttgctgatggagcaagtgttggctccgcgcttcgagttcaggcccaagaacccagaaagtgtcccaactccaggcttcgactatggtgatggagggtacgacccggatagctgcaattttggtgttaatgagcagacagggacttatcaaatcgagattaagggacttgccgagccaaggagcaaagaagcggcacgcatctgccaggaagatttaaacgaagtgatcgctgcctttgtgcaggataagcccgccatggaacgaggtctgttcgatgaagagctgatacccgaagaattaacacaggttcgtatgggcaagatcatcaaggaaaagtatcctgagcttgacgctgaagatcaggaagctgtgcgtcagcacgctattgccgctctcaacctcactcagcaggcaaagcggctcgtcaccgacgagaacgatggagcgctcaatactgccctgatcgatggtgtgcgtcgttttgcgatggacgtgcgcgatttagacatagaccttatcgaccgcattaatccctttggtgaagcctacgccattcttgccaagacgatgagcgaagacagcttgaagcaggtcgcagcggccatttcggctaagcgcaccgcgatcacgcctgaagatgccaaagtgatcgccaagcgtgcggctgaatttaaacgtgaacgtggacgccttccatcaataacttcaccagatgcctgggaaaagcaccttgccgaaggtgcagccgcatttatgcgtttcagggcggaggggcgttatgagtaa

SEQ ID NO: 105347 - DNA, 1179 bp, Enterobacter aerogenes
atgagtaattctgatttagacgatttagcagcagaacttgctgagtttgcaccatctaagaagaaaaaaggacgtccagccaacgaggaacgcatcatcgctggttttgaggaaatccaacgcttcactgagcaacatgggcgtgtgccgcgacacggcgaagatcgtgatatcttcgagcgcctgtatgctgtacggcttgaccgtctacgtggcctcccagactgtcgtgccttgcttgaaccgctcgatcatcaggggttattgaccgaggaggaagtcgtagcggactcggaggacaaaattatcgacatcgataatttggctgccgaactggtggatattacttgcgaggacgatatcacagtcttgcgtcatgttcgtgctagcgccgaaaagcgtgctgtacaagggatcgcggatcgcaagccgtgcgaggattttgatgagttcaaaccgttattcgagcaggtgcgtagtgatctaagttcagggttaagagttacccgacctttcgggcagtatgcaacagttgaagtgggccattggttcatcctggatggtcaaacggcttatgtggctgaggaaggtgaagagtttgattccccacagggcaagaaggatgctcggctgcgtgtcatttactcgaatggtacggaaagcaacctacttcggctgtcattggttcgtgctttgtataaagacgaaacagcccgccgaattaccgatccagacatggggcctttattcagcgatgctttagaagagagcgatctagaaagcggcaccatttatgtgttgcgttcgctatctgataacccttatgtggctgaacatcgtgatgtcattcacaagattggtgtgaccggtggcaaggtagagactcgtattgccaatgctgaacacgattccacctatctgttggcgaaggtcgaggtggtagcttcatacaagctcgcaggcatcaaccgcacccggatggaaaacctgtttcacaggttgttcgcacccgcacggcttaacattaccattaatgaccgtttcggccatccagtgcagcccgaggaatggtttctcgttccgttattcgtcatcgatgaggctgtagcacgtatcaaggatggtagcatcattgggtatgtctatgaccccatgtctgcgaagctggtgaaggcatag

SEQ ID NO: 105348 - DNA, 4953 bp, Enterobacter aerogenes
atgtgggatggcggtttacaagagcaagaagtggcagctattgagaaaataaaggctgcgttttcggataatctatccaagtctgacaagcctgttcgtggaggttctattggcgagcagctacaaagatatggttataccggcaacggaatgttcccctggaaaggttatgcaggttttcgttttgttgaggcaaaaaaagaaggtgaatttgatttagtcattgttacgcattgtaatgtgatcattgttgagttgaaggactggaaccatcaacccgtaactgcgcgcggagagacttggtataagggtgataagaacatgggacgctcgccggtaagcgtgacccgtggcaaaaagttcacgttggacaataaactcaagcgtctggcagaccgttttacgaacaaaggctatgttccatttgtacatttttttgttgtgatgactggcaatgcggacttcagtgagttaccggaagaacaacttcaccatacaatctcgttaacagattttcttaaatttgctgatcgcaacacattcaacaactacttcagaccccatccaggctcccaggttctaaacaaagattttcccctttttgataaccttttcttagggcctcagacagcgccaaaagccctgagggttaatggcttcgaagctaaggatatgattttcgaacatcctaaaaaggtgtatcgggaatacttggcaaaatcagaaatatcagcaaatagcgaagcattgctcagaatatggaatttccggaacatccaaggaacgaaagcgtacacgccggaaggaagagctgagatcgtttcacgtgagcgcgaagtgttacagcacatcaatcaccagaaccgtgacctgtataaccactgcctgaggtctctgacgagttttcagaaagacgaggtgacggcagagtactgcgaagtctatgagcttccgccgggccatgtcaggtttaatgaatttatcggaaaatatggcaaggccttttctgatatggaccgtttgaatgtggtcaaactgctcattgcgaaatttagcgatctccatgagatgaaaattgcgcacagggatatcgccgatcacagcctgtggatttcaccttcaaaagaagtcgcactttcgaactttatttcggcgtaccaccggccagccggaacggtcggcgactaccgtaagcttttatccgtaggcgcagtcgagataaaagatatgcttgatgagggcgagcttacgccttttcagcaggatgttcatgccctgggcattgtagcgtggcacttattaagcggtaagcgcatgtcgcctaagagtcttgagacagtacaggacaatatgctaaatagtcagcactggtattcagatgtattacttgatgccgttgctgcaaaatttgcttccgcgactgaattcttcgatgccctgaaacaagccgaacctgcgggcaatgcgatccctacatttgatgatactgagcttgatccttatcggcatgctattaaccactctcgccagtaccgggaagacgatgactttctggtagaaacatccgacaaagaagtctatatctcgggtggaagactcgtgaaggcctggctgaacgtgggggggcagggagacgatccttcaattaatttccaagttctgaaatttctaaaacagcttgagcagctttctttagttaaaccaacgtatctgcctcaaattcgtgaattcggtatcgcatccaaatcatcaagtctgtacatggtcacggatcaggtacagggagaaacctgggataaaatggtcgtcccgaatgatgaaaaaatcgacctcattgataagtttgtcgccgccgttgagcacttacacagtctgggggtttctcacggggacatccacccaggcaatgtgatgcttgggacacagagtcgttcgcttttcctcatcgatatccccgatttttcaccgtccggtgacgaacctaaaaaccacagctacagccctgaatacatcgataattgtacttcttttgaacgcgacaactatgcagtgatgaagatgtcctgcgagttattaggcatgtcatgggggcaggaatcagacatttatcctactattgcgaatgccatccgagcagagctggaagatccggtttttgggtttaaggatttgggccggtttaaaaaagcgatagacagtaatgaccaggcaccagaacaacccctgatagatatcactgtaggaaacgccgatgaaataatctctgtcctgcctgataacgggcatctgtatgtcaaagttgagccaaatcctaaagtgccagctgaagtaaaagtgactttcaccgggataggtggcagttttactgcagtgttcaacaaggatcagaagacgctgattcatggtttcaggccatgggctcgcgccacaattcgtaagcaagatattgatgaaagtcagttcgaaattgttactggcatcaggattattcccggtagtccgcaggatatgtcagcgttgacagtattgcttaatgaagaagaatcttttacgcgggcaatcgagttgattgccgcacctgaagatgttcaggaacagaatccgcttacgcttcagctaaaagatgcttttgcaagacttgataagcaggcgcttgaacctgctttaaaagaagtgctggaaatcccgacggtgaagctgtggcgcgccattctggatactgaaacagaatcatatccaaacattgaagtcagcggggaggtggtcccggttgcagatgctcatggagagcttcttctcccttactctgcagacgttgacccacttggcgctttcagaagtagtgatgaagtcgaagccttacaggtcgatcaggaaggtgttgagcgatttataggtgaggtgtcacttaagaagtcggagctcaaagagatccgcctggtcaaagtgcgttcagcagcctacaggctgaaggattctgatattgtcttcttccgtacaaggcaggatcgggcatcttatcagaaacgtaaacgcgcattggaacgtctcctagatcgagaaagtgtgctgcctgacttaattgacctgttcgacccatcctgcaaacagatggctcaaaattatggtatcactctcagcgatgacgattttgccagatacgaccgtgaagatcagcacggaaacaagattagtctgaatgaacagcaaagaaaggcgtttaacaaactggtcaacaatggccctctttccctcctgcaggggccgccggggaccggtaaaaccgagtttatcgcggcctttgtccactatctgatcgaaaagcagaataccaaacgcattttactggtcagccagtcacacgaggctgtaaatacagcggccgagcgcatcagaaagcactgttcccggcttggtacagagctggacgttgtcaggttcagcaacagggaaggggccgtttcccctggcctgaaagatgtgtattcaaacgcgatcacaacggagaagcgtgaactatttaatgctgaaattaagtaccgtgttgaagcgttgagtgaagccattggtctggagccggggtttatttcgggagttgtacttgcggaactcagattgttcaggcaaatcgatcaccttgagaaattgctctatcaagttaacgatttaacggattcaaaagagatcggtgaactgaaagatattgcagtcgaactcgattttgccatccgctccaggctgagtcaggagtatgggattaacctggataaagacgcgaaggtctctgcagcaaaagacattctaatttccaggctgtgtaaggattatggcgtcagaccggatgaggcacgacgggtaaaggcattagctaaaatatcccgtgatatgcaggatgctatgtcgggagagcgagtgaatctggacgagttttattcgcgttccaggcagttagtggctggcacatgtgttggtattggacaagggcacattggcattcaggagaatatctacgactgggtgattattgatgaagcagcacgctcaattgcaagtgagctggccattgcaatgcagtcggcccgacgcatcctgttggtgggtgaccacctgcagcttcccccgttgtactcagatgcccacaaagcggcattagcgagaaagctgggtatcaataactctcgcactgaaattgacgaggtattacgaagtgactttgcccgtgccttcaactctgcttatggtgcgcaagcgagtgcagctctgctgacccagtaccgtatggctccaccgattggtgatctcgtatcgaagacattctatgacaggaagcttctgaatggagaacgggcaattccggatgtctatcagcacgctccagaagcgttatgtagcgtcgtaacctggcttgatactgctaatctgggccaccgggcacatcatcttgaagatcgcggaacaagcatttacaaccgatgtgaagctgacgagattatttctgttcttaaacaggtatcagagaatgaagaatttgtcgctcagctttcaaatctcgttaacaaagatgaagccgctatcggcgtgatatgtatgtatgccgaacaaaagcggctgctccgtcagaaattcaatcaggaaatttggagcgagggatttaaggacattgttaaaattgacactgttgacagttatcagggtaaggaaaaccggatcatcatcctgtcactgacgcgttcggataagcagcatagcccaggtttcttacgagctccaaaccgtataaatgttgcgatgtcacgcgcaatggatcgcctgttgattgtgggtaatgccgatatctggaagggaaacaataaagaactaccattaggctcagttgtaagttatatggctgaacgaggtcaggaagctggatacaggttcctctccgctcagcagggaggcaaaaagaaatga

SEQ ID NO: 105349 - DNA, 1437 bp, Enterobacter aerogenes
atgatatctgataacaaagtaacctatcacgaggttgacttcctgctgcccgcacagaggtttaacattcagttttcctatgtttcccagaaggggctgccattcatccgggagtttgtgctaagacttgttcatgtagcctcgatgagcaaagcacaaatagcaacctatttcggcctgacccaccgtgagacagaggaggctatttccgatcttgtgcagcgtggcgaattgacgctctcctcagacggcagactgactttaaccgacaaatcaaatggctatttttctgaggttggcgagataccgcacctttcaactatccaggacagtggtggtaccttatcctttgatttagccacatttagctgcttcagcaaccaaactttccaggaccactggaggggagggttaacattaaaggttgatgacaacaacatttctcaaagtgagaaactggttgagaagcactttcagtaccagtttaatcaaatcttggataaaggttatctgtctcacttgcaggttcagggaggtaaagaacaaccttctatctatacagttaattctgttaataagctgcggcaaataccgctccgtttaacaacggaatttaaaatggataacgatggtaaggctgtcgagcgtgaagactatgaacagttaaacagttcggaatgtgttcatgagttaatggctgttgagatagctaggttatcacggcataacaataccatgagtatttttaaggccatggtatccataaacgatgaccttacgcttaagctgtttgactctaaaacgaatcaacttaatccattatttatcaaggatatgcaggcgctggaagaatactcagactctggcaggacgacttttttaggcccggtttattctaaaaacaactgggaaaagctgcagaaagctctggcaccggtgctcaatcagcgtatcagagacaaaaccgattatggcggtagcccgttcgtctgggtagctccatcagatccctactggtcaaagagcgtccgatttatctcaagcctgagcgattttcttaacaggtcggctacgaaggataagcggctgtataaaccggtgctgtacgtacccgtccaggatgcagctgatgcctgggttgccaaacagtggaagcatgaacttgggcaattccacgcgtgcgctaaagggctagttgaaggattgttagatggtaatgttgagatccttcatcttgaggatgagttatctgccgttatctatcatatttctcaaccagaaacgctgcctgtgacgatgccattgggcttcattacaactaacaaagatgcagttaagattattggtgcgctgattactgaatatgtcaaaagcacctctggttttgataagcctcatgactgtggatttctttcttcaatagttgaaaaacattga

SEQ ID NO: 105350 - DNA, 537 bp, Enterobacter aerogenes
atgtgcgccaataatttgataataatgaatgcgataaaacagtataataacatggttcagatgacaagtttctacaacgagcttgaactttctgccatccacccacagtctattacaggaattctggatgaagttgaatctgcattgggcaaaataaataaacggcttgatgcagccgagaaaattattaatagcgaagaactgtccaagttaattatagatgagaaaatattaactgttcgggagtgcagacaaaacctcgtaagctatttgaatgaatttacattgtacaactgcattcttaacctgaattatataaaaccttacctgacactcctcggggagaaattagtaaatatctacggacttgtcggcaattcagaagaacgtgtaataaaacgagaatttttagctgaggctatcagaattgttaatgagagagaaggtcaaattaagcctttagctgaaggtgaaaaagctcaaaaaatggcgctaatacacgatctgagcagtgagcttttcaaatatgatgagtga

SEQ ID NO: 105351 - DNA, 2169 bp, Enterobacter aerogenes
atgtcatcagttgcaaataaaaccgccaataaagattcagatgagattgatttggggcgtttgatcggtgaactcattgatcatcggaagcttcttatctcattaacatcattttttacattgttagcgcttgcatacgcacttttttccactccgatatatcaagcggatgctctaatccaagttgaacaaaaacaagggaatgcgctactaaatagcttaagtcaagtattgcctgatacacagccacaatcagcgccagagatagcactgttacaatcaagaatgattttaggaaaaactgttgatgaccttaatcttcaggcttatgttaaaccagactatttcccaattattggggcaggttgggctaggctaaatggagataaaccaggggagattgtagtatctcgcttatatatggccccagatgaggatgattccaagaggccggaattatcattagaggtgaaagaccgcaatagttattcagttagtttgaatgacggaaccgagctcaatggcactgtcggaaagttgctggaggggaaggggttatcactcatgatttctagtatagatgctgagcctggtcagaaatttcgtattacttacatgacgcgtcttagggcaataagtgatattcaagatgtgttcactgttactgatcagggaaaagacgtcgggatgttgcagttgaagttgactggagacaacgctgaaaaaattacagatattctggacagtattagtaataactatctcacgcaaaatattgaacggcaggccgctcaagatgctaaaagtttagagtttttgaacaagcaattacctgcagttaaagaggatttatattctgcagaggataaactgaatcaatatcggcaacagaaagattctgtggatttgtctcttgaagcgaagtccgtattggatcagattgtgaatgttgataaccagttaaacactttgacgttcagagaatctgaaatatcacagctttataccaaggaacatccgacgtacaaagctttgttagaaaaaaggaatacattgcaggaagaaagacaacgtttaaataaaaaagtttctgggatgccggcgactcaacaagaaatattacgtcttagccgcgatgttgaatctggtcgagcagtatatatgcaattgctaaatcgccagcaagaactaaacattgcaaaatctagcgccattgggaacgttagaattattgataatgcggtcactcaacccaagcctataaagcccaagaaaatattattggtactggttggtatgatattaggtggtataatttctgttggggtcattctattaagagtgttcctaagaagagggatagagtcaccggagcaaattgaagagttgggtgttaatgtttatgcgagtattcccgtatctgaatctatttcaaagtcaataaacaacgtaagttttatgcgtaaaaaagtcacagaatacgaaagttttctggctgtcgagaatccagctgacttggcgattgaagcaatccgtggcctaaggacaagtcttcatttcgcaatgatggaagccaagaataatatactcatgatttctggagcgagtcctaatgcgggtaaaacttttgtaagtactaatttggcagcgatcatctcccaagctgggaaacgagttttgtatattgactgcgatatgcggaaaagttatgttcataaactttttaaaacaaccaatgagaatggcttgtctgatttgatatcgggaaaagttgacgtaaataaagctataaagaaaataccaagcatagatatagattttatttctcgtggaacaatcccaccaaatccggcagagttattaatgcatccacgctttaatgaacttcttgactgggcaaacgataattatgatcttgtaattatagatacgccacctatcttagccgttacagatgcagctatcattgggaattatgctggcacgactttgctggttgccagatatgaacaaaacactgctaaggaaatagaggtaagtattaaacgctttgaacaaagcggagtgccagttaaaggttgtattcttaacggagtggtaaaaaaagcgagtagttactatagctatggctataatcactatggctataactataacggtgacaaataa

SEQ ID NO: 105352 - DNA, 756 bp, Enterobacter aerogenes
atgatcgaagtgaataatctgacgttcgcgttcaaaaagagtaaaactgcctttaacaatatcagcttctccattgatgaaggtgaagtactgtgcgtactaggaccgaatggtgttggtaaaacaacattgcttaaaacggttaccggtctgtatcagccggttagtggttcatgtcatattggccgagtgggaaaccggaaagctcatatggcgtatgttccgcaggccaaacgtgttcacttttcttacaacgtactcgatttcatctcctttggatgcccattacggggcggaatgctggcatctcctggagagagggatatcgaaaaagcggcgcaaatattgtcgggtcttggtgcttcatatcttgcaaccaaagatgttaaccagatcagtggtggtgaactacagatgtgttatatcgcgaaggcgctagtatcagagccggacatccttgtacttgatgaacctgaatcaaatcttgattttaataaccagtctctcattatcaattggttgcacacgttgtcgcgggagaaaaatgttactattatcctgaatacgcacttcatcaatcatgcaaataacattgcagataaatgtttgctaatgggaaaagatagttactgttttggaacaacacagagtatcttacaagaatctctcctcgccgattatttccacgttcccgttaaacgctgtcattttgaacacaaaggtatacagaaagaatcatttattgttgccttgtaa

SEQ ID NO: 105353 - DNA, 1014 bp, Enterobacter aerogenes
atgcaggaaagacaaaaataccgcatgctaatgtggattgcaattatattgttactgattgtggctatgatttctatgttcataggccgctatacattatccttccctgaaataatgacggaggtattacatgataatggtcgccattgtttgagcgcaggattctcggttatatgcaatctacggttgccaaggattattgccgtaatgatggtaggggcagggctatcagtagcaggcgtgacgtatcaagcggtgttgcgaaatgcgctggcgagcccggatgttctcggtacatcttccgctgcagcgttcggcgcagcgctcgggatactgctaggttttccactacaactcagcgctttttcctctttcttttttggcattgtcagccttttgtgtgtaatgggactttgctatttcaagaaaaacaatggggagctcacgactatcctgtcgggcatcatagtggcttcggtatttatgtcctttgtatcaatcattaaatatgttgccgatccgcaggacgaactcccggctatcgtcttctggcttatggggagtttcgcttctttggtcaaagatcaggtttacggactcatcccgctatacatcatttgttatctggttatctacaaacttagatggaaaatcaatgtgttgtctctgggaaatgatgaggcaaaaattgctggaatgaatccacaattgttgaatacagttttgctaatcacagcctcaattttggtggcagcatcagtcaccatcgctggcgtggtgggttgggttggtctggttatcccgcatctggttagaacgctggtcgggtacaaccatagcaagctgatcccggcttcggctgtatgtggtgcgttgtttttattggtcatcgacaaccttgccaggaccctgacttacgcagagatccccattggaatacttactgctctggttggtgcgcctttatttgctgtactgttcatcatgagtaaccgatatgatcgaagtgaataa

SEQ ID NO: 105354 - DNA, 1080 bp, Enterobacter aerogenes
atgcttaatggaaaaatattattctcattgttcatatcatcgataatattattatcctcggcaagctatgccaatagtagtgaggtgagtaaaacgataaatgaccaaaatatgaaaaattctgaggaaatgcccataaaattcaaccgtattattatcaccgggaattgcccctttggtgtaattatggcaagtgatttagcatataaacatgttgtgggcgttggaccttgggcttttctgcattcaaacatgaaacttctcaaggatatgaagccagatatcgaccgtatcactactgactttattaataaagactatgttgtaaatatggaatccttactaaatttacaaccagatattatttactattatggtaaaagtcagaatgataatctggagcgggcagggatccccactattaatcttgatgctggtggtgacacgaaatttgagccagtagtaacgcagacttattgggaaaacgaatttaaccagacccttggtttacctcacagtcacaaattttcggatgcatggaagataagcctcaatgaggcaaaaccctatgccgagaagatcaaatcacaacatattcgggcattgtatcttgagcagagtgatgggaaagaactcaaggtgagtgggccgaaaacatatggtgatacctatcttaagatggcggggatggaaaacgtagcaagtgatctggtggtaaaaggggatgctggcaggtacattaatgtttcaatggagcaaataattcagtgggatcctgatattgtatttgtggtctttggtagcgcgaaggatattcttaataataaaaatcccgggcaagactggcataatgtaaaagcattcaaagatgggaaaatattttccacacccgtaggactacataattggggaggattgtctgctgagactgcattattaccattgtttatgattaataaatttaatgctgactatataacagatgcagaattgaaaaaagcaacgcgtttacactataaaaaagtgtttgattatgaaattccagacgcgctattaaccgatgagctaagacagcgataa

SEQ ID NO: 105355 - DNA, 1383 bp, Enterobacter aerogenes
atgtcaactgaacatatcaaagaagaaaaactcaacattggtgccgtgctggctgtatcacttagtacagtaattgcgatgctggacagcactatcgcaaatgttgccttacctgttattggcaaagattttgctgtctcagaagctgcatccatcctgataatcaatgcttaccagtttgctgtggtcgcttcattgctggtatttgctgcattgggaggcaaaataggtaacaaacgtatttttattcttggggtgattttttttgcgctttcctcgttaggctgtgcactttctgaaacactgatgatgctgacggcttttcgcgtcattcagggctttggggctgcggccattctaagtgtgaatgcggtgttgattaaagagatctatcctgcccggttgttaggtcgtggattggggattaatgtgatgatggtctctgtttccgcagcggcgggcccgtcaattgcttcagctattctatcagttgcgaactggaactggttgttttctattaatgtaccgatcgcttgtatttcattgttgctctgtattgtatcgttcaaaccgacgcaacgtaccgataaccggtttgataaagcgggtgcgttgctggtttttctgacgttcgcttcgttttcaacgatgatgctgggtctggcgaggaacaacgtgttaaacgttatcccaagctcgattgttcttgtcgtgctggcaatcactttgtatttgaaccagaaaagaaaagctactgatgccttgatcccggttgcgatttttcgcaataggacgttttctctatcgctattaatgtctttattatcatatagtacccagttactggcatatgtctccttaccgttttattttcataatgtattaaatcgcaatgtcgttgaaattggcatgttgttaacggcgtggccgctggcgacaatgttgacctcgctggtcgcgggtgaacttatcaaaaagtacgaacccaatctggtggcattcactggactattactacttttgataggcactctgttaatggcatggttacccgtacaaccctcgaatctgcagatcctctaccgggtcgctatttgtggttttggttttggactattccagtctcctaataattttctcattatgacttcggttccacatgaaaaaagcggtatagccagcggattattaggcagttcacgtctgattggtcagattcttggttctgtgctggtggcgtttttctttaataattttgggcgtaatgtaacgaatattagtcttttcgccggggcattgttctcatttatgtctctggcggtgagttatttccgctttaaatctgcgtctcatgatgttggttttttaaagaaggtaatataa

SEQ ID NO: 105356 - DNA, 837 bp, Enterobacter aerogenes
ttgaataccaacattacccgacgaagacttattcttactggtttagcggccctcgcaaccaatacactggctataccgcttacatacgcacatacacgacctcagctaaatcataagcattcctccctctcaacaaatgggcacaggaaatttacgataatgctagatcctggacacggggggattgattccggcgcagtgggttgtgaaggttctctggaaaaacatgttgtactggatattacctttaagataaaagccattctcaatagccacggtataaatgcactacagacgcgatcggatgacacttttattccactatacgatcgcgtacagattgctcatgcacacaaagccgatctatttatgtccattcacgccgatggtttcgctagtcctgcagcccatggagcttccgtttttgcactttcaacacggggagccagcagcgctatggcaaggtatctatccaaaagtgagaatgctgctgataatattgctggaaaacaaatcattcacagggacaagtatctcgacaaaatcatcttcgatcttgaacagactgaaaccatcagggaaagtcttttactgggatcacatatagttcaccacatttctccagtccaccatatgcattcaaaccatacagaacaggcagcttttgcagtacttaaatcaccctatattccatctgtcctggttgaaacctcttttatcaccaacccacaggaggagaaattattaggcacaacggcattccgcaacaaaattgcatccgccatttctaatggcatcatcagttattttagccacaaacaaaacgtttcagcataa

SEQ ID NO: 105357 - DNA, 1041 bp, Enterobacter aerogenes
atgacattgcatgacctacgctattattttatatcaatcacactactcttttcaccctactctttagcggtcaacgttcttaaccaggacggtaaaaatctcgatttttatggcactattattgcgagacgttttaccagtaataacatcaaagatgatggcgatcgtagctatctctattttgggttgattgggaagcatgaccttacccacaactggcaaacctacgctcactgggaatatacggttagtgcatcagatgccagcagaaatgcaacccggctagcgtttctgggtgtagacaacccgtactggggaagcctggatatcggccggaactggggggtgctgtacgacgtaacctcaataaccgaccgctctcccttattcagggaaatgtcttataactacattgacaacttcatgcgtggcagagcccttaatcttgtgacgtggcgcaaaaatctttcggtctttcaacagacagtgaaattagcaatgcaataccagttcaaaagtaacaacgaaaatcgagccttaagacaacagaacggcaatggtataggtacttccctgtcctggttctttacgccaaagctcagtgcaatttttgctgcgtcatcttccgagaccacattttcacagcaacaaaatgccggttacaaaaaaaatattcggactttcgcagaggggcttaagtaccagagcaaaaaactttatctggccactgttttcacgcagagtaatgatgctatcaacccccaacctcgcaataataataccaacgccttcagctatgaagccctggctaaatatatgctgaccgacaaatttcagcccagcattggttacactcacctgacgcaaacaatcgctggccaacgaacacgagtactggattatgaagaaataggttttagctactacttcaacaaaaatatgcagatatttttagattataaatttaataacgtcagaaatagccctaccgggattgactgtgcagataaacttgatacagggataagttatcactggtga

SEQ ID NO: 105358 - DNA, 921 bp, Enterobacter aerogenes
atgtcctggaatagcaatctcaagcttatggcaaaaaactggttaacaatacacgaagctgtgcaagtgattaatgagacattcgacacctcaattacagaaagtaccatatatcgatgtgcactttatgggcaaatcaatctatccatttacttccagtcttcggtaatattacgaaaaatagctaaaaatggagaaaaggtaaaaatatctactttggacaattcagaactaaagagactctgttttcttgataagcagtgtttcataaataataggaatcttatcatatctactgaaggtgattacttttcatctcgcagaaatatttttgatactaacctatttggatttgagtacattatcattcaaaggtatctagcagactcactcagaataccaccacctattaacaatccttacgccattaattttggaattactgttacgaatgcaaatgatctatttttgcttttcaataaaacatcatggaaagaacaaattcagagcaagataaaatacttaccggatgaggccacctctataatcaaggagtcttcctggcggaatgaaaagcgggaatatacggttccatgctacttcccaatgcatgacttgccacaagatgcttgtttcgttatcaaatgtgttgaaatcgagagattaatagaaaagctaactattgacaaaaactccacgttatcaccgacgagaatatctacacccttatcccggctgttctggttagcctgtcatcataatgatgatatacgccctctgatgaaacaaccttacaaactcttgtctatatttgaggaatgggcaattgctgatggcatcaccgatcatctcagcggtgatacgctaaaaacggcgctggagcgtggctcccctttatcgtataaaactacggtgaagtag

SEQ ID NO: 105359 - DNA, 186 bp, Enterobacter aerogenes
atgccatctcatcaattactacgcctcagacaagtcgagcaaaaaacaggtcttaaacgttcacaaatctatctgtatatgaaagacaagagtttcccactctcaataaaaatcggcccagccagcgtagcctggctcgagtcggagattgacgaatggattaatcgtaaattagctaaccgctaa

SEQ ID NO: 105360 - DNA, 573 bp, Enterobacter aerogenes
atgtttccctcgctgaattattacgtactcacggatgtaatatatgcattgaaggaaggtgacttatcttacgctgaagcacttggatttactcttgaagaaattaacgaaatcagtcagttaccctttgatgcattattttctttctgccactctcccgtatcattcattgcggtaaaaattcaccatgacattttacgcaaacggctggaaaaagtacgtactgaaacccagtatcatcagcaaattaatcgggcgatccggttaggtggatctatagcattactaaagcattatttcggtcttacttctaacgatgtctgtctcaaccgcagattacaaggcatatctgtaccatatgggcgcacacctcttcctgatgaaaccatggatgccgcaatatggtgccgatggaaagcgttaaaaggaaaaagccctgatgctaatgaagctcttaatatcatgatgcagatcaccgaagaattagcctcggagcccaatcccccctcactcactgttgtctgtaaccgaatcacattttgcgagcagggaaggacagacaggaggacatga

SEQ ID NO: 105361 - DNA, 210 bp, Enterobacter aerogenes
atgcctgacgaagttgatcgcgaccaggaattcaatgagcaacgtctggaggaaatgattgagcaaagccgtttcaaaccagcagcaacgccttccctgtatcactgtcagttctgcggcagaccaattcctgaaaagcggaggcgcactctcccaggagtaacaacgtgtagagaatgccaggaaatgcttgagcgacgcaaacgataa

SEQ ID NO: 105362 - DNA, 708 bp, Enterobacter aerogenes
atgctttccacatctgcctttctggcggtggccatgcagtgtgccgccagcattcatccgtccacagcactcgacgtcgtaagggtggagtccaattttaacccttatgcgatcgcagaaattatcccaaggggctcaggcaccttcagacacaataaaatcatttctcatcagcctaccagccgggaaagagcagagcgaatcatacgtcgccttgtggcgcagagccgccgttactctgtggggctgatgcaaattaccagtaccaattttcatcattacggtgtgacagcctctgacctgcttgatccctgtaccaatttgtctgttttcgaatacatcctcaacgactgttaccgacgcggcggctcgctgaaaagagcactgagctgctactactccggcaatttccgtaccggagaacagccggaagcggctttttccggaaccagctatgtgcaacggattggttacgctgcagctccccactatgccgtacccggaacccacgaggataaattaacatccccgccgttcctgaagcctacgcctgcaggtgaccagttacgtccctgcgtgatctggccgaagggcgtggttcgtggcgtcccctcaaaattccgccagaagaaaattgccctcgaaaagatctctacgccgtcattgcgccggagcctctccctgtcaccccgtgaggagaaagaataa

SEQ ID NO: 105363 - DNA, 294 bp, Enterobacter aerogenes
atgacactttgccgcatacttaaggccgctttcagtcctgtttccgcatttgcactcatcgtctgttctgtacccccggtttttgccgacggctttcaacgcgcaaatactgtgatggaaaaagtcgccactggccttaatggtctggcagccatcaccattaccgtggccgtgatctgggtaggttacaagacactctggaaaggcgaaagcctgtcccagtgcgcctacatcatcattggcggcatcctgattggtggaggcagtgaaatcggcgcactgctgatgagctga

SEQ ID NO: 105364 - DNA, 2745 bp, Enterobacter aerogenes
atggcaaagctgcttaaggcaatgaaacgtccggcggcactatggggcgtgccgatggtgcctctactggctgtcacgggtatcaccatcatcattgctgtctggacctccgtcgctttccttgccctactcccgattgaatttctgctgatgaaatcactcaccaggaatgaacccatgcggttcagcctgatagccgtctggctcagggcaagaggaaaacctgcggcaaaccgtctatttagcgcaacagcatttatgcccattgagcatgatgctgttgatatcacggagtttctcaacgtcatgaaactgaatcagagtgccacgctcaggaaatacattccgtattcatcgcatattcatcagcatgtcgtccgctcacccaatagtgacctctactgtacctgggaactgacgggcactccgttcgattgtgaatcagaagaaacgctcaatattgaccataaccagttgcacggacttatccgctctttcgaggggatgccgatcaccttctatatccataacgtaagggagccatttaccgattcgctacataaggtatccggcaactcttacgctgatgaagtcagccgtctgtattatgcttcgctggaggctaacccgtttcgccgtaaccgcttgttcctgactgcctgctaccgcccttttgccagtctggaaaaagccggacaccggcgtatgaaagacggccagaaactgaaagagcttgacggtgcgttgcaggagatgctggaaattaaaggtaccctcgataccgctctgtcacgctacgccgcacactctcttggtacgttcagcgaagaacaggcggtattctcctcccagttatctttttacgagtacctcttgacgcaccaatggcgtaggatccgcgtcacccgtgctcctgcatattcggtcatgggatcggcagcgctgtttttctccggggagtctggacagataaaccatgccggcggcacccagtatttccggggtctggaagttaaagagttccctgaagaaacagcgactgggatgatggattcgctgctttatgccccctgcgattatgtcatcacacagtcctacacctgcatgtcacgggaagaagcccggaaggccatcaaacgcacccgacgtctgttaatgagttcagatgatgatgcggtgtcacagcggctggatctggatgtggcacttgacctgctgacatcgggaaaaattgcgtatggaaaacaccatttttccatcatggtgttttcccacacgctggatagtctggtagccgataccagcgaaatcagcaatgccctgaacaacctcggcattatatcggttcccgccgcgctttcgctttcagccgggtatatggcacaactgcccggcaattatcatttgcggccccgcaagggtgagctgagcagtcagaattttgtcgagctggcttcgctacacaatttctatcccggcaagcgcgataatgcgccctggggggatgcgatggccttactgcgtgccccctcaggggatggctactatctgaaccttcacaatacgctggctgacaaggatgaattcaacgagaagaatccagccagtacctgcattctcggtaccaacggttcgggtaaaaccatgctcatgacgtttctggaaaacatgcagcagaaatatagccgtatggagagtttttctcctgacgcaaaaaccaaacgactgacaaccgtttatctggataaggatcgtggcgctgaaataaatatccgggcattgcaaggccgttattaccgtattacacatggcgagcccaccgggtggaacccattttcgctgtcgcccacgaaacgcaatatcagttttatcagtcagttgatgaaactgctgtgtacgcgtaacggtgcgactatcacaccccgcaatgagcgacgtctaaatgacgccatactggcggtgatcggtaatgaaccgcagtaccgtattcatgggatcacccgtttactggagaatcttccggagcctgcgacccgagaagcccaggagaatggcctgagtattcgcctgtcgcagtgggcgcagggtggcgagtttggctgggtatttgataacgcatcagacaccttcgatatcaatcgctgcgataactttggcattgacggcacagagttccttgacgatgcgaatatctgcgcaccgatctccttttatctgctgtaccgcattaccagcctactcgacggacgtcgactggttatcttcatggatgagttctggaaatggctacgggatccggtatttaaggattttgcctataaccggctgaaaactatccgtaagctaaacgggctgctggttgtaggaacccagtccccggcggagatcatcagggatgaaattgcgcctgccgtgattgagcagtgtgggacgcagattctggcagctaaccccagtgccgaccgggcacactatgtcgacggaatgaagtttgaaccggaggtgttcgacgtcgtgaaagccctggatccgcaggcccgtcagtatgtagtggtaaaaaatcaatttagacgcggcgacataaagcgttttgctgcacgtgtgacgctcgatctttccggtatcggcaagtacacaaaagtcatgagcggcagcgccgacaacctggaaatcttcgactctctgtaccgtgaagggatgcagcccgatgaatggctggatacctacctggctcaggcactctga

SEQ ID NO: 105365 - DNA, 705 bp, Enterobacter aerogenes
atgaaacggcgttttcatgcattaattattgcgtgtgtgatcatcaacccgctggcacacgcaggtatccctgttctggtggatgctgacccactacgtgagctcgaatggctgaaagaggcacaacgctggatacaaacagcgcagcattatgagagccaaattcaggcatataaagaccagttagcaacggccaccggtgtccggaatattgttgatttcgttgatcaggcgaagagtcttaaatcagatctggaaaaactgcgtaagccgggccagacactcaacgacctgctactttctggcggcaccgccgggcagttcgatgcgctatacgcaaagtaccgggtttttgatacgtgcaacgcggcgcagtccggaagctatgccgatatctgcaaacaacaggtcatcaataaggcaattcaatttgagcagactgacgagatccaggatcaggtcagccaggcactgggcgagatcaacaacctttcgaaccgtattgcactctctaaagactcaaaggagtcgcaggaccttgccaacagtattcagttgaaatcagtgatgctgaacacgctcactgatcagtgggaaatgagtgtgaaggcggcagaaaaacgcggaaaagtgctggaggatgagcgtctcaaacagtggaaccagcagcagttaactgcaccaacccccgatttaaaccgctaa

SEQ ID NO: 105366 - DNA, 228 bp, Enterobacter aerogenes
atgcgtttattaaccttttcgttcctgtccattttattcctcatcatttgcggctgcagagacgaaaccaaaacgacccagtggtacaaagatcatcccgatgagctgaaaacagtgtatgaaaaatgcctgaaaaccggcgatgcctctgaaaattgtaaaaatgccaatgaagctcattttcagattcaacagttaaattcccccactcccaacctaaattcatag

SEQ ID NO: 105367 - DNA, 1065 bp, Enterobacter aerogenes
atgcctggtggtgtatttatcggtgttgaaaaacacctgatagggggagtcaccgacgcaacaaagggactgatgatgtcatactccgccatgatgctgggactggcggcaacgtcagcgacactttatatcatgtggcgtggataccagagcctggcaggtaagttgtccacccccatggaggacgtcatgtgggacatcataaggatggccatcatcctgtcctttgtggccaatgtcagcggttatctcgacggggtaattgacgcgatcaatggcttaaaagagggcttttccggcaacgataatatatggcaactactggatagcctatgggataaagcgaaggtattaggcaaaacgttacatgacatggataattcaacgtacataaaagacgagggcatcacagctcaattttatgtgtggcttgggatattcgtattaatgactattacagcctttgttgcaatgatcgcagaggtcatggttttgctgctcagcatcacagcccccgtatttatcttttgtctcatgtatggctttttacgtcccatgtttaacaactggctgcaaaatattttcgccgccatattaacggttctattttctgcattgtcgctacgagtggtcgttaattatttaaactcccgcttagatattgccacacaaatatctgcacaatctaatattgtggagctaggtgctcaggtctgtctcgccggggtctgcgcggcaataatggtatacctttccgcaaaactggccggagcgctagccggggcgggagccactgtctccatgcagggactggccgccgtgggtataggcgcagcggcgtttggtgcagggaaattagccgcaggagccgggaagcagacaacccgcgcaattcaggacaattttcagggctggagagatgccagcgcagataaacccggcagcggcccaggatacagagctgctcaggtacgtaagtatgccattgagcaaatgatcgccaggaacgaggcccggcgactggtgaaatcaagagaaacaaccgttcagaaattccatcgttaa

SEQ ID NO: 105368 - DNA, 138 bp, Enterobacter aerogenes
atgaaacgcttgattgcgctgattttactgtgcgcgctttacggctgtgcgcagtctccccatccccaggcctttagtgggcacggcatcccggtcaacacgcctcagattatggcggagttaaacaatcatgagtga

SEQ ID NO: 105369 - DNA, 684 bp, Enterobacter aerogenes
atgagtgaacagtcagtcattgcggattcccgcacctttgagcagaaaatgattgagcgggacaaacgcgccacgaaggccggatttatggttggcggcgcgggcttactcattgccatactggcactcacaattgtggtgctgctattaccgctgaaacaggcagttattgagctgtacgctgtagataatcataccggacgggtggagcacgtcacccgagcgtcaaaaacgagtctgacagcggaagatgcttatcaaaaggcgatgacctcatgttacgttagagtgcgtgaacgttacatttaccctgccctacaggacgattattcaacggtacaggtttataacagccctcaggttaatgatgattatctggcactttatgcaggaaaagacgccccggataaggtgtaccagaatgaggcccacaccgtacatatcgacatcctgtctaatcagatcaccgaaggcactgcccccgataaagtcgccaccctccgttacaaaaaaactatccgccgcctcgctgatagcagtacccgtacagaatactgggatgcccacctgacattccactccaaccccagtaaggaaatgagcgatacagagcgggaagttaacccgttcggttttacggtgaccagttggcaggcagatcgtgaaatcagaggagttgaataa

SEQ ID NO: 105370 - DNA, 900 bp, Enterobacter aerogenes
atgaaaattatcatctttttcgcactggcgatgtgcggtatagcctggggtgctgcaataccacaagcaagccgctacgacgcccgtctccagcaggttgtctataacccgtttaacgtcactgtcgtcaatacccgacccggtttcgtaaccacgctgatctttgacaatgacgaagcggttatcagtgctaaaccaggttttgaggaagcatgggaagccacagcagacgcaaaccgggtcagtatccgcccagtagccctggttcagagtgcccccggagtggacggtaatacagcgcaggtggtcattcctcccaacagtcacgactggcataccaacatgctaatcgttactactcggcggctgtataacgtcgagctaaacgtcatcgatgaaaaatcatcgcagcagcctgcttttcaggtgagttatcgctatcccgatgaagcacgcgaaaaagcgggccgtgaggtcacagccaaagcgcaggaacgggagcagaaacaacagcaggccgatatccagcaggctcttaacgccgcgcagacaccacgaaactgggactatctcaaatatccggggagtaatagcacgcgtatcgttccggacttcgcctatgacgatggtcgctttacgttcgtgggcttttccccagctaaatccattccctctttgacgaaagagctaaacggccaggagcatgtggttaacagcagtgtccgcaggaaaggcaacttcaccgtactggttattcaggaggtcacgccccgtctgatcctgcgttccggtggcgctgtggtcggcctggaaaatcgtggtttcggcagggttcaggtcgcagatggtgccacagtctccccgcaggttgagcgagtggaaaaaaccccaacccattaa

SEQ ID NO: 105371 - DNA, 1251 bp, Enterobacter aerogenes
atgaacgacgaacatctacatcctgtgccagatgaatccaggtcctgtccgacacagaaggatgatgatattgctgcgcttgagcgcgaggcccgcgcaaagcgtgaagctgtgcttcacacctggcaggatgatgacaataacgatcccatacagccgactgtcaataaactgaaaaagcgccagcgggggaaagccaccgcttttctggcattcgctgccgttgccctgattgcactggcgtgggtgggtaactggatataccacaatcttctttggcagcccggtgaagaaaagcctcaggaaactatggccccgacagatcgaaccgattcccggcagcgtaccgatctgggtacgcactatatcgacgcgaaaacaccagaacaggcggacaacaaccctggtagtacgacacccaacggatcggaggcactgcccgacttagataaagcccgttttctggtgcgccgggagagttcaggttcggcggtacgaaatccggtacggacccgccatcaggaaatggcgcaggtatcctctaccgggcagccgtcagggacacaatcttctgataccggtcagccgctaaacacctcgtcgccacagccggaatcgtccccgacagcggtccggcgaattccttatgatcccgatctgtacgtgcctgaaaataccactattccctgctcactggattaccgttttgtctcagatcgggctgggaaaatccgctgcacgatcgccgaagacatctggagcgccagcggtaatacaaagatgattgaaaaagggaccactgccacggggatgtaccagactggcgcagaaacaggaatgacacatggacagggacgcgcattcatcatcatcacgaaactgcgtacccgccagccccctttccttgatattccgctggtcgatacgaatgctgccggagaactgggcgaggctggcgttgatggctggatcgactcgcatttcagggagcgatttggaggcgcattgctggtcggtatgatccctgatattggggcatgggcatccaacagtgccggtcagaaagatcggaataccgactataccgaaaacagccgtcaggctatggcggatatggcacgtaccacgctggaaaacagcattaatatcccaccgactctctacaaaaatcagggtgaaatcatcaacctgctcacagggcaggatattgatttttcaggcatctacacgctgaggatgaagagtgaataa

SEQ ID NO: 105372 - DNA, 387 bp, Enterobacter aerogenes
gtgaataatcgaaagtttttgtttggtgtcacggcgacagacatcatcgaaagggacgatttcagtaatgctgtcgtcaacgacttactgtcacaccttaccggaatcagaagaatagtcatgacatgctatcgtgccggaggcgcattgatagaactcagtattgactcaggagaagagcaaacattctgtatcaccatcagtgaaggccctttggatgcaccacctttttcctcggacgatatccggctggcacataagcagatatcgctgcctgacgtcaccgatatactcatttttgtgacaacattaggccgctacgccggactttccccctccgtctccaccgatgaagattcatcttccctgctggagttcagctcgtag

SEQ ID NO: 105373 - DNA, 1008 bp, Enterobacter aerogenes
atgtcgaagacgaaagtactgttcgcttattgccatgaactcgggcgctgtttgtccattgatgaagcgcgaacggaatttttttccagaaagccggaagaaaggaagcggttcactttttcatgtagcgatcgcaactgtgatgtcaccattagcggtgttaactatcacgtcaaagctgaagatggtgagaaattcaaggctgcgcacttccgttcacctcatcctcacaagttcggatgtgaatggctcgaattcaccgaggatgcggatcaggaacggcgtacagacgagtcagaggctgatttcacagaacgaaaagcaaagcaaaagctgacggactatatcaactgctttgacccttcaatagatgatcctgatggcgaaccatccgatcccgtgaagcttgttacgcctgttcacacaagaaaaacggtcggggatgatgataaaacggacacaaatgaagagccccgctggagtcgctacacgcgaaccaaccagcttcagcgacttatcgacacatggcaggaagcgaaagaaacgctgcctcaggatgagttccgggcgttgagactcaggatcatgcaccacgatcaggtctatctacatgaatatataacgcatatacagcgtggattggctaatccgtattcgggcgtcatctatggtggtgggaccctaatgcatcggtatggtcggggttttctgattaatttctttgataaacatgaggggaagcctgttcgtctgtatgtcagtaaagatctgatggcgaaagggcggtttggtcattatatcgatgagattctggacactaaaaacgtcagatatttccgtatatttctactcaatccggttgtttccgagcgggaaaacagcacaggaaaaagcgttatcaaccttgaaatatcaaagctgcgtcaactggcgatttactacgagctgaactccagcagggaagatgaatcttcatcggtggagacggagggggaaagtccggcgtag

SEQ ID NO: 105374 - DNA, 1020 bp, Enterobacter aerogenes
atgaaaaacatctctctcgaccgctatacacagcgattttttggcgattttattgttcatcctggactaacagaaatcgccgtcaaccgcccgggcgagctatttaccaaaattgatggtgcctgggagctgcacagtgtttcgctggattatgaggggtgctacaacttcgccagatgcctggcaaagcatcacggcgacaatattgaagatatcaaaccggggctgtcagccacgctggaatccggtgaacgttgtcaggttattgtccctccggcctgtgagcgcaacaccgtctccattactatccgaaagccgtcacgggtacaaattccccaccagagctacatcgacgccggtttttataacagggtaacaggcgcagaaaccattcagacacacgaccaggaattattgggcctgtataccgccaaagatatcccgcgtttcatggagaagtgcatggagtacggtaaaactatcgcagtggccggggaaaccagtaccgggaaaacaacctacatgaagatgctgattggttttattcctcgccatttgcgtattacgaccattgaagataatccggaaatcaccttttttgttcataaaaactatgtccacctcttctatccatccgaatcagcagatgaaaaaggctcgattgtgacgccagccagtcttctgcgctggaattatcgcatgaatcccgaccgtatattgttaaccgaagtacgcggtggtgaagcctgggattttctcaaaataaccggctctggccatgaaggcagtatgacttcccttcatgcgggttcagcaatagaagcggtagacggttttattactcgctgttatgaaaacccacaatgcgcccggctgccctacacgtttatgttacgcaaagtgctggacagtctggatgttattgtcagtattgatttagacgggaacgtgcgccgaatgaatgatatctatttccggccattgcaccgtaatgccttcttcgaggagatgaaagcataa

SEQ ID NO: 105375 - DNA, 303 bp, Enterobacter aerogenes
atgaaatacgccaccattgcgatggtaatgctgtgcattgccattgtgccccctgtttattgcttcgccgcggccccatgcgaagtcgtgctttgtatgtacgggaaagcgaccggaaacagtggagggagtgagtgccattcagctgaaaaaactttctttaatatcgtcaaaaagaataaacacggatttttacccggtcatacactgaatgccagaaaagctttcctcggagaatgtgtcagtgctgacccggaggcggtgaataaaatcctgtccagatttggcaggctcagaggataa

SEQ ID NO: 105376 - DNA, 306 bp, Enterobacter aerogenes
atggataaagaaaacctttttatttccaacatccactcaatgcatcatgacagaatatcggtaggagccgtgtacagaaagttctctgaggaagcgaatcagggatgcggcctttactatgagatctatgaaagtagactgatcagtttattgcgacatcatctttcgcgtcttaatgaacaggatgctgacaaactcagacgatacgccgaaaatcagggaacgaaagtcgatgatgaaacctaccgggaggtattaaaggctgaacaggaatgccggggtgaaatatatcgcgaacaggtgtga

SEQ ID NO: 105377 - DNA, 243 bp, Enterobacter aerogenes
atgaattctgatcggtacatcccggtaaccaggaaagttttttacgtagcgcaatgttgttgctggctactgcacgttaagataacagcctgcattcatatactcattagcaggagaatacatgatcagtttgtagaaaataaaaaatgttgcgctcagcaagaagtgctaagagatactctccatgttcaggccgggaatatcagtatgattttaatatataatctgaaaactggcgggtga

SEQ ID NO: 105378 - DNA, 264 bp, Enterobacter aerogenes
atgaagaggcgttctttcgacgaacagatcatcagtattttccgcgaggattgtgctgggatttctgcccgcgagttccgccgtaagcacgctatttccggtaccatcttatactcctggcgcaagaagtatggcggtatggtggtgacagaggttaagcgcctgaagtcgcttgaggaagagaacaccagactcaagaagctgcttaccgaagcgatgctggataaggaggcacttcaggtggctctggggcaaaagtactga

SEQ ID NO: 105379 - DNA, 285 bp, Enterobacter aerogenes; identical to SEQ ID NO: 31406

SEQ ID NO: 105380 - DNA, 2130 bp, Enterobacter aerogenes
atggcgatttatcaccttacggcgaaaaccggcagcaggtcgggcggccaatcggccagggccaaggccgactacatccagcgcgaaggcaagtatgcccgcgacatggatgaagtcttgcacgccgaatccgggcacatgccggagttcgtcgagcggcccgccgactactgggatgctgccgacctgtatgaacgcgccaatgggcggctgttcaaggaggtcgaatttgccctgccggtcgagctgaccctcgaccagcagaaggcgctggcgtccgagttcgcccagcacctgaccggtgccgagcgcctgccgtatacgctggccatccatgccggtggcggcgagaacccgcactgccacctgatgatctccgagcggatcaatgacggcatcgagcggcccgccgctcagtggttcaagcggtacaacggcaagaccccggagaagggcggggcacagaagaccgaagcgctcaagcccaaggcatggcttgagcagacccgcgaggcatgggccgaccatgccaaccgggcattagagcgggctggccacgacgcccgcattgaccacagaacacttgaggcgcagggcatcgagcgcctgcccggtgttcacctggggccgaacgtggtggagatggaaggccggggcatccgcaccgaccgggcagacgtggccctgaacatcgacaccgccaacgcccagatcatcgacttacaggaataccgggaggcaatagaccatgaacgcaatcgacagagtgaagaaatccagaggcatcaacgagttagcggagcagatcgaaccgctggcccagagcatggcgacactggccgacgaagcccggcaggtcatgagccagacccagcaggccagcgaggcgcaggcggcggagtggctgaaagcccagcgccagacaggggcggcatgggtggagctggccaaagagttgcgggaggtagccgccgaggtgagcagcgccgcgcagagcgcccggagcgcgtcgcgggggtggcactggaagctatggctaaccgtgatgctggcttccatgatgcctacggtggtgctgctgatcgcatcgttgctcttgctcgacctgacgccactgacaaccgaggacggctcgatctggctgcgcttggtggcccgatgaagaacgacaggactttgcaggccataggccgacagctcaaggccatgggctgtgagcgcttcgatatcggcgtcagggacgccaccaccggccagatgatgaaccgggaatggtcagccgccgaagtgctccagaacacgccatggctcaagcggatgaatgcccagggcaatgacgtgtatatcaggcccgccgagcaggagcggcatggtctggtgctggtggacgacctcagcgagtttgacctggatgacatgaaagccgagggccgggagcctgccctggtagtggaaaccagcccgaagaactatcaggcatgggtcaaggtggccgacgccgcaggcggtgaacttcgggggcagattgcccggacgctggccagcgagtacgacgccgacccggccagcgccgacagccgccactatggccgcttggcgggcttcaccaaccgcaaggacaagcacaccacccgcgccggttatcagccgtgggtgctgctgcgtgaatccaagggcaagaccgccaccgctggcccggcgctggtgcagcaggctggccagcagatcgagcaggcccagcggcagcaggagaaggcccgcaggctggccagcctcgaactgcccgagcggcagcttagccgccaccggcgcacggcgctggacgagtaccgcagcgagatggccgggctggtcaagcgcttcggtgatgacctcagcaagtgcgactttatcgccgcgcagaagctggccagccggggccgcagtgccgaggaaatcggcaaggccatggccgaggccagcccagcgctggcagagcgcaagcccggccacgaagcggattacatcgagcgcaccgtcagcaaggtcatgggtctgcccagcgtccagcttgcgcgggccgagctggcacgggcaccggcaccccgccagcgaggcatggacaggggcgggccagatttcagcatgtag

SEQ ID NO: 105381 - DNA, 213 bp, Enterobacter aerogenes; identical to SEQ ID NO: 31409

SEQ ID NO: 105382 - DNA, 207 bp, Enterobacter aerogenes; identical to SEQ ID NO: 31408

SEQ ID NO: 105383 - DNA, 225 bp, Enterobacter aerogenes; identical to SEQ ID NO: 25145

SEQ ID NO: 105384 - DNA, 222 bp, Enterobacter aerogenes
atgttatcgaccgccgtcttaccacacgtcttgcagcaaaccggcttgaggtatctgacagacactgccgacggttgctggagcgctatcgtgaacaagggccgctttcacttgttaaccgtcgtcgtggccagcctgacaaccggcaactcatgccgggcctcgctgaacgagcactacttagtatccgcgaacgctacgctgattttggtccgactttag

SEQ ID NO: 105385 - DNA, 297 bp, Enterobacter aerogenes
gtgaacatcgaaatcgtgacgtggtggcttcgcaaaccggtggttctagtcagccatgaactcttcggcaaaggcgtttgcagcctcgggtgtactgataccgcggagccgcagctccttgacgaggcgctcctgcaacgtaaggtgggcaagctcaacacggcccttggcagaactggtattggcacagataccggtgatgttcagctcgttcatggcacggccaaactgagtctggccatctccaccgaggtctgcttgttgttgatcctgaagacactgaccttgccgctgtag

SEQ ID NO: 105386 - DNA, 318 bp, Enterobacter aerogenes
atgcatctggcagcctgtctgctgctgtatgtgaaacacagaaggggcccggaatttgaggaactcagggagctttatacccgctattgtgagctcacaaaatgggatctcagtaaccgggaaatttacactttcagcgtggattatgaaccccgtcataccgaccagaactatggctcgtatctatgctactgggtccagttttcaccgaagaacagactttccttttcactgccggatgtagtggatgtgattgcaaaagctgcggctcctcccctgacagtggacgggatttcaaatgagattcgttacacgtag

SEQ ID NO: 105387 - DNA, 1926 bp, Enterobacter aerogenes
atgagtaatttaagcataccaatagatagagttgccatatcctcatctgtcagctttcgccacgatataaatgttttacgcggcatagctatacttgctgtcgttttgtatcatttcgcaccagtccttttacccggcgggtttgttggagtagatatattttttgttatatccggttttttgatgacgtctatcattatgaacaggatcgaaaaggaaaaattttgtcttctttccttctatgcggctagatttcgccgcatagctccaactgttatggtaatgtctgcaactcttatggttgctttctggtcttggcttccgtcaattgaatataaaaaaataggaagctatatcggctatgttatattatatatctctaacattaagttaaataaagaaagtagcaattacttcgcttctgattcccatgaaaactggtttctccatacatggtctctatctgtggagtggcagttttatcttttactcccacttttgtttgtttcgctttccactttaaagaaaacgagactcataatacctacatacatcttattgatttttatttcttttttatgttgtttatattttcattctgaaagttcttcttcaactttttatctctttcaatatcgatcatgggagatgttaagtgggggtttagttgcactccttaaacctttttccgataataattcaaaattaaggcgtattgttgcgttaacaggatatgtggttttagctgcatctatcattatattaaaaccatcactagcatggccgggattgtacactatcattccggtcgtcgggacgatgctttgccttgcttcaaatagcaaaagtgttgccgttatgctggataaatatattggatggattgggttaagttcttactcagtttacctgtggcattggcccgtcgcggtttttctaacctatgctagtttaaataaagatactaaatggataattattggtatatgcgtttcctttttagtcggagttatctcatggataaccattgaaagaacactaaaaaaatatttagaaaaagcatctaatagatctttatgctatatagcgttgatagccattgggtctttatatttctcggcataccttataaaacatcaatttattgttagttctgctggcaaacaaattgatatgattgcacttgaagcaaataataagaattatgcagagaatcctgaaacccatttcagcttttatggtactggttcaccaaaagccattattttaggtgattcgcatgctgtagctacagcaacagctttagcttctgctgttggggaaagaggatcagttatcgggttaacattttcaggctgccctaatattgcatttggtgagctaaaaggccattctggatgcagtatttttaatagagaagtaactaaacgactatctcaatatgatgcgaatgttcctgtttttattgtcaacaggacaatgcattacattgaaaatcgtgctatagagtttgaaaatatttccagcatggtcaaagatgaggacgatttatttaaaaagtctcttaccgatatggtttgtaatattagtaaaaatcataaagttttcattgtaaatcctattccagaaatgcccgttaacgttcctcgcttcatatctcactctctaatgatgggatatagtgttgaagatgtaacctcaaccgtacagtcttataacactcgtaataaggtagcaatagaggcacagcaatatgccgctactcaatgcggggcagaaattttaaaacctgtcgattttttatgtcacggcggtgtatgttacggcagcaaaaatcttcaaccattttatttcgataataaccaccttagccagacaggcaataagtggcttatacctatgttcaaaaatgcgttagaaaaataa

SEQ ID NO: 105388 - DNA, 294 bp, Enterobacter aerogenes
atgcaccatcagggcgcccagcttcgccgattcttcagccagaaccgccactcctttctcattcaggagatccgaaagctcacgctcactttccgccttatcgacggcggtatgtgccgccgcattaactaccacatcgggtttgacggtacgtacggtctcagcgatcccttgcagattcgtcaggtcgccgcaaagcgttttatcaaaataatcgacggccaccacgtcacccagagtggacagcgctcgttgcaactcccaccccacctggccgttcttgccaatcagtaa

SEQ ID NO: 105389 - DNA, 870 bp, Enterobacter aerogenes
atgaaaggtattgttctggccggaggctccggtacccgtctttatccaatcacccagggcgtctccaaacagctgctgccgatttacgataagccgatgattttctatccggtgtcggtgctgatgctggcggggatccgcgatatcctgattattaccaccccggaagatatgccggcattccagcgtctgctgggagacggttcacagttcggagtgaacttcagctatgctattcagccgtccccggacggtctggcgcaggcctttatcattggcgagaagtttatcggcaatgatgcctgtgcgttagtgctgggtgacaatatctattttggccagagtttcggtaagaagctggaagtggcggcggcgaagacgtcgggagctacggtcttcggctaccaggtgctggatccggaacgttttggtgtggtggagtttgacgagaacttcagggcgttgtcgatcgaagagaagccgctgaaaccgaaatccgactgggcggtgactgggctctatttttacgacaacaatgtggtggagatggccaaagaggttcgcccgtccgagcgtggtgaactggagatcaccaccctgaaccagatgtatctggagcgcggggatttacaggtggagctgctggggcggggatttgcctggctcgacacgggaacgcatgacagcctgatagaagcttcacagtttattcataccattgagaagcgtcaggggatgaaagtggcctgtctggaagagattgcataccggaataagtggctgtcggcggaaggcgtggcggtgcaggccgagcggctcaagaagacggaatatggcgcctatctgaagcgtttgctgagcgagagctaa

SEQ ID NO: 105390 - DNA, 843 bp, Enterobacter aerogenes
atgggaggggagcgtaagtggttacttcaagaaacatttacactcaatagaaaaattactaaaaaccgaaatctaaagcagcgcataaaaaacttgatactttatcctaactttagacgtaaccgtatcataggaaaaataaattatttttctcctgttattccaggtgaatacgatcttataaagaaaaaccgtaaatggaagaggtttccagagcaggttgattggaactacggagctgcagaaaaagatctatcttcttatgtttcagatattaatgatataagctctattggcgaaaatattcttatcggaaatagtgctactagtactaataatcatcttgagatttttaatatcttaagtaagattaactttcaggagcgcaagcttatagttccactcaattatggcaatagagtttatggtcaaaaaataaatgttattgcatatgatttattgggcgagagtgtcgatgcattaattgatttcatgccgttagaagagtacatgagaaaaataagttcatgcggctttgttattatgaatcatataagacaacaaggtgttggtaatataatcagcatgatttactttggtgcgaaagtatttcttcgcctagaaaatcctactttttcgtttttgaaggaaaaagggattaagctctattctgttcaagaattggaaaacgaaccttcccttttgtcttctcatcttgagaaaaaagatgtggttaataatcgcttaataattgatagcatttggtccaatatggttttgttgaacaagaccataaagctggtctcttacgtgaccaaaaaggagggaaagggtgaagcttaa

SEQ ID NO: 105391 - DNA, 129 bp, Enterobacter aerogenes
atggaggtgcccgacgttaagcgcctgaactcgcttgaggaagagaacgtcagactcaagaagctgcttgccgaagccatgctggataaggaggtagtacttcaggtggccctggagcgaaagtactga

SEQ ID NO: 105392 - DNA, 165 bp, Enterobacter aerogenes
atggataagaaaatctggactaaagctttactcgcgagcgtaaaagccccagtgacacttactggtaaaaagatagatgaaaaaatcattgtcgagtttacgaagcaaccgaacgatgcttcatgggattataatgtacaccaatggagttacaatgatgaatag

SEQ ID NO: 105393 - DNA, 1158 bp, Enterobacter aerogenes
atgaaattaataaatgtaataaagccaacccacgtttgtaatctctcgtgttcatactgctataacggtgatgaacgccgtccatttatggatatagatacactagaaaaagtaatagagcagacattttcactagcaagatttatcggcaaatacaagtcggttgaattcatttggcatggaggagagccacttctagcaccgttatcattttatgaaagagccatcgccttccaggaagaatatgcagataagataccttattcaaatattgtacagacaaatggcacaataattaaaaaagaacatttggaatttttaaaaaaatacaaattccaagttagtttatccattgatggtataaaagaatcacatgacgcaaacagagtattcaaaaatggtaaaggtagtttttcccgtgttttggagaacgtaacaaagctaaggaaaaatggttttagaataggttgcgttcttgtattaaacagaaaaaatagagaaaacattaaagagtcatattcttttctccgagacaataaacttggacttaacatcatccccctaaagaagggagggagtgcaactaatatattcaatgaaatagctttaacgcaggcagagtattttgaaacatggtcattactttatgaagattggctttcagcaggtagtgaagattatgttgatgtatctagctttttacacacaacacgctctgtaatatcaggctcatgttcatcatgcattgggatgtcacaatgcggtaaagctaatctttcaacggaccctcttggtaatatttatccctgtgctagtttaacgggaaacatggatgtttgttatggtaacatcaatgaacattccctcattgatcttttttattcggatacagcaataaaatggagacatagatcctctacagaaaaatgttctaaatgcaagtggtttcatttatgtcatggtggatgtccttcacgttcatatcattattacaatggagaatataatacacctgatcattattgcaaaagtatcaaaatgatgtacgaccatgttgaatcacaacttctaaaattcggtataacacccggaaatgtaaaacccagccatctaaatgatggtttcgtaaatgtagatgagttaattttgaggaaatag

SEQ ID NO: 105394 - DNA, 1272 bp, Enterobacter aerogenes
atgtctcttaccgacaccaaaatccgcagtctcaaaccatctgataaaccctttaaagtttccgattcccacggtctgtatctcttggtcaaacctggcggttcacgtcactggtatctcaagtaccgtattaagggtaaagaatcccgtattgcactcggtgcctacccagtcatatccctctcagacgcccgtagtcaacgtgaaggtattcgcaaaatgctggtactgaacatcaatccagcagagcagcgagcagctgaacgcagttctcgtataccaaagaaagtgtttaaaaacgtggcactggcgtggcataagagcaataaaaaatggtcacacaacaccgccgaccgtctgctcgccagcatgaataatcatatattcccggtcattggtacgatgtcaatttcagaactgaaaccccgtcacttcatcactttattaaaaggaattgaggaaaagggtctactggaagttgcatcccgtacacgccagcacctccggaatatcatgcgctacgccgtgcatcatggattaatcgattttaatccggcagcaaacttggacggagtgacggctccgccagtaaaacgtcactaccccgctctaccgctggagcgtcttccagaattgcttgagagcattgagagctttcagcagtgccgtgaactcacccgccttgccatcctgctaacactgcatctattcatacgctcgagtgaattgcgttttgcccgctggcatgaaattgatttcggaaaccaggtctggataatacccgccacgcgcgaagctattgaaggcgtgcgttactctggtcgtggtgccaaaatgcgcaggcctcatatcgtacccctctcacaacaatcgatcgcgatcctgaaaaagattaaagatatctcaggagataatgcactcgtgttccccggggaccataatccgtataaacccatgtgtgaaaatacggtgaacaaggcgctacgcctgatgggctgggacacgaaaatggaaatctgtggtcacggtttcaggacaatggcatgcagtgcccttatggaatccagtatatggtcacaggatgctgttgaacggcaaatgagccaccaggaacgtaactccgtacgccaggcatatattcacagggcagagcatctggaagcaagaaaggcaatgatgcagtggtggtctgattatctggatatttgccgcaaatcctatgtaccaccctatattctagggagaggaataaaaacgcctctatctcactag

SEQ ID NO: 105395 - DNA, 306 bp, Enterobacter aerogenes
atggtgaccgtcgacccggcttccgccgtcccgctcagggccggtgtcgcatcattggtcagcccgccgctggccagcggcccggtgtgctgcgccacctcatccgtcacctgcagatcgctgaccggcaccacggtagtgtccaccgtgagcacaaagtccggcgagtggccgctggtgttccccgccacatccgtcaccgtggtgctgaagcggtgctccccctcacccagcggatccggggtgaagctccagtgcccgtcctcatccgccaccgcggtacccagcacagtgctgccgtcgtaa

SEQ ID NO: 105396 - DNA, 183 bp, Enterobacter aerogenes
atggtgaccgtcgacccggcttccgccgtcccgctcagaaccggcgtcgcatcattggtcagcccgccgctggccagcggcccggtgtgctgcgccacctcatccgtcacctgcaggtcgctgaccggcgccacggtggtgtccaccgtgagcacaaaatccggcgagtggccgctggtgtga

SEQ ID NO: 105397 - DNA, 150 bp, Enterobacter aerogenes
atgtccgacaccgcagactccacgctgaatgccctgaaggcgcttattgcggccttccagaccggtgccactccggtcacggttaaaacctccactgtggaagcatctggaaaaccggtattaatgtctgtagcggccaattttatttga

SEQ ID NO: 105398 - DNA, 597 bp, Enterobacter aerogenes
atgctcctttcaattttagtttgtgtatctttgtactcaacatcaattttttttaggatccggtcaagtttttcagtttggttagtttttgcaagaaatctagctgactctggaatgaccttaatgagtacaggaattaatagtaatggaacaatagataaccataagactggctcccaaccaaattttggcatcacatttattgctactagtggagccaacatccctccaatctggttaccacagattgcaattgcaaccatttttgccttatttgatttgggtgaatactccgtgagcaaggagataacaatgggagtcgcaccaccactccccacgccagccataaagcgacaaaggccaaaagtaaatccattatttgtaaatgttgccatgacgataaaaatattaaagataaatattgaggatatcaacattttcttcacaccatatttatcggccatccagcttagcagtactgcaccaaacatcataccaaacattgctgaactaccgataaaaccaatctctgtagggctaatttcccactcacgaataacaaccggaacgatagcgccgaaaactgaaagttcatag

SEQ ID NO: 105399 - DNA, 1383 bp, Enterobacter aerogenes
gtgattccgactccgacagcgattcggactccgacagcgattcggattctgacagtgattccgactccgacagcgattcggactctgacagcgactcggactccgacagtgattccgattcggacagcgactcggattccgacagcgattcggactctgacagcgactcggattcggacagcgactccgattcggactccgacagtgactcggattctgacagcgattcggactctgacagtgactctgactcggatagcgattcggattcggacagcgattccgattccgattccgattccgacagcgattcggactctgacagcgattcggactctgacagcgactcggattccgacagcgattccgactccgacagcgactcggattccgacagcgactcggattccgacagcgattccgactctgacagcgattcggactctgacagcgattcggactctgacagcgactcggattcggacagcgattccgactccgacagcgattcggatagtgacagcgattccgactccgacagtgactccgattctgacagcgattcggactctgacagcgactcggattccgacagtgactccgattcggattctgacagtgattcggactccgacagcgactcggattcggacagcgattcggactctgacagtgactctgactcggatagcgattcggattctgacagcgactcggactctgacagcgactcggattccgacagtgactccgattctgacagcgactcggactctgacagcgactcggattcggacagtgattccgattccgacagcgactcggactccgacagcgactcggactccgacagcgattcggactccgacagcgattcggattcggacagtgactccgattcggacagcgactcggattctgacagcgactccgactccgacagtgactcagactccgacagcgactcggattcggacagcgattcggactctgacagcgattccgactccgacagcgattcggattcggacagtgactccgattccgacagcgattcggactctgacagcgattcggactctgacagtgattccgactctgacagcgactcggattccgacagcgattcggattcggacagcgactcggactccgacagcgactccgactctgacagcgactcggattccgacagtgactcggatagcgacagcgattccgactctgacagcgactcggatagcgacagcgattcggattcggacagcgattcggactctgacagcgactcggactccgatagcgattcagattccgatagcgattcagattccgaaccgcaggcaaatgatgatacgcatacggcagctatcgataccgtag

SEQ ID NO: 105400 - DNA, 555 bp, Enterobacter aerogenes
atgaaaattgcattcatgggtagatcaggtagtggaaaagattttcttgccaattatctaatatccaatcacgactttattagattatcatttagtgatcagcttaagaaattagccaattacatttacccttggatgaaaaaagattatactcctgatgaaaaaatgtcacctctaaatttagtcttgcctaccggtgacttaatttctcactcaccaagagaaatctggctaagtctagacaagttaaggggaattgaagagaagatattcattagaatgttatcagaagagttgaaattattagaagatggcgaagaatcgaataaaaaaataataattactgacataagatcgaatgaagaattcgcatggtgtaagaataataagttcactatagtccatatcgaacgaaaaaataacaattataaaaaatatgacatcgataagtatgtcgatgagaataaattaaaatcagattatcatttcgacaataatacgactgggttaggtaattttgaaactttctgcaaaaaggtgttcttccgtgaataa

SEQ ID NO: 105401 - DNA, 588 bp, Enterobacter aerogenes
atggccaagaaggtgtttttcagttttcactatcaagatgttgtcgaattccgagccaatgttgttcgtaagcattgggtgctaaagtcggacagagaggaggctggtttctttgataaaagcatctgggaagaaaacaagaaagctggcgatatagcgctcaagaagatgattaacaaagcacttgaatataccagtaatacggtagtcctaactggaactgagactttcgaaagaccttgggttcgttatgaaataatgaaaagcttccttcgtggaaatcatttacttgttgtgcatattaataacataaatgggaaggatggcaaaaccaaacctaaaggcagaaatccactggagtacgttgctgcatgtttttcagctgatgggaaaactgtaacattgaaagaatacacagatgggaactgggttgagtataaaaagatagatggaaaatctacacatacttgctcgtcttcaatgtcctcaggatatgaaagcaaagccataaagctaagttccctttacctaagttatgactggacgctcgatgaaggttataaaaatttttcatcgtggttaaaataa

SEQ ID NO: 105402 - DNA, 492 bp, Enterobacter aerogenes
atggctagagaaattaagaaaaatgtatttgttagtcatcatcacaaagatgacgctagtgttgatggagtttcgcgtttagctgcagcaaagggttatcagctacgtaatagttctgtcagaatgaaacctgaaaaccagagacgtgctgatgaaaataaaattagtgataaaactatagcacgtttacttaggatgaaaatgagatgggctggccaagttatcgtagttatcgggaaagagacacatacaagaccttgggtcaattgggaaattcaagcagctcatcagcttggaaaaccgatcataggtgtatatgagaacggtctaaagggggatgtaaaactaccagaaaatctcgaaaaatatgcaacttctatcgttgcttggaggggtgacgccataatcaacgcattagaaggtaaaactagctttcaaaagcctgatggtgcggatcgggagaaaaatcaaggaggtaatgtcgtatgctaa

SEQ ID NO: 105403 - DNA, 432 bp, Enterobacter aerogenes
gtgtatgccacccgcggcgccaattttgccaagaccatgctccgcctggcaggggagaaagagactctctccatcattgacgaccagcacggggcacccaccggcgcagagctgctggcggactgcacggcgatagccattcgtgaagaaatgcgtaataagtcggtagccggaacttatcacctggtggccagcggcgagaccagctggtgcggctacgcccgctatgtgtttgaggtggcaagagcgcacggtgccgagctggcggttcaggaagtgaagggtattccgacgacggcctatccgacgccagcgaagcgtccgcttaactcgcgcctgtcgaatgagaaattccagcaggtgtttggtgtgaggctcccggactggcgtcagggtgttgagcgtgtagtgaccgaagtgttgggcaagtaa

SEQ ID NO: 105404 - DNA, 717 bp, Enterobacter aerogenes
atggatagagggatccttgaattcgtggctctattcagtggattaatttttaagtacggaggaaggattgtccatggatgccacccaagttttacgcctataattcttcgccaagcaagattgcacgcaacatggaattcaaggccacctgtcacgcttgttatgtcagacttgtggttctctggataccttgaggatgaaattattgcaatgacggatgttgcagagttgatcgtgacccgtaaacgcggtcacggaacggttgccaatgcgcaaacaagaaatggaagcctgacagatatgcgtaaagttctggttgcatctcagaatatgatggtggcggtaggtggaaaaatgcatacaaaagatggtatcaatcctggagtcgctgaggaaatggaacttgctcaacaacataggttaccgtgttatcttattggaggactcgggggattttcgcagaagcttgcggcggagcttacgccagcgtctctgaacaacaatttatcccgtgaggacaacataaagttatttggtacccatgatgtatcatcatgcgtcaacgtaatatttgagcaattgtgccaacgttattggacttataattctatcaatttaccgcctactactctttctgacgtacaggatgttgttaaaaccgttattattcaagacgataaagtggggaaaccgcgcggaccttctttcagaatttaa

SEQ ID NO: 105405 - DNA, 249 bp, Enterobacter aerogenes
atgagtaaaagtaagaaactacgcgagcgacttggatcgcttccgaaagattttacctgggatgagctcgttactttgctgggtcaatatggctttaatgtcctcaatggcactggttctaggcgaaagtttgttaaccaaaatggtcgtttggtctcatatcactgccctcacccaggcaatatcgtaaaagagtacgtgctgaaggatgttagggctctcttagatgagctagataattatgagtaa

SEQ ID NO: 105406 - DNA, 459 bp, Enterobacter aerogenes
atgagtaatatgctgaaatttaaaggttattttggaagtattgagttttctttagaggacaaagttctccatgggaagattcaatgcgtaaatgatcttgttacgtacgaggcggaaacacttgatggtttacagtctgccttcgaagaagctgtcgatgattatcttgaaacctgtatggctctcaataaagacccagagaagcctatgagtggtacgtttaacgttcgtatcggacctgatttgcataagaaagcatatctgtcagcgtgtgctgatggtaaaagtctcaatgattatgttaagtcagcaatcgaagagaaagtcgtcggtaaaacggaataccacttccacattgaaaagcgcgagaaaactgaagtattcgctcatgaatacaatgccagttcatttcgtgagactaaatgggttggtgccatcagcaaagggactcatcactga

SEQ ID NO: 105407 - DNA, 441 bp, Enterobacter aerogenes
atgctagaaaaaattaaatacggcggattcgagatttcatcttcacagtttgtgcagcataaggacagcgaaggcggtcgatttaagctatccgtggataaatgccagtttggatacgattataatgagtctgaagggaagggtaatattcagatcattgtcgaatcatcaatcaaaggttttgacgaacaggctcttgaagatcctgaaaatccaaatgaggacggtctcgccttcgaggtaaactctaaaattttagtttactttgatgttgaagataaacagcctattacagatgaattttgtaaagaaaacgcttggttttttgaaaatttttattcgatatccatgaagttggctcttgagtcaacgatgcagaatacacctatgcaaagtatcgatttgccttggcacattccttcgattgcaacggaagaataa

SEQ ID NO: 105408 - DNA, 441 bp, Enterobacter aerogenes
atgaccaaacaactaaaagccaaagtaactaaagcacagatggtgcttgccatcgttagcaggacgccagaatgcgtcctgcaggatgtctgcgatgcgctggacttgcaagctagtacagcaggtaacttgctgcggcagctccatgccgcgggaaaactccatcgtacccataacggctaccagtatgtctatcgagtggttgcaggcgttgaggttcccgatgttgccctgccgcagactgcaacaccattatctgaagaggttgtgaaaaaagtccaaaacgcactgtccctggcgaagacgctggaagacaaaaagctgtggcgccgggctgcgactgtttacacatcgatgcttggaatgacgacaacagcaaacgagctgtggatgcttgccagaatgcgcaaccgctgcttgcgcaacgctgcgaggagctga

SEQ ID NO: 105409 - DNA, 582 bp, Enterobacter aerogenes
atgtctactattgcagatttagtctcagcattggcatggccattggcttttgtatggttcgttcagaaatatggtaatgatgttaaagaacttattctccgattatcaaaagtaaagcttggaaatgctgaggctgaattcactttgggattaaaggtggtggaagaattagcaggtgaaacacctttggcggaagcatcaaaagatcttcctgaggaaggtgttgaattttctaaacgtatggcgcaattagagcgaattgcagatgtatctcctagagccgcaattatggaatcttggttactaatcgaagaggctgcagggaaagcaggttttgtccagggggcatctgttccacgaataaaccctttgttatttattgactggttggtaaaacaagggaaagttgataattcaaccgctgccttagtcaataaaatgagaaagttacgaaacgaagctagtcatttaaaagatttcgaacttaccaaggatgaagctgaacgatatataaaaatagctgttcagatctcccttcttataatcgatccagacacacctacggcgttggaaaatgattga

SEQ ID NO: 105410 - DNA, 525 bp, Enterobacter aerogenes
atgcaccaattcaatgagcttgcatataaatgtacatatttttcactcaatgtaataaacgaagcttatgaaaaagcagtagaggaattatcagaaaccggctcaactcccccagttaaacaattacaagctctaaatttacaaaagatgatacatgcggttggtttgttttctatttttgaagcatatctgcaacaaatgcttggatgtcgaagaggtttcaaagatgcagagatgattttagagcaagcaggcgagcatgctttaaaagaaaattttcataattgttatcttgcaattaatgctctcaagcatggtgaaggggccagctataagagccttattggtaaaatcaacacccttaacttcgtggttgagagtcagaccacaccaatctttgaagaaggtgacgtttctggtatttttgcactcgttaaagtcgatgatagttttattgataattgtttggagataattgacaaagtatataagtgtattaatcatcaccgctctaattttaagtga

SEQ ID NO: 105411 - DNA, 234 bp, Enterobacter aerogenes
atgaaagtggaaatcacaattgatcgccaaaaaaaattgccggatggcgctgtgcctgctctggagaaggagctactgcggcgattggatcaaaactttaataactgcagacttgtgattcgccgggccagttctgatgggttaaccgtgcttggtggaatggacgaagataaaaaacgtatcgaagaaatccttcaggatacctgggaaagcgcagatgactggttctgttaa

SEQ ID NO: 105412 - DNA, 783 bp, Enterobacter aerogenes
atgcgccttctccgggtattcaccccgctaattcccgccattttcttcttttccgccgccctttatactgcgggggtctcccttactgataataaaaaaatgaaatacctctatttactgctggcgctggcaagcttcgccgcagacgctgcggatccgggcagccaataccaacagcaggccgaagccggcgacccacgcgcgcagttttatctggcggatacatgggttagctccggcaactatcaacaggctgaatactgggcgcagaaagcggcggcgcagggcgatggcgacgcgatggcgctgctggctcagcttaaaatccgtaatccgcagcaggccgactatcaacaggcccgacagctagcggaaaaatccgtgcaggccggcagcaaggctggcgagattatcctcgcccgcgtactggtcaatcagcaggctggccccaccgattatgcgcacgccatcaggctgctgcaggatgcggccaaagatgaagagagcgactcagccgtcgatgcgcagatgctgctggggcttatctacgccagcggcgtgctgccgccggaagatgacctcaaggccgcgcaatacttcaaaggcagctcggcgctttcacgcaccggctatgccgaatactgggcagggatgatgttccagcagggagagaaaggttttatcgaaccaaacccgcaaaaagcgctgcactggcttaacgtcagctgtcaggaggggtttgataccggatgtgaagagttcgacaggataaccaaaggctaa

SEQ ID NO: 105413 - DNA, 570 bp, Enterobacter aerogenes
atgataaagcatacccgtattttgtccggcgggctggcggtgctggccgctgtttttctctgcctgctgacggcctgccgcgaccatagtcgcgacggcatgagcggcgctgatataaacgtcttaaaccacggtccggatgccattgtctcgttgcaggtgaatggctacggcgggccaggcgctaactcctacggcggcggcggcggcttctgctgtgtgatggtgccagatgtctggcgcccgggtctgacggcaaaaatcacctggacctccgatcctaacgcatggatagacccgaaacatatcccagacgatcatgcgagtcattatcagcgtcatggaccgatcaccgtccccattgaacgctgggagaagggacaggcctgtggctttgaagtgcatattttcccgtgcgacaaggtaagaattgttcgttcttgtcgcgatcgctcatctccggaatatccgatacatcgtgcgcccgatgaggatgaaaaggcgaaaaaaatattattcgaccatgttaaggagaatatcgtatgtccgacgccgcagactccacgctga

SEQ ID NO: 105414 - DNA, 255 bp, Enterobacter aerogenes
gtggaagaattgattaattgtgtgcaaattgattggcagggaaaaaacttgtccattgaccgttgtcttaacacggttcacataaggcatcatttccgtgtattgattaatatactcccagacctcagcattgtcagtgtggaaaatatgtgggccatatgtatgaaccataacaccggtttcattatcccgctcactatagcaattaccagcgacatgtggccggctatcaatgatagttaccttatggcctga

SEQ ID NO: 105415 - DNA, 273 bp, Enterobacter aerogenes; identical to SEQ ID NO: 92299

SEQ ID NO: 105416 - DNA, 603 bp, Enterobacter aerogenes
atggttacattttcagtatttgctgagaaggtttcaacccctgcgactgcccgagtcttacaggatggatttcctggtgaaccacaggctttagcatctatcacttctgatttatttcaagagtatgaacgtactaacaaagttggcgcgctgatcttttattcgtggggaatgctgcgacaggctaactattatcagagtatcaatgatctcattaacgcttctgaatatgcaaagacgggctttttttatcttgatgaagcggtagataccaatgaagacaacatgctgattcgatacttacgtgccagagttgatgcctggctaccagtggggttagggcgctgtgtgattaccatcgaggatactgacctactgctgaagaataaagacaaatttagcagtgagatcattggtaatatactgataatgcgtttaagggcccttcataattgccatatgaaacagcaagaaaaacaactcgttgatcatctgcggagagttaatcagcagcgtgaaattgattttgaaaataacgaaatgccggcttgggaaatggttgaagtcttacaggttattgttcccgttattaaaggtgaatga

SEQ ID NO: 105417 - DNA, 222 bp, Enterobacter aerogenes
atgagcgcagaaatcattgatcaggccaacgagctggcagaactccagcgggaagccgccattgcgaaatgccgcatcaaccatgcggcagtttcggccactcactgctgcgactgcggggaagagataccggctcggcgccgggaactggtggcgggatgtcagcgctgcgctgattgtcaggaagaagaggaattgcgcggtaaacaccggaggccgtga

SEQ ID NO: 105418 - DNA, 228 bp, Enterobacter aerogenes
atgagcgacgaattaatgaaaatggcattagctaaacagttgacgattgctatgcaaaatctcggagcccctgttgaattgctctgcataatcggaagctacggagatacgcaggatgattctgatgttcttgaagcgcttgaacagtacaacgaacgcggaaccagcatggatgtgattattgctccagagtttacgtggaagccaaatccaggcggtgcagcatga

SEQ ID NO: 105419 - DNA, 972 bp, Enterobacter aerogenes
atgagcgaaataatggatttaaccgtcatcgaaataaaaccagaacaggcgcctgccctgtaccgggctggcggtcttgacgcttaccttgagcagattcgccaggccgtgaacgaggttcctgacctgaccaccaagaaaggtcgtgaccgtgttgcttctctggcggcgcaggtatcacgcagcaagacggcaatcgaaaagccggggcgcgagtacctgaaacgccttaaagaggctgtgcgccctgctgaggcggaaattaagcggttcgttgacgcatgtgacgagctgcgcgatgcgacacgtaagccgctgaccgaatgggaagccgagcaggaacgcattaaggccgaagaagccatgctcgcccttcacgtcgaagcactggccatgaatgaagagttcgatcggcagttggctgatcgtattgagtctgaccatgaaatggccctgctgatgaatgacgctttcgaccgtgagcaggcagataaagcagctgaggctgagcgccagcgcatttcccgcgaagaagaaattaagcgactggcagctgctgcagcagcccgcgaagtagagcagcgcgctcagcgcgaacgtgaagaagcagcgcatcgcgaagctgtgttgaaagcgcaggctgagcaggcagagcgagatcgcattgcagccgagcagaaagctgaggctgacaagcaggccgctgtagaagcagagcgccgcaaagcgcaggaagaagccgatcgcatccgtcgcgaggcagagcagcgcgaacaggcccgcctggccgaagagaagcgcaaagctgacgagcaggcgcgccgagaagccgacgtgaagcatcgcaaaactgtcggcactgacatcgtcaaagccctggtggccaataccagcattaccagggatcaggctatcgaggtgctcaccgcggttaaagacggccgcattcctcataccggtatcagttactga

SEQ ID NO: 105420 - DNA, 540 bp, Enterobacter aerogenes
atgactatcacattacaggcagtaaacgagctcatcgcctccctggagagcacaggcgagctgtcgatcaaagagacaaaggttatggcgctggcgaaagcgtttaagcagctggctgcggagaatgtggcgctatcgaaggatgctcagcgttatcgctttatcagagaaagggacatgttcggctcagacaatgaatctggattgttgagttgggaggaactcgctgagcttgagtgcaacgaattcgatgatgcacttgatgcaagaattaaccatccaaacactggttttattgagttggacgccaagctgcaagatcgcaaaacccacgccaccgatcgcatcgtagacgggattaaggctgatgcgattaccgcttctttggatgcctgctctgactacctcgatacagactgcgttatggacaggcttgatatcagctacgaagaagccgagaagcgaacctcaggggcaatcgagtttcatgatgcgatggtcgattttgcaaaccaggtgcgcgagggggccgacaaatga

SEQ ID NO: 105421 - DNA, 1485 bp, Enterobacter aerogenes
atgaactcgaaactgacgtcgctggagcttcagtcccgcctgctgcagggcaattttgatcgggaacgctcacctgacgagcgctttgccgaaccactgacggaaaccgcaatggtcgtgacgctggagcagcttcgcccctacgatctcaatccccgactgatgcgcaatcccaattacaacgatatcaaagcctcgatccgccagcgtgggctggacacgccgccgccgattacccgtcgtcccgatcaggactactacatcatcgccaacggcgggaatacacgcctgtcgatccttaatgagctgtggcgcgaaacgcatgatgagcggttctggcgcattcattgcctgttcaagccgtggggcgggacatccgagcagcctgtattgggcgaactgcgctgcctgatcggccatctggcggagaacgatctgcacggcaaactcagctttatcgagcgagcgctggggatcaataaagcgcgtgaactgtaccagcaggtggaggagtgccagctttcacagcgggaactggcagagcacctgagaaacgacggctacccgatccaccagtcgcatatcagccgaatggagcagacgctggagtatctgctgccctgcattcctgaagtgctgtacgccggaatgggccgtccgcaggtggaaaaactgctgtccctgcgggcagcggcgctgcaaatctggcaacgccatgctaccggggatacaggttcctttgagagtctcttttcctctgcgctgtcgctgttcaacgatcagcctgaagacttctttatagaacgggtacaggatgagctgctggggctgatgagccaggcgctgggtgttgattacaacctgttgttgctggacgtcgatccttcagagcagaagcgtcaggccgtactcggccccacgccggagccgccgccttatatccctcccgatgaacccgaaccgcgccctgctgcgcgcaggcgtaaaccagacgaaggcgaaatgcgtgggggaacggttattccaccgccggagtcaatgccagatgcctcgccgctgtgcgaaggcaatgaacccattacggatatctggcgtatttcaccgctctttgactcaaccgaagcattacagtcgataagcgatcggctggcatgggatctggcagagtgttgcggtatcgaagatcgggtgatcgcggataacgatgaagtcggcgttggctaccgactcaatacgcttgcttctgatcaccctatgtattcccggccacagtcccgcgcctgctgggcactgctggcgtcactcaatgatatcccactgacagaagatctgtccgccgcactgacgcccgccctgtttattcaacgcgatacgggcggtttcttcttcagcgatctgtttcttattaaagcatttcggctgatccgtattgtccgccggatcagaaaattacagcaggaggcacaacatgctgccgacgattaa

SEQ ID NO: 105422 - DNA, 1134 bp, Enterobacter aerogenes
atgacaccgtacattcaggcgctgatcgacacgaccggcaacaagctccagcagcgaatgcagaaggatccgtcctcaacctccgacagcctgctgtttatgggcaacgcgcatgacacggttccgcgtcgcttattgcaggatccgctgttatcgcccagagataaattcgcctggcaggtgattcggatgcaggcgcaggagaacggcggcgcggtgttcccctcctacagcgaattgcaggtacagctctctaaccgcccgctggacgaaaaagcctcgcgcagcaccgtcagccgggcattactgatgctgcgcctgacgcgctggctaagcctgtgccacaaagcgcgggaccgcgtttccgggcgcattctgggcaatatctacgccctgcacgatgaaccgctcaccgtcctggatgctgtgcgttttgatgccagctatctgcatctgctggagcagtgttcacggcacgagaacaaaactatccgcgccaccgcgcaaggcattctgtatgacattcgccaggataccagcctgcgctacttatcatcacgtattgatctgctggaagaacgtgcccgctggcaacaacgccagtcctctgaggagactaagcccaaaacgcccggtctcaatacggtaccaggtgaaattttacctggtaccgaatcgggactaagccggaaaccggggcctgacggcttagtctcaaatcaggaccaggcttctgtacgtactgtatctacagatatttgtaatagtactaccgcgtgcgcgaacgactcaccgcctaactggccgccagaaatcccactgacgcatcccgaaaaacagcttgtcctgcaggcgatgaagaacatgccgccagtattgcgccaggaggtgcttgatgacgcggcccggcgcgtcgctcgcggcggcgtgcaaaacccgtttgcctacctgttggcaacgctgcgcaaagcgcaggatggcgagtttaatcagtatcgacgggataaacctgctgtgccggagtttgtgccgcctgcgattccgaagccagaagaaccggtacagccgcgcaaaaagcgggatatcagtaagttggttgcggagatccgggcgcagtgtctggggagtggctga

SEQ ID NO: 105423 - DNA, 750 bp, Enterobacter aerogenes
atgactcagagatatacccctgaacaagctgaacgtatgaaaaaacgtcgctattggttttatgttgatggacagcgttttagtagtgccaaagcagtaaatgattatcttggcgagagtttatgtcacgcagcatggcgagctgatcttatagcagcttctggcggtgagaatatgcaaattggggatcgtacagtaccagtaaaacgtggagggcacacaattgttctggagcgccgtgaagacttaattgataagtctgttcgtgactataacgcagctcggaaaaagcttctcagcgtaggctggagtgcagaagagatcgataacttaggtaatggacagttgtattcagagtataaggctgagcttgcacgtcaacgcctggatatacctcattttgaaaaacaggaaataaaatatacccgagtgaaaattcgtccagctcaaggggtctttcgcgctcgggttatgactaactgggacaatcgttgtgctattacaggggcagggttagcgctggaagcggcacatattatcagccatgcaagtggaggaacgccgaccgttgaaaatggcttgtgcctggcagctgatttacacactctgatggaccggggtcatttattgattgatggaaatgtagtgcgattgtccgatgaagcaaaagaagaaccgcgttattcaggcctcgatggcacagtgttgcgtaagcctcgccaaccggtagtttttccagattcacaatga

SEQ ID NO: 105424 - DNA, 966 bp, Enterobacter aerogenes
atgaatcttcatgagaatgccgatagttttgtcgagattattcaggccacggcagaccatctttctataccggcggtatacgttgagaaagattattgggtaacatatattttaagaaatctcagccgctctgattataaagagcggcttatttttaaaggtgggactgcgctttctaaagcctataaattgattcgtcgtttttctgaagatatcgatcttgccgctcatttgcctgatttttctggaaatcagatcaaaaattatatcagagacgccgaagctcggcttaccgaggggctgacatatctaccgggacatcccggtgagtcaaaacatggttcatttcggaaaacatggtttgagtatcccagacaagttgacggtgagtttgctcaggcatctccgtttcttttactggaaataaacgcatttaccacgccagaaccctattctttaatgccagtgtatacattgattgcagagtctctgaatatgatggggcggcctgatctggttcagaaatttgggttgatggcatttgaagtcaaggtcctgaatattgagcgaaccgttgctgaaaagataatggggctagttcgggcttcccgtgaagaaaatgccgaggaacagttgaaggctaaaatccgccatatttatgatttatgccttattcgacgagatgctcaatatgccgggttgtttactgatgatgcgctgcttcccatgctgaaggtggtcgaggatgctgacaggcaacagttcaggcacgccggaagctggcttgattcccctttatccgaggccgtcattttttctgatgcggcatctgtctggcagaagatacgactggagtttcatacccgttttgctcctcttgtctatgatagtgatattcccggagatggcgaagtgattagtatgctggatgctatccatgttcaacttaggaactatgtacggtag

SEQ ID NO: 105425 - DNA, 723 bp, Enterobacter aerogenes
atgagcattcagaaacaagtcgtaagagatattgacaggattgagccgggtaaaatgtttacctaccaggcgctgccagcctggcggtcgtcgccggagagcactgcgaaggccatgagtctcctggtgagccgcggtcaggttcgccgtttttcaaaaggcgttttttatcgtcctaagcagggagttttgggggaggttcgtccttcggacaatgaaaaaatccgcctttatctctttgcgggtgaaaaacgaatcggctatataacgggtctcagcctgtataaccgcatggggttgacaacacaggtgccgaaaacggtcactattgctactgaaaaagcgcggcagaaaaagagtttgggtaatatcgatattcgcctggtccccagtaaagcgcctgttaatgaacaaaacaaggaataccttgaagtcctggatgctctgacggatattaaaaatattcctgacagtcagccgtttgaagtgcttgatgtgttgagtcagaaaataaaaaacatggatgaaggtgcgttaaactcactcgtacaactggcaaaaggatattatccacctgcgaccaaagcgttgctgggtctcattctggataccaatggttatgctatcagccgccttctggcagaagagcttaaccctacaacacgttataacattgggttgaaagggttctggtctcaggctaaaaaatggaaaatcatatga

SEQ ID NO: 105426 - DNA, 705 bp, Enterobacter aerogenes
atgtcggactacaccttcaacatgggtcccctgcgcagtgcgatccatattcagcttcacacccataatgccaccagactgtggaccgggcgacgggcgaccgagaacggctccgcgccgatcatcggcatgccgcgctttatcgaaatcctcaaccagatacgtatcgcttcagagcatgacgatccctacgccgacctgtggatgctgcatatagaggaaaagctcgcgcagtcgcgcaaaataatgcaaatgatgctggaacaggcgaaagcgctgttcagcgaattgccggaaggtatcgatattgaaagctgcctcaacgtacagcccgcccgcttcccactatttatcaacgcgccgctggcataccagggcgtctatctgttgaccgattttgaccagcttgcccgccagcttctgctggcttcacatatcgctgtgctgtcgcgccgggatatgcaccactggctgaaccggggcgcatcggtgatccgcagtgccttcagcctggcgcagaaatatcagatttccggtctgaagcgcagggattttatcgatgatacgccgcaggccagggcagtcattacccgctgcggcccgctgccggaggcggtactgagcggtaaactacgctcctcatactcaccgccgttatcctctgccgcccagaacaccacaccgggagccacccatgatgaataa

SEQ ID NO: 105427 - DNA, 519 bp, Enterobacter aerogenes
atgatgaataacccgacaaccggctaccagcctctggctgatgacgactataaaatgcaggtttacgtctcctcgctaaaaggccttttaaagccttttaagagtaagggggagctcgagctactggaaagcaacgccagagccgcccgtgagatgatggaaccgctgatgcggcgcttgatccagagcgcccggcgctaccccgtgcgccagcttccgctgatcttcaccatcggcccggctccttccggcgcaaattttctgcgctggcgtaaccagcagaataataaaaccggcactccggcattctgtcacctgatcggcgccccgaaggtgccacaacgtgccagagataccctgctggaaatcgagaaagatcgcatcgtgttcaacatgcagatgtcagtgctgacgtttatcatccgccaggcgcgggagtgccaggaaaaagtcgagcaggcggaaaggctgcacatgggattgctcaccctgccggaaaataatgaacgcgggggataa

SEQ ID NO: 105428 - DNA, 969 bp, Enterobacter aerogenes
ttgcttcacggattatgccgtcagccatcatatttttactggggtaataccgtctatggcgtaaacgccaacggtcctatcgaagagggttttgcggccgcttaccaggtatcaccggataatatcaacattgccaattcttatgccgcatcgttggtcagaaatggtcatgcccctcagggaattgatcagtacaaagcaaacttcaccaaattcggcgatttccagtccggctttaccgcatggtcactgatccgtgcagcggctaaaacggcagatgagcataacaatgccgcgccggaactttatcaacaattaaagaaacactacccagatcaaacccggaaatatacatccatactcaattcggcggataagctactgcaagacgagtcgctgattaacttcgatattcccgcggtgaaaaaccccggacgttatcacgccatcgtggttctcggtttccagctcgataaaaacggtaatccgcaggaacctctggtaggcatcatgaataaagccctggccgtcgccaatgcttaccccacctcaaaaattatcgtaaccggcggtgttccgcgtaataatcgcgtcgaggcggaagttatgtctgatttctttacctctcacggtatcgataaatcgcggattattcctgaagttctttcttatgacaccgtacagaatgctaactacgtcgccatgattatgcgtagctttaatattcgtgaagccacgattattacccgtgcaggtcatattcgtcgcggcaccgcgcttatacaaaatgcgacgcaactttatgtcccatggaaagtagccattaactcggtagcctggaaagatactaaatacaaaaccgaagaagacgcaaagaaagcccccaaactgggtagcggtgattacaaagccacctatcgggatgttctacgtatttatcagcaagagtatccaggatttattaattaa

SEQ ID NO: 105429 - DNA, 1146 bp, Enterobacter aerogenes
atgacctcatgggacagtaaaatgaaaaaaataattactccggttatcctgtcatcattattttatgccgggtgcgccagcgctactgtgctttatgacaaagatgacaataaagtcgagatcaaaggttcactgcgtctgatgctggatggtagcagcgccagatcgcgtgaggaaggcacgaacaaatacaagctggaagatgaatcctcacgtattggcttccgttttgagaggcaaatagacgagaaacttaaggcgctggtctactatgaatggggaaacgatacccaggctaccgagaaaaaagacgactttaattttactaaccgtcaggcttatggcggcatccactacaaaggtattggcgaatttgactttggtcgtgtcaccgttccttttgaatcagtacatcagtcagactacacctatgaatttggcaataatggcgcagtttattatggcggcaagaaaaccaagcgtgttggcggcggagacaacaactatataaagagaatatccaatacactgaaatacatgagcgataaatatgatggttttcgttttggcgcatcatatacactacaggatgaaaccaatattaatgatattgactacgcctggtctaccgcagtctattatgatactacctttaatcttcacctgagggcgggctatgcgcaacaaaaagcgaatggctctaccgattctaacgctgattccgggtattacgacatcacaccagcaaaagaaagtatctggggcgtcagcgcaaaatatgatatcccgttgtgggggttatcatttgccgttgattatggtggtgaaactatcgaggatggtaacttcggagataccaaaggctatacgccttatggcgacaccactcatgccaaactctttggtgtgggcacaaaatggacattcaatgataaacagtccgtttatgccacctgggctatcagagatggcgatgatgcggcagataattatcaggaaacacgcacagtattaggtacggattacaaattcaataaatcctttatcgtctggctggaatacagcagtcagaataaccgttcagattacgcgtccgataccaaatcggatgacaagtctgccttaggggtccgttattacttctga

SEQ ID NO: 105430 - DNA, 1317 bp, Enterobacter aerogenes
atgaataaactaacacttatgatgtccggcctttgcttcgcctgttctactggcgtgccggtaacggtaattgccgccagtcataatctggtgctggataaagttgtaaccatgacgcgtcatggcgttcgttcacaaagtaatactgccagcgtacagcaaaattcaccaacgcctatcccggtatttaatgcaaaagatggcgaactcacaccgcacggctatacggcaatcaccctgatgggagattatcttcaccgccagtttgttagccaaaattttattgatgagaatacctgccctgatgcgaaaaatatttttatccgctccagtgcatttcagcgaaccagaatgacggcaagagcgctggcagacaccttatttccgggctgcgccgttaccgttcactctccagaaaagaaaactgacgatactctgtttgaacccatcgtcagtggaatggcgccactgaacgtagagaaagccacacaaagcgttatgacttcgctgggcggtgacttcgatactgcccgccaacgatatgcctcgcagatcatggcgatgcaaaaagtcgtcgatccgacatgccagttaacggaatgtactttcgttaatcacaaatgggagatcaaagccgacaagcaaaatatcaatatttccctgaaagggccaatcgcaaagggaagtgagcttggcgaaacctttcgcctgcaatattcagaaggtatgccgattaaagatgtcgcttttgggcatgtgaaccaagcaaccgatcttgctccgctgatgaaactgaaagaaatcaagtttgatctgattgaacacaacccttatatcgccgcacggggtggctcacaattaatgagtcagatattgtacgcgctggaaaaaggctccggatataaagatcctgatgccagcccgcaaatccgcgattctgcgccagacgccaggatggttatgtacgttgctcatgatactaaccttggttacctgcaacctctgcttaacgtctcctggaacctgccaggttatccaaaagatgataccccgccgggtagcacgctgctgtttgaacgttatcgggacacaaagactcagaaaatctatgtcggtgtcagctttataacacagacgctggatcaaatgcgtcgccttgaaacactgagcagcaaaaatcccccactgcaacaaaagctcaatctgaactgcaaaaacagcccggacggctggctttgcccgatagatgagtttgccgcgcaggttaacagccgtctcgataagactgcgatgattgcgcagaactacgcggaatag

SEQ ID NO: 105431 - DNA, 135 bp, Enterobacter aerogenes
atggcagagtgggaaacaacgcagaactcattaccggcattgaaaaaaaaggcctgcatgcaggccaatgaggatccaaagaaaagcagtggctattctggtaatgaccacttaggagaaatctattccgcgtag

SEQ ID NO: 105432 - DNA, 609 bp, Enterobacter aerogenes
atgcttaagcgtctggcttatctgactaccgccagtattctcctcctgctggcagcgacaatgttctggtgcgtcaaccgcctgaatgtcctgacgctggcacagcaacagacacaacgccagataacacagtggcgcgaccagccacagccagacagcgattatcacgagctgaaggttgccgtaaaaaacatcaccgatagcacggaagcccttgccagacagcttaacgatgccgccagtgcgcaggccgaacagcttcaacccattaacgaacagatcaaggcgctggagagacaggtccagaccctgagcaccagttatcaacacctgcaacaacagaccgccacgcgcagccgcgcaaaggcaaaaagccccatcccatctccgctttgggccgcaaaggcccctttttctcttattggcagcgagtttcgcgccgggcggcagttcgccgtcattgccccatccggatatcgctcgctctcacagcttcagcttgtggcccccggcgacagcgtgcagggctggcaactgctgcaactggacggcagtcacgcgactttccgtaaaggcgggcagcggctgacgctgaacgcaggaggataa

SEQ ID NO: 105433 - DNA, 684 bp, Enterobacter aerogenes
atgcccgaacatgcgccaccgccgcctgcacgccgccccggactaattggcgggctcgcattgttacccggcgcgctggttggcttttgcctcggcgcatggatgctggcaatagcgctggagtggctgggcgacgcgtttttctggcggaacacctgcgccagccatagtgaacaggtattgcaggcgacatggcagtggtggcggggttccgctggcgcaccggtgtggttagtcgaagatctggcgcttgccagtaatacattgcagcaagggattgcggcactaattgcttccctcaacgggcaaagcgggttgttcttgacggagacggtcactacggtgatccgctgcgcgttactgtctgcgggtaatgttaccctcacctttttgctgcggctggcgattttgttgcaggccctgccgctgtttgcgctgaccattaccattggccttatcgacgggttggtacgccgcgacttacggcgattcggcgcaggccatgagtccgggtttgtttatcatcatgccaggcgaatggctgactccagcctggtggcgatgggactggtatggctggcagtgccagtctttcttgggccggagtatgtgttggtgttaggggctgtggggattgcgatagcaatatcagtaactactggagcgtttaaaaagtatgtgtga

SEQ ID NO: 105434 - DNA, 192 bp, Enterobacter aerogenes
atgtcatacaaaatagatataatagaagggtatgaggtattagaggcaaccaacgatcatgccacactagacggtgtttcacccgttgataattacatcgataacattattgatttgcatgatgcgtttcataaaagagaaaccatcaatgcttttagaaaaattctttctaaagaaataatttttgattag

SEQ ID NO: 105435 - DNA, 1614 bp, Enterobacter aerogenes
atgactagcacagcaagaaaattaaaagacacaagaaataaaagggcgaataaatttcaagataatttatccccaatgaaaaccattgagaatcgccagtcaaatgatatttttttgggattatgtggttttgtcggttgtggtattaaaactgtagtcgatgtaactaaagaggttgctgaatcttggggatataatgtaattcacattagaattagcgatttaatgaaagatgaattatattttgagaaatctgtcattgatgcaaaccttgacaacagtattgacagacatctagcaatgcaacacctcggcaatgaattaagacggcattataaaagaaaagagctattatctgaggctgctattgctgcaataagtactgaaaaaaacaaaagcacaagttctcctgatgaagcaactgtttatataattgatcaattaaaaagacctgaagaaattgagcttttcagagttatatatcaacacaacttttatttaatgggcattttgagagatcaagaacatcgagtaagaaacttaaaagaagatggggcatcaaaaactgacattccaaatattataaatgttgatgacaaatctgatgatgactatggtcaaagaactagtcaagcaatccttacatccgattttttcattaaaaataatcaaagtcagaagaaaagtcttgaacataatatagatcgattttttggtctcattcatggacaaaatggtttaacaccaacaataaacgagaaaggtatgtatgctgcattttcagcatcactgcaatctgcatgtttatccagacaagtcggcgccgcattatttgatgacgaaggtaacttgttagctgttggcaagaatgatgtacctaaggctggtggcggtttgtacgttagtgacgatggagaaaaagatcatcgctgcgttcataaaagtggaaaatgctttaatgtttcaagtaaattaaaaataaaggaaaaaatagaaggcatattagctaaagaaataaaagatgccttacccaccaatgctgaaccatctattgagttaatccttaaaagattagaaagcaaaattccagacattacagataaaatttatggcggaagtaaaatatcatctattatggaatattctcgttccatacatgcagagatggatgttattacaaccatggcccggaagtcaactgaagggacaaaagggaaaatattatatacaacaacgtatccttgccataattgcgccagacatattgtagcatcaggaattaagaaagttgtttacattgagccatttgaaaaaagtttggcattagacctacatgatgattcaataacaaaatcagaagattcttcgaaagttatttttacagattttgaaggtatttcaccccgcagatacagtaaattttttatgcctactgatgaaagaaaagacgaatcaacaggtatagcatacaaatttaatacaaagtataaaaatcatattgatgtgcaatacctagatagtcacagaaaatatgaagatatggttgcacaaaaatttttatctgaagtagcaaaacaagacacttccgcccaagacggagagacgactgtataa

SEQ ID NO: 105436 - DNA, 321 bp, Enterobacter aerogenes
atgaaactctattctttatttgtcgccgtaattctaatatccactgatgctccctatgccttcgccgtccccctcaccgaacgcgaagagctaaccctgtccctcagccagcttacccaaatcgaagcctcgctccaccgcgcccaacaaagcgccagaaccggtatcaacgagcgctactacttcgactatccgcgcatccacagcgatatcaccaccctgcgcagagggattgaacattatctcactcccgctcgcgcccagccgcgagatacagcgacgctggttgggcaataccgtgaggagaaaaccacgccttga

SEQ ID NO: 105437 - DNA, 627 bp, Enterobacter aerogenes
atgcgtagaaataaaatgaatcccagactttataacttaccccccaggaaattcaattgggaggctgcatcagtaattgttgcaatgatagtctttatcggtcaaataatatatggaatttattctgagcattctaagtcacaagatgataagcaaaaattaagaactatgtttgcttatgaaattacagaaaatgctaagcgagagtgttttatttacaatacaagacacataacttcaaggtcccaaaaggatcaaagtgacgatgatgataacttaattgatctttatggaataggaaaggtgcgattatatttcctttcacaattaagctctaaagtttttgaaacatatttccctgacataaaaacactggatgcagatgaaatatcattgattatgaaatattatcaaactttagatagattaagaaagcaaggaagtaactccaatgagtttatgaaacacagccataatatcgatgaaatagatcaagaaagttacaactttacttctactttttacgagcatttcaatgtttcacaaaaaataatcaaccattacacgcagttaatggattcatttggagatagctctaactcctgtaaattaacacaagaacgatag

SEQ ID NO: 105438 - DNA, 1206 bp, Enterobacter aerogenes
atgaatcaaaaattacagcgattaatgagaattcatcacttttatgttggagtggcaaaatttcttttttatcatcctaagtatggaattgtgagcgtgcgtgaccctataaaaataaaagatgctacaaagcatggactcagtcctcttattctttatggattgacggttgctggcttacccattagatggatgtcttttacatccttcgatcaaccgagggccttcaaagacgtgctgcttgagggatggtgcaacgctacaggtttgcgtggacggccagatatattgttggtaaaccgccatattgttgcagcttgtcctgatttacctcaagaaatgaaggacattggggttcatgttgaggttgctaatactcgggataagtctcttccgtcatccttacgttctgcacagaatgccagcccatggttgcgaagaaaaggtactcaggaaaatttgtcccttaacgagtccatccttaagctttgccaatatgctcaatatgagcataatgttagcatcgatagaaaaaataacagaaaaattgatagccgagtcctagaatggttagatctacctgcgcagataccagacacatgtattaatttcaatcgtctggattggaggcttgggaaatggttatcctcttgggagtcctcagttccaccatattctcaacgttattttaattttaataaatttgatggtgttacatggcttcttactggtaaaaaaatatcaaaagatttaaattctgataatttttgctttgatgatagttatgataatactgctgaaatagtaaagaaccttgttacctgctggcctaattcacctaatgaaattgcgaaaaaaataggtgtaacattgaaagaattccaatggtttatgtcagggaaagcttctcttgatactttttcgctttctgctttacaggagatcctcggttttacgtatgatggatatagctgtgttggtacaggcccgtatgttctcatcgctaaaaagccccaagcacttaaagatgcctatggagatatatcccaaggagggaatgcttatccttatgaagtcactccatctcaaggtatggcagatccaagttggcgatatatattaataaataattatggtggcccccctgtattgttatggtccctcgtggatcaaaaatttcagaacacctccctgaattgtttttga

SEQ ID NO: 105439 - DNA, 1155 bp, Enterobacter aerogenes
ttgattagaaatatgacaaaaatatttttgactgaagaagacagggatattgatgttgatgcatttcttgataatgcaagtgaagaggatgtctttatttttagacggcgactcgaagaagctcgtcttgaaaaacctattgctttatgtagtgtatgttaccaacctgttgtgttgaggggtgatatcaatagatcatttttcttcgcgcatacaaagaattctgacgattgtccaattaaaactacaacaaatctaacgcacgatgaaatccttgcaatgaaatttaacgggcaaaaggaaggaaaagctcatagggaaaataaatttaagttggcagatcttttaaaacaagatgatttcttttctaatgatgtattgattgaatcaacatttagagaaactaacagttcaggaatagctaaacattggcgaaaacctgatgttagcgcagttagtgcgaatggggaatattcaattgtattcgaattacaagtatcaacaacatttattgaagtgattgttagtagagagcgtttttacagagaaaataatgcatatattatgtgggtatttctcgatttcgattgtgagaaatttacaactcttgatgtcggatatagtaatcgctctaatgtatttgtttttgatgaagaggcaaaaaacttatcattagatagtcagaaacttgtactaagatgctactacaaaaaaccattcatgacttctagtttatctatatcttatgaatgggattgccagtttgtagattttaatgatttatctttcgattctgatgagaaaaaaatttattttgctgattctgattatttaaaaaatcaggttttgggagagattaaatctgcgaaagaaaaaatagagaatgatagaattgcgcgtgaaaaaatcatagctgcgaatagacagaaagagttggaaagacgatttcaaacggaaaggggtaaagcggttgctaatgtcaggtctaaaaattatccgagcaaaaggaacaagatagattatataacttctgtgcatagcacgagtaaatcgttcggtgattcagttaagtgttcgcaatgtgggaagatagttaaacgaaaaaagattggaagatcatacctatgtagtaattgttattgtgtattggaataa

SEQ ID NO: 105440 - DNA, 1473 bp, Enterobacter aerogenes
atgttcctgagccgatatcatcagttcaggctttaccacagggcggaaaaaatggcgtgggggaactctttatggtcaacagaacatttttttgtaaatgcttacaatctaatggggtggaaagtgatttctgttaatcacccgcagacaactatttctgataatgtcggccaaaggagagggagaccaatgtcagatatcaatccacgcgatgccttaccccaggatcgggaaacgctctataaacttgtctggcgcgaacctgcggagcgcatagccgcgcaatatggcatcagtacaacgttactggcaaaacgatgtacagaaatgcggatacccaggccgcttgctggttactggaaagcgctggcgaaagggactgcacctgcagtgccagcgttgcctgctttgaagaagggcaaggtagaaaaagcttcaggcaaagccagtttggccgttccgtcacccacaaaagtaccatctaaagtagcagtgccagcaccgcgaaagcgagtaaggacagcgggtagtggctatgcactgatcgatgatctcaaaacttaccttcccgtctcttacgtcacaaaagatggttactacaagccaacgaaaaagaagctactcgatctgaatgtttcagaaacgggattcaacagtgctatcgattttctgagtcggttctttgctgcactgggaaagcaagggtattgggtacgattggctgaaagtggtgagggacttcattgtcagggcatcgatattaaagaagatccaaaagagggaggtttgcgctatgacagtttatggcgcccttgttcagccagcattatttgcattgaagatatgctgttcggctttagcctagctgaaatgacggaatatgttccagcaaaagaaattaatggtcgatacattcgtgatgaaacgatgatccgctggatgaggggaaagtatgacaagccatttcgctacgtcattaaacataatttacctacaggacgatttctgctacagctttattcgccatactcatcaacaaactggcagactgagtttcggcagacaaaacagtgtgggcttgtaagccagatcccgaaaatgatttctgcgatgtgtgatgctgttccgttgattaagaagcagcaggaagaggcaagagtcaaagctgaagaacggtggatccagtgggaactggatcagaagagatatagagaaaaggaacggatcagaaaggaaaaagaggcatataacgccagtttggccgagctaaaagctattatggtgcagtgggcagaagataagcgtatagagcaattttttcgtgaagcagaatcgggcgcatctctgcttggtgaacagctgaagatacaggttatggaccgtttacaattggcccgccagttattgttggtggatacggctgttgagcgattgctgaagtggcaacccccccttgagaggcttgttaaatga

SEQ ID NO: 105441 - DNA, 933 bp, Enterobacter aerogenes
atgaatctccaccggacattactttgcttactgataatgatgccgtgcgcaggtaacgccatcactacaccggaaatcgctgcctcagccctgtcgccgacgtgcgtaaagtatcaggtggttggcgtctgctactggctgttttgttcgccgtttggctgctcggtacgtacctcagtaaaagtacgccatttccgcccggttctggtggtttcagcctacagtgtaaccgggcaaaacccgtgggctgagatgtcgccgttaagctcgccgctgtctggtattgccgaagccggtggcgataccaatccccgagctgtcgggcagcacagcaaagtccgatttaaaaatgctgatgcaataggctttcctgccggtgatgcgctggcgaacttcttcgctcagtttggctacgtctgcgccccgtcgtcacagccttttctcccctattttctcagcacgctggatgcgctcgcctggcgtagcggagtaccggaaatgttctacccggaggcgttaacgccaggactgcgcgaggtgagtaaagacggcgatatgtggggcaatgtctacccgcgagccggggcgctcagccagacgcatgactacaagaccggggcagtcatcgcacaacgcgccgccgatctggtaacgcgcagtggtcagccacatgtttatattccgctaactgccaccgcacacgacggctactggcctccagatccagttacggaaggcgacagcaataaccaccaatggcaaatgctggttcccaaaaaatctgcgtcctgcgccatcttcccggatggctccgccaccgactcttacgccgacaaactggcagaagatggcgcatatgcctggacgctgtggcggccctataaatgctgtccgcgtcgtgggcagacctttcttggcagcagcggaggttaa

SEQ ID NO: 105442 - DNA, 258 bp, Enterobacter aerogenes
atgaaacggctgatactgtccggctccctgcttctggtctgcatggcagtgatgttttatctggatgctgacaatacaccgcagattaaccgcagcgacctgctgccctggcgcataatgctgtacggtgtgatttgtggtgtgggctggcatctgtatgaccgcttgccgccacatcgtccggcaatccgccgtatcgcgctgatatttatcgtactgattgtactcaacgaaatcgtgccggaggtgttccggtga

SEQ ID NO: 105443 - DNA, 708 bp, Enterobacter aerogenes
atgatgcaccgacgggtgaaggacatcgactatcatctcgcgccaggcaccacccgacgtacaacggatatcgtcatcgaaagagatggtcaggttattgttcgcccgccagtacactttactccggaacaggcagataccgttgtttttcagaaacgcatgtggatttatcgtaacctggcggagtggaaagatcttaatgccactacggtggcgcgcgaatgggtaaacggcgagacctttctctatttggggagcatgtatcgcttatctctggtttccgatcagcatctgccgttactcctcagagatggacgcttttgccttaatcggcagcttattgaaaaaggcggcatagccgcagcgaaaggcgcgtttgaagacttttatataactaaaggtcagcagcgcatcagagaacgcactctgttttttgcgcctaaagtcggagtgaaggcagagacaatccgggtgaaagaaatggggtatcgctgggccagttgcggccatagcggttcactgaattttcactggaaatgtatgatggccccagcgaagatcatagactacatcgtggtccacgaactatgtcattttcaccatcgtaatcatacagacgctttctggaatgaagttgacaaggtgatgcctgactggagagagcgtaaggagtggcttcgtaagcatggcgctagtctggatctatag

SEQ ID NO: 105444 - DNA, 3267 bp, Enterobacter aerogenes
atgtctgaatacacggaagttgaacagccctttctgcagcaactgcaatcactgggctgggcgattattgaccagggacaggacattccctccgatccggctaaaagtatgcgtagcagcttccgacagtggctgctgccgcagatttttactaacgcagtagcgcacttaaatgccggatcagacggaaaaacatggttaactgacaagcagttacaggatctgcaagagcagatcctgcgacaacctaaccgtactttactggaagctaatgaggcgatccaaaagctactgtttaaaacacaggtggatattaataatgtcaccggtgagtctgacccaatagtaaaattaatcgatttcgaacgcccggaaaataaccactttctggcgataaaccagttccggattgatacccctggttgcgtaaaacaatttatcattcccgatattgttttatttattaatggtattccgctgattgttgtggagtgtaaaaaaggtggtccaacctgttctaatcctatggctgaggcatatattcagctccagcgttatatgaacagccgtaaagcgacagcgctgcaggggttaaaagagggagagccacgtttatttcacagtaatttatttgcgatcagaacaacaggcgttgaagcggattacggcacgattacttccggggaagagcatttttatccttggaagacacaatggcctcaggaagacaatgttgccagcgatatgaatgcgcagcaacagctaatcaatggcatgttaaataaagcgaacctgttatccatcctgcggacatgctctgtatttatggataccgatgccggcccacgcatcaaggttgtctgccgttatcagcaatttcgcgccgctaataagatcttacagcgtttacgtgaaggtaaaaccacggaagaaaaaagtggtgtagtctggcatacccaagggtcgggtaagagcctgacgatggtttttgttgcccgaatgctgcgcgtttcaaacgatcttcacgattataaaataatattgatcaatgatcgtctcgatctggaggaacagctaacagcgacggcacaactgatcggtggacgagtcaatgttattgaaagcaacaatacgctacgaaaagagttagccaccaacacttccgatatcaatatggtgatggcgcataagttcctggtcgcgcaggaaagcctccctgtatccgttgctaaagcgctgggaacctaccaggctattccaacgggcaaaacatttggcgtagtaaacacctcttcgcgaattgtgttaatgatcgatgaagctcaccgcacccagagctcagatctggggagtaacatttttgaggccttccccaatgctgcccgcattgccttcaccggaacgccactgattacagaacgccacggtgagaaacgtaccgtcaaacgctttggcgaatatatcgataagtacaaattaatggatgccgttgaagatggcaccacattgcagatcctttacgaaggcaggactgctgatgccgcgctgaatgataaacatggctttgaaacggagtttgagaatctctttaaagatcgaacggaagaagaattagatgctattaagaaaaagtatggcgccacaggcgacattctggaagcagagcaacgtattgccgctattgcgagcgatatggtgaaacactatctggagcatatttttcctaatggctttaaagctcaggtggtgtgtcactccaaactggcggcagtccgttaccagaaggctatccaccaggcattaaaagagaaagtggatgagcttgaatctgcggacgtacctgaccacgcattaattaatcggatcaagttcctcaaagctgcggtcgtgatatccagtgatggtaccaacgaagcggcatttattactgaaacacgcaagcaagcccgtgcctggaatgcggtagaaaatttctgtaggccatttgcgtttgacgatcctaataaaccttatacaggtatcgccttcctggtagtttgtgacatgttattaaccggttttgatgcaccgattgagcaggtcatgtacctggataaaaaaatccgcgagcatacgttattacaggcaattgcccgtacaaaccgggtgaaaaaaggaaaacaacgtggttttgttgtggattatatcggccttactcaccatcttaccgaggcattaactctttatgcagccagcgatgagccccaagagctagccgaaggattaaaaaatatcaattcagaagtcccggtgctgcaggagcgctatcagcgcttgttgagtttgttctcgtaccatcaggttaatggcatccatgatttccttgagggacgattacccgacatagcagcagaagcagccgtagtgaacgatgctgtccgtttgctgaaagacgagaaactgcgtgcggattttgatgtgtacctgaaaaaattcctcagcagtctggatatcatcctgcctcatagtgcgggccagatttatcggatcccggcaaagcgtctgggatatatccagcgagtgaccaaagagcgttataaagacgatttgctggatttgggagatgctggccagaaggtacgcgatctgattaatcagcacctcatcagtctggggattaaccctacggttcctcccgttgaattgctctcagataacttcattgaacagctaaaccagcataccaacggcaatgatgaggcgaaagccagcgaaatggagcatgcaattcgtaagcattgcactgttcaccatgatgaagatccagctttttataagagtctttcggaaaaagtggaacaattgatcgacctgtatcaggatcaatggaagaagctggcggaagagttagagaaactgcgtaacgttgcgattaccgggcgccaagatggggaagaggggatgagccgggaggccactacgttttatgaacatattgctcatgaagcgttcccgggcggagaaatacccgtttcagtaaaacccaaaattaaagcgctgatggaagcaattgttgaccttctgcaacaaagcatcggcagcatcgattactggcacaacagcagcaaacaaaagaaaacgcgtagtgagatcaaaacggctctgacgctaaccggggttcctgaattaaaacaggcaagagaacgaattgcggtagaaattatgaaactggcaaaaaatagacataatgcgctactccagaactcagtggagagtaaaaaaccatga

SEQ ID NO: 105445 - DNA, 1284 bp, Enterobacter aerogenes
atgagtaataaaaaagaaggtccgcctaagctatcgtatgttcaattagggcaacttgctgatattactatggggcaatctcctgattcatccggttacaatactaaccaaaaagggcttccttttcttcagggatgtgcagagtttggacgtctatctccaattgcaaaggtatactgtaatcctccattacgaatttcaaggcctgagtccattttaataagtgttcgagctccggttggcactcagaattggggcgaagaaagctattgtattggaagaggactcagtgcgattaagggtaaacagggtattgctaacactaaattcctgagttatgccatttcagacaatataaattttttacatcgtcgtagtcagggttcaacttttttagcggttggtgcaaatgatctgcgagtttttccaattcctaattttgattttcattcacaagataaaataagcgtcattataggatcaattgataatgctattgagaagacagaggctttgatagagaaatatcagaaaataaaagatggtttgatgcacgatttactctatcgaggggttggtcatgatggtaagctgcgttcgtctcgtgagcgttcgcctgagttatatcaagaaacgccaatgggatggtttccaaaggattgggaattaaaaaaagtaaaagatgttttcaatattgattctggtattacacttggttctcatagaaggcccaaaaaaaatgctcggccttaccttcgtgtagcaaatgtctttaaagaagaaatttctctaaaagacgtttctcttttagaagcaactgacaatgaagcttttcgttatgctttgaagacatacgacttattagtcgttgagggacatgctaatattcaacaaataggccggtgtgcaattgtagataataatgctgaagggttactcttccagaatcatttgtttagattacaagctaaaactatctctccatattatggtatgtactacttaaactctgcaatagcaagaaaatactgggagatgaactgttcaacaagctctgggctaaataccataaatcgtacgatgttaggtaatatgcctttttttgtccctgccaaggctgagcaggcttcaatagaagaaaagttgaatggtatttctctgtttttaaaaaatgaaatagacgtattggggaaattacgagctcagaaaataggtttaatgaatgacctcctcactggtaaagtccatatagagtcaaaagacacagaggcaacccatgtctga

SEQ ID NO: 105446 - DNA, 2541 bp, Enterobacter aerogenes
atgaaattaacccttacccagcttgaaacattgctgctccgcgcttgtgatgacctacgtggcagcatggatgccagtgaatacaaagaatatatttttggcatgttgttccttaagcgtgccagcgacctgttcgatcagcgccaggctgagctacgtaagcagtttgaagatcaagggatgtccaaactggacatcgagctggctcttgaagatcccgacaactactctggtaagtatttctatgttcctccgcgtgcacgctggaacgaagagtgggaagagattgtagaagagaaggatggcactaaaaaagcggtcatccgaccagccctgaagcatgtgaaagttggggttggcagcgcgttaaataaagcgctggaagcgatcgaagaagccaatatcgatgttttacaggacgtactgaaaggcattaacttcaaccgtaagattggccagcgtactctggatgacgataccctggctgattttgtacagaacttcgagaaaattccgcttaaagatgaggattttgagttccccgatctgctgggggcggcatatgaatggttgatcaaattctttgctgactctgcgggtaaaaaggctggagagttttataccccggctgaagtcgtgcggatttgtgttgagatctgcgatcctgaagagggcatgagcgtttatgacccgaccgttggctcgggtggaatgctgattcagatgcgtgactacttgcgtgaaaaaggcggtgatgcggatgaaatcgcgctctacggtcaggaaaagataggcaccacttggtctatctgcaaaatgaacatgctgctacatggaatttcgcatgctgatattcgtcaggaagacaccctgcgtgaaccacagcatctggatgaaaagggcgagttaagacgttttgatcgcgtggtggctaacccgccgttcagccagaactatatcaagaaggatattaaacaccccgggcgttttgctgtttggctaccagagaaaggcaagaaagcggatctgatgtttgttcagcatatgttgtctgtgctgaaacatgatgggcgtatggcgaccgttatgcctcatggtgtgttattccgtagcggtgatgaacgcgaagcgcgtaaatactttatcgatcacggttatctggaagctatcattggcttacccagcaacctgttctacggtacggggataccagcctgtattttagtgatgaataaagaaggtgctgcaaaacgtaaatcagttctgtttatcaacgccgatcgtgaatacagcgaagataaagcacagaatcatctgcgtccggaggatattgataaaattatcaacgcatatcgcaagggaaaaacgctcacgggctatgcgcgcgttgttccaactgatgagattatcaaagaagattacaactgtaatattcgtcgctacgtggacaacgcgccactgccggaacctcatgatgttcgcgcgcatttacatggcggtattccgctgtcggaaatcgaaagtcttggccatttctggcaaaactatgccggtttacgcgccgatacttttgcgccccgtgatgctgaatatatgaatttttctcccacgttggcggaaaagcgtgatattgctgagtttgttaaccgacatgcgggtgtactacaagcgaatcagacgttcatgacgcaacttgaagcgtggtgggagcagaatctcccgattgttgaagcgttagctcctgatgcagccaatcaacaggcccgaccacgcaatgtttatgtaatgcgcagccagttgatggacagtattcatgacgcatttgcgcagcaaaacttgttaacgtcattccaagtgcgcggcgcttttgccagctatgtgaattacctgaaggcggacttcaaatctattgcagccagtggttggggggcagaactgataccggacgaggatattctacaaagccagttccctgaggtactggaagagcaggctaatgcacaggcccgtttagccgagctacaggcgttatttgccgcggctgatgacgaggacttcgaagataccgattatactggtgtgatgacctctgagcaggtgaaggagctgaaagcgaagctgaaagacgcgaaaggtatggtgaaattatgtaaacgcgagccgggattgggaagtcctgaagagtttcaggaaaaggtttcccaaatcgaagcccagttgaaacgtcataaagcactggaagatgaagctaaagaacttaagaaagtgattaaggcaatagagagtaagcgtgatgagctggttttaagcgcacgtgagaagatctcgcaggacgaggctcgcgtggttattgttgcccgactaaagcagctattactaaatacctacagtcgctatttacgagcagagcagtgggcttgcattactgccattgaaaatctgtggggtaaatatgcggtaactgctaaagaaattgaggttgaaagagaacaagcatctaagcagttgcagaattttttagcggagttgggttatgagtaa

SEQ ID NO: 105447 - DNA, 921 bp, Enterobacter aerogenes
atgactagtcgtccccagatgataatcaacgtgttacaggctaatcccggccagcagtttactgcacgccaactagcgcagaaaatcatcgatcactacagcgcagaactggctgaaaaacgtaaaaatccacgttttgccagcgatgaagcttttttaagccaaattaccgctgaggttggtggcagtcggactgttaaagcgaaagctatgtgtccacaggtgatgacgcgtgataagccaagaccgcgattgttttattggggggaatctgtggttgaacaggcagatgctaatgtcgcccctgaaccaacagttgaaacggttagctttaccgagcattcgttgtatccgatcttaattgattatctctctcaggaggaaggtctgttgtgccgccgcatagacgaaaagcgttccagtaacaacaaagggctgggtggcaaccattggctttatcccgacattgtcgccctagagcctctggataaagaatgggacgatgtagtgcaaaactgcgttcgccatagtgaaggtcgtttaacgcggctgtggtcctttgaggtgaaaaagcagctcaatcgcagcaatgtacgtgaatgtttcttccaagcggtcagcaattccagttgggctcattttggctatctggttgcgaccgagattaacgaggataagcagcgtagtgtggaacgtgaacttcagatgctctgtgcgttgcacggcattggggtgattcttcttgatccgcatgatttctctaatagccagacattaatccctgcacgtgaacgtaacagcgtggactggcagtcagtgaaccgtctggtggaggagaatcgggattttaaagattttattgaactggtgggcgagtatcaccagactgggaaaatccataagtcgttgtggaacaaataa

SEQ ID NO: 105448 - DNA, 1410 bp, Enterobacter aerogenes
atgatactaagcggagcttctttggcacaattgataggcttttgcttgaaagagattatcattccttttcttcctaaaatatggggagggagtccttcagagtgcaaaatcgttaaaaaattaaatccaccttatgataactatattcaatatgattttgtagggaatccatctgtattcaaccttaataaggacaaaggttataaaaaattatatgacgaaggtatattgtggatggggggattttctgctctggcattaaaaatactaaatgaatcctctgcttctcgacggtatcttaaagcaagatacagtcatatatttattgatgaatatcaagattcatctctttctcaacatcagctattcgtaaaaatcaatgaaataggtttggtttcagttgccgttggtgatgtttggcaatcaatttatgagtttagaggaggaaattctaaattgttgcaagagttagtatgtaacgtagatgaatttaagcattttgaaatagatctaaatcacagatgtcatccatctattattaactatgcatctaggttacttgatcaaaattattgtttattgccaactccaagtattaatgtttttagacgtagattggatgggaatctaaaagacatagcaggaattgtttctacttggattaccgaatggatagataaaggtagctggggattggaaaaagccaatcaaatagtccttttggctagaaaagaaaaatcattagagctattatgctccggtttgaatatagactttaggttttttactgacactcccctagacaaaatagaaactgagtgctccgagttatataaagagattttatcatataagtatggagcaacaggtacagctcaggaattaattaacaaaatatttgatggtcttatcataaaagatagtcagatattattgtttaggaaaataataaaaacccttagacaagatttaacaaattcggagcttatagagaaaatccatttaattgctggcttgctggactttaatgctacagaacaagatgacaatgcattgcttgaagtgctctcaaaagatatttttatgaagcagtttagaccattatgtgatgatgagatacaagtcatgacattacataaagctaaaggtcttgagtttaaggttgtatttcactttgacttggatgagtggtcttttcccttccggaaaataaatgatgctgatagatattctcccctatatccaaatcttcagcaagaactcaatctccattacgtcggtatcactagggctgaaacgtgctgcgtcctaattaattctgaatttagacaaaatgccagtggagagtttaaaaaatctgaagaatcatacttttttaaattacctcagttatacggactttatgattga

SEQ ID NO: 105449 - DNA, 1701 bp, Enterobacter aerogenes
ttggaaatttcatcgctaaagcttaaaggctttagaaattttaaaaatgcacaaattaatttcaattccaacacccttgttattggttctaatgatgttggtaagagtaacatgttgcattctcttcggattcttttagataaaagtatatcggaatctgaaattgaaccaaacgaacttgattttcatctagaaaatggaaagccttgcgaggaaatagaaattataattcatttcaaagagataaatgaagatgctgtaatttcaattttaaaaggatatgttagtgatgctggtgaatcctatattaaatatagagcacaaagatctgacctgagctatagcatttttatcggggattcacttgattcttttcatgaaataccctcgcggtattatcttaaatttttaaatctgaaatacattcaatcccaaagagatttaaataagtttatacataaagagaaaaaacagctattgaaaatggctcagcattcattaaacgcagaagaaagaaaagaagatgaggatttattatccgaaataagtacggacttaaaagaactaaatgataaggtttcgcagctagtatatgttgatagagcaacaaaagatgttaatgaagagttgaaaaaacttgcatatcaatattctgaatattcagttcaattagatactggagcaatttgtatcaatgattttattgacaacttacaacttggagctaatgcaaatggctcgaatgttatgcttggtggggacggtaggaataatcaaatattattggctttatggaaagcaaaaagtatcaaagaacacgatgttgacaacgaagttattttttatgttatagaagaaccagaagcacatttacatcctcatcaacaaagaaaacttgccgactatttgactaatgagcttccaggccaaactataatatcatctcattcacctcagatcgctgtgaaatttagaccagactctattattcgattgctggaaaaatcgggaaatactattgctgcaagtggtggttgctcaaaaggcattgcaaatggctggagcggtatgagttataggatgagtattttaccagcagaagcttttttctcgaatggggtcttcttggtcgaggggccatcggaaattttattttatcatgcattggctgatagtttaaatatagatttggattattataatatttcaataatttcagttgatggtattgcttttaaagtatatgcagccattctcgatgctttaggtattccgtgggttatgaggactgacaatgatatatctaaattaaaaggagaagataaatggaacttttcaggaatcaatcgctgcttgagcttggctggattagataaattcgaacataatgatggcaaaataacatcaaaagatactgtaaataatggtgcctggctagcagtttcaacaaaagtaaataagaaggggctctatttatcaaagatagacctggagacagacctaattgaagagttgagtgctccgattctcaatgcccttgataaaactgataataatagtgcaatagtatatctacaaaggaaaaaagcattaagaatgtgctctttgttgaagaaagttaaaaaggatttaaatacgcttaattcaggatgtttagttaaaccactcatccatcttgtgaaaatgattgaaggtaattag

SEQ ID NO: 105450 - DNA, 207 bp, Enterobacter aerogenes
atgcaggctcacttcttaccgccgccatctgccgaagaactggtgatccgctgccagatactggttcgggaaattattgccgcgaaacagcccggagtgcgggatgtactgacgtttatcctttccgaccagcttgatctgctcaaaggtgcgatagatgcggggtatatcaataacgaggaagagcaggggagaacggcagagtag

SEQ ID NO: 105451 - DNA, 255 bp, Enterobacter aerogenes
atgctgccacatcgtctaaaagaggcacgactcagggcggggctgtcacaggaacggctggggatccttgcgggtattgatgaagcaacggccagcgcccgaatgaaccagtatgagcgcggcacccactctcccgatttttctctggcgtgtaagttcgctgaagtactaaaagtccctgccagctacttctacaccgtcgaagatgatctggcagaaatcgtcctgcattacgctgaacagcaccgcacctag

SEQ ID NO: 105452 - DNA, 246 bp, Enterobacter aerogenes
atgacttcagtttattcagatgattaccagtctgtgatttcggccctgaaacaagccagagtcaggcaaaacatcactcaaacagccatagcgaccgcattagggcggccacagtcatttattgcgaaggtcgaaaatggggaaaggcgtctggatgtggtggagtttatccgtctggcacaactcctgggcatggactggcaaagcgagctacaaaacatagcccgcaaatatgactctttgtaa

SEQ ID NO: 105453 - DNA, 1113 bp, Enterobacter aerogenes
atgaacgcccactctgaacgccttgaactgcgcggttcgcagcgcctgctgctggaactgatccgccgccacgccccggtgacgcgggccgagctggcgcggctgtcggggttgacggcaggggcaatcacccagcagtgccgggaactgatgttctccggcctggtggtggaaggggaacgtaataccggacagcgcggtcagccgtcgctgccgctgcgccttaaccccggcggtggctgtgctatcgggctgtcgttcagccccggctttatcgatatgacggtggtcgatctcagcggtcgccagctactgtcgctttctgaagcgcatcaggaaaatcagccgctggcggcgacgctcgcgcagatcaaaaccctggtggagcagacgctgaaaaagcgccagctccagcacgcgcgtatcctcggcattggctatgccgtgccgggatttctgaaagcggacgggcgcaagcgccacagcgtgccgtggctggagagctggcgcgaggtggatttacagcaggcgtttgccgacaacctgccgtggccgacgtgggtggagaacaacgccaacgcctcggcggtgggcgagctgtacagcggcgaatggaatgcgtacagcgatctgacttttatcgaccttggctatggtatcggcgcggggattatctccgggcataaaatgctgcgcggcgggttctgcaatgccggtgaagtcgggatggcatttccgtccggcacgccgcgcccgtcgtataaggatctgcttgccaggctggagcgtgacgggttcaatgaaagtcagcttccggagctaattgccggacagcatccgctgctggagagctggtttgaacgctgtcgtggccaggtggagcagacggtgttcggttgcgtgcagtgggtagacccgcaaatcatcgtactcggcggcgcgatgccgaagccgattatcagccgcttggtacaggagctgaatcaacggctggaaacccggctcgaccccaaccgtccgaaagtgaagctggccgcgtcttcgatgggggcgcagagtgcatcacgcggcgcggcgatgattccgctgtatcaggtgattaatgaagattga

SEQ ID NO: 105454 - DNA, 831 bp, Enterobacter aerogenes
atggcgtttaactttcaccgggcggcagaggggatcgtgctggccaacagccaccggggttattccagctgcgcgccggaaaacacctttccggcctttgaagccgcccgtctggcgggaacccactgtatcgaaattgatatccacctgacggcggataaccagctggtagtcacgcacgatcaccgtatcgaccgggtgtccaccgggcacggatttgtggagcagatgacgtacccgcagttgctggcgtgcgactttggcgtgaaataccatccgtcgtttgccggaacgacaattccgctgctggcggacgtgctgcgctgggcggtggaaaacggcatggggctgattgttgaggccaaacagcgcaaccgccatgacgagtttgtggcggcgctggtcgcactgctgcatgagcatccggatgccctcggccatatccagttgctgggctttaaccatgtgctgattaactgggtaaaagcgcagattccgcaactggcgttacaggtggtgacgctggagcgctacaataaccagctcgcggcggtccagcagtccaatgccggatgcgtctgctttgagttcgagttcgcccatatcgacgacctgcgggcctacaaaaatgccggactgggcgtgcggatgtatctgcatgaaatgaaaaatggtatgacgccgctggagcagtacgactataaattcggctgtgacagccgtacggtgattatcggctggatgcaggcggggctgattgatatgctcagccacgatgatattccgtatttgcaggggctgattgaagaggccggactgcgctgggattag

SEQ ID NO: 105455 - DNA, 1068 bp, Enterobacter aerogenes
atgtcaaaactggttctggaacaggtgaccaaaacgttcggcgaattctatgccgccagggaaatctcgttctgcgccgaagagggggagttcgtcaccctgctagggccaagcggctgcggtaaaaccaccctgctgaaaatgatcggcggttttcaccagccggacagcggacgcattctgattggcgataaagcggtcaacgccctgccgccggaaaagcgcaataccgccatgtgcttccagtcctatgcgctgttcccgcacctcaacgtggcgcacaacatctgcttcggcctgaagcagaaaaaagtcgccatcagtgaacagcaggcccggctggcggaggcgctgaagcaggtggggctggagagccagcgcctgaaaatgcccgcccagctctccggcggccagcagcagcgcgtggcgctggcgcgggcgatgatcacccgcccggacgtgatcctgtttgacgaaccgctctccaacctcgatgccaaactgcgcgaaagcgtgcgttttgagattaaggaactccagaggcagtaccagctcacctcgatctacgtcacccacgaccaggcagaagcgctggcgatgtcggacaaaatcgtggtgctgaacgccggtaacgtcgaacagatcggcaaaccggaagagatttactaccgtccggccaaccgctttgtggcggactttatcggcgcggccaatatcgacaccgcgcaggtcacgcccgcagagcagccaggttattaccgggtacgctgcaccctcggcgagttttacgtgcattccgcgcagccgccgcgcgcggagcagtgttatatctgctggcgaccggaagacgcgcagtatgtcggccagccgcaggcgggcgacaaccactttaccctgacgctcgacaaaatggcctttatgggcaacctcaccgaagcctggggccacaacgacagcgggctgtcggtccgtttacagctagttaaaaagccgcccgtcgcccccggcgagcgcgcctgtttccgtctggcggagaacgccatccattttctggagccggtatcatga

SEQ ID NO: 105456 - DNA, 867 bp, Enterobacter aerogenes
atgaaaaactggcgcaacgatgcggtcgcctggctgctgatgctcagcgggctgggcaccattctgttgttgatgggatcgacgttttacgtggtgatcgtccagagtctgggctggttcaacctcgaaggcgacagccatttctcgctggagtactggcgcaatatgttgcaggacgaggtgctgcaaagcgccctgttctactcggtaaaagtgtcgctgctgggggcgttcggctcggtgattttcgcctatccgctggcgctgtggttgcgtaaaccgatggccggtaaagagggcattatcgcggtactgcgcgcgccgatgtttatccccggtctggtggcggcgttcctgttcgtcaatatcgtcgcttaccacggcatcatcaatgaactgctgctggcgctggggattatcagtgagccgctgcggatgcagaacgacgatttcggctggggcgtggttatcctgcaaatctggaagaacctgcccttcgccctgatcctggtgggcggcgcggtcaacgccattcgtaatgacgtactggacgccgccagcaacctcggcgccagccgctggcgcagctttaccggcgtggtggtgccgctgacgctgcctgccgtgcaggtgacgctgattctggtgtttatcggcgcgctgggcgacttcgccttcttctcggtggccgggccgcgcaacacttattcgctggcgcggctgatgcaggccaccgctatggagtacggcgagtggaataatgcggcggtgattgcggtgatcattatggtcacggcggccctctgcacgttgctgatcgccacacttatcaccccgttcgccacccgcaaaggagaggtcaaatga

SEQ ID NO: 105457 - DNA, 837 bp, Enterobacter aerogenes
atgagccacactgccaacggtcgccgggtggtgacgatttcgctgatcttcttcgtggtcgccaatctgatctggctgggcatgccattcggcatggcgatcctctggtcgctggttgacccggctcatccgtggagctacccggatatcttcccgccggtgctgtcgttcagccgctggctgctggtatgggagaaaacctcgctttccgaggcgctgttcaacagctacaccattgcgcctgcggtagcggtcgccagcctcttgctgtcgatgcccaccgcctatgccttcgggcgcatgacctttcgcggcaaggcggtggcggagatgctgacgctgatcccgctggtgatgccggggatgctgatcggtattttcttcagcgccatgctgatcaatctcaatatcgacaatgcgtttatcagcattgctatcggccatacggtgctgacgctgccctattcgatccgcattatgtcggcagggtttaaggcggtgccgcaggatctgatcgatgccagccgtgacctgggctccggcgcgtggggcaccttctgtaatgcctatctgccgctgctgaaaccgagcttcctggcggcgctgattttttgtctggtgcgaagcctggaggagttcagcatctcgtacgtgctgggcgcgccggactttatcaccgttccgaccattctttactctttcctcggctactccttcgtccgcccggatgcggcggtggtgtcgatgattctggtgatccccaatgtcatcctgatggtcatcatcgagaagttgctgaaggggaactatctgtcgcaatccacggggaaagcctga

SEQ ID NO: 105458 - DNA, 1074 bp, Enterobacter aerogenes
atgaaaaaagcagtgatgattctggcgggcggcctgctgtgcagctcgctggcaacggcggcggataaccccgacctgattgcccgggcgaaaaaagagggcagcgtgacctttaacgtctggtacttacagccgcaatggcgcagctttgtgaaggattttgagcagcagtacggcgttaaggtgcgcatcccggagggcagtatcgacggcaatatgaacaagctgctggcggaagcgggcaaagcgaagggcaaaatagacgttatcgccctgtcggtagcgcagttgccggtaacgacgggagcgaaggcgctggcgaaggtggacgatctgccaggctatggcgacgccgttcaccagattcagaacgtcgatacccagggctacgccgtagcgttctggggcaaccagaccggatttgcttacgatccagagcagatgggcgaccgggcgctgccgcaaacgctggagcagttgcagagctttatcgacgccaacccgaagaagtttggttataacgacccgaacaacggtggcgcaggagaagcctttattcagcggattgtcaccacccagagcggcgagtttaacagcgaagcggagagcgttgacccggcggtggtgaaaaactggcacaaaggctggcagtggtttgccgctaataacgacaaaatcacccgcaccgcttctggtgccgacagtctgacgcgcctgaatgacggcgagctgatgctgacgcccgcgtgggaagaccatctggccgggctgcaaaaaaccggagccatcacctcgcggctgaaattttacgtgccggagtttggtatgcctggtggcggcaatatagcagcgatcgccgccaatagcccgcatccggctgcatcacggttgttccttaactggctgatcctgcccgaaacgcagaaagcgctgaataaggcgtttggttcgacacccatgattaaacaggccagcccggacgtgaagcgcccggacgccacggtgcagttttacggcaaggcgtacagtacacagctcaggaaagagttcgtgcgtgaagtcatgatgcagtaa

SEQ ID NO: 105459 - DNA, 1611 bp, Enterobacter aerogenes
atgcggatatggctggcacgccaaaaaccagacaccacaccatccaacgacgagacaaacgccacggagggctggctgcaatctgaatctgctgaaatcctgctggcaaaatcatcccgccagcagcttatccagtttatccgtcagagcaccgcgctccccgccccgctgtttgaacgcttctggctgacgccgctccatcgttttgcggaactggcgcagtcgtttccggcctcggaaaaccatcaccacgcccatgcgggcggtctgctcgatcacagtctcgaagccgcctgctatgccgcacggctgcggcaaagttatctttttccgcctgatgcagcgtcggaagatcaggccgctcagtccgaacgctggacaacggttatcatctacgccgcactactgcacgatctgggtaaactcgtcacggatattgaggtggaggacgccagcgggaaacgctggtttccgtggcatggcccgctgacccagcgctatcggtttcgctatctgccgcaacgtgattacctgcgccatccggctgcggcagttcttctgctcacccaactgctccccccggaatgcctcgactggctcgccgccgacgccgctgcgttatccactctcattcactgcctgaacggccaatatcagtacgccgggctcgccggagaactggtgcagaaagccgaccgggcgtcggtggcgtttaatctcggcggcgatccggttaaggccattcatcgtccgcaaacctcgctgccgcagcaaattatcgccgccctgcgcgacctgctggcgcatgagttccgactcaacaacccgaacggcggctcggatggctggctgacggaagaggcgctgtggctggtcagtaagaacgctgccgatgccgtgcgtagctggctgttgcgccaggggattgacgccgtaccgcagcataacgtgcggctgttcgacgagatgcaggcgcaccagctgcttatcccctgcgaggacaaagccatctggcgctgccggattgaggccagcggcggctggagcagtgagctgaccctgctgcgcttttcaccgtcacttatctgggaaaatctgcaacagcggcctgaagtttttcagggaacggtaacgcccatcgagccagaaccggataaaccctgcgttaccaacgatcctgagcctgaacctgttcccgccacaccgctggatgaagaaccgctatccggcgaagctttctggctgtggctgacccaaaacgtccaggcgcaacgtctggaaatcaacgaacccaacgcccgaatacataccgtcgccggaacggcgtttctggtgactccgggcatttttaagctctggctgaacgcctgcggcagggatatcccggcagaacgctggcgggaggtacagaaagcgtttcaggatctgaatctgcaccgcaaacgcaaaaacggcctcaacatctggaactgcgccgttgtcggcccgcgccgtagctcgcgtttaaaggggtatttactccacgatcccacgctgctgttcggcgatgacgtcccctttaataacccccatctcttgctgaatgaaggagagaatgaccatgacctttga

SEQ ID NO: 105460 - DNA, 927 bp, Enterobacter aerogenes
atgacctttgaagaactcctggatgagtacttttttgcccgcctgctgcgaccggcgacccaggattgttatcgcacggcggtggagcagttcactcactggcgcaacgtactgcccgccgaagtgacaccgcatatggcgctggaatggcgcggctatctgcttaacgagcgcgatatcaagccggtgagctggaatcactacatgcgccacctgcgggcgctgtataatttcgccatccgccaggggctgctgacgcagttcatcaatccgtttatgaacgtcacgctgcgcgaatcgcgccgccggaagaaaactctgactcatgaacagatagttctctcacgcgaagtactgcatcactacatcgagcaggagaaaacgcagtacggctaccgttcgccgttttatcccgcctggttctggctggcggcaatagagacgttcaactacaccgccatccggctgaaccagcttctgcatctgcgtagccgtgatatcgatctattgcataacaccctgtttatccagagcgaagggagtaaaagccatgatgagcatgtggtgcccatctcctcccgactgcgaccacatctggaaatcttactgtatgaggcgcgcaaacggaggatcgcttccggcgagcagttatttaatatcaactgcttcaaccagcggacgctgcgccagggtaaaccgatgacagaaaatcaggtcagctacttctttgccaaactgagcgacgcctgtcacagccgtttttcctcacaccgttaccgccataccgtggcgaccgaactgatgaagaaaccggagcaaaatttatacgttacgcagaagctgctgggacacagggatattaaagtcacgctcagctatatcgaacataatgtcgagatgctcagaagttgcgtggagagagattga

SEQ ID NO: 105461 - DNA, 2286 bp, Enterobacter aerogenes
atgagttacgatttcaaaaatctatcatcggccgactttgaggatcttgttcgagacctcataggacgagaagaaggacttcgcttcgaagcattctgcgcagggccggatggcggcattgatggccggcacgcgcaggctaatggtaacgtcattctacaggcgaagcattatgaaggttcgccgttcggtaagttgatagccactatgaagcgtgagcgattttcaatcgataagctcgctccgattcgctacattttagcgacttcctgtaagttcaccccacttggaaaggataagctcactccgcttatagggcccagcctgaggtcggaagcggatatttttggtccggaggacctcaacggtcttctccggaagtacccagatattctcaagtcgcacatcaaactgtggctttcaggtgcgggtgttctagaccgagtcgtacgcgcggcggcccatacctttgcagcgttcacgcgagaagatattgaacagaaggtccgtgtctacgcatcaaacccgagcttcgatcaatcactggctacgctggagaagcatcggcttcttatcatctcagggcccccgggtgttggtaaaacgacactggccgagatgctatgttacaccttcctgagtgaggagtgggagctcgttcccatccgtagtctagaggacggcttcgcggccattagcgacagcaaaaagcaggtgttccttttcgacgacttcctaggaagggttgccctcgaccggcaagctctggcgcacaaggattctgatttagcgcggttcatgagccgagtacgtcgctccccaaatgctcgttttatcctgacgacgcgggggtacatctttgaagaagcccggagggtttccgaacatcttggcgaccagcgcctcgatgtaacgaagtacgttctcgatgttggtgtttatacgcgccggattaaggcgaggattctttacaatcatctactcgtgtcagagacaccacagtcgcatatccgtgcgctattggaaagcaagaagcttgcggaaattgttgatcacaagaactataacccgcgtgtcatcgaggctatgaccgatgcatttcgcattggtgatatcgaacccgcagactatgctgtggcctttatcggtgctctgaataaccctaaccagatttgggataccgcattccggacacacatcgatcatcggtgcagacacctcttgatggcgatgttttttctcacggagtatggggcgccccttggcacgcttcgctcgtctttcgagcccttacatacagcgatgagcacagcctatggcctaccgcacgggcctaaggacttcgaagaagcccttcgcatcctagaaggtagcttcgtcaacattgtcaacatcagcggaccaagggtttcttttctcaatccttcgctcaaggattatctctcatcctatctgttggacacagagctattaattcgtcttgtccctacagcagtctccatagactggttgtcgagtttgtgggattttgtgtatccgcgcggtcttagcgaagacgatcaaacaaagatcgccctagcctgcgctggcatgctggatatgatcgaaacgcgtccgcactggcgcccgcgagctggcgatgcgcggtcgcttgaatacaacgatgctgcaaactccaaacggctggggatgttgatggactggtggcggctcacgaacgagcgggcatttgctgacagcattatggcgattgcccgcaatccaaagcagggctttggtgcatggtcggatggagaggccttgatcgacatattttgtcggctaggtgacaagggatatgggcggccattcatatacgaaaccgaattattggagctccttgagaaggcgatcacggacactatacgctggtgttcgagtgacatgctctccacgctcgtggatgcagtggatgcagcgcaagggctgccgtccagcatcaaccatgccttgcaggccgctgtgctagaagagttcgaggagaataccagtcgcatcagcgaggatgatagcgagtcctccttatcggatcgtatcgatgccctcaaaaagttcgcgccccgtttcggcgtgccggaagatgttttgagtcgcgccgtctccgacatcgaggaccgaatcggcgagattgaagaccggagcagtcccgctccctccccgagtttcccaccgtcgaacaagagagagcgggagaagtttgacgatagagctcttcaagaccttttcactcctctcttggatcggtag

SEQ ID NO: 105462 - DNA, 2253 bp, Enterobacter aerogenes
atgctatctgatatttctataacaaacgaagcaagttacggggcaaatacgcaacgtctggcgggacttcgctcaatcaattttattttcggtaccaatggatcgggtaaaacgactatctcgcgtgtcattgcagaccccgcttcaaaacccgcctgcgctgttacgtggaccggtcagccactggagcgtcttgtctacaacagtgacttctgctctcggaatttcgctcaacagatgccgggcattttcacgctagggcaggcggaggctgaaacgcttgccaagatcgaagcggcgaacgcccaagtgcaatccctaacccgagacattgctcaactccaaaataccttgggtgacgtaagctccggcaagctcggggaactccagactttaaggactggcatagaacagaaatgctgggagatcaagacagtccacgatccttattttcaagaggcattcactggcttccgaagttcaaaggctaacttttgcgacaagatcctgatggagtgggcgcagaattctgctgagattgtcccgcttgacgagctcaaacaacgtgcgctgacaatttttgagaaagggctcgaacgtcttacacccatcgtagtgtttgacgccaacgaccttgtggtccttgaaggctcggcagttctctcgaaaaaaatcgtagggaaagaagacgttgacatcgctgcacttatacgtcgcctcggcaacagcgactgggtgcggcaaggcctgggttatgtagacgaagcggggccgcagtgcccattctgccagcaggagatgaacgactctctaaaaacaaaactgaatgactactttgacgaaacctatcttgctgatatcgcagcaatcgaacgcataagggacgcatatgatgctcactctaaaacccttttgtctcggctcgagttgatccacagtgcgggaagcaagtatcttgatgtggtagcgtttcgcgccgatatcgatcgactctcggcacggttagagttgaatcttcggcaaatcgaccgcaaacggaaagaggcaagttcgcaagtcacgcttgagcccgttggtgaaatcgtcgcctcccttcaagatgctatctccaacgcaaatactgagataggtaagcacaatgcgacagttgacaatctggcgaccgagcgggccactcttatatcgcaaatctggagatgtttacttgaggagtcgaggctcgcatttactgaccacgataacgcgaaaagggggcttgatcgtgccgttactggcctgacggccgggcttgcttcaaagcgagcggcgcttgcagaggccagtaacgaacttgcagcgttggaacgcgaagtaacgagtgttcagccaaccgttacggaaattaacgccattctaagatcgttcggctttacgggtttccgcctcgcgaccgctggccaacatcaaaacttctatgaaattgtaagaggagatgggagcgaagctgctaccacccttagcgagggagagcgcaccttcatcactttcctctacttttaccacctcattagaggcagtatcaatgcaagcgggataaatgcggagcgagtcgtcgtgttcgacgatcctgtctctagccttgacagcgatgtgctctttatcgtcagtgctctgatcaaacgtgtgctcgatgaggcttgccgagggactgggcttattaagcaggtctttctattgacgcacaacatctacttccataaggaagtatctttcgatcccaagcgcggcacagaatgccgagcacatgagacgttttggatcgtgcggaaagtgaacgatgtatccgtaatcaccagctacaatcacaaccctatcagtacttcttatgagctcctttgggctgaggtcagatcgccgaaccgatcaaatatcgcgctccaaaacacgctaagacgcatcctcgagaactacttcaagattctcggaaacctcgataaggatgacatctgcgcgagattcgagggtcgcgaccagcaaatatgtggttcgctatttacttgggtgaatgatggatcgcacagtttcaacgatgacctgtacatttctgtcgatgaagcgatggtcacccgttatctcgatatttttcgcagaatcttcgaagtcacaaatcacctcgcgcattatgagatgatgatggggccacaagcgctagctactctagcacttgcgaatgagaacacagccaccgacgcagtggacgaaacggcagcatga

SEQ ID NO: 105463 - DNA, 243 bp, Enterobacter aerogenes
atgaccgaccatcaaaatgcaaatactgaacgtcgccctcaacgccgtggccgcgcatcgttcgtggcggtactggatgaggtgcggaaggagcacgaacgcggggtaccgctggtatggatttatgaggcattcgcggaccagctcgaaatgggatacacccagttcaccaaatacgtcacacgatacatcaagcaaggtcagccaatcctcgctccctacaagcacgacgggaagcgatga

SEQ ID NO: 105464 - DNA, 225 bp, Enterobacter aerogenes
atgaagacagctcaccgcatcagcgcattggccaatcaactcaacgaactgcaagcctgcctcggacgagccagcgggcggcctagcaagagcgttatggaagcccagcgcatagcggccgagctggcttcttcactcgaagattggcaccttgaaacgctacacattcctgaaccggagcgtgacctctatcgcgtacagaatccctattacgcggcccactaa

SEQ ID NO: 105465 - DNA, 795 bp, Enterobacter aerogenes
atggaaatagaatcgcaaaaaatgtcggcttatgccgcccgaaaattcggtcgaggcgcggcgctcgctctggcaatggcaagcgcaggccttggtgtaactctctacatggcacctgccccggcttacgccatctactgctcgaactgctcgacgttctatcaacaaatgttcgagtacgccgaggcggtcaacaccgcgctgaacactgccgagcaactgagcacgcagattcagcagtaccaaaacatggtcacgcagggcacgggcttgccacattcgatgttcggcagcatcgcggccgacctgaaaagcgtggtgaatatctacaaccgctcgcaggccttgggccgccaaatccagaacatggatgcgcagttcaacacggcttttcctggcttcgagtcctacctgaatcaagcagcgaactcggcagaggtcccggcgcgtgatctctatcagaagtggtcggaacagggccgcgacaacgtgagaacggcgctggaggcggccaacctcaataccagcacgtttgagtctgaggacgcgcagctagaccgcatggtggctcgctcgcagtcggccgtgggccggatgcaggcgattcaggcgggcaacgaaattgcctcgcagaacgtgcagcaactgcaaaagctgcgcgatctggtagccacgcaaatcaacatgcagggcaactacatggcccagcaaggtgaccggagggccgctagcgaagcggccgaacaacaattcgaagctcggaagaataactggggaccttcggaggacttctaa

SEQ ID NO: 105466 - DNA, 1617 bp, Enterobacter aerogenes
atgcaacgttcagcactacacgcactcatcggtgcggtgctcttgctttcggccggcactgctgcggcagcaggagatataactcaaggcaatgaaatgaatgggcttttgcggatgctctatgacgccgcaagtgaatggtcaccacgactacagggctatgcactcacattgctggcttcccttgcactaatccaattggtgtggacgttcatgcctttagtcatgaaacaagctgacttcggcgaaatcgtcggcgagttgatccgcttcttcatggctatcggctttttctacgcgatcattgagcattccgttccttgggcgacagccgtagtagacagttttcgagaagcagcgggcacggctagcggtttgggccgtgcgcttcagccgggcgatatgttcgcggtcgccgtcgatttctcgcgcaccatcgtagagggaatctcagttttctctccgggtaaagcgatcctcatcgcgcttgttggctgtttggttttactgtgcttcgccttcattgccgcattcatgtttgtgacgcttgtagagtcatacgtcatcatcaacgcctccgtgctgttcttcggctttggtggttcgcaatggacacgcgactttgcaattgctccgctccgcttcgttatcgcagtaggtgccaagctgttcgtcctaacgttgatcgtaggaattatcgtcacgtcggcgaagtcttggttagcagcgtataccaacgacgaagcgtctctgatgacattggcgggcttggctctggtatgcgcatacctgactaagactattcccgaattgatcggcgggatgattagcggcacgtcgatgggcggtggatcagccattggtggcatggctgctgccggtgcagccggttcggcggcggctatcgcaaccatcgccacggccggtgcggcggctccggctgctgccggtgctcttggcgcggccgggagtggtagtgcagcgggggcaggtgcggcgggtgccggtgggcttggcggcggcggtctggcgaccgcgatcaattccagctttgccggtggtagtgcgcccgccgcagccgcatcaggtggcggggcggcctctggcctcggcgcgagcactggcggtcaagcggcggccaagggcgcgtcgtcggcaggtgccagagtgggcggcagcgacgcaccacaaacgccgagcgcagcgccgcagcctaacagcggcgtacagcaggccgccaagcaggccgggaagtccgcgcagggcaacgacgacaaagaccaacaggcgacaccaaaagggggagtggtcagctccggcaacgccctttcgcaagcggccaatggtggcgcaaaaatgcttggcgtgatggcctcgatggcagtgccgggcatggagaacgcgcacgccttgtctcttggcgcaggatctccgccacctgtccctgacgatacaagttcggccgctccggccaatggagcggaatcagccgcggaacctgcacaagcggaagccaatgtcatccgtccggcctcggacgccagttctacacccagccgcctcgcctcgctcaaggtgccgggcacggcctcgaacaacgaccaaccggagaaataa

SEQ ID NO: 105467 - DNA, 321 bp, Enterobacter aerogenes
atgatggacattctgatgttcgctggattcgtagtaatcgcctcgaccttcgccatcggcatgtgggcgctcggccgatggctgcgtagcaagggctacgggccgcagctcgataagctggatcgccagttcacggccttgcagcttcgggtaagcccgctcgccctgtcagcttcctatcgcatgttttccggggcacaggcgctgaatcgcctaccgctgcttggcagcaagaataacgccgctctgaaccagcaagtgttgatggccatccaagccgcacaggaagcccagaagcgagagaagcccggcagtcgctga

SEQ ID NO: 105468 - DNA, 297 bp, Enterobacter aerogenes
atgatcgagctaataaaaaccgacctattcgaccgctggcttgtcggccttcgtgatcgtcaggcccgtgcgaggatcgaggcgcgcattcggcgcttgagccttggcaaccccggcgacgtgaagccggtaggcgaaggcttgtcggaaatgaggatcgaccacggccccggctatcgcgtctatttcatgcggcgcggccccttggtggtgctgctgctttgtggaggcgacaagagcagtcaggaacgggacattgccctagccaagaccattgcagcgcagtggaaggagtga

SEQ ID NO: 105469 - DNA, 315 bp, Enterobacter aerogenes
atggaagtcaaattcagccgttacgatacggcggactatctcaagaccgaggacgatattgcggcctatctcgatgccgtgatggaggacggcgaccccgcactgatcgcggcggcccttggagacgtggcccgtgcccgcaaccttagccagcttgcccgcgacgtaggaatgagccgccaagggctggacaaggccctttcaggcgatggcaatccgagcctcgcaaccgttgtgaaagtcgctcaggcgcttggcctgcggctcactttcaaacccacccacggcggccccgcaccggccgcaggagcctag

SEQ ID NO: 105470 - DNA, 753 bp, Enterobacter aerogenes
atgagcggtggtaatgctgtgacccccaccagtactagcgcacaggcgcgggtaatgctctatcagcctagccagcgcccgcgattgcgcgagggtgattggacagacacatcatttggccgctgccgcgtggcaggcaggctaggccagaggcacgccgatattgtggaagcggtcctgtactgcgcagaacgtcggcgtcctgtctctgacggcggcgtagagctgctggtagaccccgctcgggtgagaaagacgctttccgacagccgctacagctttacacagattgaaaagctgttggccgagctgcgagcggcgacgatcacaattgagacgccacaattcgatttcccaataatcgggggattgattgatcacgttatcccatcgcccatgacacggcctgatcccctaactgggggagagcggaatctgtggagagtgcgccttggcgtagcgctggtgatgctgcttgagcatgacttgagtctgtactacgacccagcccccattgcccgcctacagcatggcatcagccaagcagtcgcaagacacgtcttgagccacaaaatagagccgacaggcggttggtatcttgatactgttatcgtggccgttgctgggatcgtgccgagcaaagcaatgcgagatgctcgattcaggctgagagaagatgccgacgaattgaaggcgctcggcctgattctagatggcgaccgggtgaggaaaaaaggtactggcgacgcctaa

SEQ ID NO: 105471 - DNA, 906 bp, Enterobacter aerogenes
gtggcgattgacttgattgacttacgggcagcgttcgagaatgaaccgcccgcactagactttatttggccgggcttccttgctgggacagtaggcgcgttggtggctcccggagccacgggtaagagcttctgggcgctggaagcggcaatgtcggttgcctgtgctgcaaccgttgaaagcagagcggccggtggtgacttggtagggcttgcacctgcgaaagctggccgcgtcgtctattacgccggagaagaccccaagccagcgctgattgggcgaattcactctgttggcaaacacctcggtcaagaagctcgcgaagccatcatagaaaacctcatggtcgtgccgatcatgggaaaactaatggacgtcacgaagaaaaataaacggtcccagataatcaagcaatgcgaaggcgctcggctaatcgttctggacacattgagccgtattcatacccttgatgagaatagcaacggcgatatggcccggcttgtcgccatgcttgaggaaattgcgaccattactaaagcgtcagtgctttatttgcaccatgtcagcaaaggcagcgcccgcgacgggcaggccgatcagcaacaggcagtacgtggtgcgtcggctcttgtcgataatccccgatggtgcggtttcgtcgccaagatgactgaaaaagaagcgctgaaccatactgaccgcgtctacgaccgacagcctatcggggaaaaccgccggaagttctttgttcgttttggtgtcagcaaacagaactatgccgaaattgacgacgatcgctggtatcagcgtcatgacggcggcgttttgctgccggtggagttggcggcggtgacgaaggaacgcactctgcacgtcgcaagtgggagtgacgatgagcggtggtaa

SEQ ID NO: 105472 - DNA, 231 bp, Enterobacter aerogenes
atggaaaaagaattaaggagagcaagtaaagttctcattagcaaaaagcaactgctggagatgattccgctgtgcgagcgcacgatctacaactttgaaaagcaggggaaatttcctcagcgcattgcgctcagtagccgcaaggtcgtgtgggatttggcggaggtcgaagcatggattgatgcgtgcaaacattccagcccggcccctcgtcccggaatgggggtctga

SEQ ID NO: 105473 - DNA, 1257 bp, Enterobacter aerogenes
gtggggctttttgagcatggtatttttgagaggaaacccaacccgatcatgctgactgataccaagctgcgcaacctcaagccaaaggacaagctctacaaagtgaatgaccgtgacggcctctacgtggccatcacgcctgcgggttcgatttcattccgctacaactactcgatccacggcaggcaggagaccatcaccttcggccgttacggtgtcggagggatcacactagcggaagcccgcgaacggctgggcgaagccaagaagatgatcgccgcagggaaatctccggccaaggagaaggcgcgggacaaagcccgcgtcaaggatgcagagacattcggcgcgtgggccgagaagtggttgcgcggctatcagatggcgcccaatacccgagacatgcgccgctcggtctacgaacgcgagttaaagccgaaatttggcaaccaaaaactggtagagattacccatgaggacttgcgagcgctgacagacgtcatcgtagaacgaggtgcaccggcaacagcggtgcattcgcgagagatcgtcttgcaggtctaccgctgggccatcgaacgcggccagaaggtcgagaacccggccgatctggtgcgcccctcgaccatcgccaagttcgagccgcgagatcgagcactgacgcctgatgaaatcggcttgatgtaccagtacatggagcgcattggcaccacgccttccattcgggcggccgccaagctgctgttgctgacgatggtacgcaaaagcgaactaactaacgcgacgtggagcgagatcaatttcaccgacgcgctctggacaatccccaaggagcggatgaaacgccgcaacccccatttggtgttcctgtctaggcaggcgctggacattttcattgctctgaaaaccttcgcgggcggttcggagtacgtactgccatctcgctatgactcggacttgccgatgagcagcgccacgctcaatcaggtgctcacgctgacctatcgtctagctcagaaggaagggcagtcgcttggcaagttcggaccgcacgacttgcgacgcacagccagtacgctgctgcatgaggcgggctataacactgactggatcgagaagtgccttgcgcacgaacagaagggcgtgcgagccgtctacaacaaggccgagtaccgcgatcagcgccgggcaatgctacaggattgggcggacatgattgacgagtggacactcaggaaacctcgccccaaggactga

SEQ ID NO: 105474 - DNA, 333 bp, Enterobacter aerogenes
atgaaaaacatcaagattgaatacgttaataacgtgctggtggcgcttgagtataacggcgtgtcttacacgcatctgccagtgtcatctatccatttcgatcatacggctaagattttcccgcatctcaagattgagattgaagctggtggcgcaccattcacacccgcagcgccatcgcaaccacaaccggcagagccggaacagccaccagcttctgtagaagaagtgcagccagcaaaagaaggtgagctcttgccgccgggtgatactacgccacgaccggcgcgccgtccccgtcatcgcaaccgtaaccgtaaccggagccagtaa

SEQ ID NO: 105475 - DNA, 210 bp, Enterobacter aerogenes
atggcacacgtaaaagtaaaagacctcgttgcggcagcttatgccgcatcacagggtttgccaccagcagaggcaaaactgatgcgtgatgtcgctactcaactggacgttatctgtaccgcactgcaagaagcgatggagcagaacagagagatggctgaggagttaaaaactttatgtggatgcaaggatacatattcaatatgttga

SEQ ID NO: 105476 - DNA, 696 bp, Enterobacter aerogenes
atgaatagtgtcacctgggcctcccccaacatacagacagataaattaatccaaaagtcaatagagtgtcatgtttgtggccgtataacgaatcacagctccttggttaaggttaattttagtgaaacccaccatcaagatgacgaatatgacaattcaataacaggatatgagattttcgaaattctacaatgtcaaggatgtatgcaacccacattgatggttgagaaatccaatactgaagaagtagattatatgaaattagaaccgattgtaagaaccgagttttatccaaagcgcgaagagctaaccaaattcgagaattcatatcgattacctattgctctcaatgatttatatagcgagacaattactgcaataaataacaattgctttaccatcgcaggaatagggattcgtggattaatagagaccatttgcaaagaagaaaacatagaggctgacaacttagctaaaaagatcgacaaacttttccttgaagggaaaataagtagtgatggtaaggaaattcttcactcattgcggaaactatataataaatcagcacatgattctttcaaaccatctagacagcaactacttttttcattagacattctagagttattgatgaaacaaatatatgttcactcaaatgatgccaaaattcatctaagtgacacgaagattgtataa

SEQ ID NO: 105477 - DNA, 276 bp, Enterobacter aerogenes
gtgccacattcaccagaagacaagaagcgtgcgcttagccgcatacgccgtattcgcgggcaggttgaagcgctggaacgtgcgctggagtccggcgaaccctgcatgactatcctgcaacagattgcctccattagcggcgccgccaacggtttgatgggcgagctggtggagatgcatctgcaggatgaactggttagcggcgataccaccccggaccaacgcgccgcccgcatggcggaagtcggtcacctgctacgatcctatttaaagtaa

SEQ ID NO: 105478 - DNA, 219 bp, Enterobacter aerogenes
atgccggtggtgacgcataaaggcggagaaaccggcggcgcgctcggagcggcgcggctggcctgcctggcggcgggcaagccgctggccagcgtttgtcataagccggaaatctggcaaacctggcaggcggatctgcagcgtcatcaggcgctgatgcagcgttacgcccatttccagtctctgtacctcaacgaccgacattttcgacagcaataa

SEQ ID NO: 105479 - DNA, 510 bp, Enterobacter aerogenes
atggtcacagaaaaatataactttgatgttccaatcattcgggcagatgctgactggctaaatgatattgataaaaaaagtcagtttatcgttgcggtagagaccacagagagcgaagaaaggaatatgtggttacgaaatttcatgattaaaggttatcgatatgtctcggttattcctaccttgcgagggataccgttagatagcaccgatatgtcatttatttttagccatgaagttatgattttccgcgtacaacagaatttagcaaaatggtcctccaggctcagtaagaggttatttgatatatttggagcactgtcgataattattgttctttcaccgctattaatatacatcagtagaaaagtgaaaaaggacggtggtccatcaatttatggacatgagagaatagggaaaggagggaaaccattcaaatgtttgaaattcagatcgatggtaattaattccaaggaggttcttgaacatttattaaataacgatttttaa

SEQ ID NO: 105480 - DNA, 270 bp, Enterobacter aerogenes
atgtcgaaaactggccatgcgtttatcaaagaacgcatgcgtctcgaagatgctatttatggtggtgaaatgagtgctcaccattattttcgtgatttcttctactgtgacagtggaatgattccttggttattagttgcagaattgctgtgtaacaaaaacaaaagtttaagccaactagtcagtgatagaatgatggcattagcatcgagtatcctgattggcgtttcaatctccgtagttcaaatactgaaccagtcgtacgtttga

SEQ ID NO: 105481 - DNA, 459 bp, Enterobacter aerogenes
gtgactctcatcctgctggtcatcgggagcgcgggtttcatcggcaccacgctgattggccgggtattgaagcgcggattctacccgacgctaatggccattcctgtgctgatggcgaccgtcgcgctggccctgatcgcgtttggcagccaggcggccatcgtgacggccttgctcgggctgtgggggtttatttcaaccgctgcgcccgtgggatggtgggcatgggttccacgcacgttccctcagaatgccgaagcgggcggcgggctgatggtggcgatggtgcagttgtccatagcgctgggatccaccgtggggggcgtgctgttcgaccatcatggctaccagagcacctttctggccagcgccgcgatgttgattatcgcaaccgtactgattttcctgacctcacgtgcagacgcctctgccgatggtctttcatcacactcgtcctga

SEQ ID NO: 105482 - DNA, 1401 bp, Enterobacter aerogenes
atgtcagactggggcgccacgcattcctccgaaaaagccgcgctcgccgggctggacgtgcagtccggcgccaacctcgacgaaaaggtctggtttggcgagccgctgaggaaagccgtggcggaggggcgggtgccgcagagccgcattgatgacatggtacgccgcatcctgcgcagcctgtttgccgtgggcgccgttgaaaacgtcgcccgcccgtatggcgatattgattacatggcgcaccgcctgatcgcccagcgcgaggctgaacagggtattgtcctgcttaaaaatgccggtgacacgctgccgctggcgcgcggagccggcaggctactggtcgtgggcgcgcatgccgatcacggcgtgctggcaggcggtggttcgtcttgcgtcacgccggtgggcagccttcgtctgccaggcgtcaacttcatgggcatacagacggacaaggtctaccagccgtcgtcaccactttatgcaatacgcgcagaatcgggcgcggcagaagtagaatatctcagtggcgataatctggctgaagccgtcagcgccgcgcgtaaagcagatgcggttattgtattcgcagatgagtggagatccgaagcgcttgattctcaggggctgggactcagtgatgcgcagaacacgctgattaaaacactggcagcagcccatccaaaaaccattgtggtacttgaaacaggtggcccggtgacaatgccgtggcttgatgcagtgcccgcggtagtggaagcctggtatcccggatccggcggaggagaggccattgccggcgtgctttttggccgtgtaaatccgtcaggccggctaccggttacttttccggcttctgaggctcaattgccgcatccggagcagaccgatcctgccagcacgacctccctgccgggttcgccaataaagggcggcattattcatatgaattatgacgtggaaggttcagacgtgggttatcgctggcatgcccgtatgcaacaaccgcctctgttttcgtttggccacgggctgagctacaccacctttaagtatgacgctctgaacgcaacctccgatggcaaaaagctcaccgcctcgttcaggatcactaacagtggacatcgcgccggcgcagacgtgccactgctgtttgtcgagccgggtgaccgccgctttgtgccgcgccttgctgcgttcaaacgtgtgtatcttgaaccgggtgaaagctgtgaggtcgtgctgcagctggagccacgcgtggtggctagctgggatgagaaaggggccgcctgggtaacccgggcgggtcagtacagggtgcttctctgtaaaacggctaatgacgtcgtcctccaggctgaaaccgcactgacctcctctcaggtctattactga

SEQ ID NO: 105483 - DNA, 594 bp, Enterobacter aerogenes
atgacttcattaccccgagttctgggcgtttcaggcagcctccgaagcggatcggttaacagcatgtttctggacgccatggcgctgatagcgcctgatgatactgaattcaggatttaccatgagctgaacagcctgccgctgttcaatcctgacttccaggatgacccgcctgacgtggtcagccggtggcgggaagaacttgcccggacagacatgctgctgctggtcagcccggaatatgcccacggcgtgacgggcgttatcaagaatgcactggactggatagtgggcagcggagagcttgtcggaaaactgctggcatttccaaatctttcaacgcgcgcaaatctggcccagagccagctggcagaaaccctgcatttaatgggctgccgacaaagtgaagcctgcagcccccgatcttctgaagataagccgcttatgctgcctgcaatgaacacccgctcactgattaatgatccccgtacggcgcctcagctcaatgagctgtgggcaaatatagtttactttatccgtgctgaaatgtcagcttcaggggagcaagaaagaaatgtacgttatatctggtaa

SEQ ID NO: 105484 - DNA, 582 bp, Enterobacter aerogenes
atgaaaaacataaattacgtcagtgaacacgacatacgcctcttttttgatgctgcagacaggctccttcaggccgcacagcagcaggtaaaaacagcagacagagcaacgtcagcgctgattcattccgccgtagctcatgaaaaacagatgagagaggtcaggaatgaagtcatcagtgccgttacagcaatggccgaatcaactgctcagagatctgcacaacttctggcggaacattttagcgaagccgatcgggcagcagacggggcaagtgaccgctatgaacgagcctgcaggactcttggctggcgaagctggctctggtttctggctgcgcagggggtgctgtgtagcgtggccattgtgcttatcctgacgcttattccctcgctggatgagatacacgagcgacgcttaacgctgatgcagcttcaaaaggagacggagggcttcccgttatactggggaaattgcacggttaacggcaaagtcacccggtgtttccggacggatgataaagcaggaaattttacgtctaaagatggcagcacctggcacgttccatggcaaaagccttag

SEQ ID NO: 105485 - DNA, 708 bp, Enterobacter aerogenes
atgaaattatatgagaacgtggttattggtaattttctgtacggattaggcgtctctgtcggggctcaacttcgcggacatgtgttgccagcatctgtcaatctgctccagcagacgcctgaagacaaggcgctggctgatgtcctgctttccttccccggcacgctgcggctgattgagttcaagactgcggataaccgttccggtaaagaggcggcccgcttcagaaagctctcgcatgctctggaaagtgatacgagactgacgccgctttctcaccggatccactggtatgtcgaaaccatgcctgacgttcagttgggggtgaaaacctacttttcaagctatctcagcgccctctcccggcctaaccgtcaggctgagcccctgaatcttgagaaatttattgcgcagacaacccgtagcatcttttcgagtcaggttcatgccgaagatccggttgccgtcagtaactacctgaaactggtcaggtggtgccagggcgttgacgcagagagcaacgcgggcgcgcttatcgtcgtgtgtgatggcagcggtaatctgaaatatgcagagctgaagaacataatggagttgtcgatgacgcatgagaaatggctcctgtataggcatgaaatagatcgccagacagagctggagagagagcaaaccttagaccacgacagagggattgagctgagcctatga

SEQ ID NO: 105486 - DNA, 501 bp, Enterobacter aerogenes
atgaatagtagagtaaccaatcctgagtcgtacatattttctgcaatcatttacattggagaagacaacttcaccagtaacgatatagcaaaaattcttatcgagcgattctcattcccgaaaaatttattaaaggcaaaagctttttcttataaccaaattcaatgcttggttagaaaaggattattaaataaagtcagaaaattaggcgtttatcaatatttatactcagccacatctgaattcaatgtcgagaaggaaaacgatgaattaattcaggcaacccataaaacttcctctcaacttgtttcaagcgctacctgccatgcacgcagcaatgtaaacatccacataagatctcttattgaaaaatatagcagtgagctggagaaagtatcaggagcaaaagtaatttatgaagaattgataattgctgtgccgagcagggaagatgaatttaggaaactgtgtcttgagcaagagaaatacacattaaaataa

SEQ ID NO: 105487 - DNA, 189 bp, Enterobacter aerogenes
atgtccgctcttcgctcacagcggacatttaaattggtcaatttatccgcaccgagccagaatcgggtgtggctaaacagtctgagttggtcaatggggaaacagatcaaatgcttagaggcggtacctgatgtccagacctatcaaataggcttgctcctatcaccattcctcacgccttgccggtga

SEQ ID NO: 105488 - DNA, 915 bp, Enterobacter aerogenes
atgaaaatagagccttccattctgccttctcttgcatggtttgcgttgattgcgcgctcaggcagtttctcgaaagcggcctcggagatgggcatcacacgggcagcattatcccagaacttaaaagcgcttgaggaacgactcaataccaagcttgtttatcgaaccactcgtaatatgtcgttaacagaagaagggcagcgtctttacgatgtgttgatttccgcatttgggcagattgatgatgctctgagagatgtcggtgatacccagctggaacctacgggtttactaaaaattaactcctctcgtgttgcggcaaggatgcttgttgagccacatatcagtgaattcctgcaccgttatccgaaaacacagatagaactgatcatggatgatggattgtctaacattattgctgaaggatgtgatatcggcatccgcctggggcagagtctggcagaacatatgacggcagtacctgtctctccacggataaaactggttacagtggcatcaccagactatttacaaaagaacggtattccacaaacgcctcaagagctttgctattacaattgtctgcgattacgacataaaagtagtggggcgctaccatcatgggagttctcacaaaaagaaaataatgaagagttcgaaattgaagtttcaggtggatacgttaccaacgacgatgaaagcatgattcgtatggccgtcaatgggactggcatcattcaacatctggattttgcgataacagagcaaattaacaaaggtcagttacaacaaatacttgaggactggtctatatcattccccggattctatctctatgtatcatcacgagtaagaatgccttctaaagttcgtgcattcatagatttcatggtcgagaagcgtttgagagattga

SEQ ID NO: 105489 - DNA, 921 bp, Enterobacter aerogenes
atgaagactgtttcgattaaacacacatactgggatatagctgctgacatctatttccctgctgatttcaatgagacaaaaaaatatccagcaatcatcagcgctcatccgattggaagttgtaaagaacaaacgtcaggtagcgtatatggcgaagcgttggcaaaagctgggtttgtagtgattgcgtttgatgccagtttccagggaagtagcggtggagaaccacgttatctggaagatccttctatgcgggttaaagatttcagtattgtggttgattatctggtgacgctgccttacgtcgatgaagatcgtatcggtgtgctgggtatttgtggcggaggtggttacgccattaatgcagcaatgactgagcgtcgaattaaggccattggtaccgtcactggcgcaaattatggtcgtcttatgcgtgaaggatttacagccttcgacccgattggtgcgctcgaagcaatggcacagcaaagaaccgcagaggctcgtggaactgagcttcgtgtggatgatttgttgccaccatcaccggaggctgctgttgcagcaggattgacagaaacagacttgtttggtgcaactgaatattaccgttctccgagaggctatgcgccaaatggggttaaccgggcgctattttctcatcaaactgtcgccgtggggtgggatgcatttcatctgtcagaagttctcttaacccagccgctgatggttgtagtaggagacaaagttggtgcatttggagcgtatcgtgatggctgtgaaattattggtcgggcagcttccaaagataaagaacttgtcgtcgttgaaggctggtctcattatgacctctacgacaaaccagaacctgtcaaacaggcgctcgataaactcatccctttctacaaaacccatttataa

SEQ ID NO: 105490 - DNA, 636 bp, Enterobacter aerogenes
atgacaaatgtgcttgttttaggcgccaatgggcaaattgcccgttgggtgatagatatgctatccactcaaactgatattaaaatgacattgttgtatcgcaacccaataaaaataaaagggaatgaacctctaaattccgaaattatcattggtgatgcgtcagaccagaggctcatggaccaacttgtagcagggaaagatattgtttatgcaaaccttgctggaaatgtggacgaacagatggaagtcattacttcagcaatgaaaaaaaataacgtaaccagagtgatcagtattaatacccttggaatttacgatgaagtgccaggcgctttcggtgagtggaacaataaaaccattggagagtatttccctcgctacaggaaagctgctgacattctggaagcatcaaacctcgactataccatcatcagagccgcctggctgacagatgagaatgaagttgattatgaggtcacacaaaaagatgaacaatttaaaggaacagaagtttccagaaagagcgtagctgatcaggttgtccaaatcataaacaccccatcgcaaatggttaataaaaatattggtttgaacaaaccaggcactaatggaagtaaacctaaatttatgtaa

SEQ ID NO: 105491 - DNA, 1149 bp, Enterobacter aerogenes
atgaaaaacaaatttacatcattattcgccccttattccttgggcgaaaacatagaattacgtaaccgtattataatggctcctatgaccacatggtcagcaaatcctgacgggacgatatctgatcaagagctggcattttatgaacggcgctcccgggatgttggactggtaattaccgggtgtacctacgttacgccaagtggtatcggatttaccgatgagtttgcagcgtatgacgatcgattcataaacagtcttgaaaaattggctactgcggcaaagagtggcggtgcaccggccattcttcagatttttcatgctggcaacaaggcgcttcctgaacttgtaccaaatagtgatgttttaagcgccagtgcatcaaacgaccacgctagtgatttcaatagtggtaaaaccctgagcaggggaatgacggagaacgaaatccaggcaacgattcaggcatttggtgatgtgactaaaagagcgattaaagccggtttcgatggtgtggagcttcatggcgcgcatggttttctcctgcaaaatttcttctcccccctatttaatcatcgctccgacagatggggaggcgagctcgagaatcgtatgcgtttcccactagccgtattgcaggaagttaaaaacgcagtttacgaatgtgcgacaaagccttttgtcattggctacagaatttcccctgaagagtctgccgaggggggattgcggttaggggacacttataagctactggatcgtttgatctcatccggtgtctcctatatacacgcctctctgatgagtattaacgagagctatcccgttgagaattcaaaagggctgcgaactatcgaattgctattaaaccatattgccgggagggttccggtgattgctgcgggtaaagtgcgcacccctgaacaggcgctggaagcgctttccttaggacttcctcttgtcgcagtaggaaaagggttagttattaaccctgagtgggtttctttggctaaattaggtcgaagtgatgaaattcagacagtacttgatcccaaattcgtgccagagctatctattccagacaaactttggggcgttatcaaggcatcaaaaggaacagggtggtttcctgtaagagatatcagttaa

SEQ ID NO: 105492 - DNA, 525 bp, Enterobacter aerogenes
atgcgtttcccgctggaggtcgttcgggaagtccggcgggttattgaaactcatgccaggaaaccctttttactgggttaccggttatcgccggaagagtccggagaaggaggattacggattaatgactcccaggctctggtgtgtcagttagagaaagagactctcattgactatctccatatctcactccacgacgtacttactgatcggccgcagggtagtgaggataaggaaacaattctggcgcggtttgtagaacaatttaatgggcgtttacctttgctggcagccggaaaaattacttcgtcacaggcggctcaacaggctctggaggccggactgtcactggttgccttaggccggacgattgtcatgaatcccgactggatggagctggtgcaggcaggccatgagaataaggtaaaaaacatgcttatcctgtctcaacggtcagacgaattagcgatccctgaaaaactatggcaagtgattcagaaaacgcccggatggttcccgacataa

SEQ ID NO: 105493 - DNA, 2109 bp, Enterobacter aerogenes
atgcccgttacgctggaaattaacggggcagaatatgatctcttcatcgctacgttcacaccaaaacaggatgctgttccgggcgtggggggatcggcagcttcattgcgcggcagtgcagccccaacaacctatgatttttcgaccagcagccagacgtttaccctgacctggcaggcgactacctataccgtttcgctgatcgctaactacggcaatatgtctggcctgctggcggcaatcaatgaagcgatagcaggggctaacctggtcgcgcaggatgatggcggggtagttcgcatcgttgagaagtccagtccgtggctgggcggcagtattaccgcctcatcacttccggttgccgttttcggggatagtccagtttttaccgatggtaccgcatccagcggcggcagcccggcgatcaccgccaatgtcactcttgcttatggcagtggaagcggcacggcattttccggcattcctgaaggggtgcagcgactgtcacttgcgcatcggggtaatgaataccgcattgcatccgcagatggcacgacagctacagtacagcgaatggttaacggaagcgttgataatacctggccaggctactcacccaggacgatgattgattaccaggcgaccgggattaacgacaacaatagctggatgggcccgtttctcgcctgcccggataatgaggtggtaaatgcatttgaagtgaatttttcattcccttccggcatttgcggtttcggaaaatccggtggcaagaattaccgtaacgttgattatgaaattcagtaccgcgtatatggttctggttctggctgggtgagcaaaaccggacggtaccggatgaagaacattaatgccctggggttcactgagcgattcgaactggctacccctggtctggttgaggtgcggtgccggcggcgtaatgagcaggggagcaaaaactccagggactctatgtactggcaggcgctgcgcggcaggttactgacccgccctgcatcatatgccggtgtatcgttactggccgtgacggtggaatctggcggtaaactggcggcgcagtctgatcggcgcgttaacgttgtggccacgcgtatttatgataccggcgctccgcggcgaatctccagcgcgctgtatcatgtcggtaattctcttggcctggcgatggacactgaggctataaatacccttgaggcaacctactggaccccgcggggagagtattttgatttcgctactggcgacagtgtctccgcgctggaaatgctgcagaagatcaccacggcggggaaatcgtacttcctgctgagtgacgggctcgcatctgtaagcagggaaggaattaaaaactggtccggcattatcagcccgcatgaaatgaccgaagagttacagaccaccttctcggcgccgtccgccgatgattacgatggtgtggatgtcacttatatcaatggcaccacatggtctgaagagaccgtaaagtgccgcactccggacaatcctacaccccgtaagatagaacagtacaccctcgatggggtgcttgacccgaaccgcgcctatcaaatcggcatgcgtcgcctgatgaaatacctgtatcagcggctgggccataacacgacgacagaactggatgcgctggtctatcagtatggcgatcgcattttgctgactgacgatattccggggaataaaacggtaagtagcctggttatggatatggccatatctggcggtcaaacggtatttaccgtctccgagccgctggactggtcctttgaaaacccacgcgcaattctgcgttaccaggatggttctgcctccgggttgctggtggccacctttgtcggggattatcagttgtccgttccgtggcaggctgcttttgatgaaattctgctggacgatccgagcattgagccaccacggctggtgttctgcagctcgacgcgcagtgtttatgacgccatttttgaggagattgccccgcaggcggacggaacctgccaggtgacgacaagacaatacagcgacattttctaccagtacgacgacgccaactaccccggcagcgtctcttaa

SEQ ID NO: 105494 - DNA, 486 bp, Enterobacter aerogenes
atgactgagcgcggaatgaaattctccaaattcactgagttggtagccctcatctggtccaacccaatgacgcagcggcgcgacccggagattaccatctccattcactcgccgggcagtattggtgcgtcgccatccgttgctgtcgagtccattcaggctggcttcgactgggacgctgggcaggtgatgatttacccggcccagccacttactacactgacgcctgaacaggtggcggacataaccatcagcgtgcggaaaggccagtcgtggcacgcatttgaggcttacaagaagtacaaagtccagctggaaaacgcagcgcttgagcatgcgaaagtcgccgggcagcgcgacgagcttctagcggcgctggattccttggctgctgtcgctcgccgctatcttccggattatgacgagcatccagaaatacagaagactgatgacgccatctcccgcgtcaaaggcggtgcagcatga

SEQ ID NO: 105495 - DNA, 555 bp, Enterobacter aerogenes
atgttaaatgactcattgatacgaacagaatttgttcgaaaacatttgaaagaccggtctatagtttttcatgaactggctgttaaaagaggtattgctatcgcggatatagttacggtcaacagttttgctcattgctatgaaattaaaagtgacgttgatagtctttctcgactgccaacacaagtaagttcatttagcgacgttttcaagaaagttactttgattacaacgcataaacatgtaactaaagcccaaaatattataccttcttggtggggggtgattgttgcaagaaaggaaaaagaagatgttgtattcaattatgtaagaaaatcaaaaaacaatcccaaagatacatcgtctgatttattgaaaatattatggaatgatgagcttaagagtattctctcttcaaaaaacattccatttaagaaagggtttaatcgagatgagttagttaacgtcattatcaataactcatcttcaaaatttattaatgatatgttttttgctataatgaataagcgtattaatcaatctcatcataaatga

SEQ ID NO: 105496 - DNA, 930 bp, Enterobacter aerogenes
atgaacggatcgatcccgctctcaactattcaagacatttttgcggacgaatcaacagaattgccagcgggtttcttgattgagcgggatatactgcgaaacaaaccttgccagtcgttggcgtcatacttgacaccttggcaagtactacgactttttcccaaaaaacgcgaaaatctaaatcttctgtccctagccgtttttgagagtttgtcgcagaacaacgtgcgttttgttgaactgcgaagcagcgttttatatctcgctagcttgcaaaattgtgctcctgctcatgcgcttgagcgtcttttagaatcatctagatctgcatccagccgcttcggtatacgaactggtttaatactcacagtgacacgtggtgattacagctcagtagccttgtccacccttcttcaagcctaccaagatctcggccagccaagtgatgtggtggggctggatctggcaggcgacgaggaaattacctacccagccgaattaccttctctatttcgtaaggcgaaggatcgattcgggctaggaatcactatccatgcgggagaaactggacgtgtggataacgttcgtacagcagtagaattgtttggtgcggatcgtattggtcatggaacagcggctagcaaggcccctcaactactagatttcttagcaaagaaggatatctgtattgaagtttgtccgatcagcaacagattaactggagcggttctcaaaaacgaagcccatcctttgcttgcattccaacgtcatggggtccctttcgtgatttgctcagacaaccccgcgattcatcaacgaggcctagcagatgatcatatggcggctatgaatgaagggctatcagccagagatatttacgaacaattcgacgtcgcaaaacggtactcatttatagagggtttagattga

SEQ ID NO: 105497 - DNA, 582 bp, Enterobacter aerogenes
  misc_feature (568)..(577): n is a, c, g, or t
atggaaacgttccacaatcctgatcggtttatgtctgatttgcgacaggtactgtcacagggcaggaagcgtattggaattcttgttggtgcaggagcaccactcgcaatccgcgtaaatgataagaatgagatagacccagatggtaagtcgcttattccgggtgtagaggcactgacactgcaagcaacctcagggctgacagacattcagacaaaggcggtcgaagcaataaaagaaagcttaggaaataccgctaacattgaatcagttttatcacgtattcgtttattagaacaagcgttggggaaaacgaaggtagaggggctcaattcagaagattataggcaactaggcaaagatatctgtaaaaagatctctgaaattgtcggggtttatttgcccaaagaacgaaacgcatattctgatttaatcgcatggattactggtaccgttcgttcaaattctgtagaaattttcactacaaactatgattttcttttcgaagaggcgtttgaaagagtaaggtctccttactttgacggtttttcaggaggcagtaaacctnnnnnnnnnnggtga

SEQ ID NO: 105498 - DNA, 711 bp, Enterobacter aerogenes
  misc_feature (30)..(39): n is a, c, g, or t
ttgacggtttttcaggaggcagtaaacctnnnnnnnnnnggtgatgacttacctgcgcgatgggcaaaattgtggaagatgcatggttcccttggctgggcattggaagacggagctgttgtccgaggacatgggcgagaagctgccgaattagtttatccagaccatttaaaatatgatttaactcaaaaacagccttactccgctctctttgagagacttaaaagatttttacttactcctgactctttgttactcacgattggattttcttttagggacgcacatatttgtgctgttcttgatgaaagtttagcgatgaatgccaatacagctgtattggcatttcaatatcaagttattgcaatggaagagcctgccgtaaaattagcaagtgatagacctaatctgagcgtctacgcagcggatggagctgtcataggaggcgtcccaggaaaatggcgtccaggggaattacctaaaaactggggaagtattcgcgaaagtttttgggctccacgatcttcgaaagagccaaaccaatttttattaggggattttgcagcttttgctcgcttctgtgcattagcccaagcaaatgatttgatagcacaatctttgaaaagggatgaaccagatagaacggagtatgaaactaatggaagcggcagaaatgaggttgagctagaggaaagccaaaatgagcggtaa

SEQ ID NO: 105499 - DNA, 1833 bp, Enterobacter aerogenes
atgagcggtaatgatccgacatatttaggtgtcgttagtgctgtttcaggtgccaccctcactataaaacttgctgagtccttggactctggttttgccgtcattaaaggacatacatatcgagttggccaagtgggcagttttgtcagaattcctcagggctatcaggatctatttggtatcgtttctgagatcggggccactgccgcaccctcacaatctgatatttctgaaatcgactcaggtaggtggatgactgtccagcttgccggtgaaacagtcggtgggcaattcgaaagaggcttaagccagcatcctaatataaatgactcagtacacttggttaccgaaactgatctaagaagaatttacggttcaatcggtgatgaccaagtgaaaatagggcatcttgcgagcgcggaaaacattgacgtgcgtctttctttagatgctcttgtaacgcgccattcagcaatattagggtctactggggcaggtaaatccacaactgttgcaagcctcctgagatcaattattcgaaaagatgaaactcagggatcacctggcgctcgtatccttatgctcgacatacatggcgagtacactaaggctttggaagatgtatcgactgttttcagtgcaacccctagccaggatcaaaagccattatttgttccctattgggccttagaagctggtgaacttctagatttcataacaggagggctttctgaagctcacgaaattgcctttacagataaaattgtggagttaaaagacaagggtattcaagtaaatccaagagcgggtattgattccagaactcttactgtagatagcccagtaccgtttagcttaaaacaactttggtatgaattagttgattttgaaacaacaacttatatcggtgtaaatcgtgatgaacctgcacttgaagaatccggagatgcagaaaccttggtcgcaccaaaatatcaacctcacgctatgggcaccaaagggccattcacaaacacagcagctagaggtattcgaagaccattaaatttacttcgttctcgcctactagatcgccgctatgattttcttcttcaccccggcgattgggagcctgatctcacgggaacagttaaaacagatctcgataaactgttagaaggttggctaggtcatgataaacaaatcactatattggatttgtccggagtccctagtggagttttaactcgactcatcggctctattttacgtattgtttatgaagcacttttttggagtcgggaaaaatctgagggaggtgtagagcgtcctcttttagtagtgatggaagaggctcatcgttatctaggacctgatgctggaactgtcgcctctgaagtggtaaaacgcatagcaaaagaaggtcgtaaatatggtgtaggggctatgattgtgtcccagcgaccagcagaagtagatgagaccgttttatctcaatgtggcacgatcatcgcgcttcggttatcaaatcctgtagatcgtgcacgcgtgaaaggaactttgccggataacttagccgggctgatggacctcttgcccgtgttgagaactggtgaagcaatcatcaccggtgaagcggctcgactccctgtccgttgtcgcattaccttgccctgccaaaagcacttaccccgtagtaacgatcccaaagtcacccaggcttgggctagcaggcgttcagccgaaggctatgaccgcgtggttgcctcttggcgtagccagcagactaacgcagttgtccaaaaacttaaaatcacccgttcaccaatcgaagatgaacctgaggagagctaa

SEQ ID NO: 105500 - DNA, 210 bp, Enterobacter aerogenes
atgcaccgcgacgccgtatcatcatcaaacattatgtctgctggttatgattctgccagtgaaaccatggaaatcgaatttaaggatggagctgtttaccaatactataatgttaatgagcatctttacgaacaattcaaatcagccccttctaaggggcagttctttaatatatatataaaaaatgcggtccctttttcaagagtttaa

SEQ ID NO: 105501 - DNA, 390 bp, Enterobacter aerogenes
atgaagtatcttgataaccatcacccgctacagaagtcactttccggcctgccgcaaataaatcagttaactcactacgagccgataattggcattaaaggcaaaactggcgcaggaaagagtagcctgtgtaatgcgctttttgccgggaaggtgtcatcgattagcgttgttgctgcatgtgcccgtgaacctttaagctttcatctccgggtcggagaacgcttactgacgatttttgatttaccaggagtcagtgaatgcacgtcgcgggatgtggagtccacctcactgtgccgtgaacaacttccccgcttcgacctgtgctgtggcttattaatgccgatgaccgggtgctggcggtggatgagcatttttatcgccgggtga

SEQ ID NO: 105502 - DNA, 864 bp, Enterobacter aerogenes
atgagaaatcaggaaggcttgcattcgctgcagggctcacttataggcttaccagaatgggcctcagaacaagtcatgcagcaaattcgtcaactgacaaattacgagccaatgatcggtattatgggaaaaactggagcgggtaagtcctcattgtgcaatgctctgtttgcgagtgaggtatcgccagtcagcgacatatcagcctgtacccgtgaacctttgcgattccgtcagcaggttggcgaacactttatgaccatcgtcgacctgcccggcgtgggtgaaagcagagctcgtgataccgagtatgctgcgctgtaccacgaacaactcccccaactcgacttggtactgtggctgattaaggctgatgatcgggcacttggagtggatgagcacttttattatcagataattggggaagcttaccgccataaggtgctgtttgttatcagtcagtcggataaggccgagcccactagcagtggagagacattgtccacgaaacagaaacaaaatatcagccgtaaaatctgtctgctacatgagttgttccaaccagtaaatccgatctgtgcggtgtcggttcgtctgcaatggggactgcgggtaatggcggagcgtatgattcgttgcctgccacgcgaggccagcagtccggtggcggtacagcttagtgctccacttcgtaccgatgccgttaataaaaaagcccgtgacgattttggtgaaacggtcggctcggtactggacacagtaagttccctgcccctggtaccggccccggttcggacagtcatccagtctgtacgcgacatcgtggtatcagtcgctcgtgcagtctggaatttcttcttctga

SEQ ID NO: 105503 - DNA, 318 bp, Enterobacter aerogenes
atgagcaacaccacatggggcctgcagagggatatcacgccgtgcctgggagcacgtctggtgcaggagggcaaccggctgcactatctcgatgaccgggccagtatcaccggtaagtttagtgatgcccaatgtattaagctgaatgtggtatttccacattttatcagccagatagagtcggtgctgaccactggcgaactgaatccccgtcatgcccactgcgttaccctgtaccacaacggttttacctgcgaagccgatactcttggtagttgcggctacgtatacatcgccatttatcccactcagcgctaa

SEQ ID NO: 105504 - DNA, 321 bp, Enterobacter aerogenes
atgaaaaccctacctgctataatttcgcgggcggcgaagccctgtctgtcgccagtagctgtctggcaaatgttactgacaagcctgcttagacagcactatggcctgacactgaacgacacgccgttcagtaatgaaactgttattaaggaacatatcgatgccggtatctctttagtcgatgccgtgaattttctggtggaaaaatacgaactggttcgcatagatagtaaggggtttagctggcaagaacagtcgccttttattactgctgtagacattctaaaagccagacggggtatgagggaaatgagaatttaa

SEQ ID NO: 105505 - DNA, 1374 bp, Enterobacter aerogenes
  misc_feature (1191)..(1200): n is a, c, g, or t
atgaaaaaaaatatagagaactttgagacttttatcatagaacagaaagcttggttcgaagagaatctggcagcagattttgcagaatcatgggatagctttgtctggatatgtgggatcaaaggctccggctggttacgtggcaatggggctaatttattacgttttgatgaggttaaccggctcaaagggatcgatgatcgccatactgtctccgagccttatcagttgttcatgaaagcgatgctggtactcgtctatcgagggagaaatcgcagtatttcctctgcggttgctgtcgcaacgctgattattttgaaacgatggtactgcgctctcattaagttaaccgggcaaacacatcccatctatctgactacagatgtcgtacgtagcgcaatggatactctgagtgcagcttcccggccaggtgataccaacctagccaactacaaggggcgttgtgttaagattcagaaattagtaaaccatcacgccttcacattagtaacattgcaatatgtttccgatgattgttataccaatcagactaatttgacccggaaagcccgggaaacaatttcaatgaaagaaaaagacaagctggatgatacttccactgatggtgaagatacactgattaccattaaaggtttcctcaatgtcgtgtcgttaatccagcgagttgaaagcggtactgaaaagattgccctcaattgtcttctgttactgatcgtcactggattccgttctgttgaggcattcaatctcagacaggatgccttggtcaaacgacatatagataactctgacttcagcaaacgtctgcggaacaaaggattgccagattattttcttggcatacgctatgttggtgttaagggggctggcgaacgaacgcattgggtcgagcctttagctgtacctctcgtcgaaaatatatttaagtcggtgaagttactaacagctgagtttcgcaaacatatcgaatatttacgatcaaaaaaattttctgattatttaccaaagccaatcagtgatattaccggtgaactcgttgagcttgatgatattgtaaaatacatggtccagtcctcatcagagcttcgggggcgtgcaggcttacgtgataaagcttcgaaagcattagagaaacgtggctttataccggcaaaagtcatccttaaatcnnnnnnnnnncaggtaatgaaaaagaaaaatattttaaaaagtctgatcttagtaattttcttaaaagtgaattcggtgataacagtgcaaatactccctgtactcatgcatgggcagaaaatggcaaaagatatgagattaaatatgaagagctattgttccttttccccaaaggatcactga

SEQ ID NO: 105506 - DNA, 666 bp, Enterobacter aerogenes
atgggagtgtctgcccctgcttttgtctcccaatctataagccaagccattctaaacttcagtccccctgaatatcaaactgccgttggtcgcggagaggccgctcccccgtcaatcacatctactgatctacgtcacaacgttggtcactcacttgcaatgcagggcgctagtgcagaggaaattgctcacattcttggccattcatctctggttgtagcaaagcactacatccgtgcgaccccagccttggcattgatccgcgctaaagcactcggttctaaccctgtgtggcaaaacatggtggctatgatgcttactgggaaacttgtcccttcaaaagaatgggaaggtcgacgcgtggttggtatggttggtgatcgattgcactatgagattggtggctgtgcgagaaccgatgatgaatgccccttctgtgaagtccgttgctgctatggttgcttatattaccgccctttccttgatggccatcaccagggcgtattgaatagcgtctctaaagaagtcgatgagctgatagcagtatcagatagtgttggtaatgctctcaatccactaatttctgtccacgagacgacgcaaatagaaatcaagtcagtgattgcccgttgtcatttgcataacgtcaaaggttgtgggaaatga

SEQ ID NO: 105507 - DNA, 942 bp, Enterobacter aerogenes
atggatgtaaccatctgtttacccgcactttatccgttaaggtatgtagttgaccatctggagtatcgctcgccctcaactcaatcagcctccctccaggcaattaagtttttttatgatttttggttcatgaagcatagaactacattctgctatagcttttatttctccggacatgaccctgcaatcgctatacatgagatggctgacttttttcaatatttagaaaatggtcggatagtaaactccacaccactatcactgccatttaaacattctagcggcgtgacaaatgccgccagagtacgtgcagtgattagattcataggctacctaatcgctacctatatatctccttactatcgaaatgaaacacctaaagaattgtctcgtcatgcatcccgcctgaatactcgtttgctgatatgtaaagaggaattcaaaactcttgaaagaagtaatcatcggtattatcgcgtcattccgggatttcgcagtatgactggtgatatggttgaaaacatttatcgtatagtagtaccaaattcaaaacataaaaataactctctaaaccccttcccttctgggtttatccagtttcgtaattatttgattttgcggttaatgctcaactatgggctgcgtgtcgctgagctgttattattagagtgcacatcggttaaagctagtataaaaggtgacaaatttagcttaataattagcatacctagcaacataactgatccaagaatacatgccccgtcattaaaaaatgattactcacatcgagttttggagcttgacaagcttgattatgaatttcttatgatttatatgggaaaaattagaaaatcctcgctgactcacaactttatatttgcatcgagccaaaaccctgataaaccgttgtcctataatgcagtgcatttaatttttttctga

SEQ ID NO: 105508 - DNA, 567 bp, Enterobacter aerogenes
ttgatttatgccttgggccagtttgcgctgtcgcaagcctgttacgatctcgagacgatgggggatttactcctttccgtcaatatatccccggcgcagttccgcgacccggaattcgaaactcgggtgatccaaaccctgggacgctgtcagtttcctgcccgccgcctgcagcttgaggtaaccgaaagctacgtactggaaaacccggagcgcgctcgcgtggctatcgagaacctgaaatcgttaggtatcgccgtcgcgctggatgattttggcattggctattccagtattggttatctacgcagctgtcgttttgatagcctcaagattgataagtcgttagccggggtggtggatgtcgacccgcaggcggcagaactggtgcgcggcacggtacgtatcgctaatgcgctggggatcaccgtggttgctgaaggggtagaaactcagcagcagctggcgctgctgcggcgggcgggatgcgatcgacttcagggatattatttcagccaaccgatgccgatcgattcattgcttcaactgcgccagcagcagggataa

SEQ ID NO: 105509 - DNA, 1488 bp, Enterobacter aerogenes
atgactgacaacaacaactatcagcagctcacccgcactttccaacggctctcccgcttctctcaccttgccgccatcgccggctgggatatgttcgccatgatgccgcccagcggcagccgcgcgcgcggtgaagcgctggcggagctcggggtgctgcagcaccaaattttgaccgataagaaggttggtgaatggctggaaaacgccctgcaggaagatcttaacgatctggaacaggctaacctgcgcgaaatgacccgccagtaccagcaagcggcactactgccggaaagcctggtggaagcgaaatcgctggccggcagccgctgcgaacacgcctggcgcagccagcgcccggctaacgactggcaggggtttgccgaaaacctgcgcgaggtcgttaagctcagccgcgaagaggcgcagatccgtgccgatgcgaaaggctgttcacgttatgatgccctgctggatattttcgaacccgatatgaccagcgcgcgtcttgacgtgctattcgccgatctgaaatcctggctgccgtcgctgctggcaaacgtcgtcgataagcaagcgcagaagacgctgctcgagccacaggggcccttcgccatcaccgaccagcgcgagctggggctggaagcaatgcgggttttaggctttgattttgatggcggccgcctggatattagcgcacaccccttctgcggcggcgtgcctgaggacgttcgtattaccacccgttataacgaaaacgatctactcagcgcgctatttggcgtgatccacgaaaccggccacgcgcgctatgaacagaacctcccgcgtaactggctcgatcagccggttgggctggctcgctcaacggcgattcacgaatctcagagtctgttcttcgaaatgcagcttggccgcagcgaagccttcctcaaccgcctgctgcccgccgtgcgtcagcgctttggcgaccagccggcgttcagcgcggaaaactttatcgcctggaaccagcgcgtgaagccgggcttcattcgcgtcgatgccgacgaagtcagctacccggcgcacgtcattctgcgctatgaaatcgagcgggcgctgatcgacggcgatattgaagtagacgatattcccgccctgtgggacgagaaaatgcagagctggctgggtatttcgaccctcggcaactatcgtgacggctgtatgcaggatattcactggaccgatggcggtttcggctatttcccttcctatacgctgggggcgatgtacgccgcacagttaatggcggccgccagacgcgcgttaccgaatctcgcacaggatatcgccggcggcgattttaacgctctgttcgactggttgcggcaaaatatctggcagcacggcagccgctttaccacttcgcagctgattaagaatgccaccggcgaagatctcaacggtgagtatttccgccagcatcttaccgcgcgttatctctaa

SEQ ID NO: 105510 - DNA, 957 bp, Enterobacter aerogenes
atgacacattcatctgatgataaaaactatgtccgagcagttctgagctatcttggcatagattttgatgaggcggatatagtattaagtgtttgccattgtcaaagtgacgagctttcttttacctgtaatatcaaagctattgaactcaagaatgctgttgatttatatgtcgatagtatctctgagaatgaaatagaagctttaaacagagaatctttaaaatctcgactctgttactttcttgaggtgtttgacgcagtctctggtcagtaccttgagatttcaggaaaacactttgcaactagccgttttgaatatgatgatgtttgtagtgaagttcttagcatgtctaatgatgtttctcagtcgaaaggttatgaccgggatgaatataacagactgatgcaggttgatggtcaggttatgattgcccgttttgctttgcaacagttctgggatactcattttattggactaataacatttgtatctgagtctataacatcgagcctctataaagcttatgaaacttttagtgatataagtttggcttgctataaactgagtgaatattcttattcacgctctatcaacagtgaattgacccttaatatttcacttaaagaaaatgacttctgtgaggacctatctgattgctatatggaagatgaggctttaccttctggtagggtaatttctcgacgcaacaatgactccataataagtatttatgagagctatgctgcggcttcttatattccgatgattgcatctttggaagtcgttgatgaatacggcgaagtggttactgacctctgccataccgtttatgtttcagagttaaccggtgggcggattaaaatccacgaccgtaatgacttagtatctgaagttttcgataacctaagaaatttaaatcttgcagttggagattcagtttcacaagctgcttga

SEQ ID NO: 105511 - DNA, 276 bp, Enterobacter aerogenes
atgaatgaactaaaatccaaaaacgagaacagtaccaaaagcaactttcccccggttgataatcagttttgcttttaccatgttgatttcagcatagaacgactactttcaacggccgaggatctccagtttgagtacatcttccagaaacctggaagtgaagtaagaaaggatttggttgagcgattcgaacgtggagagcgctttgttacagcttcacactgtgacaatttctgtgaaatccttggttgtcaaggccatcaggaaaatgcataa

SEQ ID NO: 105512 - DNA, 591 bp, Enterobacter aerogenes
atgattggagaaagtatttttgactgggtaatttacggaatatccattttgatatttgcctcagcactaattgaaggaaagacaactcgctacccagcactttttttctatgggagtttaattttaatgttaatcctgatagttgctggaggccttaactggtggttctacaggtcaaaatatggcgcagtaatcgttatcttcacagtggtctctttactgatgactcgattccgcctggtcatatataaattaagattaagaaagttagtttcagaaatcagatttcgtataaaaacgggttttcgtataattcttgttttgtcggataatgaggatgagcgtaatgttctgctgtctatgcttagcaacgtattgccagagcaaacgcttattcacacgcgtgatgctctcggacctcattcagagcctatcctaaaagctcttgagctacatcatcaacagggaacaggttacatactcgtctgtgaacaacaaatctcagcgcgtacgtggttgagtatcgtagaaaatgggaaacctgatacatctatagctgttaattttcattcgatcccagaaatggagtga

SEQ ID NO: 105513 - DNA, 258 bp, Enterobacter aerogenes
atgagtagaaccgtttcacaaagtgtcacagaagattgtctttttgatacccgcacacaagtcagattacaactaagtcgaagcgttcataaaacgctggcatctgctaaagaaattttacagggaaggggggttgattcggtctctattgaagatcttgtgcgagcctgtcttgaagagaaccagccaattgatctagcctcactttaccttgaaaatctcttaaaacagaaaggtaccagcatttgcgatttttag

SEQ ID NO: 105514 - DNA, 537 bp, Enterobacter aerogenes
atgagtactcaaaagcaactttccagaactaccggcactgaacgtatgtttaaggaagagctggcgttatccttaatttgttgggttttcaccagtccttttaccaactggaccgataaagtcttcagtggtattgaagttccgtctgaaggaccgtcatcattacggggtgagacagaaaaattctttcgttttgtcgttaatgaagaaggctacgacgcaggaagggctgctattggtcttgacctatgttgtttttcacttccgttgtgtttgttcccggacgctgccctgtctgaggaagaggttatgagtaagttaaccggagaagttatccatggaattcttctttccttacctgagtttattgatatgccagaagtgctcgcttaccaggtcagggatgaaattcttgcttttaacactcgctgtggagacgggatctttcatggttggaacacggcttcagaattgtggaagtttgaaatctttccccgcaccaccatcatgatgcagcatacttcggcaatacattaa

SEQ ID NO: 105515 - DNA, 447 bp, Enterobacter aerogenes
atgcataaaaaactttttcttctcgaatggaaaccctgtcagagccgcgtatgggccggttggatggccctgtggttgactatcagttttctgatgttatctgccttgcttatgacagatcatctcctgaacaaagtcatcctgccgccaacatggttgttgatctggttttcgccaatgctggggtttttgataaaagttcgcgtcgtcgaaactcaacatttcctggagcatgacctctgtgttgcaggtttctctttttaccgctggaagaggttagtttctcccgggctttggtcagttgactgtataaatggtcgttttcgcctcaatcggatcacccaggtgggtaagactatccactatccatggcgtctccattatcatcctttgttcatgagccctatcgaacataaatcgcatgctgtgaaagctgtttcaaaatga

SEQ ID NO: 105516 - DNA, 963 bp, Enterobacter aerogenes
atgagttatgacgatttgccctattttcgtgaccagattctggaacgcatcgactcgctcaagtgttttctttcgaacacccccccgatgatggcaaacctgatgactgtctccaccgtatctagaacagaagagcgcttgaagcaggttaaacccatcagggttagtattaaagacgatgcttcggttgaggaaattattcaggcacttactgacatctgtgtggatgacatagagtcattaagtcatgattccaccaaagtaaccactaaatacccgggtctaatcattgtccccgaaagagcagatcttctcgaaagcttgatcacttctataaacgaagcaaaaaatgattttgctgcggcaatgaggcgtatcgataataaaaagaatgtccgttttgataaagtgcacaagaagctcccgggccttgtcgctatgcactcaacaagaaatatccttttcatcaagtcccagcttaaaaaagttactttttcatggcggctaaaccgaaaccaggaagttaaaacagcagagcaacttgtgagtttgttggagcgcaggagagcctcagaagtaaaaaatgtagcaactaccaatttgaatgtcgtgtctaatatcgataaggctttacaccgtcttgaatttcacccactgaagcagggcgaatcttatcgcctttgtcgaactaactctttccctgttccgattgctcacatttttgcatttaggcctgaagggcaggaacgaaacgggaataaatatgctgagactgattattcagtagtaaaagcatccttgcccattttcgcagcaggcaacatacctcaattaaaaacgctctctgactgggctcctgaaaacagccagggtccgtccaaccaacggaagctgagcctgaaatatacagaactcgtgccgggggctgagctgggcattttcattgtcagccccgaaaattaa

SEQ ID NO: 105517 - DNA, 906 bp, Enterobacter aerogenes
atgcaatggatttccacagccagccagaaaatcgatgagcgtctctatcgtgtctgcgtctgggtaaaaaaatatcacgctgatgcgattaaccgcgttgtgctaaccgttgatctaagtaaagcccgacatgaccctgacgaggaccaggtaagagcagagctgctgtgcggccattattttttgcttcgtaaggaaaacgcttcgaactctgcgcctgacgatcaaaagtttgctttcctgcctgacgggcgcaatctgtgttggcagaccgcaaccccggtgcttcagcatctcctactcaataaaaacgttcctgagtcgctgaggttgcttacggactacatacatatgcgtctggccaggctgacaatggtacctatgtccggaaccatcatgaacgaggctctgctggacagcatcagctgggttaaggtggatttgacctacttctggcagtacgaacagctcagctctcatctgggacccatccagataacccacaaggcacttgtacgcttcgggcacctggcaaagaatgatgaaaactccagtgccataagaattctgcgtcagcgtctgtcttcagaattcttacaagaatttcagatggctgaggatgagctaaagcgcaaacagtcgttgatgggcaccatggacgtgaaaatgctgtttcatgctcattaccccagccagaagatgctggtggctcgatataaaaatggttgggtaatggtggattgttttctgtttcaccataccaaacctaagaaaaaagcaaaaaacaaaactactgtggctaagcctcaacttaaacagactaaaagagaagggagtgaaaatggaactgggcattatggtgtgcatcgtgttgttactctcagtggcggcggcgtggatcagtaa

SEQ ID NO: 105518 - DNA, 330 bp, Enterobacter aerogenes
atggtgtgcatcgtgttgttactctcagtggcggcggcgtggatcagtaataagacagttgatttgctcgaaagattctatttcaagcgtccgctgagcatggagtacgcggcatggctacgtgtaatgtgtgcaggcttgttattagtttttattcaggttgctccccaatttacactcctgtatacccttaaacttgtcacgcttattaatcttggaatccagacaatgaaattaaatggcgtgtacaaatataaaaggacgggaattttgcctccgggaggggcactctctaatctcaccagacttaacccgttcaagaaaaaataa

SEQ ID NO: 105519 - DNA, 1176 bp, Enterobacter aerogenes
atgaagaatcaatcagtgatcagacagttttcggaaagcgaattgcatcagcagctggaaacgttcggcaaccatgataaacagctttcacgcttgatccgttacttttcccatctgagatacaacacagctaaaacctatctgcactggctacgagtatggaacgaatggtatcaggcgaatgcccggttgcatacagactggccagtaagttcgctccccgtgtctgaggaagctctgctggcgtttatggggcatcttgaaggcaaattgtcacgaagcagcataaacagctgtcttcaggccttaaacagtatccataaaaaagggcttaacctgcccgggattattacgtctgaagcatggtacatgctggaagccttaaaacaatcggaagcccggaagcgaaagacgactaaacaggcaactccctttcttattggcgatctcaaggctctgataaagttacgcagtactacaaactcagttcgtaagcttcgtgacctgtgcctgatctggacaggctttgaaacactgctccgttcatccgaaattcgccgtatacgtctgaaagatctgtctctggatagtatgaccggtgaatttaacctgacggtataccgtacaaaaacgaacatcagtacacttcttacctaccggctgacacgtcagttaactaactgcctcttgagattgatgaaccttgtgaaaatggatcagcacagtcatccggatgaataccttttccaggccgtaaatttccatgatacaggctatatgccacccggctggaagcttcggagtaaagggaatgagctatctgagcttcttaaacggcataacctgccctaccgtgctaaacaaagtcttctgaacgatgaagatgaggaagacactgtggacgatgccggtatgctcagcaaaaattcccttttacgggcatttaaagaaatgtggaatgagctttatccaaatgagactaaaacccgttactggacagggcacagcgttcgtgtaggcggtgcgatacagctggatattgaaggttactcgctaccacagattatggaaatggggaactggtcgaatgaagaaatggttatgcgctacattcgcaatattgaagctggtaaaaaagccatgatcaagcttatgcgaaatgcctttgatgaatag

SEQ ID NO: 105520 - DNA, 213 bp, Enterobacter aerogenes
atgtctgacacaaagcagtcttatttaatgaaattccgtaagtgtagttcgttcgaaacgctcgaaaaagtatttgaaaggttatgtgaaaaaaactcgggtgtcgcctctcttgaaatttctggtgcttatgatcatcgtaaagctgaactgacaatgaaaaagttatatgacaaagttcctgcgagtgtgtggacctttgttcgcgagtaa

SEQ ID NO: 105521 - DNA, 1083 bp, Enterobacter aerogenes
atgcgtaagagttacacatttggtattccatttggactccagagagaatcaggactctttttagatattacagaggtcagccggggtatcgactgtaactgcatctgccccgcttgcaaaactgatctgttagcaaagcagggggaggtcaagctttggcatttctcacacagtactgctgtagccggtgactgtgatggtctgatggaagccatccggggaaaaattattgaagtcatcaacgagcaccaggttcttggtttcccaaatcttctcgctggcgacgatggtgggccggtttcactgaatgaggttattggaagcggcagtatgttcggaggcacagctgatctgttcgtaaaggttaatgatttatgtgtggccgtctttctggacagggatcgtagcatttctgcgaagttaacctttgaccaccttcatccttccgaaagagttgccgcattgcgtatcgatcttccagatattgaatatgaaatcagtcaggtgcagctcgggcgacgtaaaacaacatacagtgagtgcattgaaagcctgatcattgatgagaccagttcccgggaatggctatatcatccattaatgcatgaacttgaatctgaacctcttcaggagtatcggggacgggagccttcagaggaagggcctcttcttcagcgccttgctgactgtaagatgaaattgcctgatatccttccgggcagtcataacgcgttagtcaggttacagcaggatacgattgtatgtctgtgtaggttaacggttcgggcttatgacatcgctcagaccgatgaatttcctttgttccttcgctatttcaggttgcactgcctggaaaacagcgaacatgtcagttacgaaagactgatctgctggcaggaaatgatttcaaaaacccaggaaggccagtccttgacacaaaacgaacttgaatatcttcatgagattgtccgcatcgccttatacaatcaccggcttaacaatgtcagtatttcagatgttaaaaaccatgacacaggaaaggagagcggcagggtagagccacaaaactattcactcttataa

SEQ ID NO: 105522 - DNA, 1557 bp, Enterobacter aerogenes
atgatgaccgcactattgcggtgttgtggtaagggatacgctttttcggtgatcaatatggcaaatatcgttacgtgcaaaacaaaggacggcgaaacagtccagtatgttgacgaggtaattggttcgggctcgatgaaggatgtttacttttcgcctgataaatcatacgtcgtcgctttttatcataaaccgcagaacgagcaggcccgggatcggattgatatgatcaccggacgctacaggcaaaacatttttggccagtccggaggtgaatactggaaggacctgttttgctggccgacccatgttgttgagcatgggcataaaatcggcatcgtggttccaacctacaaaagctactttttctttaaatacggctctaaaaacgatgattttcttggcataaaaggtcgtgaaaaggaaggcaaatggtttgccagcgccagcaaccagaacaaatttctcgacccacgtgaacgaggcaatacgcttacctatctcaaggtctgtctgctgctgacaagagccgtcagaaggatgcatgcggcaggtctctgtcacagcgatctaagctataaaaacgtgcttatcgatccagaaatgggacatgcctgcatcattgacgtagacggcctggttgtccctggaaagtatcctcccgacgtggtgggcaccccggattttatcgctccggaagtggtgaaaaccagtcatctttccaaagaggatccgaaccgcgtattgccaagcattactactgaccgtcatgcgctgtcggtgcttatctacatgtatctgttcttccgtcatccgctacgtggcggaaaaatacatgacatgtcggatgaagtacgtgatgagaccttatctatgggtgagaaggcactcttcattgaacatccgacagacaaaagcaatgcagtcaaagtcagtcagctatcgtccttttcactgccctgggctgacccggagaaaattccttacaccatcatgggcccttatctgacacctttgtttgagcgcgcctttatagatggcttacacgatgccactaaacgcccgaccgccgatgagtgggaaagcgccctggttaaaacagtcgatctgatacagccctgccagaacaaggcgtgtgaacagaaatggtacgttttctcgggtaagacaaagccggtttgtccctactgcggtacgccatacaagggtaaattaccggttctaaatttatattcttcccgaaaggaaggcagttatcgtcctgacgaccaccggttgatggtgtggagcgggcagtcaatctatgcgtggcatgtgaatcgcctcattgcgccaaatgagcgtacaaccgatttgcaaaggaaacgagttgggtattttgttttccataacgatcagtggtggttagtaaatgaaggcataaatgggcttatgtcattaccggataaacgacagattgccattggggaaaaaattgaactgacgaataacgctcagtttgttctgtcaaaggaggaaggcggcaggctggtcgtcgttcagttagtagaaaactaa

SEQ ID NO: 105523 - DNA, 1638 bp, Enterobacter aerogenes
atgtcgcaaaatgctttacttgaagagaagattatccgcttagttctgtctgagctgggccaccctgttgaaggtgagcggcttttacttctatcgcaggacccatcccttaccgaagaaattatgcggcttaaagagcggattgagagccttgcacagggtttatctgcgcgggttagcgaaggtgataacgacgcagagattgccgcctcgtcagcatccagtctttccgatcagcaacaaacggtcgtaagtgttgctgataacccgggcattgacgctaccgatacatcagcactgcaacccctgccagaaaatgagcctcatcctccgttctggaagctgatgccttattacgaatttgataaaccagcacagagggaagacgaaaacctgtcttccctggtattaaaacccgggcagataccgacaggccagcagcgggccagcttagctgtgccacctgccgttcccccgagagctaaaataacgatccccaacgcccgcgcaggcgaacgtttctcttcgccggttgctatcgttctgggtgagggccagcaggctactgtcagggacgttgtctttccccggaacattggcctgtcttttgacaaagaacaggagttgctgacaggtactcccaccgaaagcggcgatatagagctttcagtaatctggtcatgcacgtcgcacgacgaatgtgaaacaaaacagctatttataatcaatcccgatccgagaagcctgtggaaggtggtagagccaccagcagacgctccctaccctaagtcccatctggacgctgctggcctggtcaggggtgatatacgtattgctgccgccagtcgccggggacgctctcatgagcatgccggaagcttcagagatgacgacttctacatcaaccactgccaggaaacaggatggtctgtcatgctggtcgcagacggagccggtagtgcggtaaattcccgggaaggctcccggattgcagtcaaaacggctggcgattaccttttaaatcagctcagtggtgtgaaaggcgtccatttaaagcagcacatcacggcgtgggaagggagcgatcagcaggcaacaataaacgccatgcttcatcattttaaacaggcagctacgctcgcggtcaacagtatccagaacgaagccatttgtgcagaacaacctgtgaaatcctattcaacaacccttctggcaactgtagcgctacgaactgataacgagctgtttgcggctgcattctggcttggtgatggtgcgataggtgcatacagcccttccggtaaagtcaggatactgggaaatcccgatagcggagaatacgcaggacaaacccgtttccttgaccagagcattatcgcagacccctcgtttagcggccgcatcagcgtgggtaaatggaatgatgtatctcacttgatcctcatgacagacggcgtctcagaccctctgtttgagacggataatgggcttcgcagtgacgaaaaatggacccgtctcgttgatgagctcaaccctgtccttacagacgccagtattgcgcctgagaggttaggcgactggcttaactttttctccacagggaaccatgatgaccgcactattgcggtgttgtggtaa

SEQ ID NO: 105524 - DNA, 1041 bp, Enterobacter aerogenes
atgagacgccttcccgtgttttttgtcctggactgttcagagtccatgattggtgaaaacctgaaaaaaatgactgatggtctgcaaatgatcgtcggagatttaagaaaggatccacacgcacttgaaacagcctgggtctcggtaatcgcatttgccggtgtagcccgtacgattgtacctcttcacgaaattgcctcgttctaccctccccgccttcccgttggcggcggtacgagccttggagctgcattgcgtgagctgaccgtgcaaattgatacccaggtcagaaaaaccactcatgaggctaaaggcgactggaaacccgtcgtgtatctccttaccgacggacgtccgactgacgacacaaccgcagaagtgaagcgctggaaggatcactacgcgagtaaagtgaatctcattgccgttggcctggggccgtcagcggacctgaatatcctgcggcaactgacagagaatgtcatgctgttcaccgaatctcaggaaggggactttacccgcttcatcaaatggatcacggcctcggttacggcgcacagccgcagcgtcggggacgacaaacaacctgagctcagccagactgaatacatagtccggctggccaaggacgagccagtaaaagcgtacgacgaaaactgcgttacgcttaccggccgttgcagcaagacccgtcgtccgtacctgatgaagtatgaacggccaccagcaagggtttccgggctcgatttcagtctgaacctgaacagctttaatattgccggatgctatcccatcgatgaggactattttgcgtggtcagatgccaccgctaccggtttgcaggtaaataccagcgaactgcatggcgtaccgggttgcccccactgcggtaatgccagtgcgtttgccctgtgctcatgcggaaagttgctgtgtattgacggcccggatgacgtgatctgcccgtggtgtgaaacaggcctgtcattcagcaatgatggcggaaacactaacttcgacgtaaacagagggagaggttga

SEQ ID NO: 105525 - DNA, 639 bp, Enterobacter aerogenes
atgcgccgcctgcctgtttaccttgttatcgacacatccggctcgatgcgcggtgagtcaatccattccgttaacgttggaattcaggcgatgcttagcgctcttcgccaggatccctacgccctcgaaagcgttcatatctccattatcacctatgacaatgaggcgcgtgagttcattcctctcacgccgctggaagacttccagttttctgacatcgttgtgccaagcgcaggcgggacgttcaccggtgctgcccttgaatgtctgatgcagtgtgttgaacgggatgtacgtcgctcagatggtgataccaaaggagactggcgtcctctggtattcctgatgactgatggaaccccttctgatgccctggcgtacggtgaagcggtaaaagcgattcgcggccggggattcggatccatcattgcctgcgccgttggtcctaaagcaggccatgagcacttaaaacagctcaccgataaggttgtgtctctggagacgctagattcaaccgcgtttgcaggtttctttaaatgggtatcggccagcgtgtcttccggcagcacaagcgcggggattaataacggaactgatacccttccccctcctccaccagaaatccagctggtgctctga

SEQ ID NO: 105526 - DNA, 642 bp, Enterobacter aerogenes
atgtctgtcagtctgagcaaaggccagggcgtaagcctgaaaaaaaatgaatacgatctctcgtccgttactatcggcctcggttgggatattaatgaggaaaagaaaggttttctcggcgggatctttggtaaaaaagaagaagaatacgaccttgatgtgatcgctttcctgtgtaattcagccggaaaggtgaccgatctcggcaatgtggaaaatggtaaaccaacgcttgtgaatggcgatatcatctttttcaacagccttcgccataagtcaggcaatatctggctgacgggcgataaccgaaccggagccggtgacggtgacgatgagcaaattattgtgcgcctgaattcccttgacgctcagtacgagaaaattgtgttcatcgttcagatctacaatggtgaaaagctccagcagcactttggtaaagttcagaatgccttcatccgggcagtagatgcccgtaatattgaaatggcacgattcgatctttctggcggacccgccttcgccagccagcgctccatggtctttgccgagctgatacgcgaggctacaggctggaaactcagggcaattggtgagccttcagaatcagattcgtttgtctcgcacctgaggaattacatgtga

SEQ ID NO: 105527 - DNA, 639 bp, Enterobacter aerogenes
ttgagacgcttacccgtatatctgctactcgacacgtccggctctatgcacggagagcctatcgaagcggttaaaaatggcgttcagacgctgcttaccacgctgaaacaggatccgtatgcactcgaaacggctcacgtgtcagtgatcacctttgattcttcagcccgacaggcagtccccctgacagacctcctgagtttccagatgccagcactaacagccagcggcaccacgtctcttggcgaagcgctttccctcacggccagctccattgccaaagaagtacagaaaacgacggctgacactaaaggtgactggcgtccccttgtattcctgatgacggatggaagtccgaatgatgactggcgtaaaggcctgaatgactttaaagcggccagaaccggcgttgttgtggcatgtgcagccgggcatgatgccgataccagcgtcctcaaagaaatcactgaaatcgtggttcagctcgatacagctgacagttcgacgattaaagctttctttaaatgggtcagtgcgagcatttcggtaggcagtcagaaagtggagtccagcaaaaaagaagtgatcggtcttgaagacctgccaccgccgccgccagaagtaaatgtggtcttataa

SEQ ID NO: 105528 - DNA, 162 bp, Enterobacter aerogenes
atgtcggtaattctatggtggttaacttatttctttaatgccgcttctgagtatttaatctccacccgacagatgtcgtgccgttttatcaaatcaacaaaccctggcctcttcctgaaactactctcctcttccgatctcttaagaaggaattacatttga

SEQ ID NO: 105529 - DNA, 468 bp, Enterobacter aerogenes
atgcaattaaataccagacaggcccggatttttaagcttgccaacttactgggcaccggcaagcccgtttccgctgccgacattataaccagtctggaatgctcagagccgacattaacccgggccctcaaagagctacgcgagtcatattctgcggagatcaaatacagcaaggcaggtcattcctaccatctcgttaatccgggccagctggataaaaagacccttcgccggatgaatgaagcgctcgcacagaatgctgaactgaaaaccggtgagtctacagggaaggtcgtactcgataaggataaaaaaacagccgtgtccttatcgctacgcatgcggatcttaagaaaaattgaccgtctggctgcgctgagtggctcgacccgaagtgaagcggtagagaagctggctctgcactccgttgacgaactgataaaagaatacagcgctaaaaagtcctga

SEQ ID NO: 105530 - DNA, 1209 bp, Enterobacter aerogenes
atggggttcaggttcagaaagtcgatcaacattattcctggcgttcgcctcaacctgagtaacggtgcaccgagcctgagtgtcgggccgagaggtgcttccgtttcttttggtagccgggggacctatgccaatctgggcttgcccggtaccgggctgagttaccgtacccggcttgaccgggccgcgcgttccggaggtggaaaccggacggcaaccgacccggggctcagacaggcgcttgagcaggaagccgctgaactcatgtcagcggtaaccgcaatccgtaatattcacgagctgacgccggatccaaaaacaggcatcagctgggcagagctggaagcagtatacctgcataacagaacgtcgccttttcaggttccggcaccggtgcgtccagaaaagccagactaccttgcattgccggaaaagcctgccgagagcgaaggcattagttttctgggtaaatggtttgaatcggaatcagctaaagctgagcgccacgccgaaaatcttcgccggtggcagcaggagctgattgatgtggagcgtgagaatacccttcgacagcaccggtaccagcaacaacggacggcctgggccgaacagtatgcaaactggaagtttgaagcagaagaacatgaaaaacggctcgccacggctcaggcagatgcccggcagcagttccggacagacgccgcgtttttcgaatcatacctggcgggtgtgctggcagaaactgaatggccgcgtgaaacgattgttgcatttgaagtaaagccggagctatcagcagtcctgctggacgttgatttagctgagattgaagatttccctgataagatttacggcgttaatgcccggggcacggagctgacggaaaaagccatgacgcaaaaagccgtacgcgaaaactatgcccgccacgtccatggctgcttgttccgcctggtcggtatcgttttacatacgctacctttcgacaacgtgattgtgtcaggctttacgcaacgggtcagtaagcggaccggctatctggaggatgagtatatcctgtcctgcaaatgcactcgcagccagatgtcgtcagtaaattttgcaggcatagaacacattgatccggttgaagcgttaggcgatcacccggttattcgaaagatgagcagtaccttcatttttcagcctattgaaccactaaccctttaa

SEQ ID NO: 105531 - DNA, 957 bp, Enterobacter aerogenes
atgaaaaatcgtctttctccctggaatctgggagccacgctatacatgcctgcaacacgggaagatattgctgatgccgtcctgcacgggaaaatcccgggtttgcgctctctggtgatttgcctggaggatgctgtcagtgaagcagacatccccatcgccctcaaaaatctggagcacctgctgcacgagctcagtaacagcatgcgtagcctgggtaaaaatgactggcctctggtgttcattcgccctcggcatgccgaaatgggcagatggttaaaagcgcattatgatctttccgctgtcgatgggtttgtgttgccgaaatttaccctcagttcgttagctgaatggtgggatatcatgggcgggactcacctgtgcatgatgccaacgctggaaacagaagacgtctttgacgtggttcagatgcgcgagctggccactcgcctggtggaacatccctgccacgaccgcattattgcgcttcgaatcggcggcaacgatcttatgaacgttgtgtcgcttcgccgcccccgggacctgacgctgtatgacagcccgatgggctacgtcatcaaaatgctcgtttcagtcttcggcccgcgtgattttgccctgaccgcgcccgtatgtgagcatattgacgatcatgccgttatggccagagagctggctcttgatatggcacatgggcttgttgggaaaacggccattcacccgggtcagatagaggtcattcaaaacgcgctgatggtcactcagggtgagtattctgacgctctgcggatcctgaactctacccaggccgtgtttaagtcgcagggagcaatgtgtgaacccgccacacatcgccgctgggcggctggcattctggacagagctcgtttttatgggttacagaacgagcaaagcgctgatggaatcagattacttaccgtgacccagcatcattaa

SEQ ID NO: 105532 - DNA, 1080 bp, Enterobacter aerogenes
atgcagccacatgacacatttaccggctcataccagcccggtgacgtggaatttctgctaaagccggtagtcattgagatgacgccggttgagcaaaaagaagagctgattcagtcagggaagaaacattattcggacatgctcagtcaggagccagcgccaacacaatggcatcttgatttgtttcaccgggcgctggatcggggcgcagagagacttgcaaaagaagtcacacagctcgctattgctctggccgaacgcttcggtgatgagcccattgtactggccagtctcgtcagagctggcgtgccgctcggcgttatgctgcaccaggccctgcgtgacatggggaaaacctcatggcattacggtatcagcattatccgggatcgtggaattgacggtgcagccctcgacgtcattgaagagcgccatggtaccagcggtattgtctttgttgacggatggacaggtaaaggcgcaattaccggagagcttgtacgcgcactgaaagatcgcccgggctatcctgagcagccgcgactggttgtcctggccgatccctgtggctgctcctggcttgcagccagtgatgatgactggctcattccttttggcatcatgggtgcgccggtatcaggcctgatctcccggtcagtatggtcctctgaaggattacatgggtgcatggtttgcgagcatctcagtgaattcgaatgcagccggatgcttgtcgataccgtcgcccatttccgtaagaagttaaccccgtcatccctcgctaccctgagctggaatatggagtcagcccgggtcttatggcagacaagtcgcgacgttatcgcgttcctggccgatgaatttaaagtggacagcgtcaatcgtattaaacccggtattgctgaagcaacccgggctgtattacgtcgggtaccggaccatgtatttgtgcgttctattgacgacccggacgttgccttgcttgtagggcttgctcgtgaaaagggaatagttgttacagaaatggggggaaccctcggccagtatcgggctgtaaccattatcaagaaggtactctga

SEQ ID NO: 105533 - DNA, 774 bp, Enterobacter aerogenes
atgaataaacccgttgttctgagcgaccttgacgacacgctctttcagacccgtcgtaaaatggtggacgagctggccctggagccattccgtaccggtgccgttgatcgcaccctgaatccacgaagctttatgacggaagaacagtccatgttggtggactggctcctggagcaggctgaactcatacccgttaccgcacggggaactgaagaaatcagccgcgtacggatccctttccactcctgggcaatcaccactcacggggccgtcattctcacgccagaaggcaaacccgacgaggagtggaaggcccatatgctcggccagctggctccctatcaggaaaagctgacatcgatgcagcgtctgatcactgaaatgatggacgcaaaagggatcaatgcctgggcaaggctgaacttcgaatacggtgaaacggcggtttatatggtgatgaagcaccgcgacagcacccgccttgacgagctcaatgccattgcagatgagatagaaacggtgtttccgaccgagggcttctacatccaccgcaacagtaataacgtggcctggcttcccaccgcggttgagaaagggctggcagtcagatggcttcttgaaaaacttcgggctgaacgcggagtcttccccgtaattggtctgggcgacagcctgagcgatcatcgttttatgaaactgtgcagctggtttggcatcccgcgtcagagtcagtttgcagatgccatttcacagcgaatttttggagaaaattaa

SEQ ID NO: 105534 - DNA, 1143 bp, Enterobacter aerogenes
atgtctgatatcctcgaagatatgatttatcgccgtaccctctcatgcggtacgattcaggtaacccgcgaccagggtgaagtttcgctcgatgacctgtttgacatcgctgaaagacgtaacccgaaacgcgcctttctgtttgtcagcaaagtactcggcaggcacattcccgtgccaccctcagtcatgcggcaggcctacagacagcttgccagccagttcccctcgacactgacaggacccgtactgtttatcggtatggctgaaaccgccgttgggcttggggccggtgtatttgatgaagtgcgccaccagcatcctgaatctgtctatctgacctctacccgtcacccggttgatggcacgttgctttgcgagttcaaggaagaacacagccacgccaccgatcatctgatctatctgccagatgatgaagagaaaagacgtcgtgttaccaacgcacgaacgctggttttgattgatgacgaggcaaccaccggtaatacctttattaacctgctttcagccctgcgtaataccggcaagcttcaacatattgaacaggttatagccgttacgcttaccgactggagtggcaaagccttgtccgagcgcagcaccttaccagtcacttcggtttctcttgtaagcggtaagtggggatggaccccattacctgatgcacctgtcccggacatgccgaaagtcaacgtaacttcacgaggagaatgggacatccagggaaaacagtcctggggccgactggggatgctcgcacctgcggccgatctcggccatgaggtctccgtccacaagggggaacgtattctggttctcgggaccggggaattcgtctgggagccgttcctgcttgctgaacggctcgaagctgccggagcacaggcattttatggatcgaccacccgctcccctatcgccgttggttatgccattgagtccgccatttcctttacggataactacgggctgggcatccccaattttgtctataacgtcgcccaccagcagtttgaccgcattcttgtgtgtactgagacacccgcagaaagtattgacacgcagcttcttaaagcgctggctgaggttgcggccgtcgtggagattgttacctatgaataa

SEQ ID NO: 105535 - DNA, 1059 bp, Enterobacter aerogenes
atgaacaagaaaatttggtttatggaaggtttatcctcccagcgagatattattcagggggtaaaatcatttgcaaaaaaaaataattttgccattaccgtttttgcctcccaccgtaacgaaagaaatgaaatcctttccgttgccgactattctttgactgaacctgaagatcctcaaaaacgtcttcagtttatccaggaaaccattcagtcctacggcatccaccatattcatactggccgtaacagccagtggtttgaagaacaccgttcagccattgaatcgaccggtgccacccttactaccggtgcaacgggcgtcgactggttaactctggctgacgaaaaagttacttttgctcagtttatggagcaaaagggtctcccggtcgtaccatcctggcgggtgaatacgctggcagaattaaaaacacacctcgcggccccgccgttcactgacagcccggtatgcgtgaagccggtgacgggtatctatggcatgggattctggcgctttgatgacagtgcttcgcctatggccgtctttaatcatcccgaacatcgtctggtcagtccgcaacagtatattgcagcagcatcagctgctgagtcgtttaaaccccttgttttgatgccgtacctgccaggcccggaattttccgtcgatatcctcgcggataagggcgaaatactcgcagccgtgggacgccgtaaggaaggggttatccagtatctggtaaacgaaggaagcgcctgggaactggcgtgtgactgcgccagggttatgaaggccgacgggctggtgaatgttcagacgcgaaacgatgtgaatggcaacccggtgctgcttgaaaccaacatgcgtccgtcagggggggtgggttatacccttcacagcggggtgaaccttcctgggttatttgctgcctttaagctcggtctgatgtctgaagatatggtgcgccagagcgctaaaaacaccttttctccggttgcggtgagatccattacggatgtaattgcatacccggaatcactctctaaccttctgaattaa

SEQ ID NO: 105536 - DNA, 582 bp, Enterobacter aerogenes
atggtttcattagttaagaaccagacggtatcactcagcaaagaatcatctgcattaagccagcttcatttcggtctcggttgggatccggttaagaaaaaaggtcttcttggaggattgtttggaggcaacgactcaatcgatctcgatgctggctgcgtattaatggacagcaccggtaaaacaattgacaccatctggttccgcaaactggaatccacctgcggcgctgttgtgcacagtggcgataacctgaccggtgaaggtgacggtgacgatgaggtgattaatgtcaacctctcccgactgcctgcaaacgttgaatacctggcgtttacggtaaacagcttccgtggtcagtcgttcaatgacgtcgaaaacgcgttctgccgcgttgtcgatcaaaccggcaaagagctggctcgctacaagctgactgagcagggctcacataccgggatcgttatttcttcgctgcgccgtaataacggcaactgggactttaccgcccttggccatgcctgtcgcggccgcacaattgacgatatgcactccgatatcgtttcagcggttattcgctaa

SEQ ID NO: 105537 - DNA, 1158 bp, Enterobacter aerogenes
atgaacctgacgccggggggcaatgcccccgttccagcccaggagttgcgggtccggatcacctcgggcggccaggtggatgcttcggcgtttcgcctgtatgccgacgggaaggtgcagggtgatgcggacatggtgttttatggtcagccacgtaacgatgatggtaccgtcagcctggtcagtgaaggccagtactcaacctttactgtcgcgctcaaccggctgaaacctgatgtccagaaaattgcgttcaccgtgacctgtgacggtgggcagacggtgtccggtcttcgtaatctttccatcgacgtggagcaaggggctaccggcctggttagcggcagtgtcgaactgagcggccgtcaggaagcagccttaattctgggtgaattttaccgtcgtaataatgactggaaattccgcttcgttgcgcaggggttcaacggtggacttaaaccgctggcagagcatttcggcgtaaatattgccgacgaaccggctcccgcagccccgactcctccggttgtaacccctccgccagttgagacaaaaatcagcctgagcaaggtatcgctgacaaaagagaagcctgcaatcagcctgaccaaacgggataacttcggtgaaatccggatcaacctgaactggcaccggggcagcggcaaatcaggctttgcaggcatgttcggctccaaaggaatcgacctggatctgggggcctttgttgagcttcaggacgggtataaatcggtcattcaggcgctcggtaatgcattcggtgattatcgcgatgaaccgtatgttcagctcaagggcgatgaccggacgggtgatgtatcagacggcgagtggctgcatatcaatggacgtgaatggaagcatatccgcgaagtgctgatttacgcctttatttatgaaggtgttcccagctgggacaagactgatggtgtggtcaccattcatgtgccggatcaaccgcccattgagacccgcctgaccgaaggtgaaaaccgtcgcacattgtgcgccattgccagactcgtaaacgaaaacggcgcaattaaagtcgagcgaattaaccagtacttcaaaggccaggacgaaatggaccgggcatttggctggggatttcgctggagcgccggttctaaataa

SEQ ID NO: 105538 - DNA, 576 bp, Enterobacter aerogenes
atggcagtttctctcgtaaaaggcggcaatgtatctctgaccaaagaagcaccaaccatgaatgttgctatggttggcctaggctgggatgcccgtgtaaccgatggtcagggttttgacctggacgcttccgtgttcgcagtaggcgaagacggtaaagtgttgtcagatgcgcatttcattttcttcaataacaaaaccagccctgatggcgcggtagagcaccagggcgacaaccgtaccggtgaaggcgacggcgacgatgagcaggtcaaaatcgatctgaccaaagtctcagcagatatcaaaaaactggtgtttgccgttaccatctatgatgcagaagcgcgtaaacaaaacttcggcatggtgagcaacagcttcatgcgcgtttacaacaacgacaacggcacggaaattgcccgtttcgatctgtctgaagatgcctcaaccgaaaccgctatggtcttcggtgaactgtatcgtcatggcgctgagtggaagtttaaagctgtcggtcagggctttgccggtggcctggcggctcttgcctcccagcacggcgttaacatctaa

SEQ ID NO: 105539 - DNA, 1242 bp, Enterobacter aerogenes
gtgaatctacaatccggacaaaacataccacttcagcaatctgcgatcaggctgaatcttcagtaccctaccaaatccggctttaaaggcgaacccgatacctgcctgttcctgcttaatgctcagggaaaggtcagcggcgattctgactttatcttttacaataatctgtcttctcctgaaggggcagtaaagctcgttaccggttctcagcagtccagcattgagatagcactggatcgtgttcctgcgaacatcagtaaaattgcaatcacagttgtcattgatggtgaagataccatcagtgggctcagttcgttgagcatgcaggctcaaggaatcgctgagttccaggctgagactcagggccgcagtgagaaagcaattatcctgggtgaagtatatcggcacaatggcgcctggaagcttcgtgcgctcgggcagggtttcaacggtggtcttgagcctctggccattagctatggcgttgatgtcgcacagccagctccgcagccagcaaagcctgctcgtatcagtctggaaaagaaactggaaaccagatctccgcgccttgtaagcctcgctaaaaaagcctcggtcagtcttactaaaaataaactggacacccttgaggcagcggttgcatttgtacttgacgcatccggctcaatgagtggccagttcagtaagggtaacgttcagtctgtgctggaccgcatcgccgttcttgccgcccagttcgacgacgacggtgaaatggatgtctggggatttggagagaagcataagaagtatccaaacgtcacactggacaacctggacacatatattcagtccattcgcggggctggaaagcgttcagcctgggagaacctgccgggcctcggagggacaaacaacgagcctcctgtgatggaagaaatagtcgactactttaaggactcgaaaatcccggtgtatgttgtatttattaccgatggcgggatcagcaagacccgggcgattaaagatgcaatccggcgttctgccaactaccccatcttctggaagtttgtcggcctgggtggttcaagctacggtatcctcaaaaatctggatgactttactgaccgccgggttgataacacccacttctttgccatggatgatttcggttcgattagcgatgaaaagttatatgataatctactggaagaattcagaccgtggatcgatgaaacaaaaaggttaggcatcctttaa

SEQ ID NO: 105540 - DNA, 456 bp, Enterobacter aerogenes; identical to SEQ ID NO: 31745

SEQ ID NO: 105541 - DNA, 192 bp, Enterobacter aerogenes; identical to SEQ ID NO: 31746

SEQ ID NO: 105542 - DNA, 2040 bp, Enterobacter aerogenes
atgaccaaaagactgacttgggagcagaaaagtattgtcagccatgacaccggacatgcgttggtaaaagccgtacctggtagcgggaaaacaaccacacttgtaaagcgcgttgagcggctggtcaagacgggaactgatcctcgctccattctgatcctgatgtacaacaagtcggcgcaggtgagcttcacggagaacttgaagacggcactgatgtcgagcgtgattccagaaatccgcacgttccacagcttggccttaaagattgttggttacggagaacgccaacagataatcaagaagaaagacctcattactccaagcgactaccgctatgagcaactggtaaagcaagcctaccgctatggctttgaccatgaggcgaattatattgaccccaatgaaattgaaaacttcgagctgtttattgctcgctgccgggcggcggccgtaactcctgttgatgctgccaatgatccaacgttcagcaacatcaaacgggagtttattcacgcctatggccgctattgtgagctgctggaggaaaacagtctgcgaacctttgatgactgtttgattgaggctgtcgcactgttgcgtaatgacagcagccttggtgcccacttcaagcacatcattgttgatgaatatcaggacgttaacctgatacagcatgacatgacccgcttgctatctaagtcggatacgtcggttatggctgttggtgatgttaaccagtgtatttatgagtggcgtggtgctcgaccagactttatcggcggactgtttgaaaggcactacccgaatacgaaggtgtttcaactgtcatgcacgttcagatttggccatgagctttccttgatggctaactcggtaattcggcgcaactctacaaagctgaccaagctttgtgtcagtcatcctagcacccccaaaacagaggtcagattgcactttgataactgcctatccaaggtgctatcaaacctctcggtgagcagtggaacacaagccatattgtcccgcactaaggcgaaccttgctgaggcggaaattgctttacgcctgtgtgggctaccttatcgctacctcaatggttcaagcgcattacacacccgcaccgaaatcgggatactggtagttggcgtcttgctgtctgtgtacggcgatctgcggctactggaaaaccatcccaacaaacaagcgattgtttacggctttctgaaggaggctggttttagatggcagaaagggcaattcaaagcggcgctcagtggattgatggctccgcacgccgacctatggtctgctctaggtcagttattcgagggcgcacaataccaaaaagatcggctgggcaggctcgccactatctgccagaaagacggagaggaaacgcctgctatcgatgtgttacgacgcctgagtatggagggtttcattgatagtgttggctctgagggtgtaactcgcactggatcgaacgaccagcaacgaggggtcgtgaggatcggggagctacttgactccagtaagatcgattcccgcacgtttttaaaccttatcttgaatccaggcgaggctgctactgactgcgatcccttcatcctttccacactgcatggttccaaggggctggagtgggataacgtaatactgatcgggctgaatgagcaggaatttcctggcggcaaacccgatgatgtttacagcgttcgcacatcgatgaacacccctccggccgaagaggaaatcgaggaggaacgtcggctgttttatgtcggtatcactcgcacaaaacagcagctaaatctggtggtccctcttgatgaagggcttgcgcggtggctcaaaaaccgctgggatagcaccccgaagaagtcaccgatagctactcgcttcgtctatgaggctggctggactgcttgtgcggttaccagtgatgcgatctataacagcacggtagagaaacagaaggctgacttcagcaagtttcaccaatggtatctaagagatcttcagcggctaaaagtctag

SEQ ID NO: 105543 - DNA, 987 bp, Enterobacter aerogenes
atgacaactcaatccagctcaatacaatacgcttacgcgctagacggcgagggcaccctcacgcacattggcgctgccctgcgctcacatacttacacctgcccaggttgtaagagccccctgaccccggtaatgggcgagttcaacgctaagcactttcgccattcggaagaatgctgtgcccttgaaacctatcttcacaagtgcggcaaagaagcattcttctatcgctaccaacaagctctcagccgtgaaatgcctattagccttgagctggagcgccgggttgcctgtaatggttctcgtttagccttggttagagacgaagcacgtcagtgcgtaaaatccgtgcctgcacgctacaacttgactcaatttttcgatcaggcagagctggaaaaacacgataaggtcacagggctgcgaccagacgtgatgttgtatgatacgactggcgaaaggcgttgctacgtagagatttgtgtcacacacccctgctctcaagacaagatcgaagccggtatcccgattcttgagtttaaggtccaatctgcctctgatattcagatgttgcttaccggggcctactcgatcaaggagaagatcctgagagtattcaactggcttcccccgtttcaatctgtggacacctgtagcggcgtctgctcagtaggtaacgtggatatgtctgtctggagtttaagtggttccggccgactcaacgaacaaacgatgccgctcgctgaagtggatttaacaatcaattctgacgtgaacacatggcctagatcgttaggggccgctgagctggctgataacttacgagcttttatccgtcacgccgatcctcattcactatttcccaactgcattatgtgcgagcaagcaggccgatgggaggatggctatctgcaatgtcacagtaaggcaaagatcgttccctacaccgaggcccgtcagtgcgccaattacaaggttaaggcatga

SEQ ID NO: 105544 - DNA, 393 bp, Enterobacter aerogenes
atggacgataaagagcaatttacgaatcttgtggcaaagcatgcctccggactcaccgaagagcagctggccggttacgatgcctgttccctggatggtgaatgcgtcacgccttcatacgaggttttccgggggtatcgtacccgccataccctggatgaatttctggagatggccatatcgctgaatgccatccacccggatgaatatttaacggatatgctgcttaagcctcatgaggtgatcggcgctctggccgatgaaggcgaccagctgaacaacgccaccccggtttatttcttcccggataccggcgtctatgcagcggccgtcagtgaaacccgggtgctcgatgcctggctttgctggccatgctacccggcgaactggtaa

SEQ ID NO: 105545 - DNA, 657 bp, Enterobacter aerogenes; identical to SEQ ID NO: 31747

SEQ ID NO: 105546 - DNA, 498 bp, Enterobacter aerogenes
atggacgctaccgaaactgaagagctcgaaaaaattcgcaagaaggcaatggatgaagttacaagtgctcttcaggcgcttgaaaataagttcccgggtattactgagggcgcagcagctttggcggggtcaggcgtaggcgcagcggcttccttcggtgctctctatacgcttggtacaacgggagtgtcagcagcaggcataacctccgggctcgctacagcagggtctatcgtcggtggcggtatggttgcaggcattgcggtattggccgcacctgtagctgtgttagggattggcgggtacgcgatagtgaaacacaaaaaaaatgcgaaactgacagccgcccttagtcaggccatccaaaagctctacgaagttcaggaaaggttgatgtcgaatgcggaatattttaaggcagaaattgctggcatcaaggcaacaatcgacatgcttactaagaaagctccaaaaggtagcctggtcgcggtgaggtaa

SEQ ID NO: 105547 - DNA, 1389 bp, Enterobacter aerogenes
atgagtcagtctccttatgatgatgagttcagggccatccgttatattcagctccgtggtcaggatatcgcgaacgctcacgagacaattaacagtgatatagagagccttaaggcacagttgaccgggctaatcagcggcactgaacttgatgaagcggagcatctggcgcttaaagaacatcatctgcgagaaatgaccccttcagatactgccatgcattctactggtctcaagactatatatagcgaggctaaccagcgtgtatgcggtgatattggactggccacaatactctccacggatgacttggctgttgtagatgcccggatccagaatcatattaaagaatttaatgatcgctacgcactcgacgcctgggattatgctattgcctgcggatgcgggctcatagcatccatgctggatttactttgcgtcagagccccgccaaaacctacggtgagctttacggcagaagtggatggtattttcaataaacaggtgcagaaagccttcaatgccattttgccggaggacctgagtacaaaactctcagatttgttccctataggggcaccagacagttcgatcagcagcgatttagtgggtgcggccggtggcgttttgtctcccacaaatcaccgcttaagagctttgtcacacgatcccgtactgggcattattttcggtataaaggatatgctgaacgggacctgtacggtggttcagaatggacagatcgtggtttatccttccagtaaaggcgttacagacgaaaccaatattttcaggctcatcgccagaatgtttggacacctggcatcggatgttaatgccccctcagcaaaaggaaaccgtggcatggggttaccggctccttttatggggctacttcgtatgcttgaggggatccctgtggggagttctaacttcggcaaacaaatagagtacatgtatgtcaacgggtatgactttcgtcagtttatcgtgacaagtattccgatgagcataatggaagttttgatgcgggttttctatgtggcgaaacaggtatcgctgggaaaaggagcttttggggagaccttactggataccatgccgttgcggctaaatccacgcttccggatgatgcttgccctgggttatggaacttccagtgctgttaacgcaggtaaaatgtatatcaccggcaatattctcaatgcgaattacgcctcctggatggggttggcctggaatggttttcactcactcaagtggtccctttatcagcgacacttaaagctttgggccggtattgaaaaggcagaactggaacggcttcagaacaatatagacagcatcgaggcattgaccatcatagcaggaaacttgccagtcaagtaa

SEQ ID NO: 105548 - DNA, 297 bp, Enterobacter aerogenes
atgatcaataatgattacccgttaaacacgctcaaccagttgcgtcccttgctcattggttttcgcaaggcgaatggcctgacgcaaaaagacctgtccgaaaggttaggggtcactcaacagacatactcacgtctggaagccaaccctgccagtgcgagcattgaacggctattcaaggtgttttctatcctgggcgtaaaaatcagcttctcctcgacaaccgcctcttcagaggggaagcagacggaagaaatgcttaaatcaaactcacctgcacgacaggagaaatggtaa

SEQ ID NO: 105549 - DNA, 1326 bp, Enterobacter aerogenes
atgagccggaaacagcagcgtctggcaatctggatgaacggaatcaaagtcggatactgggaaaaaagtaaaggggtagacagcttacaataccttcctgactggagtgcagacgaacagggaaggccgctgtcattgtcccttccttttactcccgggaaccaggtctggcgtggaaatgtggtacgtgactattttgataatttactcccggacagcgaaggcatacgcagacgtctggcaatgcgttacaaggccgatagcctggagccttttgatcttctgacggagctgggaaaagactgcgtgggcgcgatacagctgcttcatgacggagatgaacccacagatttatattccgtgaagtatcacccgcttactgaatcagaaattgcggcaactttgcgtaataccacggagacattgctaccgggcaggccagaagataacgacgacttacgtttatctattgccggtgctcaggagaaaacagccctactgtggcatgaagatcggtggtgtatgccggagggtaatacaccaacgacgcatatattcaagctaccgctcggacttgtggggaacatgaaagccgacatgcgctcgtcggttgaaaatgaatggctctgctcggtacttctcgaacagtacgggctccccgtggcaagaacgcagattgctcactttgaagatcagaaagcgctggtggtagaacgttttgaccgaaaatggtcaggaaacggacaatggatcattcgtttaccccaggaggatatgtgtcaggccctgggcatttcgccattacgaaaatatcaggcggacggcgggccaggtatatcggaaattatggaagttctgagtaattcagaccgtgctgagcgtgacaaagcgcagttttttatgacgcagatagttttctggatgatggccgcaacagatggccacgctaaaaatttcagtatttctattgggccacagggacgttatcaccttacaccactctatgatgtgttgtcggcatggccggtgatcggtcatgggaacaatcagatatcctggcagaagtgcaaactggcgatggccgtacgtggcagtagcaactattaccagatatatcgaatacaacgacgccactggatcaggcatggtgagataaccggcctgagtaaacagcagacagaggcgatgatagaggaaatcatcgccagaaccccgggtgtcattgaacgtgttagcgggcttcttccggaccagttcccccagcagcttgcggaaagtatttttgatggaatgaggcagcaatgcaggcgcctggctgagaaatga

SEQ ID NO: 105550 - DNA, 207 bp, Enterobacter aerogenes
atgactgaagaacaaaaaagaatagagcgggctattgagttggcttgtcgttacggcggaaccgatgaaatgcatcatctgcaatgggtcgtggatcagatggtaagagaacttgctggagaacgttatgcacagattgtagcagatgccaccagcggagaagatgggcctgatacttacaaatggagtgttgggatcgcgccttag

SEQ ID NO: 105551 - DNA, 411 bp, Enterobacter aerogenes
atggcaattttagcaatcattgcagttatcgccctgggtgggtacgcctgcgggtttattaaagcccgtgagctgagcgctttgcgtaaagaaatgaaactatacgtggatcgcatggaagcggcggagctggacttacacgcaatcagaagtgtagcggagcaccggttgcacggtgcaggtaaacagtttgccgacctttacagccgtatcgacggtgcaactgtgacgctgacacccgaagatcagctgttactggcaacgatgccatttaatattcaggatgtagaagacatcgtaaacgagcgcggtccaaagacaattagcggccgtccattctgggaagttgagccaggcccgcatgactatgaatatggcccgcaatatccgtatttcccagaccagcgctag

SEQ ID NO: 105552 - DNA, 360 bp, Enterobacter aerogenes
gtgacgcaacgtagtggcgtggcacagggtaaatttaaagctctgctcatcgagaatttcgcgggccgttgtgcggtaaccggttgggttaatggcggtgtcctggatgcggcacacattgaacatggaacccggtacaatccgtctaatggcatcctgatgactccaacaatgcatgctctgtttgatgccgatcttatgggcatagatccggccaccctgaccgttcattttaagccaggcattgagctgggcgagctgtttgaaggccgtaaaatcacaccgctggtgtacgatctggacttagagcggctggccgtacgctgggcaggataccagggcctggctcatgaacaatga

SEQ ID NO: 105553 - DNA, 309 bp, Enterobacter aerogenes
atgcgcaaatttaagtacataatctgtcaccagtgcgaaggccacgggaccatggaaaacccggcctttgaaaatggattcacccaatcagaaatggctgagtgggagccagaaatgcgtgaaaagtattttgccggagcatttgatgttcgctgtgacgtttgtgccggtgacggtaagctcagcgtaccaaacgtagcggctatgtctttttcagaacgacgggttctggcagcacggcggcgtgatgagcgtcttcaggctgctgatgaacggctgtcccgccaggaacgagcaatggggtactga

SEQ ID NO: 105554 - DNA, 858 bp, Enterobacter aerogenes
atgaaaatgacgaagccaaaaccggtaagccggatgaaaagaccgtttattagtgagcttgcagagctgggtttatcgggtgaaattctttcaattcgaactgacggcatgcaggggacgctcatacccgatcttaccgcaggggtgagtgaagcaggccgtgtgaaaaccggcaactgggtaatctctgacaagagaaccttcgaccatgtcgttctgtgtgttgaaagacaagatgagaaccatgatgtgtacgtaggtaaattcatccagttacatgtagccgctaataagagccttaagatcgtcgaaatgggcgatgtgaaactggtggccataaccagctcgattcctaccacttttaatggtgggataaagagatacaaaggggttacgtatgtgtcactttcccaaacagctcaaaccactatcgacttcccgaagcgtatctacaaagagggccaggaatgtacttctgtcaccagtcctgaccaaggtcctttcgcccgggatgttaggttgaattgctacgggcgatgtgttgtcaccggcgtaaggtccccctggcgtactgaggccgcgcacttaacgccacgtcatgaagaaggcattcccgacgtaacgaacggaattttacttcgccgtgatatccatacactgttcgacaatgaccattgcgccataaaccctgacactatgaaaatttacttcagccgggaggcccgggagttggatgatgatctcctgaaatggcatgggaatgagatagagacgacacgcatgcaggttccggttaacatcgaaaaccttcggatacgatggcaaaaatttaaggctaaggatcgtcagcgtaaataa

SEQ ID NO: 105555 - DNA, 204 bp, Enterobacter aerogenes
atgcaaacccaaaaagatattacagttggccagatctgggaagaagtggatccaagactgatccggaaagtgcgagttgttgaggtggcctcgttagaagggcccaaaggcatcctaatcgaaaacgtggagtctggtcgtaagaactgggcgtcgtcatcccgctttaatggaaagcgtggagggtatcgtcttatttcctga

SEQ ID NO: 105556 - DNA, 405 bp, Enterobacter aerogenes
atgtctgaagcactcaaatcgttaaacaatattcgtactcttcgcgcccagggccgcgagctgcctttagaagtacttgaggaaatcctcgaaaagcttaatgtcattgttgatgagcgtcgtcaggaagaatcatccaaagctgccgaactgcaagctcgtcaggagaaacttgacgccctgcgtaagttaatggaagaagatggtatcaacccggaagagctgcttggctcattccaggccaaatctacggctaccaagaaaagccgtgaaccacgcccggccaaatactcatttactgatgaaaatggcgaaacaaaaacgtggactggacagggccgtacccccaaagctctggcagaacaaattgcagccggtaaaagtcttgatgatttcctgatctaa

SEQ ID NO: 105557 - DNA, 666 bp, Enterobacter aerogenes
atgttctctgaacgctcagtacacttaatcacttcctgtacaaagggcaagaatcatcagggccacgtctggccgacattggacatagatccaaaacaaaccccggacgacgcagcatatgcctggagtaacattgtagacgacgccagaagtaatcaggcggtaccggcattgtccttgtattcaggtaatcactggtctacggcaaaggaaattttaaactcaaccagaaatctggagttgtggataatctctgccgggatggggtttttaaatagtcgagatcgggtgccctcttacgaggcgacatttcatcaagtaccattcaggcatgatctctggtggaaagccatcacaaaatcactaggaaagcataaccgttgcgcaactataagccagttaatgcagtccagtccgaatgatgaatatttgattgcggcttcgcctgtttatattgctgctgtccagaatgacatcctgaagggcattgagagtttgactcatcctcttacgcaactaacgatcgtgacatcaggggcatatgctggcccacttgaagaatacttaattaagagttcttctaggatgatgaaagagctagagtgcaatatggtgtgcctgaatataaaactggctcaatacatacttaaaagtggtagtcgttag

SEQ ID NO: 105558 - DNA, 381 bp, Enterobacter aerogenes
atgacaagtacacttgacccatcacacaagcaaattgaaatgtggcgcagagctaccggttccgaaggtggactcaacgaataccgcaactgggttctggaaaatagtatgagatttacagcatacggtatccataccgttatcgtcgaaggtgaggcgaagcatataacagcgcttgatgatgttaccctctgtaacgagtgggcgaagcttaaaagagaaaacaataggctttacgcagcaaatgaaaaaatttgctctggctggcgtggttttgtgttgcgtttgttaggaataacactgtcatgcagaaaaccggtcatcttactgggggcagacgcgaagaatcaaaatgatgccgtgaaaggggctgatttgtaa

SEQ ID NO: 105559 - DNA, 2058 bp, Enterobacter aerogenes; identical to SEQ ID NO: 32296

SEQ ID NO: 105560 - DNA, 609 bp, Enterobacter aerogenes
atgatgttactgcagctttcctctgcacaggggccacaagagtgttgcctggcggtaaaactatcgctggatcagttaatgaaagaagccgccgacgcacaagttaccttaacgcttttggaaagcgaacccggaaaagagcctgatacttttcgttcgctactggtctccttagacggtgaaaatgcgctcatgctcagccagctgtggtgcggtacgttgcaatggaccttccaaagtccgtacaggccaaaccacaggcggaaaaattggtacgtcggggtgggacgcttttgtgccgacgaatacgagatgtccactgagatccgctttgaaacgctacgttcgtctggtcccggtgggcagcacgttaataaaaccgactcagcggtacgtgcgacccatctggcaagcggcatcagcgttaaggttcagtcggaacgtagccaacatgcgaataaaaggctagcgagattgttgatcgcatggcatctggagcagcgaaagcaggaggcgtcggcgacgttaaaatcgcagcggcggatgtttcatcatcagatctcgcggggtaatccgctacgcacttttattcagcgctcattgaggtag

SEQ ID NO: 105561 - DNA, 1140 bp, Enterobacter aerogenes
atgggcaataatgttcattatatatctgatcgtgttgcttatttcacatcagatgaattatggatcgagggtttagcgatccaacagttacaaaacaccgcaaatttaccccacatgcatcgtgttatggggatgccagatctgcatcccggtcgcggttatcctatcggtgccgccttcttctcttgggagcatttttatccggcgttggtgggtaatgatatcggttgcggtatggcgctgtggcaaaccgatattctgcggcgcaaatacaatgccgagaagttcgagaagcggttgggcgcttttgaagatcacgcagatgaatgctggctgaatgagcatcttcctgacgatctcatggctcacccctggcgcagtgcgctgggctccattggaggcggcaaccattttgctgaactgcagcaggtggacacgatctttgacagcgttcgttttcaacaggctggtctcgacagtcaacatttgttgctgctggcacatagcggttctcgcgggctaggacaggcgattttacagcgacacattgccaggttttcgcacggtggtttagcgcaggggacagcagcggcggaagattatctggccgaacatgatgatgcgctggcctttgcgcgagctaaccggtggttaattgcaacccgaattttacaacaggttcgcgcatcgggaactgcagcattcgatattgcacacaatttcgttgaatcctgcacccttggcggccagcagggctggatgcaccgtaagggcgctacgccagacaatcgtggtctggtcattattccaggatcgcgtggcgactatagctggttagtacagcctattgcttgtgaagatacgctgttgtcattggctcatggcgctggacgtaagtggatgcgcggcgaatgtaaagggcgactgtccggcaaatatagcccgctgcaaatggcgagaacggaactggggagccgggtgatttgccgtgacaaacagttgatttacgaagaggcaccgcaggcctataaatcggttgatagcgtgatcgcctgcctgcaacaggctggggtggttgaaccggtggcgcgtctgcgtccggtgctcaccctgaaaaccagtgggggtaaacacgtatga

SEQ ID NO: 105562 - DNA, 456 bp, Enterobacter aerogenes
atgttaacgatcagggcgtatgtagaagaggattttccggcgctgtgcgccatttttttgcgcgcggtaaaagagaccgccagccgggattattctcccgcgcaaattgccgcctgggcgcaggttgatgaatcccgctggcggcagaaatttgcgcattcgcaagtgctggtggcggttattaataatcagccggttggatttatcactgtcgttaatgattatatcgacctctttttcgtctcgccggattatacccgtcgtggaatcggtcgggctctacttagccagttattaacgcaatttccagatgtggtttttaccgtcgaggcgagtattacggcaaaaccattcttcatgctgatgggattcaaaatcgttacccaacaaaacgttgaggtccgcgggcaatggtttattaattatttaatgcggcgagaaattgtcttgcaataa

SEQ ID NO: 105563 - DNA, 159 bp, Enterobacter aerogenes
gtgaaagtcgcgggtacccgtgatattggtgagctgaaaacaggcgttgaagcgaagctgaataaaaacgtgaacctgtgggggaatgttgcccaacagatggggggtaaaggttacagcgatacccaggccatgattggcgtgaaggttaacttctga

SEQ ID NO: 105564 - DNA, 579 bp, Enterobacter aerogenes
atgcgtatttatcacattttatctattcgaaaacttatggtcgccagtgcgatggttatgggactggccggttgtgaacaggcaggaacaatgcaacaaaaaatcagttatgttgacgtggccgaagtgctaaaaacatcgtctattggtcaacaggaaatcgcaagaaaccagcaggttaaagatattctggaaaaagctcagaaagatgcaaccgcccggtatgccgacatgaccgaggcgcagcggcagaaaagcacgatggcagacagtgagttattgaaccgacagtgggtggcggagcagcaacatgccaggcagatgagtctggaagcaattgcaaaagctgttgaaacgtatcgttctggtcataacctgagtgtagtgttaagtaaaagccagattattgcgggagatgcttcactggatatcagtaaggacattattgcccaggttaaggcaacaaaagtggattatggagctttacctgaactgacgatcaaagatacgaacagcaactcttccgcagagaagggcacgtcatcagagaaaccaacagaaaagaaagctaagtcataa

SEQ ID NO: 105565 - DNA, 420 bp, Enterobacter aerogenes
atgcccgaaacacaactcagagggtactggaagtattgtgggttgaatatatttatgctttcgcggttgtggaaagaaagactggagtcacggctcagggcgtataatatcactctgcaggagctgatgaccctacgtctgattgcgaacgacgttcccgttactcgcgaggacttgaaaacgtacataggtgagtatgagcttcctctgaagatgctggaaggtaaatcgttgtgtcagagcaaatcagatgatgagggagctaatattagtcctacacaagcggggctggagttagttcaacaaacggaaaacattctgaagacacaggaagagttttttatggggcatttacccagggcgacgcgaaaaggcgtaaatttgacactggaaagtgccctggataaatcattaacataa

SEQ ID NO: 105566 - DNA, 249 bp, Enterobacter aerogenes
atgagatttaaaaacttggttttagcaattcttttgccagttacctcactttattcaggcggtttggcggcattgctctggagcggtttatcactccatcacctcagtattttcaccttcattgttttttattcagaatttcatgataatgatatctacaacgtattgatgattatttcctgggcggggtttgcattaccatcatttatactggcgacatggttcttcatgaaaagtcgcaaacattaa

SEQ ID NO: 105567 - DNA, 891 bp, Enterobacter aerogenes
atgataaatgatctggatttaaaggtacttaaggttgttcatactctttgcctctcaggcagtgttagcaaaactgccgatattctggatgtgacgccgggagctgttagctatctgcttaataaagcacgcaaagctacagggacgtcgctcttttttaggacaaaaaatggcatggaacctgatactctggctcgggagcttagcgagacttatagacgaattacggaggatctatctctgaaggatgaaaacagcgctataaataacaggccagtatcgattagcgcatattcactagctgaattgttgatttcccttgctatgaacgaggatgatttggactaccccgaaataatttttaatagacaagagtatgacgatgggcaacggttaattaagctcaggaatagagagattgatttagatattggtaccagattaccttcagatagctcaataattcaaatatcattttttgctggcaatgctggagtgttggtaaggaatgagcaccctacaataaaagaaagagttacattaaaagactggaatgaaaataaacatgccatctggttgagagggatgcactttataaacgatgactttgagaaaaccaaggcatttaatcatttttcacacgaaaggaatgtggcttttacctccagtagttctttgaacttaataaatctttgtgtttttagtgatgtaatagtacttgtacctgaaattgtcgggaaaaaactgtcatctataatgccagtaaaatggttcgtacctcctgaagagttggatatgcgctatgagtgctatattcattttcatcatacaatggctagcaatgataccatgaagaaaataatagaattgtttcataaagcattcgtgtga

SEQ ID NO: 105568 - DNA, 2004 bp, Enterobacter aerogenes
atgaaactggagtcttttcgtgttcaaaatttccgttctgtatttgacagtggggtgatcacgactgaaaaattgacagcgatccttggacggaatgaaagcggaaaaaccaacctgttgctggcacttaaaagtattaatccagctgaaggtttcgataaactcaataatataaaagactttccacgaaacagaaaattaagcgaatgtacaccagatacccccgtggtagagacaatctggacattcactgaacaagaacgtgtggagctcagtgctatttttccacgcgcacagaatatcacatcagtcacaatcagcagaaaatacaacggagatcatagatatatttcatttcatggtctcaatgcattcacatatgacacgcaaaaaatcagaagagaaatccagaaaatttctgctcagataagcctttttttcgataaaccagaaaataatacagaacaaaatcaggcggttctacagagtattttgaatatatgcaatgacttgcttcctattccggaccgccccatcgcctggtcagaacaggcggcgggcaaacctcaggagttgagaaaatgtcttgtaaagtatgatattcagcttaaaagcgagtcagaagatgcgcttgacgcactggaggatatgctcaatgaaatcagcagtgacgacagcagacaggcaaaagcacgacaatggatcataaaaaaactacctgtttttgtcatggtggatgaatacccagagttgaacggacaccatcacatggccgaatatactctgcgtaaacagcaggctaaactaaccaatgcagatatcaattttgaaaaattatgtaaagtggcaggaatagatccaaccgaactggcggctaacagaaataattcagaagtcagaaaccagctggtaaacagagccggtgcagttgtcacaacagagataagaaggctatggcaggataaaccgttaaaaattcgttttaatgtagatagcgattattttgatacatatgtttcggactcaaataatacctacgatgttgaagtaaatctggatgaaagaagccgtggatttaaatggttcttctcattttatataaccttctttgcggataccaaaggaggggtcgcagaaaatgcaattattcttctggatgaacccgggctctatttgcatgctaaatcgcagactgatctgctccgtcatcttaccaatgattttgaaaaccagatcatttataccacacattcgcctttccttgtgccaattaaaaatatttccgatgtaaaaacagtctcgattgcagaagataagggaacaactgtcaccaacgatcccagcggggattccacaaccttattcccattacaggcggctctgggttacgacattgcgcagtcgttatttattggatctcacaatctgattgtcgagggagtaacggatttctggtatctgagtactatttcggatgtccttacttctgctggcagaaaaggcctgaacagcaaaattacaataacgcctgccggtggggcccagcgcgtatcctacatggtttctcttctgtcctcccaaaatctcaacgttgttgtacttctggatgatgagaagcaaagtcgggagacgtcaactgagcttcagcagcagggtatgcttaacagaaaaaacgtggtatttgtatctgatgcactggagtcaaaacatgatgagtgcgatattgaagatctttttaatcgcgatactttcattcagcttgttgatgaaagttacgatctgaaaccaggctctcttcagttgaatgagaacatcccgcgaatagtcaaacagattgaaaaagccttctcagcagacaagaaaaactttgtgaaagctaaacccgctcgcgcattcatgaaccgactgaaagatggcaataatcatctgctttctacagaagagctggatcgatttgaaaagctttttgagctgattaacaaaagaatgaatgcccggagctga

SEQ ID NO: 105569 - DNA, 153 bp, Enterobacter aerogenes
atgctggatctcgtgacgaagatgattgccgtggaagagcaaaataaaagactcagcttcgaaattaaaaccaataatcttaaaatatggtcagcactggcgctggcctttctttcctccgcaaccgcgattgccacagcattactgaaatag

SEQ ID NO: 105570 - DNA, 1089 bp, Enterobacter aerogenes
atgctcagccagcttaacctgcgttttcacaaaaagctgatcgagtcgctgaaaacacgcgccgggtacgaaaacacctcggtcaacgccctggccgaacgctttctcgatgaaggactgaagtcggccacaccaacagacagctacctgcaactgatctccgatccacgtgctgcagtgcaacaaatgtacgcaaaaattgtgcttggacagaccttcggtgctgatcgtatcagtcgtaatgaactgcgctaccttctctccctggcacaggaaggctgtatgacaggtcaacaccgactggtcactctgccagccctgcggaccatgctcgacataactcgggagttgcttgtctggcagacggaacacaatatgactgtcggtattgctcacattcagaacaccttccgccttgacggaatcgatccgggagaagagttagcacgatttatcgcacagctccgaccggttataagtcaggattacgcagagcgactgctgcaaccgctgtgttgcggaggatttgatctgaatggcttcccggatgaaatcctaggacgtattttcaccctgccgcgactgaaggcaatttttccgctggcgctgcgggcgctggagtggagcagggaggaagtgcagcagatggctgctgctctgcgtccggccatccctgcagtccgggaaatgattacggctggtacacttcaatttgaaatccatgttgacggtatgcaaccgggtcaacgttccggtgcatggtatgacaccccttctctgcacctgatcatcaccgggaaggattttgttgtgccatacggctgggaagtgttttctgaattgctgggcctgttcacgctgtatgcccgtcatccggatgcactggcacatggccatcagggggaacatgtgatgttctcccctccggggcacgttaccccagagggttttttcggcattgacgggctgcggatttttttgccaaaagaggcatttgagacgctggtcggtgagctcaccactaaatgtacggaaggaacactgggtgaggccctgcttgggctacggtgtctgtatggggatctgtaa

SEQ ID NO: 105571 - DNA, 381 bp, Enterobacter aerogenes
atgatatggataggtaaaatcatcagtgtgactatcatgagcgtgattgttagcatggccattatccgtttgaagaatttcgatgaagggaatgatatggatacagacgagatgatcgacgcgcttattgctgagggctataaaaaggttaccctctattcgaaccatgtattgaccgataacgaaagcacagagcagtttctcctgagggacgaacagggtgacattgtcgccagaaaccgtcggaatcctgacggtcagggatgggtattgatttactggcctgttgacccggcacgctcttcggctcccagggtgttgtgggaaatcgacctgacgaacagggaagaggcaaagatcctactctgcatgttttactga

SEQ ID NO: 105572 - DNA, 711 bp, Enterobacter aerogenes
atggctgactggtttatagcaacagaaggggtgaaggtggttaaggacagcgccagtctgtggccacagatcatcacggcggtttcgagcattggtgctgcgctgggtggcgtcagcctgactcatcatttcacccgcaggcgtgaagaaaaggcactcgtcgccaggcttgaaagcgagcgtctctttatcgctacggaactggtcttaatgctggagcagtatgcagagggatgttaccaggttgcgaatgatgacggctggagtggaaaacctgtccagtcagagacggaaccttgtgccgattaccccgaactgaacctggtggctgtctccggcgactggcgtgtcctgaactggcggcatatgtaccgtatccgtgagctgccggtgctccagaatgaggcccgcagagcaattgcctatgtcgccgaaatccccgtccccccttttcatgaggactttttcagggaacggcagtatcagttcacacgtctggggatcagggccgtcattcttgctgtccgtctgcgccgggctaccggtctgcccgaaacacgtcttaccggtcacgatgaatggtctgcggtttccgtgtttcgtaaagtctggaggcgcgaaagatcccttcgcgctgctgaagcggcccgcaacagggaatggtttcaaccagtgatcccccggcacgataacggaaagtcaaagccatga

SEQ ID NO: 105573 - DNA, 201 bp, Enterobacter aerogenes
atggaggtgtgtaccctggtgtttgctctggagctggcggcgatgcttgccgttccgtttaccggtgatggatgcgatgcggcagtcgtgcttggctctcttccgccagtgggatcaggacggagagaccggcggttttctaaagaaatgttggacaacgcgcttcgcggttcgaagcatagtccagaaattcaggtctga

SEQ ID NO: 105574 - DNA, 660 bp, Enterobacter aerogenes
atggtttttgagtggaaagatatcattactcctgttgctacccttacggctgtctggctgggggcaaatttcacgcttcgtaatgaaattcgcaaaaaggcccttgaaatccagtcccaaaagctggagcaactctctctggaaatcgagcaaatcctgatgaatttgatgcgatatacactcacagttcgtaacacactcaatgacctgtccagtggctcaaaaaatgatgtgacgctgactcactttgctgatgtcatgagagattacaaggatgcaggaatcattgtcgattttgaccgcgtgatttgctttcagaacagcttagagttccatcgtccagttgaatacgagctatggatgatgacggttcgtccgctactcaaccaactaagcgcaacgctttcctggcagtccttaaacgatcgtaaaaacgctcctgaaaaaacctggaaagcgcacgaaatacgagattactgccatgatcttgaaaaaaaaattgaaaatattaaaacgctcagaaaacaacttgtctcattgctgagtgaagattttaaaaagttaacccacgcatcagacctgaatttctggactatgcttcgaaccgcgaagcgcgttgtccaacatttctttagaaaaccgccggtctctccgtcctga

SEQ ID NO: 105575 - DNA, 1020 bp, Enterobacter aerogenes
atggaacagaatgaggaactgataagctcgtttttcagtgagcaggataaggcgaccggcaatatcgtgacgctgactccaaatgctaacaacactgttcagcccgttgcgcttatgcgtctggggttatttgtaccgaccctcaaatctactgcccgtggccgtacggggcaaatgtcatcgatggatgttaccagtgagctcaaacagttgtcgctggttaaagctgaaggctatgaaaatattaagataaccggtgcacgtcttgatatggatagcgattttaagacctgggtagggatcatccgcgcgtttgcccgacataagaccattggagactgcgtgacattgccttttgtggagttcgtgaagctctgtggtattccttctgcccgttcatctgcgaaactgcgtaagcgtctcgatgcttcattaacccgaattgcgaccaatacgatctccttctcgaataaagccggtgattactatgttactcaccttgttcagtctgcaaaatatagccctaaaactgatcttgtaacgcttcaggcagatcccaagattttcgagctgtataagtttgatcacaaagtacttttgcaactcagggcaattaacgaattgtcacgaaaagagtctgcacaggcactttataccttcattgaaagtctaccgactaatccggctcctgtatcgcttgcccggctcagagcgcgtcttaaccttacctcccgaacaatcacgcaaaatgcgactgttcgcaaagcaatggagcagctaagagatattggatatctggagtattcagaagtcaaacgagggagggtcgtttattttatcattcatgaacgtcgcccaaaattacgaccggaggttattcctgcctgttttccggacaatgtagttgatgactcagtggttttggatgatatcgacgggcaaactgaaggtcagttggtgaggctgacgaaagaagagcaactgatccttgaacgtattcgcagaggcgaaattaagtaa

SEQ ID NO: 105576 - DNA, 573 bp, Enterobacter aerogenes
atgttaaatcaggccgtttttagcgaaatttcacgtttccagcgaaagctccgctggggggatctgaatattcggttaaaacctcctggccgggaattttaccgaaaccgccacgaacgggcagaacgtgacaaaccacccctggcttatcggcttcctgcccgttcgcggctctgtatagtgtatctgccgcacagaaagaacacgacatggggtttatccacaaaaaacgggaataaccctgtgggtttcacggtacgttcagtaaacctgaataaatccgcttgcggtcgcgttgccggcagcagctggtcagcgtcctgcatcggcatcgagggtgaatgcgaaattaataaaaacagccacttatcaccacgcggggcgcggtgggtcttcgtcgcaaaatctgaacgggacggcatggcggggcggttcggcagaatgggcgttttacctaataatcatcattatgcgtgccgtagctgcgctgtcaaatgtgctgattgtgatccgccagttcatctaaatcgaaacatgaaaattttggctattgtgattctgagttggaagtga

SEQ ID NO: 105577 - DNA, 150 bp, Enterobacter aerogenes
atgaaaattaacaacacattttttaaagttaaaaatcttttaaaatcaatgcgttgcaataagtcacgtgctccactggaggcgttacgcaatgccttcggcgccgctaacgcctccagtggagcgctgagcttatcacaaataatataa

SEQ ID NO: 105578 - DNA, 192 bp, Enterobacter aerogenes
atggaaagactggaaaaagcactagactccctttcatcaagttccgataaattgatttcatcattacaagaagcgatcaaagaagcagccaaagataaccccggcaaacctgtatctgttaatgtatcagccaaaccgacgccccagggtaaatgggaaatctgtattggctcattgtgctgggaaatttga

SEQ ID NO: 105579 - DNA, 141 bp, Enterobacter aerogenes
atggttgaatggattaacaaactcatgagttacatttatcatgttgtttttaatgattattttttgtttttggttgtgtttgttgattgggtaacgcatatgcgttactatccttcctcatatgactgggggctgatatga

SEQ ID NO: 105580 - DNA, 1053 bp, Enterobacter aerogenes
atgaaaacgtttctcgatgatgcactcaatgagttagctaatgcattcattgtcaggattgaacaccgtagagatgtaactgaaaagctaccatttcagctaaaaaaagtagctactgctgatactctaatgttagagggacgtagtttcttagtggttgcatgtttgaaatcagctgtattaaccgcaaataacttcttgcttatacgaaggttggcagacaggtttaatctcccaattatttttgccctaaaaagtatagataacggaatgatgtcatatttacatcataaaggttacggatggattgttcccggtaaagcttcttttataccatcaatactagtaaactacagtccaatcgaccgcatatcgaactacacgttagacaaaaatagaaaatcgtttgggattatcccgtcatacattttggcatattatttgtcagacgatttgccagggttattcagttcaactgacttaattcaaaaatttgacgtgtcgaaaatggcaatatctcgtgcattgaaagagctttatacgcacgatcttattcaggaagtgagtggaaccagaccaaaactttttgagttttgtgtcgataaaagaacactctggtcaaaatacaaagacaggatttcatcgctatccactatttttattactgtgaaattggaaaagatacaggatctttatctttttgctgcaggggaaagtgcgctatctctttatacagatataaatcctccacagcaggaacaggttggtacattcctgaacctggatgataggttgtctttaaaaaccatcactcctgcaacaatggaaggggattatttctttaaaaatatggggctttatgaagacatatataatggtcatgttaaggaagataaagtaaatctccagatatttccctacaaacctgtgctggagggaaattcactcaataaaatattcctggctctctcgcgctttgacaaaagcgatacacgtgttaattcatgttttattgaactggaaacggatattattaatgggtttaaatcttag

SEQ ID NO: 105581 - DNA, 762 bp, Enterobacter aerogenes
atgtttgagcacgattttttgtcaaattatcttggaagttttagtgatgactacgttttgattggtggaaatgcttgtgcacttaattttcaaaagttagatgcgccatttcgagcgactgtagacctggatttagttttgattattgagcgtgaaaatgccaagttctatgctcacttgtgtgattacctcgttgaaaatggttatacaggtgggctttataaatgtaaggaaaaaggggcgtgctcatatcgttttgagttaaaaaaacagatacaaagacctagggttatagagttgttttctcggaagccagagtattttgattctgatatgtcagaaaaacttcatatcactccaattgtgactcaggagggtatctcaaatttatcagctatgttgcttgatgatgaattatatgattttgtcatagagcataaatgcaagataaataacatttccacagtaacactggagtgcctctttggtctaaaatcgatagcgtggcatggtaatgaggagctttttaaacagggagaagttaaagagggggatgtatataagcatccttcagacatgataaggattgcgagtgttatcccaacgcaggactatttctatcctcgtggtatatttgacaacatacaaatcagtaagcatgagtttgaaacagggagaattttgccaaaaattcaggatgttgcagagcaggttgatgatgtaattgaatttatagactcatatgtaaaactaaaacaatag

SEQ ID NO: 105582 - DNA, 663 bp, Enterobacter aerogenes
atgtcaaatataaaattcaatttcaacagattaaaaaatatctattctgatgcatgggaacgaaatgatcctaccattgctttcgaaatcagaattggtgtcggatgctttgttttcatgatgtttttatcgaaggaggaagcggaaaaaaatgataaacttttcatgtattacagaaatatcaacaccttatctcaattaaaattatatggccaccatctcggcggggatttcatagcgtacataacaccaaaagaggaagaactaatcaggcaagaattacagcttcgaggaggtggcaacccgtttgattgcacaaacttcctaagcgaattaaataatagcatccctcaattcttacccccatcgaccaaagcagaaactttgcaaaagacatggccaaatattaaaagtgaaatgagatcgcttgtagatgatgcagataaaacaattttaatcggtttaaaaccgttacctaaaggccacaaacctcgcgatcaaacactgcgtaaattatacattcacaccaatggtgtgacagatgatataacagattttcttcaggcgcttaaagcaagaaactttacattagcctggacaaacgacccaacgagaacagctaagtcctttgcgcagctactggcagaatttgccagtaaatga

SEQ ID NO: 105583 - DNA, 624 bp, Enterobacter aerogenes
atggaagctgttttccgcaacaacagcgtgctgacgggcatcagcccggagcaggttggcgaccttgcgagaaatttcacattacctttgttcggctactcatgcccggcgggctttccctcaccggctcaggactatatagaggccaggcttgatttaaacgagcactgcattcgccatccttcggcctgttatttcgtccgggcatcaggtgattcaatggcagagggcgggatcctttcaggcgatttactgatagtggatcgcgccgtgaaccccgttcacggcagcattgttattgcatccgtggacagtgaatttacggttaagcggctggctctccatccccggctggcgctgatgccgatgaatcccgcctacagcccgatttacgtaaaccctgacgaccttgaaatattcggcgtggtgactcacgccagcagatgcatgaagcggtatgccagtatgccgaacgtgcggcggaaaaacttcggggcgaacgccgctattgccgtcatatcaacgttttcgtgcgtaccagccccttttctgacgagccttactacgccaacagcgcgagccagctacttatcacggccacccaggatacccgcgatattgtag

SEQ ID NO: 105584 - DNA, 969 bp, Enterobacter aerogenes
atgacgatgaacctgcatacccagacaaccgcccctaaaaccgcaccggcgaccagcgtatcctcgctggagcagtcaggctcctcaaaaacgaaatttgctaaaggcaaagccaaaccaaaaactgatatttaccaggtggtaacggatagcatcattgaagcgttagaaatgggcgtgaagccgtgggtgtgtccgtggaaacgtaacggcatggtgtcgggtattccgtcaaatttcagcaccggcacagcgtacagcggaatgaatatcatgcttttctggtgcagtgctgcaaaacagggttttcaggattcgcgctggctgacctacaaacaggcacaggagttgggcggtcaggttcgcaaaggtgaaaccggcacaaccggcattttttataagacgctggaaaaagaaaacgaagccggggaactggagtttatccccatgctgaaaacgttcaccgtgtttaacgttgagcagatcgacgggctgaaaatgggcgccatcgatggcgccgaaattgagccgcagccggtaaccgaatttgacccgctgccacaggtcgaaacccttttccagcgcaccggcgcaaacattaccgagcgtggccaacaggcgttttatcgcccggctacagatgaaatctggttgccagagcgtcaattgttcgttgatgcagcaaacttttacgccaccggcttgcatgagttggttcactggacaggggctaaaagtcgtttagatcgcgagaagggaggaaaatttggatcagaggggtacgcctttgaagaacttattgccgaactcggaagcgcgttcctgatggctgatcttggcgtagtgggggaggttcagcacgaaagctatattgcttcgtggctgaaagcactgaaaggcgataagcgctacattttcaaagcggccagcgccgcctctaaagcgcatcaatttctgatgggatgttaa

SEQ ID NO: 105585 - DNA, 123 bp, Enterobacter aerogenes
atgtcattggaaaaaaaggtaaatttgcttgagcgcgtttctaaaatctcggtaaacctctgtttgctcattacgtcactgagtatgcttcttctggtttaccattttgtattggggcaatga

SEQ ID NO: 105586 - DNA, 744 bp, Enterobacter aerogenes
atgccttactttgtgctaagggactgtggtggattgaataaaataaagaaaaataaggtatcgacgggggtggctgcactgaagatatttatttttatttgcttaaagtcgaacgtttctgatgatgggacatattgcgctttgattacttatgaccaattttcgcaatattgttcattgagtcgtaaattaattagtgaagggcttcgctatttggaaaatattaagttaatagaagttgatggggaaaggaaaaaacgttacatattgtgcaactgcatccgagaagataaaaaacgaatgttgtctcgttttcaatcatcatatggtcattggtgtaaattaccttacaaggggctttttgatgaaaaagggaggattactgcttttgaatcaatgagtaatagaaatgttgttgagcttaatgctttgaagatatttgtctacattctgatggtaagaacaggcgggaaagcttattcagctgtaacgttaaaaacaataaaagcgaggttatcattatcttatcaagaaatcatggtcgcaattgcttaccttcattctataggattacttgaacgaagcgacgtaggttccaattcaatcagtaattatgatgagcgtttttctgttaagtttttagtgtgtggttgggaaggtctggagtggaagccacattattactcagattcagataatggcgttgatacctggaaagaaaaactacttgatggtgttttttga

SEQ ID NO: 105587 - DNA, 528 bp, Enterobacter aerogenes
atgcgtaaattccttttccttgtgctggccatcgctatggccatgccagcgttcgctaacgccgcgccggtagtttcggtgggcttttccccttctcacggtcacagcgcgttagacgttgttctaagcgccatcaagggggcaaacaaaagcgtggatgtcgcagcgtacagcttaaccagtaagccggttgcgacggcactggttgctgccagtaagcgcggtgtggctgtccgggtcgttgccgatgaaaaggccaacgatagcaaatacaccgccgttacgttcctggcgaatcagggcgtgccggtgcgcctcgatgcgcagtatgcgatcatgcacaataagtttatggtggtggatggtgacacggtgcaaaccgggtctttcaactataccgccagcgccgccacacggaacgcagaaaacgcccttctggtgcagggctcgccagaactggcgaaaacgtaccagagcgagtttaaccggttgtggcatgagtcttccgagctaactcgaaattattaa

SEQ ID NO: 105588 - DNA, 747 bp, Enterobacter aerogenes
atgctttttgccactgacagcgagcgccgcgagcgcaatcacgaaaaaatccgcattctgctgaattttttaaaggaagaaacctacagcgattttcagacattaatgttgctgtttggctttaagaatcacaaatcgctttatacgttgctagctaaggtaacgaaaatggggctgattcagaaacacacgctggaattacgtgccagcaaagtaatcatgtggggaattacaaacgacggattagccgtcgtacttacccccgatgataaggtgataccgtcccgcttcgagccgtatcgaattaccggctggtcactggatcaccatcttgataatcagttagtgcgcctgacgctggaaaagaaaggcgcggcgaactggattaatggcgaccgttcgacattcctcagccagtacaacgtcaaacaccgcccggatgggcttatttctttacccgacagtcgggtaattgccgttgaaacagagcgccggttaaaaaccaaagcgcgttatcagtccatcatggccagtcacctcatggccatcagtgataaacactggcgttatgttttttatgtcaccccggatgaacagaaaaaacgcgcattgcaggtgatttttaacagcatcaacagcgtgatcatcaaaaatcagcacgtttccttagaagcgaaataccgcgatgtttttcgtatttataccctggaagaactaaaaacactggagttaaccaactatgcgtaa

SEQ ID NO: 105589 - DNA, 1932 bp, Enterobacter aerogenes
atgccattcgaaagattgagctatttgctatcgccgatagtaaatagtgccttgtggtttttctggtttttacagacacatcaaatgattttagcgttactgtctggtttgatgttgccatttatcttttttctgaaacaggatgaacaccaaaaagcgccattctggaagaagtttattttcggttcatccatgctctgttttctttttggcactatcgcgccagtgccgatctggtttctgcaacgcatatatgcggggcgaaatgaagtagatgtcccggttctgacctgggggatcctgctggcgtttacggcagcgggattggctacgcatattattctacgccgtttaatttctccagaactggataaagctaaacgcagcctggttaaaaaaaccagcatggagcgcgacactcgtacagatgtgagaaaggtaaaagacattttaccggaaacggctgaatacgatccgatgcaatacatcgacctgagcaaaggtattttcataggactgactaaagaagggaaaccgcaatacatcccggttaaagaatggcaaacgcaacatgccgatataatcggcacaaccggtgcgggtaaaggtgttgcctccggtattttactttatcagagtattttagctggcgagggtgttttcgttctcgaccctaaaaacgatgaatgggctccgcatctgtacaagaaagcgtgtactgatgccggtaagccatttgttttgattgacctcaataagggtgagtatcaactcaatcttattgatggtatttcggcagatcacttagaggaattatttgttgccggtttcagcctggctgaaaaaggcgaggccgcagatttttatcgcattgatgatcgcaaggcagcgagaacggcggcgcagtttgttgttaatcagccaacggccacaatccgcgatatttataatggtgattatgttcagggtattggtgaaacgataaaagcgtttcacggtaaaaccgaagaactggcgatgttaaattgtatcaatgcgccaggtggttttgcactgaaagagattttcgacaaaggcggttgctgttacatcatcggctcgatgcgtaactctaaaataatcactgcacagcgaatgactttagtccgtcttttccagcttgccgaattgcgtgatcgcgttgctggcgatccgcgcccaatcgctattttcctggatgaagttaaataccacctttctaaaccagctctggaaggtttaggggcggcgcgtgataaaggtgttcacatcattatggcgcatcagtccattgccgatttaagagactgccctgccgatttaaacggcgatgctgtcgtgggtgcggtggtagaaaactgtaagtttaagttggtctataaactgcaagatcctgataccgccgaatgggtggcgagaatgtcgggaacgatattagtcgatgatgaaagccgtaaggtgaaaactacggcggtactcaccgaaaaagttgatgatgaacgaatgattcgtcaggcagaaagctattacattgacagtaatatgctgcaaaatctgccgaagttcgttagctacatttttagcgccaatgcgctggcgttcccttcattgatttccccgttgaaagtgaaaaaacaaccgctggaaattttcacggttgcccctgctgttgcggcggcgattccagacgtaaaacaggtgctggattttgatttcgacaaggacgaaaaaacggcagcagaacccgaaaccctccctgccgaagttgtaaccggcgcggagattgaattgcctgttgtcgataaacctgaaaaggcttcaccggtaatcgatccccacgaagaagaatgggcatttccctcaccgcctgaacccgaagaagaaaaatcctcattactcgactttgatttttaa

SEQ ID NO: 105590 - DNA, 126 bp, Enterobacter aerogenes
atgaatgatgataaaatcagacgtaagatagaaagtcttaaagaaacttctgttacgtgcaacaataaactttgctgcattgattttctcattgaaatccgcaaagttttttttcaagctagctaa

SEQ ID NO: 105591 - DNA, 402 bp, Enterobacter aerogenes
atgaaccatattcaggaagaactcacatcagaacgcgctttaaaaaaatttctccgtgaaagtgattacactttccttgagaaattacgtgagcgcatttcgctgacgcttgacgacaaacgcgccgaatatgaagaacaggaaaaacaacgccgccagcgtgaagaaaaacgcaatgaattactggctctaatcgaatcggaaggtttttctattgcggatttcgctggcgataaacccgttaaaaaaccgtcaaaacgaaaaccaaaataccagtattttgaaaacggcgagaaaaaatactggtctggtgttggccgtgcacctgtttatatccaacgcgaactggatagcggcaaatctcttaccgattttcttattaaggagagtttaaatgaatga

SEQ ID NO: 105592 - DNA, 2172 bp, Enterobacter aerogenes
atgaaacaactctggatagctgagaagccgtctgtggccagcgacattgttaaagcgctgggcggtaacttcacccggcatgatggctacgccgaatcctctaccgatatcgtgagctattgcgttggccacgtccttgaaatggttcccccggaggtgatcaacccggcctatgccacctggtcactcgacaccttgccgctgaagctgtaccccgtacagcttcagccaaaggcgagcgtggccaaacaagccagtacgttaattaagctcattaaacgcccggacatcaaaaccgtcgtccattgcggcgacccggacgacgaggggcagttactggttgatgaagtcctggagttcgccggtaatacagcgccggtgaaacgggcgctgattaacgacaacaccgcgccagcggtgaaaaaggcgatcacttccctgaaagataacaaagatttcagggggctttatctcaaggcgctgatgcgcagcgccggtgatgcaatttacggtttcagtatgagccgttgttattccatcaaagcccgtgaaaagggctacaaaggcgtgttatcggttggccgggtacaaacgccggtgttaggtctgattgtgcgccggtggcgcgaaaatcagtctcacacctcttcgttttattactcactgactggcaattttatcagcggaacggatgttatcagcgcgcgctggcaaacgtccgaatatgcgccggtggatgataaaaaacgccttattgataaagcatgggcagacgggcttgccagagcgttggccggaaaagcggccagtgttctggcggcggccgtcgatactggaaaaaccaccgccgccccgctgccgtttaatctggttcggcttcagcagtatatgaaccagaaacacaagctgaccgcccagcaaacgctggatattacccagacattgcgcgaaaaacataaagcgatcacctataaccgttcggattgctcatatctttctgacgagcaattcagcgaagcgccgaaggttgtcgaagcgctaaaatcgcaggtcgattttagcgccctcgacaccgacacaaaccagaaaagcaaagcgttcgatggtaaaaaggtgtctgcgcacaccgcgatcataccaacggccaacactccggatatgtcgcagttaaccgcgaatgaaaaagcggtttatctggccatcgctaagttttatctcgcccagttcctgccgaaaaagacctacgacgaagccattgcagaaataaaatgcggtgacgaagcgtttaaagtctcggcgagaaaagtcacggccaacggttttacgtcgcttctcggcgacgataaagacgacgacgagcaggacgataatagcgccgcatttgacaccctgagccgtttacatacaggcgaatcactgacctgtcgtgatgttacggtggcagaaaataaaacgaagccacagcctctttttaccgaggcaacgttactggcggcgctggttcgcgttgcggattttgttactgacccgcgtattaaacaattactcaaagaaaaggataaagataagaaagacgagcacggcggtataggcacaccggcaacccgtgccgcgattatcgaaacgctgaaaaagcgaaactatatcagcgtcgaaaagggtaaattcgtgcctacggatgcgggaatagcgttaattgatgctcttcccgattcagtaacacagcccgatatgaccgcagtctggtctgaaaaacaggccgcgattgagaccggacaaatgaccatcgaaaagtttattgatagcctgtacggtgaagtatcccgcctggttgaaagtgctgatattaatatcagcgcaacggaaaaccagaaacctaaaaccgcgcttgatcgccttacggttaaatgtccgtcatgcgattctgatttagtcatgacggcgaaagcctgtaattgtaccggctgtaaattcaggatctggcttgagtttcgcggtaaaaaactcacaaacaagcagattgaaacaatcatcagcaaaggaaaaagcggcgagataaaaggttttaaaagcaagaaaaacgactcgacctattcgatgtttgtcacgctggcaaacaaagaaaccggtgagttaggttttgaataccctccacgcgatgatagtaaataa

SEQ ID NO: 105593 - DNA, 1002 bp, Enterobacter aerogenes
atgaaagtattgttcgcgtactgccacgaactgaagcggagtgtttctattgatgaagcaagaattgaatattttgcaattgatgaaaaaaacagaaaacgtttcgttttttcctgtagcgaccgtcagtgcaaggtcgctgttaccggcgtgaattaccacgtaaaagcagaagacgcgccgaaattcaaaacagcccattttcgcgcccatattccacatattgcaggatgtgagtggcgacagttcgagaaggaacgtgagcaaggcaaacgagccgatgagtctgagagcgattttagcgaaagacagttaaaacagctgttaaacgactatatcgacaattttgacccctttattgctggttcagaggacgatgataataaacagccaggtggttcagaatatatcgacggacgagctgcctctgaccctgaacgtaaagatcagacgggagaaccccgacagggcagatatacacgtaccaaccggctacaacggtttattgacgtatggcaggatgcgaaaaatacgctgtcagatagtgactttaaagcactgacagtcaatgttgtcggtcatggccgggtgtcttaccataaatacgtcacccatatatcaaacggcgtacataacgtgtatgacggtattatttacggtggtgcgacacttgtccggcgctatggtactggttttctcctccgtttttttgatgaagttaatgggcaggaagtcaaactgtacgtgggtaaagacgtggttgagacatcaaggctgaaacattatgttgatgccattcttaatacgcctgatatgcgatatttcaaggtgtttttattgaatccgacatacagcgacagaattgatgccaggggcgcgcgtattactcagcttgaaattactgacttacgccagatggtcatttacctggggcatgcggtaaagtcgaagactgaggaagacccgatatcagaggaaaatgatggtttaagcccggtgtga

SEQ ID NO: 105594 - DNA, 447 bp, Enterobacter aerogenes
atgagactgtgggtagcagaaaaaccctctgtggccagcgtgcctgattacgatattgcacataatacccttttcatcgccccggcagatggcaaggtatttgataataattgttgtgcgccctttcttgaggatttgtactctgccatccagaaaccagaccggatcaccctatcctgctaccgggcaggtggtgcggtggctgaactggtcttctggcaagctgagtccgtcattttcgttctgacaatgtgtgaaggccgcttgagtatccccccgatatcagatgacgacaggagggttgcgcacaaggtgattcatctcgttgatatcacggatatcatgctactggttgcaaggctcgccattcacaccgggcttaaaccatcattttcctctgatatcgggtcttcctcagtcttcgactttaccgcatgccccaggtaa

SEQ ID NO: 105595 - DNA, 309 bp, Enterobacter aerogenes
atgccattcaaaaagggtttcattgccccaccgtggtcgcacatccggggcgattctgttcgcgctgaatgtctcattcagcgtatcgagcaagaagctaatcgcggctgcggcctctattacgaaatctataactatcgtgttttaagtgagctgaacggcgttctggtcaatctcagcgccggtgatgcagcaacctttaaaacggttgctgccagccgtggttttagcctggatagcggagctctttatgaggctggccgcgaatatcaggaaacacttgcagacataaggagagaacaagaatga

SEQ ID NO: 105596 - DNA, 312 bp, Enterobacter aerogenes
atgaaacacaccgctatcgcggcggcgctgctgtgcgctgccgtcgctgttcctgctttcgccaatgatgccgcccctaacgacccctgcgcaatggtgctgtgtctcgccggtaaactcgatggcagcagccccgccgaatgtgacccgatgtacagaaatttcatgagtatcaaaaagaaaaagcacggtgattttcttcctgaccataccgctgatgctcgccgcaaaaagttaaacgcctgtccggccgctggcgctgacgtcatagacaaaatcatcaataaatttggtcgcttaagcaggtggtga

SEQ ID NO: 105597 - DNA, 396 bp, Enterobacter aerogenes
atgactaaaattctttatctcgcggcgctggccgcgcttctggcgggatgttcatcatcgccagaacccgttcctgtggaatgggataaaccagcacagcagatgaataccggtctaccccattgggagccaaataacgccgtcattccctcgccggtagttactggccactggtcacagcatatcgccagttttaaccctgatatgctctttacccccgccgtctggtatgccgtcgcgcattcatcacaggccatcgtgagcgccccggacagtgaacgctattttgcagccaaagcatggctgcgtaatggcggttacaaaggtgttattcagttccgacctcaaagcaactgcttcaactgcaacaacactcaaatcttcttttaccgataa

SEQ ID NO: 105598 - DNA, 1023 bp, Enterobacter aerogenes
atggcagacacaaacgtcgctcttgaatatatgtgcgatgaaatattaggggagtaccttgatacagatggtctgacagaaatcgccattaaccgccccggagagcttcacacgaagattaacggtgcgtggtcaatgcataagtccagcgtgacttatgaacaatgcgaggcgttcgccagcgcgttagcggtatggcaggacgataacattgatgaaacgtcaccaatcctctccgcaacgctgccgacaggccagcgttgccaggtaattttcccgccagcctgtgagcgcggcactatcgcgatcacagtgcgtatccccgattatttccagcgaacgcatcagtcttatatcgatgcgggtttttataatcgcgtcaccggcaaggagaaaaaggaaaccaaagacgacgaactaagcgcaatttaccagagcggcaatattccgttatttattgagaagtgcgtcgagtacgggaaaaccatcattgtggtgggcgaaaccggctccggtaaaaccacctacatgaaaatgctgttgcgctatatccctgaatggttgcggatcatcaccatcgaggacaaccccgaaatcaagttcttccagcattccaattatgtgcatctgttttacccggctgatgccggtgaagatgccattgttacatcagaccgcctggttcgcgctatctaccgtatgaatcctgaccgcccattactggccgaaatcaggggtaaggaagcctgggatgccctgaaacttatcgaatctggccaccctggttttatgtcgtcactccacgcaggtagcccgaaagaatgcatttctggccttgtcgatcgttgcatggaacaccccgcctgtcgcggtatgccagaagatgtgttgaggcgtaaagttatgcgctgcatggatgtgattgtgagcgtggatattaacggaaacgtgcgacgtgtaggcgatgtgtactttaagcatcttcaccaggacgcaatgaaagagagctttgctaatgactaa

SEQ ID NO: 105599 - DNA, 1257 bp, Enterobacter aerogenes
atggacgaacaggaagaaatcaggacggccgctgaactggaggccgaagcccgtgaacgggcaagagcagaaattgcagggcaaaaatcggtttctgcagaagccccaccaggacaacccaaagtcgtacagcacaataaacccaaaagtaagcgctccctgatagtatctgttatcagtctgcttgcgttggcgggtctggccgtcggtggtgattatctgatggggatggccaaaggcgataaatccgaagcgaaggaggaaacgaaagccccaaaatccaacggcaacgatacgacgcgagagcgtaccggcatggggcgcgacactaagccctgggaaggtaagaaggacgataccgaaacgaagacggcggcgaaacaggcacaaccgcagccgcaggaatcgacagtagtcaccttcagtaaagtcagtgcgctggccgggtctgcctcatattctcccgccagtcagagaaatacttcatcaactccagccgtcgcccccgtcgatccatcctctgattcagccctggcacaatgtaaaaaagttctggtcagggcagaaaatggaaaactgtattgcccggactcagcaacagccgacaccgacaccgacaaacaggatgatggaatcgccagaatcaccggcgttaaacgcctgaacctcgatccaaatctgtatataccggtagaccgtcatattccctgcgccattatgcagcgtttcgtgtctgacgtggccgggcgcgcaacctgcatgattagcgaggatgtttacagcgctaataatctggttcggctgatccccgcaggtagtaccgccacttttatttataagaccggcacactcaaaaacggtatgggtcgtatgtttattgccgccaccgaaattcgcaccccggaacccaacgcgctgcgcatcccgctgattaacagccaggccgttggccagctaggggaaaacggtatcgctggctggatagacgagcattggggggagcgaatcggtaacacgattctggtcgccggtgttcaggatttcgcggctggaatagcgaaaactgcacccggtacagaccgcaacaccgattacacagaaaacacccgcgcggccaccgctgaaatggcaaaaaccattctcaataacagcatcaacatcccgccgacgatgtatctcaatcagggggatgtgatcggcctgaaaaccggcgcggatattgatttttccagcgtctacaaacttcatgcgaggtaa

SEQ ID NO: 105600 - DNA, 909 bp, Enterobacter aerogenes
atgaataaaaccctgctcgcgctggcgatgctggccgcatcgtcatgcgcctggagtgctgcgcatccgagagggagcgcatacgacagccatatgcaaaatatcgcctataacagccagaattctacagtggtttatacccgcgcaggtttcgttaccacactggtttttgacgacgatgaagaagttatcgatgccacgccgggttttctggctggttggacagtcaccccggataaaaaccgcgtgaagatctggccacagccgattaaacagcctgtaaccggcgccgacggtaaaaacgtggagcaggtttttaatcccacggataaagactggcagaccaatctctttgtgaccaccactaagcgctattacagccttatgctgcatgtcatagacgatggcaaacccgtctccgggctggcgttcgtcgttcgctacagctacccggcagaagcgcggaaacaatccgcctccgctcagatggccagacagcgggaattgcaagaaaaacaggaaaaagaactgattcaggcacgactaaaaaaggcgacagcgccaaaaaactggagttatacccgccgggtggccaaaggctctgactccatctccccggattttgcttatgacgatggccggttcacttacctgggcttttctccacaaaaacgcatccctgcgccgttcgccgtggtcaacggcaacgagcaggaaatcacaccgacctttaataccgaaggtcattaccgggtgatggtactccgttcgctctctccgcgctttgtattgcgctatggcaatgacgcagcggggcaagtggtcggcatcgagaacaccggcttcggaaaagtcaccgaggccaacggtgacaccgtttcatcatccgttagcctggaggccaaataa

SEQ ID NO: 105601 - DNA, 687 bp, Enterobacter aerogenes
atgtctgatttagcggaaaaagccattagcgaatcgaaaacctttgaaaaagcgatgcgcgaaaaagatgaacgtttctcaaaagctggctggtttatgacgggaatatttgccctgacgaccatcgggttaattatcgccgtcgttattatgctccctcttaaaactaaagaggttgatttatacgttcttagtgaagtcaccgggcgacaggaaaaaataaccattgtcgatacggaacatttttcagccaccgaagcgcttaataaggctgaagcggccagttacgttaaacgtcgcatgcgttacaactatttcgcgctccagcgtgattacgacgacacccaggcatttaacagcgctgacgtaaaccgggattaccgcgctgaatatgacggcgctgacgcacctgataaaaagtggaataaggcggcgtatgttgtcagcatcgacgttatttctaacgtccattctgcgggtactaaaccagaccgggttggcatgttgcgcattaaacgcaccattcgccgcatttctgatgggtcagaagcctatgactactggacggttcgcctgacctaccgttatatccctcagaaagaactcaccactgaccagcgcgaagttaacccgtttggcttcaccgtcaccagttggaatccggttaaggaaaatcataatgaataa

SEQ ID NO: 105602 - DNA, 138 bp, Enterobacter aerogenes
atgaaatacagcatcccatttttgatgctgtggctgcttacgggctgcgcacatcaaaaccatttgccgcctgtttcgggtaacccggaaccagtgaactcacccgccattattcaggagttaactaacaatgtctga

SEQ ID NO: 105603 - DNA, 1098 bp, Enterobacter aerogenes
atgtcagatggtatattcacagggatgaatactgccatcatgggaggactaaataccgtattacaggggcaaacttctgtgtacggttccatgatgacaataatcataactagttccttcacctgctacattctgtttaaaggttatcagactcttgccggtaaactgcaaaaacctgttgaagatgtggcgtgggatgtgggtcgaatgcttttaattatgatgttcgtggcgaacataggaggatggttagatataaccatagcagctattgatggtttaaaaaatggcgtatcaggaagcgataacatatgggagttactcgataccgtatggaataaagctcaggtattagggcaagacctttatgatcaagacgattctacttacgtaaaacttaatggcggaattgctgagttacttgtatggggagggactatttttgttcttatcgtcacaacaattgttaacttactagccgaagttactatcctattgatgtccacaacaggtccgattttcattttctgtttgttatatggttttttaagaccaatgtttgataattggcttaaaaccatctttaccgccattctcaccataatgttttcggctttatttgtgagaatatcaataaaatatacgaatgatattcttttgaccgcatctcaaatagcagatgataaaaatatcgttacgcttgccgcacaatgtttgctggctgcggttggagcaggtatttttgtctggttctcagccaaaatatctatggcgctagggggagcggcaactcaggcaacaatgcaaggcgtagcaatgtctggccttggttcacttggcagtaaggcaaaagatgtcgcaaccagtaatccggctaaggttgcgggcgcactggccgccagaggcgctggcatgggaatagcaggggcagccaagggggcaggtgcagcgatggactatgccgcaggtaaagccgctgatgcatatacttcctggggtaatacccgtgccgcttcgtctgctttccgtgcagcagctaaccgccgtgcttccatccagacaatgctaagggggaatcagcaacgcaatggcagttaa

SEQ ID NO: 105604 - DNA, 318 bp, Enterobacter aerogenes
atgaaaaacattgttgtattatcagcgattctttcaatattttttataagcggttgcgaagaaaaaaacacaagggaatggtacataaaccatcatgatgaaatgattaccaaatacactgaatgtttattagaccgcacatgggagatacaggagtgtcagaatgcaagggatgcaatgaaacatgaacgtaataaacctgatgttataaatggtaaaaaagaagcctataaaaaacttaaccagcaagtatctgatgaagttgataatttcaataaaagctggaatgagtcgatgaaaaacattcaaaaacagtaa

SEQ ID NO: 105605 - DNA, 732 bp, Enterobacter aerogenes
atgaatatgaaaaaaaatctaatcgctacagctacggccgcaatgattttttcatcttcggtacacgcctccggtgtaccagtggttgatattctggcaaataccacatccgtgaatcaatggattcagaaactggcgcaatggactgaaaccgtccagcactataaagaccagatggattcctataaatctcaactggcgacagctaccggtgttcgtgatgttcaggcgtttcttagccaggctaaaagcctggccaatgacataaaggcgatgagagcgcgaggcatatctctgaatgacttgctaacgaatccaaatggctcctacacctcagacttaaacagcttatatgataaatataaggtgtttgatagttgcgctgaaggagctacaggcgcttacctggaaagctgtaagaagatggttatcaaccaggcggcggcaattgaaggcacaacggaggtgcagaataaaattgctgatacgctggatgatattgcaagtttatctaatcgaattcaatattcaaaagattcaaaagagtctcaggatttggccaacgttgtttccgcccgcagcattcagttaaacgccttaaccacacagtgggaaatgtctgtgaaacaagcggagcaacgtagtaagatgctggaggtgcagaaacaaaatgaattttcaaggcagcaacgtaacgcgccgattgccgacttgaataacatagggagttaa

SEQ ID NO: 105606 - DNA, 2751 bp, Enterobacter aerogenes
atggccatattaaataaagggcttacccgccctgcggcactctttggagtgcctttagtcccattaatcctcgtgttctctgctatcgcactaatcgctgtgtatacacagttttactgggcgctatttcttattatccccgccgttattgaaatgcgaagcaaagcgcaaaaagacattcactactttaacctgaagttactggcctttaagacaagaggaaacagagcagtgaatcgcttttatggcgcaaacacaataacaacggggcaatatgagagcatcgacattacggagttctgcaaaaaaatgcgacttaacgaaggtatcgacgtttctaaatatatcccttactcgactcatgtcgataagcatatcattaagaataaaaaaggtgattttgtttcaacatgggaactggggggaactatttttgaatgtgaggacgaacatcaccttgacattatgacctcacaactaaacaacctgattagaacgtttgaagggcaaccctttacgttttatattcatcgaatcagagagagttataccgatgggtttgaatgtaactctggaattccattctcggatgaagtatcacagctatattacaattcgatagagaaaaagccctttcgccgctgccgtctgttttttactgcctgttacatccctttaaacaaaattgagaaagccgcattaaaaagaaagaacactggtgacagggaatcagcacttaatgaagcaatcaaagtgatgaatgaatactgggaaatgcttaatacctcgctttcccgctactctgccgtaccgttagggatgtaccaggaaaatgaccgtctgtattcctcacagattgcgttctacaaccggctgctgaccgggaaatggcaaaaggtcgccgttacccgcacaccgttctataacgttcttggcgatggtcagacatttttctctactgataccggtcagagaaatcatgttgatggccagacgttttttcgcagccttgaaatcaaggatcatgccactgaaacgtacaccggactttttgatgccctgttgtatgctgattgcgattatgtgctcactcagtcgtttacgtgcatggccaaagaagaagcccgtaatcacataaaactgaccagcaatcgactgaaatcagcagaagatgatgccatttcacagcaggaagatttgctcgtcgcacgtgacctgctccagtcaggccacatcacctttggtaagtatcatttttccctgattgtcagttcttcagatgccgaacaggtgataaaagacaccaacgcgatggccgaaccgattaaagacctgggtatcatcaccacgctttccacaaggtcacttactgcggcatatctagcgcagttgccaggtgtttacgagctgcgcccccgactggtatcaataagcagccagaatttcgcggatatggccagtctccacaatttcaacccgcacaaacgcaatggcaacccgtggggggaagctgttggcatcttcaaaacaccgtcaggcggaagtcataaccttaatctccataacagccaggagggcgtagacgacttcaacgaaaagaaccccggtagtgccatccttataggcagcaccggcaccggtaaatctacgttactggaaatggtgaagcacctaatgcaaaagtatcgccgtatcgatacctttgcacctgaggcgaaaacaaaacgtttcaccacagtcacgtttgataaagacaggtctgccgaaatgtcgattcgactggccgggggcgcatattttcgcatccgttcgggagaaccatcaggtttcgcacctggtcggttagctccgacaaagcgaaatatcggccttatcaagcaactgattcgcctgatatgcacccgaaacggtcatgtcctcgatcctcgtgatgaagaacgcatcagtaaggccgttgaccggattatgctggattatccgccagagaaacgcgggaaaatcatcacccgcattctcgaactcctgccagagccgccaacgacagaagcccggacaaacggtatccgtattcgcctgaaacaatgggcggaaggtggcgagttcggctgggtcttcgataacgaagaagatacttttaatatcaatgatatcgataactttggtattgatggtactgaattcctcgatgataaggatgtgcgttctccgattacctactatctcctttatcgtgtaaccagcttgcttgatgggcgtcgtctggtgctgtttatggacgaattctggaaatggttgcaggataaagagttttctaccttcgccctgaatatgctcaaggttattcgtaaactgaacggtatttttgttcccgcaacgcaatcaccggatgaaatgtgcaaacatgaaattgcagcggcaattattgaacaatgcggtacgcaaatattcatggccaacccgaaagccagtgaggaggattacgttaataaactgaaagttccacaaagcgtatatgaaaagttaagagagctagaccctggcgcccgtcaagttgtcatattaaaaaccccgctaagacgtggtgaaacacgtccgtttatttcactcgtcactgtagacctttccgggttggggcgttacacaaagttgttgagtggtagcgtggacaatctcgaaattttcgactccatctataaagaagggatgaagccagaagactggaaagacgaaatgctaagacgtgcaatataa

SEQ ID NO: 105607 - DNA, 303 bp, Enterobacter aerogenes
atgaaattaatcaacactctgaaatcaaaattaaaatcagcttacctgacgtttactttaggtattttaccagcagcacaggcaattgcggcggatgatggtttccagaaagcaaacgaagggttaaataaatgggcgattggcctcgccagcctagctgtcggaacagtgacgctttgcatcttatggattggctacaaggttctttttgatggaaaagccctccacgatatgcgaaatgtgatcatcggtggcattcttatttccggtgcatcaggtttcgctgcctggtatatggcataa

SEQ ID NO: 105608 - DNA, 642 bp, Enterobacter aerogenes
atgttaaccactgcggcattcttatcgcttgccatgcagtgcgctcccgccgttcaccccgatacactctctgatattgtcagaaccgaatccggcctgaatccatacgccattgcggaaattattccgttaaaaggtggggggagtcgcgttgcctcttatatgccgtcatcgaaagagactgcgctgaacattattaaggagataaaacaaaaaaagcaccgctattccgtcggactgatgcagataaccagtaccaacttccccaaatttaatgtgtcggcggagaccatgttaaatccctgcgacaatttatctgtcgcagagaaaataatcatcgactgttaccagcgaggaggcacattaaaacgcgcactcagttgctattactccggtaattttgagaccggacagcaagctgaaaaatctttcggcaataccagctatatacagcgtataggatacgttgtgccatcaacccggcaggacaggcaaacaacaccggctgtgcagccgttagccaccgttgtttatccgtcctcaattatccggggttcaataccgatagctgataacactcaatcaaccgaaataaaatacccttcacacatagtgagaggggtattactcacatcggaataa

SEQ ID NO: 105609 - DNA, 291 bp, Enterobacter aerogenes
atgattaaagagtattccgaccatcaggcgatggtcgatgaactacgcagtcaataccgacgaaatgacgttattatccaggaaggttcgcctcccgatgaatctgatagcaaattctggacgcacaacctctggtatgtggacgatactgaaaaccctgtcgttctgcttaaagtcggcattgcccgtattaatgagtgcggagactggaatcactgccttaaccccggcattaccctggaggggaaatacaccctccgggtttgcccgaaagggcataacgaggcctga

SEQ ID NO: 105610 - DNA, 312 bp, Enterobacter aerogenes
atgacaatgcataccgttcgcttaaaatctctgcgggataatccctacgccatgcagcctccccgtaaccatgacggccacatcagagatcgtgtaacacgagcagttgatggtgcctgtaagttcgaagacttgccgctggatgtacgattactcatggttgaacgagcatgtctgagaaaggatatagccagaatcactgccagaaatattcgtaagataaactcaaatgcatctttcttaattgcccggaaattaaaaaagatagataaaataactgaacggataaactacatcagcagtttctcttga

SEQ ID NO: 105611 - DNA, 423 bp, Enterobacter aerogenes
atgatgatggcactaacaaatctggtgaaaatgatggttccaaagcggcttaaggcagtaagaaaaaaattcaaactctcgcaggaaaaactggctgaactggctggtatagatgcactaaataatggtgcgcagatctctaactatgagaccgggcgcgtctctccgacatttgaatttgttgtgcgtgtggcaaaggctcttgattaccctgaagcgtatttttatacggttgatgacagactggccgaaatgtttttacaggtatataaaaacaggcgtaaccctgattttaatccgtatatggttaccttgtcggaggtttcgctccttgcttcagacgcaagcaaagccattttggaattgaacaattgtcttcagcaaacgataggcaaagttaagccgggaaagcgaaagttgtga

SEQ ID NO: 105612 - DNA, 888 bp, Enterobacter aerogenes
gtgcgggtagtggtgactgacaagaacaccagattctccactgtctaccgacaggtcaaaaacccgtaccctgagttccagccagcagaaggcgcggacactatttcgttctgccgcaaactgatgaagaaggcggaagggtttacccgtagctttgcctttcagctatgcgttgcaactgcccgctcgctcggaaaacgcagacgtactccccctcccctgcgctgtcgggcgatcgatgccctacttcaggggatgtgtttccattatgacccgctagcgggtgaacggggacgtgtccagtgctcggccaccacgctggctatcgagtgcggcctggcaacagaatccgatgcaggaaacctggcgattacccggctgacgaatgccctgaagtcgcttgatgaacatttcggcctcgtcacctactcaacggaatacgatccggaaattggttgtaacatcccgagtgatattcagttcaccgaaattctgctggaagggcttgatgtttcagaagcggcactggcagctgcacggcgaagcagtgccgaatacaccaacaagaagcgggttaaacagggactgccccggctgagtctggaagaactggcgagcaaagcattcagttatgtacgcgatcgtttccttgaatatcaccgtaaacagcgggagcatggtatcaagcgtcggcgggctaaacaggatgcggaacggagccgccaggatatcgagctgatagtgaagcgtgagctgacccgtgaaatcgcgcagaagcgtttcccggcagataagaacgcggtttacaacgaggtgaaacgccgggttaaggagcgcatgatcctttccagaggccaccacacgcggcttgcaactgcctccacctga

SEQ ID NO: 105613 - DNA, 588 bp, Enterobacter aerogenes
gtgggaaagaagaaaaaaaatggctctcatatgtctggagatccgcataaaagagctgcgttgctcgcgttgaaaaatcagagaaatgaaattaaaacacttaaattgaaagaattcatcaatatggataaccctcttgatgttgaagcgctatatgaagtagcgagagaactgaaggctgatgaactttctgatgagtttttaaactggcatatgagcacgtatgactctgattttgaatcttcagctaattcaagtttgtatgctctgagtttttttgatgcccttttagatcttgcgaaagaaaatgatgtaactcatgaattgaatattgacagggtagttgaatatctcattgattctgatagagataatgagatgagtcttgctcattggacaaattcagcggtgacttttttacttccacagttgagagaatttttgaaatcccatggttatcttgaaaaccttacacggttgtatgatttggataagtgtatagctgctgctctggaacaagagtacagtttcatggggtatgaaaaagtgcagttttccatctccgaaacttccgctgacaggggttaa

SEQ ID NO: 105614 - DNA, 240 bp, Enterobacter aerogenes
atgagcctaaaaaaacagaatagtggaactgccgtgacgaataagatcatgacattcggtgagaatcgcgacctggacaaagtgattgcaacagcaccggcagcggttcaaaaacgtatcaatttcaacatgccagaggataaacaccaacgtcttaaagcggcttgcgccaggaaaggtgtctcgatttcagatgtaatgaacaaactggctgatgcctggttaaactcaaatgagtaa

SEQ ID NO: 105615 - DNA, 618 bp, Enterobacter aerogenes
atgaaagtgatttcttttctaaacccgaaaggtggcagtggtaaaacaaccagcgtcattaatatagcaaccagcatagctcgtaataataaagtagcggttgtggatacagatccacagcaaagcctggccaactggaataaagcagaaaaggcgaactttgacgttttcacagtcacgtcagaaaaagacgtatacacgataagaaaagagttaaaagattatccttacgtgatcattgatggtgccggtgcgctttcagtaattaccgccgccgcggtcatggtcagcgatcttgttattattccggttacaccgtcacctttggatttctctgcgtcaggcgcagtaatcagcgttcttgaagctcaggcatacaatcgccctgtagaatgccgcttccttattacgcgaaagatagaacaggccacgatgctgaacgtattaagagaaagtatcgcagccaccggaatagcccctctcagaacggcgataacgcagcggcagagctatgttaaatcagtgctggatggtgaaacggtgtttgatacaaatgacggagcagccaaaggagaggtagaagttttggcggccgaaatactgaaaatagttgcgtaa

SEQ ID NO: 105616 - DNA, 210 bp, Enterobacter aerogenes
atgatgcagtcagaccaggttctgacagatacccgacacataacttttctggcaaaacactttgcccgtccggagactcaggtcacggtgctggatgtactcgcaatctcccggtatttcccgacacatcaccgcatgcagttgctggcgcgataccgctattacatgacagcgccaacccggcaatctatttcaggtaatcagaaataa

SEQ ID NO: 105617 - DNA, 210 bp, Enterobacter aerogenes
atgttacctgttaccggtgcgaaaaaaagccgcacctttcgggagaagatgcggcttccggtactgattgctacagttacagccatgatgttagggttacgtcgtttcaggcaaatccttgcctactccctcagtatagccagcccggacatcgccggtagtttgttttttttaattatatttccaggttttttatatggcttgcgttaa

SEQ ID NO: 105618 - DNA, 483 bp, Enterobacter aerogenes
atgcgggatgaaacgaaagaggccatgcggttgtttatcggcggcagatgttacacggtggcaaacctcgaaagggattacctggccgaagtggccgggtacagtgatgaccgctgggaagcgccgcagcgtgccgcacgtctggcggcagcagtaaagcgttacaagacctctgaaatgctgcgctttatttttgccaccatcgcctacgatcccgacccggacttaaccccgctggtcgtgaagcgcctgtgtaacgccctgtttggcagaacgggtagccagtggctgattgtcgaaatcttcggggagaaggggcggcagcaccgcagccacgacagtgacccggctgtgattgaacaaatggccgcaaaatatcgcagggaggcagcactgcactggtcggctatcctgggggaaattgaacgggtcaagcggttgtatcaggtgggaatccgcgcatccagagaggaagagggctaa

SEQ ID NO: 105619 - DNA, 426 bp, Enterobacter aerogenes
atgacaacagaaaagcggtacacgctggaagatttcgacttcagccagtgcaaaaatgttacttccctgaccccagagggcgttgatgaagccgccattctgttacgtctggttgaaggtgccggggtagctctgtggcgctcacgcaaagacagcacaccggaactattaccgccccgccctgatttgttccagtataatggtggctatagctggggctataaaggctcaggatgccagaacctggcaaatgcgattgttggccgggtttatgaatttgataatctcaccccttctgctcttggcgaaaaggcgcggctactggttgaggggatgatttcaggaataaacaaagatgtggagtatacgcttgacgtaactatcattcgccaggcgctcggcgatgaaccacgcaccattttttag

SEQ ID NO: 105620 - DNA, 291 bp, Enterobacter aerogenes
atgaaatgtctgctaaaaaatacttcgatgtttacctttttatctctgcttttcattctcaatgcgaatgccgggcaagtggttattgttaaaggcaacgtgaataatgtcgctacgggcggagggttggctttgaccaacataggttctgtgttaggtaatggaaatggtgagttaaaagccgaaggcgtttcgcagacagcatccattggtggttcagtggttaacatttccaaaggtaaaggttcaaaatcagaaataaacattagcactattaataaccgaaagtaa

SEQ ID NO: 105621 - DNA, 303 bp, Enterobacter aerogenes
atgatagataaaaaatttatatccattattgtactgttgtcggttggtgtcgctggctctgcttatgctgatatcaatatcaaaggtaataataaacagacagtcaatgtccagggggctgttgccaacaccgtcgtgggggctggctctaaagcgaaacaatccctggcatctaacgttggggatgtctctgtaaaagggaataactcacagaaggtctctgttcagggggctgttgccaacaccgttgtaggggctgcctccaaaggagagcaacatttaggatcgaatgtcagtgattaa

SEQ ID NO: 105622 - DNA, 1584 bp, Enterobacter aerogenes
atgtctttttttaaaaaaactcttctcgcaagctcaatatgcttattgataaatggttgcagtgtctccccaagagaagaaattccattttttgaaacttcgctggtagaaaatcagtcggtaatgaaaccggtaagggctatttcgaattttgatgatagcctgtcttgcatggatcaattactccttaaaaagggggtggcaacaacatatataaccagcaaaataatacctgatgcaacaggtaaggtttttgtttcggtgaaagacatggttataacatcactctccaaaatgtccttatcaagtaatgctttcaaatttgttgatttcgagaccgatcctctgaagcaagacaccgtacaaaacattaccacgctcctcataaatagtggcgatatgcatataccaaaaccgcaaatttatgtcacaggtgcaatttcaagtatggatcagaatattctggttaaaggtaaaggtttcggtgttgccagcgacgattttgaattgggtcagacaaacgatctcatcgcaacaaactttagtcttgaattacagcttggtgacttcgacactcgtaccattatccctggtatagcttccgctaatcaactcgttgttgcgggttctgggaatgctattgatggtggaggaagaataaaaaaagcaggtatccagtttagctttaataatacgttaaaccagggagttggaccggccacgcgagcgttagttgatctaggaatgattgaagttatcggtaaatgggcagaagtaccctattggcaatgtctgtccttggaccaaactcatccggagtttcagcgtgaaatgtatgaatggtattctgagatgtcagatgaagagcgtataaatttcttttctcacgcgatgtttgccggtgggtatattcgtaccaaagagagtgcggggctgacatctgagctgcgaaatgcaatctttaattttcagaaagactctggactagtcgcatcggggttacctgattttgaaacttacgataaagtcatgcggcattatgttgttattgatgaaaaaggacgttttaaaaaaattggctgggataatgacagagagcgcgatccgaaaagttcgaatatttggccatcaccagattcagagaaaagaaatcctttaacagtcagcgtcactactcaatcaggaaaggatagctactcgcttggtgaggacgttagcttaaatgtgcaggttaatagagcatcatgggtatactgttactataaaaactatcaaggggtgctaaccaaagtttatccttcaatgttccaggaggaagggaaagtgagttcttcacaaacgttgattattccaccgaaaaacaaaacggacttgttttctcttactatgtcagggaaaggacaagaatccgttacatgtgcagcctctgagcaacagttgaatgaacaaaaaatacctcagctatttaagttcgactttactccggtcaatgctacgttcagccagacaactttggatgatactctgaaaggcctcggtacgtctgaagtcgttatctcttctacatactggagagttaaataa

SEQ ID NO: 105623 - DNA, 600 bp, Enterobacter aerogenes
atgttcagtgtggtactgaatgtttttaccatatcaaaatgtgtagtgatgatactttttggtttttggataaatgttgtatatgctgacgttatcatcaatggtgagaatttaagtcaaactggtgaggggggatttctatcctcaaaaacgtatgacgatgcccgcagcagtgaggtgggtaaaatgacggaattaatagctcctaacataccagtgtttgaaggggaagataaacgtagcccggtcactaaaaattccccgacgaaaggaagggatgaatctctagcaggaaatatttcgatttcacaaccgaaagaagaggagggtaaggtaagtactctgtcgctgttaacaagtcgcgccgaagctggcagtagcgaagctgcttataaactggctgttatttatcataaggggattaacattcccgtaaattatagtaaggccatttattattaccagttagcttccactggtggtagttatcaagccaaaaaaatattgtcgttaatctattcaggtccaaaaaataaggatgggagtattaaaccggaatggatgcaggtcattgcggattcgataccgcaaccaaaatga

SEQ ID NO: 105624 - DNA, 210 bp, Enterobacter aerogenes
atgatgcagtcagagcaggttctgacagatacccgacacataacttttctggcaaaacactttgcccgtccggagactcaggtcacggtgctggatgtactcgcaatctcctggtatttcccgacacatcaccgcatgcaactgctggcgcgataccgctattacatgacagcgccaacccggcaatctatttcaggtaatcagaaataa

SEQ ID NO: 105625 - DNA, 153 bp, Enterobacter aerogenes
atgttacctgttaccggtgcgaaaaaaagccgcacctttcgggagaagatgcggcttccggtactgattgctacagttacagccatgatgtttgggttacgtcgtttcaggcagatgttctgcctgtattcatattataaccagcctgagtaa

SEQ ID NO: 105626 - DNA, 390 bp, Enterobacter aerogenes
atgacctattctctcgttattcttacaaacatcaggagccttcgtgccctggccagggaaaccgaatacgatatattacaggagctttaccataagctatcagttgttgtccttgagcgccgggatgaagaagctgttgcaatgaaagcaaaaggtgagagacaagcaaggctggaagcgattcgggcgcagatgttggcagagggtttggatccgcacgaattaatgaatattcccgtgactaaacccagaactccccggccggcaaaatatcagtacacaggtatcgatggaatcaataaaacatggactggccagggaaaaactccacgagttattgctgaggcgattaaaaatgggcagacattggctgattttttaatccaataa

SEQ ID NO: 105627 - DNA, 141 bp, Enterobacter aerogenes
atggatacgacaaaaaaagatactgatgaactgttttttgaaattgttgggaaggcattttctgaagatttcgatacccaacgtgaactggatgaactcatcgaatcagtgacaaattcatctgataataaaaatgagtga

SEQ ID NO: 105628 - DNA, 246 bp, Enterobacter aerogenes
atgtttttagtaaaaaataaaaaggcagaagaactggaaaaaaaaggtttgtggcggagggccgcaacacattggctgacaacaatgcaacaatgccataccagtgaagaacaggattgggtgagaaggaggagaaattactgcttatcaaaggtaaccaaaagaaagcatagtaatctggatatcagggagctaaatcaggcagcatcgttagtgttacagcagatggggtcgcgtgttttctga

SEQ ID NO: 105629 - DNA, 891 bp, Enterobacter aerogenes
atggttgagactcttgatataaaagttctccgcgtcattcatatgttagttaccagcggtagcgttacaaaaacggcagaactcatgaatgtttctcctggtgcaataagttacatgcttaacaaagcacgtcaggcgaccgggtcagcattattttcacgcacccataatggaatgacgccagataatattgccaaggaactaagccagcggtatttagagatcacgaaggtttttgcagatgattccggtgcgatttcattgcagaatagagcggtaactatttgcacgtattctcttcttgaattcatgttagcccatgcactttcagataagaaagaccatccagcaatgctggaattttgcaggccagaaataaatagtgaggatcgcgttcgtcgtatcagaagtaaagaagttgatattgatatcggcacacgcctccctactgaccgtagtatcattcagattcaattattttccagtaatctgtgtattttcatgagtaaaaacaatccattatcaaaacataaatttactctgagaaactggagagaaagtaaccatgtccgatggtcaagaaaagctgattttatttgcgatgattaccaacatgcgaacagattcaatgagataatggctgagaaaaatatttcgatgatatccagtgactcactaaatatgagcttgctatgcgcattcagtgatcatgttatgttgatgccagcgatcttatccagtttccttgaaaagcatttgcctatcgtttcacggccaccaccggcagaacttcagatgcgttttgactgctatatgcattttcatcattctctttcaggggataaaacaattagcgctatattcgaaaaactacagcagactattgtttga

SEQ ID NO: 105630 - DNA, 408 bp, Enterobacter aerogenes
ttgattctggccttccacaaaattgacatgaccgccgtccacgtcaatcgcaccgccattccgggcatacacgccaacgacgccatcccccttcaggttgacctcaccggtcaccgtggcctgagagccctggccaacggcacgaataccataattagcatatttattttgctcaccaccattgacgttgatgatacccgcatgcgtggcctgccccccgtcaatcacatccacaccaataccattgatgccgttcagatcaatggtgccggtgttcatgaccaggtctttttgcgttccggcccccgcttcgaggcccttattgattgctgtcgaatctccgggaatacggccgttaatggcaatatgaccgttttgctggacagaggcattatctcttgcggctaa

SEQ ID NO: 105631 - DNA, 690 bp, Enterobacter aerogenes
atgttacttcctgtagttatggctggtggtaccggcagtcgtctctggccgatgtcccgcgagctttatccaaaacagttcctccgcctgtttgggcagaactctatgttgcaggaaaccatcacccgactctcgggccttgaaatctatgaaccgatggtcatctgtaacgaagaacaccgctttctggtggccgaacagttgcgtcagctcaacaagctgtcgaacaacattattctcgagccggtcgggcgcaacaccgccccggccatcgccctggcggcccttcaggccacccgccacggagatgatccgttgatgctggtgctcgctgccgaccatatcatcaataaccagccggtcttccacgacgccattcgcgtcgccgagcagtatgccgatgcaggccatctggtcaccttcggtatcgtgccgaacgccccggaaaccggttatggctacatccagcgcggcgtggcgctctccgacagggcccacaccccgtaccaggtggcccgcttcgtggagaaaccggatcgcgagcgtgctgaagcctaccttgcctccggggagtactactggaacagcggcatgtttatgttccgcgccaaaaaaatatctctccgagctggccaaattccgcccggatatcctggaagcctgccaggccgcggtgaatgccgccgataa

SEQ ID NO: 105632 - DNA, 918 bp, Enterobacter aerogenes
atggaattaaaggattattataccattctgggggttaagccaacggacgatctgaaaaccatcaagaccgcctatcgccgtttggctcgtaaatatcaccccgacgtcagcaaagaacccgatgccgaagcaaaattcaaagatctcgccgaagcatgggaagttctcaaagacgatcagcgtcgcgccgaatatgatcaactttggcagcaccgcaacgatccgcagttcaaccgccagcagcacgctcacgaacaaagctacagccagcaggacttcgacgatatcttctcctcgatgttcggccagcaggcgcatcacgcccgccgccagcgcgccgagcgcggccacgatgtcgaaatcgaagtggcggtgttcctcgaagaaaccctcaccgaacagactcgtaccatcagctacaagctgccggtctataacgtcttcggcatggttgagagtgaaacaccgaaaaccctgaatgtgaaaattccggcgggggtcagcgatggccagcgtattcgcctgaaaggccaggggacgccgggcgaaaacggcggcccgaatggcgatctgtggctggtgattcatatcgcgccgcatccgctgttcgacatcaacggtcataacctggagatcgtactgccgctggcgccgtgggaagccgcgctgggggcgaaagtcaccataccgacgttaaaagagagcattctgctgacaattccagcgggtagtcaggcgggacaacggctgcgtatcaagggcaaagggttggtgagcaaaacccacaccggcgatttattcgccgtcatcaaaatcgttatgccgccaaaaccagatgaaaaagcgcgtgagctctggcagcagctcgccgaaagcgaagccagcttcgatccgcgtaagacatgggggaaagcctga

SEQ ID NO: 105633 - DNA, 306 bp, Enterobacter aerogenes
atggctaaagtaacagtgacgtttaccatcaccgagttgtgcctgcgcaccggggtgtcggaagaggagctgacggaaatcgtcggcttagggatgattgagccgcaccagccgcaggctgaaacctggctgtttgacgacagcgcggtgacgattgtgcatcgcgcagtgcgcctgcgtaacgagctggagctggactggccggggattgcggtggcgttgacgctgctggatgaaaatgcgcgactcacccgcgaaaatcgactactgcagcagcgtctggcccgctttttgacccatagctaa

SEQ ID NO: 105634 - DNA, 513 bp, Enterobacter aerogenes; identical to SEQ ID NO: 31756

SEQ ID NO: 105635 - DNA, 801 bp, Enterobacter aerogenes
atgtcagaatctgataatttaactcgtagcttactcggtaaacttttccgcactgagatttcgcttattcgtagttaccgtgcatttttaatgttattgcctgtgcatggatcttctgcatatcaaactgggactcctcttctccagcgtcgcctatttgggaaaggatttagtacagccgctgatttagcttttgaagtggaaacacgtccaggtagttttttggttccgcgtacactcggaaaggaaattacatgggagaggtttttttctgcggtcttggacggtgattccaatgtaattcgtgaatatgatacaaatgatattgactatggtatttacgatgccggtgaaaaagtgacttttctgaatggtacagtggatatctataatcccaagaagattcatgagttgcgttctaaatgtgttgatatacagaatgactactttatgcaggtgttctttatctcaatgctcgcaccagagtttgtaagtattttctttggtttaaaaccaactacagctgatgctattaaagacattggttattcatcgttaaaaacaattaacgatgtcgttcttttcccacgtacaattgctttctcacaagggcatattgaagagagtgtttcacttaaaacgaaagtttttgcctgggcttatgaattgtctgctgacatccggttaggaaaagttagtgatgatttgatggaactattacgttatgacactatgttcaccagtcaccgtcaggatgtgttcaacactttaacaaataaagttatgttaaaggattattga

SEQ ID NO: 105636 - DNA, 486 bp, Enterobacter aerogenes
atgagtaattcaaatcttataagttctatagagctaacacgtaaaaatttacgtgctcagattgaaggtttgcgtgttgaggctgaagatctcattacaaaatactggatcaagtggaaggaacgaaaccaccaagagattaaccttacccgacatagcaaagttccaaagagggagtacctgggttcttacgcaccaaaagttgagctaattggtaatgccagaaaagtaacgatcacttggcatcagttcagcccttataaaacaagagcgcctagccacatgtcaaaacgggtgcaaccaatgaaaagtggaaaatattctaagaactgttttgtaaaccatgccagctgggaatacgaaatgatttctgaaacggaagcattgctggagccttacagagaaatgcttgagctctatcattcagcatatatcgaacttggacgaaaaatccgtcaatactcaaaaactaaggtggcacaatga

SEQ ID NO: 105637 - DNA, 738 bp, Enterobacter aerogenes
atgaacgacgcaattatcacggacaatgagcgtattaacattgaaccaaaagatgtaatggtaaaaggttcaaataaaaagcaaggcgtaaacgctcaaacttctactcaacgtagaccagagcaccagggtatggccaaagttattattaaccccggcaccccagactttaaccggtttttaactgccagaaatggagcagtcatcagaggttttgatgatgtgagtatcgctatttcctctctctttaaaacggttgatgcagttaaacatcctgaccttgttcaggctattcaggattggttcaacgagctgcatgaagaaaacaataagatgaaagaaaatcttgttgcttatattaagtcaattgagttcgacaagaatgactcattcatgtcatcaactcagtttgtacctttcagttttgaaccagtacaactcaacttcaataaccacaacaccatgaggttttacaagtacatcttcgagatgaaccagctcatgaacacaatgtatgagtacaactcattgggtttactggctgtaagcgactatccggttatgtctcacaacattataaagagtattaatttatatgttgagaatgtgaaaaagactctgaatgtttctcgccgtaaggatgggccatacagtccagcagagttcatcaccaaagtaatgcaatataaaagtgtgcaggcatacattgcagccgaaatgtcaggcaaacgtcgataa

SEQ ID NO: 105638 - DNA, 3147 bp, Enterobacter aerogenes
atgaatttcagggcgctgtatttatgtattaaacggattttggggatattctcatctcaggagaatgatgcaacctctgtaatgattgaggatatatcaagcctctctccttttgcgcagattctaggagatcagaagtacactgttcctgatcatccaaatccagaagtcctgaaattcatcgagtatccaactcgtccgacgggcatacagacatttaatgaacagtcaatcctgtctctgtatcgggaaaagctgcactcaatttcaatgatgttagctatcagcgatagcgacatcagggacgatgcatatacatttactaatttagttttaaagcccttggttgaatatgttcgctggatacatcttttgccagcttccgaaaatcatcatcataatggtattggtgggttactttctcacagcctggaagtggccatactctctttaaaaaatgcgcatcactcagaactgagaccaatcggatatcaagatgaagaagtagtccgtagaaaagtatatctctatgctgcgtttatctgtggtttagtccatgatgccggaaaggtttacgatctcgacattgtaagcctgaatttagctagtccgatcatttggacgccaagctcacaaagtcttcttgactgggcacgtgaaaatgacgtggttgaatacgaaatccactggcgaaagcgtattcataatcaacataatatctggtccagcgttttccttgagcgaatcctaaacccggtatgtcttgcatttttggatcgggtaaataaagaacgtgtttattcaaaaatgatcaccgccctaaacgtttatactgatgggaatgactttttgtctaaatgcgtgaggaccgctgatttctattctactggtacagaccttaatgttttacgtgaccctatcatgggtctgcgttctaatgatgcagcagcaagggccattagtaccatcaagcacaactttaccagtatcaatatcaacaattacaatgctaagcctatgcacatcattatcgtaaatggtgaggtataccttaacgagaacgcattccttgattttgttctcaatgatttcgaattacataaatataacttccctcagggagaggctggtaagaccgtattggtagaatccctagttcaacgtggttacgtcgagccctatgatgatgagcgtgtcgttcactacttcattccgggtatctattcggaaaacgaaatatcaaacatctttagaaatgggatagggaaactagaattctataaccttcttaagctaaggtggattggtttaatctttgattcctataaaatccctgactcagtgccgggtctttttagcgttaatgccaataaagactttatttacattgacgagcaaaaaacagttactgaatacagaagaccagtgcccggtcgggacgttataactaaaattactgatactgttgagacggctgttcttaaggttaatgatttaggccgctcctctgcctctattgatgttgatatacattctaagaaaaatgaaggctcatccgacgattttgagaagaaagccgaaagtgataatgaaattgataatgacacgcagatagttaaatctgagggtgaggaagcagctgatcctgtcattcctgatatagaagaaagtgaagatgaatcggcaaaggacacggaatcccatgtcctggtcaaccaacttcatgaactccttttaagcgctccactttccaatgactatatagtgtgtgttgatgctgtcccctacctcaacatagataccactatggcattgctgccgggattagatgaaaaagcattcagtgaagagccctatttccaactgacattcagagaaggctctctcgatggaatgtggatagtaagggacattgacgatctgcgtttagtccagctcggcgataactgcgccgggttccagctcacctatcatgagccaagaaggccaacaactttaaagtcacttttcaatacttctatgtatcaggcattagtgattaatgatgagtcttctgttgaaaactctgccccacgtccaaagcaaacgcttgagctgcctcccccacgtgtaaatgcagtcgaagaacattctggcgacgtggaatatcatggaaccgatagtgcatccgcgactggtccgctgaaaactgaggctgtggaatatgaacattatcaacatctttttgagaaagaagatgaagagcatgagatcattgattataccgatttctcacagcttagtgtttctcggccagaagtcggtagttgtgcaacaagctcttcggtccataatgaaaagcttctctccgagccgtcagaattaccagaacttaaccgagaacagaacgctgatccccagggtacgaatgaacgctctatggatgtttctgtaggacaagaaaactcagaaccagatactgagggtaactgcccaccaccagctgaagttgtgtattcccagaccgaagcagccgcaaccagtgtgatggcaagtgaagagcccgccttacctcctgtacttgaagaatcaaatggagagcatgcgcccacagacgctaaggggcatcatctttcgccagcactggccagactgttcgccccaacagcaccggtagaaaaacaaaatcccaagcgcaaccggaataaatcatcggacaaagcagaagtacaaaaaccagcatcacctgtttctggtcacaatctgaacagtaaagtctttgcatctactgaatcagaccaaaatggtgaattctcgcttataagcgaaggtgacgttacagagcttgaatttgtagaaattgcgttagtactgcatcaaattctgtccaaaatggaggtggcgtttaaaagaaagcgcaaaaacagatttatggtaagtactcctaatactctctatctgacccaatcttgcgtggaaaaatttgggtcgcagttagaggctcaagatcttttcaataagcttcctcagtacctcgttaattctggtgctgtgatcaatacaaaatgccatgcatttaacatgcctactttgctggccgcatcagaccgggcgaaagtggacattgaacgaattatcaataacctgaaagaggctgggaacctataa

SEQ ID NO: 105639 - DNA, 2085 bp, Enterobacter aerogenes
atgtcagattcgaagaggactaacctccatgcacaagagaatttttatcggcctattcttgagtatcgtagtgcctcaatacttttgatttgttcggtttctatgctttatatgggactttcttcagacggactggacatcgccccaatagttctgttcacctcaatattgctttttttgctgtgcctttatcgttgcaaaacagcagcgccatttttgatggctcattggcgtgtattcaagcgacatttcatgttcgttagtcttgattcactgcgtgtaattaacaaaagtaactttttctccaatgagcgaaagtatcgtcaactggttcaggattatcaaaataaaaataaggatatacccgagcgaaagtcctatttttgtgatgggtttgagtggggtccggaacatgcggatcgggcatatcaaatagctaacctctccagtgataaacgtgagatcgagttgccattcgtcttcaacccaattaagagacattttgacgcaatggctcgtaagatgggcggcagcaatgcaatttttgctgtggaacgtagggaacccatatttgtaactgaagacaattggtttggtcatactctgataaccggaaacgtgggtaccgggaaaacggtgctacagcgtttactaagcattagcatgcttcatcttggtcatgttgttgttgtcatagatccaaagaacgatgcagagtggcgagaatctctaatggaagaggctaagaccctcggtcttcctttctataaatttcatcctggccagccagcatcttcggtctgtattgatgtctgcaacacctatactaatgtttctgacctaacatctcgtcttttgagcttggtgacagttcccggtgaggttaacccattcgttcagtatgccaaggctctcgtttccaatgtgatttccgggctttcttacatagagaaaaagccttctatttatctgattcacaagaacatgaaaagccacatgtctattgtgaatcttacagtcaaggtaatggagtcatgttacgcgagatattatggttacgatgtctggaccgaaaaagttaagtacgtcgctaacgataccttgccggtacgtttcaagcgtctcgctgaatggtttacggctcatttcatgaattacgaggggtccgaacaaatagactggttagatactgtttcccagcttattgattactcaatgtccgacccagagcatatggctaaaatgaccgcaggtattatgcctgttttcgatatgctcattgaaaaacctttaaatgagcttttatctcctaacccgaactcagtatcatcaagagaaattgtaacaagcgaagggatgttcagcactggcggggtgctatacatttcgcttgatggcctttcaaaccccgatacagcagctgctatttctcaattaataatgtcagatctgacctcctgtgccggtagtcgctacaacgctcaagatggtgatatgtcagctaattccaggataagtatttttgttgatgaggcacactcagccattaacaaccctatgattaaccttctggcgcagggtcgtgcagcgaaaattgcactgtttatttgcacccaaaccatctccgactttattgctgcggcaagtgttgaaactgccaatcgaattacggggctctgcaacaattatataagcttgcgagtcaacgatactcctactcagacgcttgttgtagagaactttggtaagagtgcgataagcacaaatatggtcacttatacgaccggttcagaaacatctttgccgcataataacttctcaggttcaatctcagaaagaaagcagacaactttagaagagagtattccaaaggatctcttgggtcaggtccctatgtttcacatagttgccaggcttcaagatggcaggaaggttgtaggccaaatccctattgctgttgctgagaaacaaatgaagccaaacacaactctgtcggaaatgcttttcaagaaggccggaaaagttactttgcgtcaaaatctcgatatcaaaaatcttaataaatttctaaggaagttgcattga

SEQ ID NO: 105640 - DNA, 1110 bp, Enterobacter aerogenes
atggatgaaaaaattgtcctgacgcgccagcaaattttaagctctgcactaaaagtcagcaaatgtcgctcgctcgtaaaaaggcgctttcagtctttgggtttaaagtacgcagattctcaggaagttcgagatcggctaactatgatagaaaaaaacgcgtttcatcatttgggaaaattttgtcagagcaacgatatcgattccctattctccatggcaaataccctgtctgagcttttccttttaaagggagagttgatcacgactgatccctttggggaccgtgaaaccagctactggtcggtaccacaaggatcatgccatgaatggattcaatcactgaccaccagcgaaggtcctgaacgtaaattcgttagtttccgtatttctttcgataacaatgacgtacggtgtgatcttgtaaaaaagaatgcccgtatgcttggttgttatcttttgccttatttcgtcgatttaacacgcacggtgggcgcattcattaatttgccaggtagtgtctcttttaaacaagtacagcgcatcaaaccccagattcatccagaaacaacacatagtcatatagttactattgaggactctccctttctttctcggttaaaatttaaaatcattactgccatagatcagcttcctgaccctaatggcctttatacaaacacctttaacagcattattgaccgtgcactgctgactcatctcaaaaccgaacaggaaaaaatagatagtccaagagtctgcaaaaatgtgatttcggcttttgccgactcaactctttctctgccggtgtttaacatcggcctaaacgagcagtacagatactggacgccgtggggcatcaactttatagaattttcccgccaggccgcaaaagcaaggaccgctgtatttgttcctgatgtgggacagatcgagtggaaaagcgcagagcataaagaactggcggagttaagcctcatcgaccaaatcatacctaaacagtaccactggctcctgggtatcccgacgatgtggcgtaacaactattgcaatcacgatcagaggctagctctttttcgtgaatggagggaaagcaatggctgcggataa

SEQ ID NO: 105641 - DNA, 663 bp, Enterobacter aerogenes
atggctgcggataatacaagcagggcagcagtgctcagaacaatgcttttttttggcatggtcatttattttggttacagcttggctttccagaatactgaggagctcaaatatcagattactcaggaggttaatgcaagccggtccatcatatcaaatgaccgttggaagtctgtcattgcaaatagtgaagcgactttaaattggttggtacatgactataagttaattgactatctgaatactattctgatccctgacaccaaaaaaccagccagaggtattaacattgttgctgaaaaatttacctctattaattacactatggccaaaaacatacccctcttactttatcagtccattttccggtggaacttaatcctggggtggctaatcgtttttctgccctatctatttgccatgctagcagatggaatgtaccagtggaaattgaagaggtacgtatttggtaaggttacagttcagttttatcgtatttggtttcgagcattttgggtgatcagtgctttaacgatggtctacctggtcatgccaaatatgtcactatttaacaatatcgctcaacttttcccaccagtcgctttattgatactgggaattgcattgaatcgcttgtggtctaactttcaaaaactcatgtaa

SEQ ID NO: 105642 - DNA, 1182 bp, Enterobacter aerogenes
atgttaagcagtaaaaaaaggaagtcccctacaaatatcaaagaatcgctcaatgataacgctgaccgtttttataagatgtttcgcattcataccacggcaaaagttgctatgtcgctaattgccatgaccgctgtagggttttctttctacaatctttacgaacaatggcaggacgctgaagggaagaaagaccatatagctgtaatacggatttctggcgagatgggtaccggctcggaaacgggcgatggaacagtgatcgcaacagctcttgccaaagcttacaataatccccatgccaaagcagttattatcgaggcagagtcaggtggtggtggtccctctgacgccatcattatttaccgccagataaacgcgcttaaaaaccaccagccacagattgaacgcgtatcagatgccggtggctctctttcatctgtagccgctgacaagagtaacaaaaccgggagcacagaacgtggcgatgaagcacggtcgaagcaaaactccctcgaagtactctccagcggtaccggtcgttttttctctgatatcgcagactcatataaaccaatcatcgttagtgtgaaaggcatatgcgcatccgcatgctattacgcggtatcgcccgctgatgcaatttatgccgacagtaatgccctgatcggttctatcggtgtgcgtatggaccactggaatctgtcagagatcatgagcacagtaggcgtcaagaatgagccccttacggccggtgagttcaaagatgctcttgaccccttccacccattgtccgattcaacgagggagttcatgcagaaggagatcctgaacacgatgcatgaaaaatttataactgatgttgaacttggacggggtaaaaagcttctctcgcgtcatgatgccgatgctgtttctctctattcaggccgtgtatggccaacacctcaggcagttaagtacggcctggtggatggagatcttacgtcagtagagatccgtacacgtctttcaaaaatgtactccactgacacgttcaaaaactacaatgagcctcatcgtaatctccgttctgcactcggcatgctgatgagcctgtcttcaaatattgagagccttaccggtaccactacccgcttagtagaatctgttaatgccaccagctacccctctgtgaggtaa

SEQ ID NO: 105643 - DNA, 732 bp, Enterobacter aerogenes
atggatgctttcaatctgctgtggagcattacgggggtagctttcattatccttattttcgtcgtgttgctgtgtctgttgggatttatgacctctgccatagcggaacggcggactgcaaaggcaattgaatctgggcttcctgaagaagctcaggggctacttagtgatctcacctttcagttgtcggctcatagcactacgcaggttgatcacattctcgtagccccacatggtatatacgtcatagagcagaaaaactacgtaggcaagctctacggtactctggaggaaagccactggcggaaatggactcagtcccgaaccctcaagttgcagaacccgtttaagcaaaaccaggggcacatcagggctattcagtctgctcttaaggctagagaactggaatgtatcaatgtcgtcatcataaacggacgttgtaagtttgatggcatcaagccggaatggttatgtatggggatggacgattttatccataaagtcaaacaacgacgagggctacggttgttcacaccggagtctgttcagcacatctgttcggtgttgaagtcaacaaggaagtcgccagggctctatacggaccttactcatattcataacataacgacaaagtacaaagccccgatgaaattcgagcaacgagtaacatacattctgctcaactttatccattatctgtgggcaagtctgttcactaagcagaagccttag

SEQ ID NO: 105644 - DNA, 123 bp, Enterobacter aerogenes; identical to SEQ ID NO: 31757

SEQ ID NO: 105645 - DNA, 354 bp, Enterobacter aerogenes; identical to SEQ ID NO: 26525

SEQ ID NO: 105646 - DNA, 285 bp, Enterobacter aerogenes
atgaatacatttttatacgtgcttttggcctggattgttgtgctttttatcgccaacaaactgctcgcaagacgtaagcccaatacggttaaaatcctggtacagcgcaacgggaaagccgcagaggttgatgctgtagtggttcagggttcaaagagagctaacaacagttctgttgcggacagcgacgcggtagatagttattttgaaatgaatccttactcccgcgaaaaccaggcgaatggttgggctatgctggccagagacgatgaccagcttaaataa

SEQ ID NO: 105647 - DNA, 369 bp, Enterobacter aerogenes; identical to SEQ ID NO: 31758

SEQ ID NO: 105648 - DNA, 537 bp, Enterobacter aerogenes
atgaaaaacgtaaatattttggataccgatattgcggccattaatgctctttctggcgtagaactgactgactttctcactgccgggtatcaggtaaactggttaggagaaagggaggtttcgctggtgggctttccgtgtttagcaagcaacaagcagccggtagaagttggtcccggcattttcattaatcgcgtgtacagcagagacagccagtctctgagcgggaaattgcgctatgacctgtctaatggtctggcaacgagtgcattttcatttttctcccagtcaggctggtatgggggattccgtgtcgtatctttccgtgacaacgggccagctgcgttaatcaacattggtattgtccatgagaatgttttgaatgcattttgtgctgacttcccccgggccaatgtgagcgtaacccgttttcattgtggcatgacgcttgagcagatccgaatgttcatttcagacactgcttacgatatgccgctttataacaacgagtctgactttcgcaggctcgccagttag

SEQ ID NO: 105649 - DNA, 438 bp, Enterobacter aerogenes
atgtacagaaacgacagaaacgtggattccttcaacctggttaatgctcttcagccggtctttcgtaacaccggctgtgggatgtttgaatatgatcgtaaaaagcagaatgaaaccgctgattcaatcttacgagcgttggcgttaaatgccgatttcgcgagggccttaaaacagtacgtccggattaattctgtacgacgggttgttcagttcgatgacggctcggttcgctatggtattcatgccgaatttgaagggcataataaaattaattccttccgtatttttaaagatgaagatacagacgcatttgactcctatttttattcggtttgcgataataaagctgagctggtggattttaaaatggactctctcgatattcaattgcaggcagtttttgaaaaggtgacaggtatttttctgtcacattaa

SEQ ID NO: 105650 - DNA, 297 bp, Enterobacter aerogenes; identical to SEQ ID NO: 31759

SEQ ID NO: 105651 - DNA, 702 bp, Enterobacter aerogenes
atggtaattacttattcattatcggaaacgtttaatatgtttttacgcgagattattgcatctggacttgcagttttttgcgcatggtgcgttttgtgtcttttctctgatcaggaacgaggtaaagaggttcctgtttctatgaaaaaaataacttcaaagtcagctttctcctactttatcagttctcaaattgccgcttttattatctccttgttgggttcaatcttaagcacgaaatgggacaacatcgtctggaatgatgaaataagacagttttatctgcatgtaggatttgggctggtagcttgtgtattctgtctgcttgtaatcttgcatgagaaatttatcaaaagaaatttaaatgtttattctggttattgtggttcactggcagttagtctcacaggaatctttgtactttgtgcgttatatctgacattttcattaccatttcattatgaagaacgtctacttaatgatgcatccttggtggcttcggatggcgttgaaaattcagtcgtttttgcagacggtcgttactgggtttttgaactgggcttaccatatttcaaacagtcattgctcaaagaggtaagaaggggcaggtaccagctaatctgcactacagaaaaaaaaacaacatgctggtctggcaaaaaacttcccgaaaaaccaacctctttgaaagctagttcataa

SEQ ID NO: 105652 - DNA, 282 bp, Enterobacter aerogenes
atgaagaaggcttttatcaacgtagacaagactaacccactgccagtcctgacggattcggtgacccgggtaagtattcagtgcacggcaaaagatgaaaacggggcagggatcgaagtgaacatcctcgacctgattcaggatcatgatacggatgaagtgaaagtgcagtttgggagctcgcctgttcaggctctggcgatgctccgccgggttatgacagcactggaaaagcaggcaaatgcagaactgcaacagaattcctgctcgcgtatgcagtaa

SEQ ID NO: 105653 - DNA, 1185 bp, Enterobacter aerogenes
atgtccgcaatcgaaactgaagtaaaaaacaacagcaacgaaatcagccttcgtggttacctggaacgcactggtaacggtgcccgtaaaggtaacggccttatcattgacccttcggttgttgtagagcaggaaggctttaacacccgcacggccggtatgggcgagctctactattcaatgcctcacgttgtggaacacctgaacagcctggccgatgcctacatggaagacccgttcagcgtgacgcctatcgttgttcagatggttaatggcgtacctgtactgcgtcagggggcttgccgtatccgttccatcgctattgcaaaccgccagctggaagcagaagggcgtgaacgcattactcgtattcgctgcgaagagtttcgcggtagcgcttcaaaagcagaactcttcaccctgaccggcaactccaacctggcgctgtctgtcgtagctgaagcgctttcaattaagcgtcttgttgaagataaagaagagcctaagacctttgcggaactggcaaaaaaacgtggtaaatcagagcagcatcttcgccagatggttcgcgtactggacctgccttctgaactacagaccatgcttgtgagcgatcaggtgagcatgtacgttgcgctggacgagtatatgtacagcggtgaggatgcggtagataacatcaacaaggcgatctccatctatggtaaagcgacgaaaaacacgctgaaattcgtcaaagctgccaaggtagaagagcgcatggcagatccgcagactccggaaaactccggtgatgagcaaccggcaggtaatgctaccgttaacaccccggtaccggatcaactgaatgatgaaagcaatacagagacgctggttacgccaccggtacaggaaccagctccggctccaaaggacagcgctcctaaacagaacccggcaggtaaagcaccatccatgtccagcgttctgaacaaaaagaccgtgaccgtcattgccgacaccgcgatcccgatttttgaacgtattgctgaagaagccaagcttaaagaaggtgaatctgtcagcactgatacttacacgcttgttctgaccaatgatgaaatgaacgatatcatcaatgctcatgctgacctgaaagagtacctgcgtaagcatgctgagaagatgaataagggacaggcatga

SEQ ID NO: 105654 - DNA, 177 bp, Enterobacter aerogenes; identical to SEQ ID NO: 26516

SEQ ID NO: 105655 - DNA, 945 bp, Enterobacter aerogenes
atgaaactttcccgtcagacgacttctgatacttctgttgatggccgttcacgcgcatatgcctggggccgtgtccattatttcattatcgaacatgcaccaatggctgagctggtcgctattgacgagctgctggaaaaagctggctggagcaatgacggctgtccgaactatgagaaagatgacgagtttggtaatgctggttacagctgtggttactggatcgatattgacagcgtgggaagcttcaaggctgactacaaacgtcttaagggtgagattagtgcgcatatcgcctcaaaggcggcagaggtggagatccgcgtactggactcgatgtccgacaaagaatgtaaagatgttgcctcggtggcatgtactgttcgccgtgacttacgtacgcagtccgaatcgcttcattcactgcgtactatcgtaacggttgatcattacaatccctatgtgatcaccagccgcccgctgagcatttccgcctggacacttatccacgactgtctgaaaaccggcaccatcaatgacgtctgttcacggttgagttcattaatcctgcactctgaagccgcgattgcccgttgtaagggaagctccgactactcttcggaacacgctcagctatcgttttttgctggtaacgactatgtcaccagacgcacccttgttgatgcagctcacgaagaggctctgcgaatgaaccgccgctttgatgaacgtattgcaatgaacgcggattctgatgccagaaggctccagtgcgaattcaacctgagcaaccatgtcgtacagcgtcggaccgttgaatctgctcatatccaggcaatcaacgaagacgtcacccgttcacaggcggaaccacgctgccctggaaagcttcttctgaaaatgaccagtcatgaggaagtgcgggactcactgagcacctgttag

SEQ ID NO: 105656 - DNA, 603 bp, Enterobacter aerogenes
atgatgaataaagaacaactaatcgacaaactggaacgcgtggtatgtggtcagtactcctacgaaatgcaggagcttgcgtattcggccctctgctgcattaaaggcaccccggacgactgcgctaagttccctgttacgcgtccgctgcctgacaccttagtggacgtatgggacgagatcgggcaataccttggcacaggcaaagccattgaaactcgcagttgcggcgtttcgcttctgcttcatggacactgctacgattcaaatcatgtgctgtactggcgcaatgctggcgcacttccagcagcttgcgatacgccactggctggtgggtctcgcaaactgttcacctgctcagcctgtggagtggacggtctggatgaaccacctgaaaccagttgccactgctgcacagagggggcccactggattgagagcaggctcttcacctccgggcaggcagaccctgaagaatttagacccgtggcggtcgtgaaagagtgtgcaggctcaacgccggatgatcggctcatctggagcgtgattgaacagctcaacggcgaactggcggaaggcgataaactatttaagcaacgctga

SEQ ID NO: 105657 - DNA, 357 bp, Enterobacter aerogenes
atgaacatgaaaaagcccaaagctgcattacagaatgccatgaaagaagatgtgccagctgtgacacagattcagatgcgatctacggtttccagaaaggttcgctatgtaaaacaggcaaatcgagagggtctgaaattatctgagtggatgtcgcggcatctcgacgctgtctgtgataccgcagatgagattcataaaggcaaacgctcaactccggttgcgcctgggaagattccccctgaggtataccaggtgatatacgatcagtgcggcgggttcgtggagtgtgatgctaatgcccaggtaatctgggaagcctgccgtgatgccattcttaacggagacaaagggtaa

SEQ ID NO: 105658 - DNA, 204 bp, Enterobacter aerogenes
atgaaccatgagagccgaactgtatacctgaacacggccattgaggccctgttgaaagctgaggcggctctgaacgagctggcattagcctatgtactcaaaccaggtgaaaaggcaagcgcatgccatccccgaaccggtacgctttccacagcttcccaggtaagaaaacttcgccgtgttctagaaaaaaacaagttatga

SEQ ID NO: 105659 - DNA, 321 bp, Enterobacter aerogenes; identical to SEQ ID NO: 31761

SEQ ID NO: 105660 - DNA, 159 bp, Enterobacter aerogenes
atgaaaatgccgaaccaacccattgttttgtgcatattaatagtttgtttaacgctgttgatattcacctggctcacacgaaactcgctttgcgagttgcggatgaaagacggaacaagggaggtatctgctatcctggcctacgaatccggtaagtag

SEQ ID NO: 105661 - DNA, 606 bp, Enterobacter aerogenes
atgactgaattaaataaaagcccgtccggtttttccggagctgatgtcagtaaagaacaggctgccataagggcacttgtagaaagagtagtgaccaactatcgcagccggacagcacctgatcgggttcaaaaggcttcggtagcgtttaatgggggattaatcctgaccctgatgctggccttgacgctattgggctaccttgtggcggaattgctcagggggtatgttgcggatagttcaccctatgtgcccggtctaagttattcgcaattttcgatgcttatggtcgttgagctgtgtctatgctttcttgcatggtttttggttgtcacaggggactatccccggccgtggatatttcaggtagtcccgatggagcagtactggttctttgacgaagtggatgacgacgatcttgcccggctttcctgtaacccttacatcaagcgctggctacttgatgaaatgtccggtattcatcgactgacctacacgaggctgcatgatcgactggagcgcatctgtaatattgcatcccatctcgaatacagccgtattcaggcacataagatttccctaatcaacggaagcagtgcctcctga

SEQ ID NO: 105662 - DNA, 282 bp, Enterobacter aerogenes; identical to SEQ ID NO: 31769

SEQ ID NO: 105663 - DNA, 177 bp, Enterobacter aerogenes
atgaaaccatttggacttgccggaaaaccccggcccgaaccttgcggctgctgctggtatacccgtgaggactgcccttacgtcagcgcaaaacagatctatcgccgcaggcagcgcaaggcagaacgccagcgtcagcgcagcaccattgtgatggccgtttctgaatttcgctga

SEQ ID NO: 105664 - DNA, 312 bp, Enterobacter aerogenes
atgatcacatctctaatgaatttccgcgatttaaccggagaggcagtcatccaggcgcggcaatgcgttattaatgctgagatcgaagcggcccgggaaaaggtaattcatgctcgttcgttattcaaagcgggtatacataatgttgtaaacggtagttctggcattaaggctgcggcagcacattttctggtgataaaacgtttacagactgacactcggtatctggacgcggttatcactgataacctttgcatgttttctcctgagggttatctgtatctgtttatgcaacaacgttatttcctataa

SEQ ID NO: 105665 - DNA, 201 bp, Enterobacter aerogenes
atgaaacaaacaaagtcttctatgtcacgtattgtgcagctgtacgacgggagccgatacggaaactgcgagcaggctgataacgaaggagagctttttacggtggtgttgaataagccttcgcagatcgatgacatccgtaaaatcgtagacacaaccgccgaagtacttggcaaagctttgccagtactcctcttttaa

SEQ ID NO: 105666 - DNA, 225 bp, Enterobacter aerogenes
atgcataaccacgaaattcagaccattgctatatttagtgcccagtataaaaacatcgaagatgctgaaaatgcaggtgctttatattcagtagatattgaatatccgatgacactaaatgatttatcgcggctttgcgactctattgccgaagcagtaggtgtgcctggcggcgtcaaataccagttcgtgtcccagccggaagcgcatgaaaccagcttctga

SEQ ID NO: 105667 - DNA, 204 bp, Enterobacter aerogenes
atgaaaatgttttttaccccttatgttcgtatcgttttctatttttgcgcattgatttttattgtttacagtttcagtgattttttccagggcgtccctgacagcaccttcttcagtgcggtcatcacgctacttgttatcggaaccattgttgcccggcatctggatcgcaaaaaatctctcaaatatacttcacagatttaa

SEQ ID NO: 105668 - DNA, 492 bp, Enterobacter aerogenes
gtgaccactctcgtatttgaaatggcagatatcaataaactgatcgaagaaattcgcaccgcaaaaacgttttcggtcaccccagatcagatctatgacccggcatgctatccggggggagccctccttaacgctgagggacagactgaagaagaggcgcgtaaagctggtagggttttctttccctcatcctcaaaaattgccagcacacatctggtgccaaaagtgcttctcgcgcacagtcatggtgtatacctgatcactaatgctgagcttgagggctctcccgcatcccgcgatactgtggcttacgcccaggggatgaatccaaaactggatgaggactgggattacgcttgtgatgccgctttgggtgggtctgattgtagctataccattcccgttgagtggctggagttagcggtagagcagggttttcaggagtttcgacttcgaatgagtgaaaccaatatcaaacttgtcagcaaatag

SEQ ID NO: 105669 - DNA, 312 bp, Enterobacter aerogenes
atgcaaattgaaaaggtgatgtcattacttgaagtgctttcaagctggcttgaagataacatcaatatggattctgaaattatctttgataatgacgaagataataccaactcagaaattctgtatcctgctgtagaaaaggctaatgccgttttgcgcaaaatggcatctttatcttcagattctgttcatgcaattcgacagcgcttgcagcttgccgtagaaggcaaagctgaattgtccctcaaggatgtgggagagcttctgctggcaacaaagtatctgatgttgtccactgaagagggagagtaa

SEQ ID NO: 105670 - DNA, 321 bp, Enterobacter aerogenes; identical to SEQ ID NO: 31768

SEQ ID NO: 105671 - DNA, 228 bp, Enterobacter aerogenes
atgtgtaactttactcctgttcaaattattgctgattatatactgaggtttcttaaaaataatactgatgccaagctttatgaggcaatgcagcgtcttgaaaagaaaattggtcagtttgtcgctgatggggttgatgaacatcaattacgctcttcattaagcaaagtctgtcgatctcgttccagggcggctcttaaagaggagtgtgaacaactcattccataa

SEQ ID NO: 105672 - DNA, 891 bp, Enterobacter aerogenes
gtgcgtaaccttaagagtagtgacgatttttcccgtgaactgtcatttctttttcaccggtctataaagattagaaattcaggtttcgcgatatttggtgcgggcctgctgataatgatttttggtctttgcttgtggttgctgtcattacacctctcaccttcagttctggactttgatattgatgtgcccttgtcattcttcaattcatctgaaggtgaagataagttagtggtttcggattttggcgatgcatttggaggcttcctaactacatattctaagttgctattagggattatggggctattagtagtttcttcaactgcctttaaaattttaaagggggaggaaataggtgagatattcccgatgcttctaattgctggcgcttttcttatcggcttgtcagtttttacatctgctttaggttcggaagagactgatgccacttcagcttcgactgtaaaggttatcaagaaatatgtaaaacatgaaaaatacgataaacttgtcgcatatttaaatgatagtaattggccctcaggcgaagaggtatctgtaaactatttaaaggcgcaactacatataaaactcggcaagccagatgtgaagttaacacagaatgttgttagggcgtatatgtctggtgtattacagtcaaatattcccgtgaaagttcgttatgcattggaaaagacagctttagataaatccgtctcaccacttgcgattcgttatgagcaaaaacgtatgtctaaatcacataccttttcaaaagcgtcggttaattgtcttaaagtaggtagtcccgtcgcattcgttggcgttttgttcgctcttcttggtataaaaatcaggcggcgagtcagattcttagaatcaaattga

SEQ ID NO: 105673 - DNA, 219 bp, Enterobacter aerogenes
atgatctacccctttttgtgtcagtcgggtgcgcaaattctcacgcatggcaagaacctgtttttctgtttccctgagcttaatagccccttctctctggattttaacaacatcgccaaccgtctggataagcgtatcctgcacctctttaagggtgcttatatcaataaccagccgttggtttgctttcatagtttctactgcattgcgatgcagtaa

SEQ ID NO: 105674 - DNA, 327 bp, Enterobacter aerogenes
atggaagatttagagacgattatcatggagctgctggtcaacgccggctccgcacgcagttctgccctcaccgccctgcagcaggcgcgtaaaggcgattttgccgccgccgaacaggctatggccgactcccacgaattcgtgaagcatgcgcataaaatccagacccagcttattggcctggacgaaggcagcggcaagctgccggtgaacctgattaccgtgcattcccaggatcatctaatgaacgcgatggtgattcaggatttagcaaccgatatgatcgaactgtatcgccgcctgccgcccgcacaacaatcccgctga

SEQ ID NO: 105675 - DNA, 2655 bp, Enterobacter aerogenes
atggcgaataagttaaaacagatcattaccccggttgaggtttcagccgtgatgaatttcgatgcaactgatacgcactggcagtatcaatccggtgcttccagcatggcggcgaagcaggcagagggggtggctgggttgtggaatttgctgaataaacaacgactggcactccttgctgatgaagtcggcatggggaaaacttatcaggcgatgggagtaatgttgttgttatggcaggcaaaacctgatgcacgcattctggttatggcacctaacaggacgctctgtgataactgggagagagaatttagcattttcacagagatacactatcgggctgaacataatgcctttaccactttagagggtaagacaaaatatgccccacaaatttatggcagactggcggagctggcggccgctgtggaaaaaaaatctcaccatttttaccttactactatccattcactaagcggtctggtccctccagatgaaaaaaaagatgctttaaatgctgccgcgtcttatggcgtgttatatcgtcagcagattaagcaagctcttggaaaaggagggtttgacttaattataatcgatgaggctcattactttcgtaaccgaagcggatcacagcgtgccgccgccgctcaggccttctttggtgatgcgcaggaccggctggggagcaatgtactgttgttgacggcaactccaaatcactcagcatcgcgaaatgtttatgacatatttagctacttcagtgacatgccaaaacgttatgcagaggatgatgtccgtgcgctgatgaatgattttgccatccgccgactgcgcaaaatgcagggcagagagagcagccacagcaaatatgaatatcgtcatgagcgcgctagcatttccagttttactaataagatggatgctgagttgttttttgctctatatcagaaacaactcgtggttcaactggacaaagagaaaaaggcaggtggcggcaggcgcatgctatatggctatcttgaagggtttgaatcaacgggcagtaccgcaagtgagcgggataatagtagtgatgaagaggggcaaatccataatgacttcaaccacgcgccggattctgctctgctcaatagcttgacccggcagtttcacgatatctataaccgctttccagatcatcccaaatacgacactctggtagaggcctgctttaccagtgatccgttcaagcagtctcagccgctacattgtagtaagcatttggtttttgttcgtcgaataccatctgtacgcgaaattactcagcgcatcaacgcacgttatgatgaaataatggctgagcgattgatgaatgtctggcagctacctgcaaaggcgctggcagaatggcgagagtcgggttggtcccgagatatttttgttaagcttttatcggaaaaatccaatgaaaagtccgattttgatgagcatatgctggaggacggggagacagatgagcctgaaacggataacgagctaaagctttcaagtaaaattgccgagctatttgttatgaagaaaacgggcctgcgcagtaccgactgcgccaacgttagtttgcgtttccgtcgccctgaaagcctcttttcattatttcttgagcctgcattggatggtacgaccgggacctatcattatcattaccgcaaagagtctggtgaacgtcaacgtgacagctatggtgatgccgcgagagatgcccggctgcagcagtcgacaacagctcagaaaatcaaatatatcactgctttgcccacagcctggggattgatgtttcatgagctgccgcggccagcaaaagagcaattgattaagtggcgtgaccagcctaacggtatggcaattattgagaactttgccaactatcttcgcacgggttacctgtttgccagccctgtgatcattgagctctattgctggtttacagagttcaaccgtcgacctcaaacaggtgaggtccagcagcgatatcagcattttgtagaatgggtcaccccaaaattgaatggatcactgatgctacgttattttgtggctgccattgaaactttcgaaacgctatgtgtgaaaattgttggccagaaactagataatactcaatatacttggcgcgagttcactagcttgagtagtccaagttggtatgccagcgggcagtcaaaaaatcgcgaacgtttaattcgtggatttaattcacctttcttccctaatgtgctggtagcaacctctgtgttgcaggaaggcgtgaatcttcatcttcaatgcaatcaagttcatcattatggcatcgcctggactcctggtgataacgagcagaggaatggacgggttgatcgcctctttggtcgaatcaatacaatgcttcaagtccagggggcggctgagatgattatcaattatccctaccttgcaggtaccttcgaccaggatcagttggcatcatttatacgccataaacacagtgttgaagagaagttagatagttgcgagctggaggattttgacagcgaaattgatattcaggaggatcctcaaggttggcaaaaatggctacggcatccttgtaaggataaagataaagaagatccttacccagccaagtttgatcagtag

SEQ ID NO: 105676 - DNA, 1902 bp, Enterobacter aerogenes
atgaagctgttagatgtcttcaaaaagcaaattgctgatatgggtatgttgaaacgtgtctggctcaccacctttaatctggatatctcttttgttgaaacgtgggtacttcctgctgtgttgggtatggacccgcccgttagtcgtatggattacgaaggtctgcagcgtgcgctgaatgagagtggtattgatttccgcatctactgcgatccgcgcatgattgcgaaagaaaagccgaaacgtacctccattgcggtatatccggtgtcggtgcgtaagctggctcaaagcgaagagtcttatctggataaagagcgcgggctgtttcacccaaaagtattttatctcgaagatcactacagaaagattattgtgggtgcgggcagtgccaaccttacgcttagtgggtgggggcgaaatcaagaaactgtggattttcgttgtgttgcaagtaatgcccaataccagcaggtaaaacgattttttaccacaattgataacagtctgaatgatgaagaatttttcccaacccgtcgcaagtttctcggtgatgatcctgattggtcatttattcacagtctggctggttgcacactgctagatgcattaaaaaacggcggtgagattcatacactcagtgtttggtcgccttatcttgctgaggatttagcagggtttatcgacaatattgggcatgaagtgctcgtagaactggttccggatttggttgagggacgttatatccgcactcgatggagtgacagtattcaggcaatgattacaaataaaaagcttaccgtgtatcgctctccagtgcccaaggacgatagggcattgatgacccacgccaagctctggctggcgaaaagcaataccggtacgcaacttgccgtggggtcctggaatttcaccaacccgggttgcagcagcttacctgaggcaaactggaatgtagaagcgggaattgtgcatccggtctctcgtaacatcacgatttgcggcaaagaatgggatgatgttaatgaagagaatttcgccagtgaagcattgttggaggaagaggcgctggagcctgatgaacttcaacctttcgatctgagcgttatttttgactggactcgatgtgagtatcagatttccgggcaatggttcggtggtaagcctgcgtcaggttatcaactgatattgcccggtatcaacggggcaaatgaattggtatggaaagctaccggtataggtctgaaatcgccccggcaattgacggtattaaaaagcaatgccgtattggataaccctttttatacccttcgtagaactggaataaccgactggcagggcatgatcgttgaaagcggtattgaacaccggcgtgcgttgagctttaagtcgttagatgacttacttaacagctatctgaattcagtggatcccgcattgagtgatcgccttatgctgcgctgtgctggcgcgcaggatgaagagcaaagtgaggggatggcgcaagccatgaatttagatgccactagctatttccgcctctttcaggctatccaacaacggcgcaactggctagcagacgcggacgatggcactcagctgtatcgtcgtttgttcagtgaaccaggttgcttacaggaattggctgaaatagccagggagcgtataaatcaaccgactcagctagtatttaactggtttctggcccaagaagttaacactctggccgctctggcaagaaagcgtgttaaaagcatacgtcacaaacaaggggctgaagccatatctgtggctgtgcacttgtgggagtctctacaggttgcaattccccccctaactagcgatgccactagcctacgttatctcgctgctatcatggaagactgtagttatggcgaataa

SEQ ID NO: 105677 - DNA, 1383 bp, Enterobacter aerogenes
atgtacatcgagaaatttctgactgaatacgatgactcgctaacgggtgagttgaatgtggatccgcttgggcaattagtcatctggtcgtcctgggggcaggacatctttcatagccgtattacttctatcgcaaatgatgtacggcaatatacgctgaatctgctgcatcacagcgtattgcgccagatactggtcgatgaaaagctgcaaacttcaggcgtgatgaaaggtctgtatcccaaaaagcaattacatgagtttagagttgcctgtctgatccatttggaaaatatttatatctactccatgctggcggctgaaaaaagaggtgtcactctcactggtgtgcagggtattaataaagccagatctaaatggaacgctgcaaataaaaatcctcagatattttttggtcatgagaaaagtagtgagttactgactaatcagatcgctcttggtaccaatgggcgctataaatcgccaatgatgaaaatgcattttttctctactgattatcgctatgatctgccggaaagcaagccagtgtggcaggcagcagaggcatttattcggaatgtaccagagctgaaaaaattacatgcagcggcattgacttacatgcaattgaaaatgcaggcctcacataagcgcgacctcaacccatttttcgaagatattcctgtcggcctaaaaaaggcgtatgtaaaggcattccgcgacccgaaaatggtcggggattattcgcgaatattctggctacaaagaacggggttagataaatatgcagcgggtgctatttatcgggtactcaagcaggaacgtttggacgagttagagcttacagatgctgaagttttcaaacgtgccatgcatcaggcgaaaagtatgcctgaaatgaatgaaagtgacctcagggcgttacaacatatcagtcaggcggagccatttttatccctgatcgacctgatgttttcaggcttacgccgacagagtagtcagactttggcagaatttcgtcaattctggcagtcgcgcggtcttacggaacttgatctgccacaaaaggcggctcagcttctggaaaatgatgtgctcctttcctcgctttccggtacgcccgccagacgttttcagcaactattagcactggcctgtatgccgtcgctggaagatcaggttcgaggcttgctggattatcatcacaagataatggagtcaagggggcagttcccgtggctcctgcttgaaggtgatgatattttgctgcaggtaccaccatgttcgctacgcgaagatcgtcagaatagcgactgggtaaaccgttattatctaccacagttcagacatttgctgaacggtttatgggggcattctgcatga

SEQ ID NO: 105678 - DNA, 744 bp, Enterobacter aerogenes
atgaaacccgaaacagtcattacccccctgcagaatgtagccgcccaacagtccgcagagagcagccagctcatcacagacaagctgagcgcattcactgcggccagaaacacacatgcggccagcatgaaggaactgaaagagattgatacgtccattgaacgctgtaagcaggagcggcagaccgccctaagtgagagtgcagaggcggagcaggactggcgcagtcgcttccgcaccctgcgcggcaatctcacccctgaaatgaaagctgagcacagcaagcgtatcgccagtcgcgagctggccgacgagttcaccggcctgattgcggagcttgaaaccgaccggacacgcgccatgctgagtgcctgctccacagccagtaaatacctgtcagcgcatgacgatgtctttaccgcttatgccggtgcggaatgggctcaggtggtcaacacgctccccgtcgcgctcatacgtgctttcctgttgcgcattcgcgccctcgaaatgaagggtgacagtgcaccgcagtccgtggccatcggcgagctgcgcgatgccctcaaccgtcagggcagtctgtatcacttcgatatgaagcaggagccggtactcgccgtgacgggcatgcaccagccgcagattaccggtgtggatatggagctgttacgcagcccggcgaagagaatgaagctcgccagaaagctgtctgaaaatgacggcactaaggcggaggcataa

SEQ ID NO: 105679 - DNA, 219 bp, Enterobacter aerogenes
atgtttcactgtccgttttgcaaaaccagtgcacacgcccgcaccagtcgttatctgtcagagaacgttaaacagcgctatcaccagtgcgtgaatatcgagtgctcggcaactttccgcacgcttgaatccgttgacgggattatctgttcgccgccgacagagccggtcattcctgcatccgaaccggcaaccaccgttaaccgtgccggtgcgtaa

SEQ ID NO: 105680 - DNA, 684 bp, Enterobacter aerogenes
gtgcccgcatcagataattgtgcctgcactaaacaaccacttaaggatgaaattatgttttgtgttgattccggaaaaatatattctccgctaaagcagaaggaatatgactacagcacgtaccataatgcgaatgataaatatcttcaggaagttttagacttttggggaactgaatcgcaaaaagaactaatcaccataaagaaagcatgtcatgacaggaatgagtttataaaaagaatcgatgaaaaaaatatccatgattacttctgggactgggaggagataataaaaagcccagatggttactcgctagaaactttttacctcactgcaaattgtgatgaaaagatggttcaagggatattacatgcatactttccggagccgtcaaaaattgctgaggggtgtaatatagtttacatagatagactcgccgttgcaccctggaatcgtcaaacactaggtgacaaaaaattatttaagggtgttggtagtcgattagtcatcgccatttgtaattatagtaaacaacgtggtttagagggctgcctgggtcttcatgctcttccagctgccgagcctttttatagaaatttcaaaatgatagatttaggtattgatacctcacacgaaggacttcgctattttgaattagataaacttcaagctggggcattatag

SEQ ID NO: 105681 - DNA, 903 bp, Enterobacter aerogenes
atgaaaaaaacaacagacttttcattttacgatgacatggaagataaagtcccgactatttcatcaggaaatgaattatctcaaatagagaaattcgctgaccttatattttggatagatgaaaataaaaaaaacatcccattggaagaacttgtaaatagaaaagccatttcaggcaataaaaataaagaatttgaagttttcaaactactttctcgcgcagccaaaaataacgcaacaccattattcaaagcaggacatcttcctccgagtgacaaaagaaatgttttggttactatttggcaaggtttaataaataataaagctaaatatttccatgacttaccgccgtataaaaatgatattgataaacattacatatctgaacttataaaacaaagcccagatatatctttcataccaagtattagtgactaccttaagcatagtggaataggattcattattgaaccaactttgcctgggctaggtgttgatgggttagtgtacagaaataaaaaagggaatcctattatcgcgctttcgctaagatatgatcggttagataatttctggttcactctcgcccatgaactgtcacatatcgcattgcactacgagctacttgacaatgcaatcatcgaagatcttgacctaacaaatatatcagaaatagaagacgaagctaattactttgcatctgaatcaattattagtagctctatttggagaagatgtgagttccgaaaaaaacaaacagaagatagtttgaatgaactagcacacagccaaaatatacatccaataatactggctggaaaattaagaaacgaaactggaaattacgaattatttagtaagctagttcacaaatattccatcagggagatcttatcaaaatga

SEQ ID NO: 105682 - DNA, 573 bp, Enterobacter aerogenes
  misc_feature (557)..(566): n is a, c, g, or t
atgcctttcatcagccatcactacccacacgatcatagttgccggtgggtagaaccctttataggcggtggtgccgtttttctgaacatgtttgcacaaaatgcattgcttgcagatagcaatccagacttgatcaacctatacaggactattcaaagacagaaaactaactttataaatcaggtccaaaacctagcggataaaacctttgtcgaaaaggactactatgagatgagggaccgtttcaacaaaacctgtatttctggtcaaccgcttcaaagagcggctttgttttactccctgaatcgcctgggctataacggtatgtgccgctataactcagaaagaatctattcagtgccctgggggaaacatacagaactgaagcttgacttcaataaaatagactacctttcatttcgtctttcaggtattgaactgatcaccgctggttttgaggagactctggccgcaaccggcgaaggagatcagatttattgtgatccgccatatgacaaaacaagcaaaactagttttgtcagttacgatggtaaacnnnnnnnnnnatggtaa

SEQ ID NO: 105683 - DNA, 1164 bp, Enterobacter aerogenes; identical to SEQ ID NO: 31753

SEQ ID NO: 105684 - DNA, 1692 bp, Enterobacter aerogenes
atgtcatctcttgattctgaagctaaacccgataatgcaggtcacagcgtactggctttaacaacctctcatagcctggtggttagctcttctgaaacatttcttccagatatgcgcaaagagctcggcattatcgcggatcttgttgagtcctataatgatgaactctgcttgttgaaacacatggctgtccagttcaaaacccacaatcaccagaaactttattcttatctctcaggctacaaccacagtatctctgaagcggatgccttgttcgcggaaaacgctctgagatctgaatactggaaacgcgttatggcactcactgatgttttgcctatcatgtcggatgccaaacgtaacgaatgggataagcagtttacggccgaccgctatattatgccgcctcaggtgatccctgatttcacagctgacgctgtagtaggcacagtcgttgctttgcttaatgaccgcaatcaatttattaaagaaagggtttacgacgtcttccagtctctgagccgcagtcataagacaaacaaagcttttgggttctccacccgcatgatcactaccggagtttgcgagccgtctaaatacccctggcagaaattaagggtggattttaaagagtctggcatttcaccactgagcgagctccgcgttatatgcgcattcttccgtggcgaacaggtgaaggcgatccataacaccaaatcattggttgaggcgttggtcgaacatgaggggttcagaaaatggatctgcatcgatggcaacagtattcgtttcagggtttacaaaaatggatcaatgcatattgacgtccaccctgatatcgccgagcggcttaacaatattttatcagctatcgtaccgctggcattacctgccgaccgcatggctcatagcaagaaatctttggaggcattccctgtacttaagcagtgcatcgactttgatacccggatgcagctttctgaactaatgtttaaaaatgacggggacaataaatggagttgctggacatctttagggtctctcgccgaacgcaaatcttcgagtgttgccgctgacacccttcggttcttaggggcaacagtaacaaaatacgatgtgacattttcctatgatccgtgtgaggttattcgttacatcggccagataggggagatgcctgatattgtatcgcatcagttttacccttcatcttgccgaatcagcgaatatgtatattccctgctcggtgcaggggaaggggataccctcctggagcctaatattggccatgcggatttgcttaaatcattccctgccggtgtgatcgttactggcatcgagcttgatactttgaattgccttatctcccgggctaagggatacgatacgacagaagctgacttcctcacatggtctaagtctaatcaacagaagaagtttgattatgtcgtgatgaacccaccttttgccgataaccgggccaggctgcatctccaggcagctgcatctcatctcgcagccgggggatctctagcagccgttcttccattatctcttcaggggctcgataaccttctgggggaagaattccggacggaatggatggacgtttttgagaacgagtttgaaaacacgaccgtttcggttcgcatcctgtacgccgaacgtattcaacaagaggaagtcctatga

SEQ ID NO: 105685 - DNA, 177 bp, Enterobacter aerogenes
atgagcaaccaacccaccagcctgccagaagaagatattgagtttgttatggatacctttcagaggagcatgggtaaatccaaacctgtcagggatactcaaatagagggcgagaaaccgcaaagtaaagagtccgcaaactcaactgaaaaccccggttatgaagaattcttttaa

SEQ ID NO: 105686 - DNA, 282 bp, Enterobacter aerogenes
atgggcagtcctaaatttgaaattgctgagcaaattaaaatgtggatcgttgtttatctagtttgctttttagcactttactgtgtgttaagcgctctacatgcgctttatgatccgctaaatttacctgccctgacgtggcctatcagctggttcgtggtgcctgaaatgacaagttttggcagtgcattattagcttttgtcctaacgccaggcctttgctctataattgctgttttattcggtaagtctacctttaaaaaagctaaaacaaaaatatag

SEQ ID NO: 105687 - DNA, 627 bp, Enterobacter aerogenes
atgttatacatgctcttatgctgttttctgatgctcaacagtacattcgttatgttcagagcaatgtctgcaataagtaaaggatccgctaaagaaaaccggtctgaaatatcgctgatagtcctagcaacacttggaattgcatcaccattcattgtcgcaatgattactattaatgaaagtatgacatctaaaacagtaacagatttttctttgggtgctcagtggtccggaatggtttcagcggtagcgctaatggggttatatgctcgacgcgtttggaaagagaagaagtccttatttactggcgctttcctggcctcttccttaatggcctttatttttactgacagccttgttttcgtatcccagaaggacaccggcgttctggctactttcgtactcgataaaaacgctggagatattgattgtagtcgcccggctatgattgtccattacagtaaaggtgttccaacggactggcgttgcccaaccagtatcatgttgatggcgtattcttcatatccttttttaccttggcctgagtatagccatggtaccagccagtctcttacggttgttattgatacatttatggaaaacgctgttaatctcagtcaaaaataa

SEQ ID NO: 105688 - DNA, 2457 bp, Enterobacter aerogenes
atgcgtaaaactctaattggctgcatggttgcaactgcccttgctactgtatcttcggcacatgctcaggtatttagctactcatttacagataccaataaggctgttcggaatattaagcctgcaacacaaacatatcttaatcccgctggtgttttgactctgaacttgatatcgggtcttgatcggtacgagcgagtgacggtcacacgagacagcgataaaaaggttatgtattcctccgtctcgaccaaaacgagcgttgcagatcgtatcgttgctgccgatggaacagaatactatggaaaggatatggttctaccggcgctcggagaagggacctttactgtagtcaatgaaactctggatattcgccagactgtagtgagcacatctacttatcatttcatcgttgatacaactcctccacgctataagagtatttatccgagtcaaaacgcaggttacgacatggtactttctgggccactttgggagttgggccgaggcggtagtggccagttttctatatttgcagacggtattgaggatgctagtggaattgccaagatccgtcttgtcattaaacgaagtaatggttctgtggtctccgacaataacctgagttatgacacagccaataaacgtgcgttctatccgtggattaaagatatgaacacccaggctggcatgccctcaagtgatcttgatgaagaattcaccttcaatttcatcgttacggacctggcaggaaatacgcttaacattcctccccagcggtttttatatgacgatcaaatgggagaatttacgccatttgcagttcatgactcacgtgtaagcaccagtgttgtacccggcatttcttcgggatacgtcccgtttaaacgaggccttacagtgctggaaaacccctacaagttggttatacgtatcccaagaactaactggaagccatatcgaaatggtggcatgagcattaccaataactatggcggagtacaggtcctttccgaagatgccacctatgtctacgtggaagttaagctgccacagggtgccttagatggaaactactatagacctgtgaatacatatcaatggtctggaggagatcttggtcagtatgccagctggctcaactgggatcctgcctctgtaaagagtccggcttggggaagttcacccatagaacgacaaaaggctgatggaacatggttcaacagcgtaaactggaacctgttcaaggcatctgatatgcctataaaacttactaatatccggttcaatgtacaggctaggccatatgatcaaaaaatcactggcggagcaacatgcagtattccagctggctcaacaacctgtaccgtctctttgccccaggatattataaatggcactaccggctatcttcatagtggctatgaagtaaggtcaaccaccgaagcaaccttctttgcccctatatgggagaatatagcctggcatacactgggtccctccgtcactggatttgattacattgaaaccaccaacattctccaggtttacgtgaatcaacctggagatggttcatatttcgaccatgtttatgtaaatcgagtttggttgtcagataaaaaccgtaacaacgcagaaataagcgtaaccggcaaacaaacaggtagaaatatggcgtctgggaactacacgtatgagttcaacatgaaagaggtaccagaaggcagttataacgtggtaattaatgcccaagatacattcaacaataccggtaacctcccttatcaaactgttgtcgttgataatacagcaccatctgtaagtattagctacgaaggaaaaccgatcagcaaaaacgtaacagtatatgggctggagaacgtccgtatacagctcaccgatgctctaactaaaccatccttaagccgtatgactcttcgcggtggccctgtttctgatgcggtggaattgtcttgggtgaatctgggaaacaacctgtatgcacctaattatcccaagatctttccgtctcttaatgaaggcgaaacatacactctcacagttcaggccaaagatgagatgaacaacgttaaagaaagctcagtcgaatttaactaccttccaaacaatctcgtcaggctagagaatctgaaaaccttagctgtcaatgcttctctcaaaacatctgacaatactcctctggctgttctgtatgccagccagctgcgtaaaaaggatggttcaatcgctacagggcttcaggacgcagtgcttactgtccgtaaggacgctgcattcggcgtgactgtaaatggtgtttctgcgatgccaggtgaaagcaaagagcttcaactggatttggggctcggggacagccgtagctttcctattttccctgctgtatccggccttacaggcagatctgagttcatgattaacattgaagaattaaaataa

SEQ ID NO: 105689 - DNA, 1089 bp, Enterobacter aerogenes
atgactaaagagaaagatactgagcagcaggacctggtcaccagggctttctctgttagagagaaagaatcaggtaaagacatcattttgcgtcctaacagcaaccgtacggtgcagtctattgctttgatgcggctcgggctgttcgtcccatcaccaaagagtgtggggcgtcaaaatcgggaatataaaacggttggctttgacgcaacgaaagagttacagacgctctctttaatggagagcgaggggttcaccaatatttcaattgtcggtgagcgtcttgatatgtcagtagattttaagacgtggatgggcatcattcgaacctatgccaatcatccgattaacaatgacacgataagcttaaaattcactgaattcctcaagctatgtacgcctgaaaattatcgctcatctacagcgtccagaaaacgtatagacgcctccttacgcaggttagcatccgttaccttgtcgttcaccagtaataactcgtccaaagtctatacaacgcatctggtacagtctgccctgttagacccggaatcagatcaggttgtccttcaggttgatcctaagattttcgagctctatcaatacgatcataaggttttgatgcagctgaaggcaattaaggagttggccaagaaggaaagcgcccaggctctctatacgttcatagagtcattaccgccaaatcctataccgatatcccttactcggctgaaaaatcgtctgaacctcaaaacacgagcaaatagtcagaatgctaccgtgagaaaggctcttgaagagttggcatcgataggatacctccagtacaccgaaattaagaaagacggaaaagtatacttccagattcataagcgggatcccgatctgaatttgaacaatactcagcctcctttagaagtggttgaagatgaagaagagaactcagggtcttctgttttagaaggtgagttatgcccaccagctgacccgatagacggcgatgatgttcttaccgtccatgatttaaccgctgaagaactgcgctatattcgtagtcttcgaagccagaaaaagaacagcaacgccagctaa

SEQ ID NO: 105690 - DNA, 657 bp, Enterobacter aerogenes
atgcggcgagtcacggccattgtgaatctcgattggattggcgaatacggcttccggttgggccagatgtcaatggttatgcttcatccagctcattactgtagtcattgccgttcagctgagctgatgctcctctcattctatgtggcgacaacggtagtgagcccagaaagtgactaccgttgtcatggccgtccagtagagcgggtcaacctcttaaatcacagggtgacaacggtattgagcccagaaagtcactaccgttgtcatggacgtctggttaagcggatctacctctcaattcacagggtgacaatggtagtgagcccagcaagtcactaccgttgtcatagtcgtcccgttgagcagatcaacctcttaacttacaggatgacaacggtagtgagcctattaagtcattaccgttgtcattgccatccagaagagcggatgatcctctcaattcatacggcgacaatggcactgagcccagcaagtcacttccgttgtcatagccttccagaagagcagatgagcctcttaattaacagggtgacaacggtagtgagctcattaagtcattactattgtcatggccgtacagctgagctgatcatcctctcaattcacacgccgacaatggtagtgagctattaa

SEQ ID NO: 105691 - DNA, 2421 bp, Enterobacter aerogenes
atgaaacatctcgcttttattactgctgtagccggactcggtatgtctgttcaggccccagctcagatatatgaatcggcctttaaagacacgaacggtattgagatccacgccccgtcttctcgtcttatgcttaatccggcatcaccggtaactttgacacttatttcaggtcttgatcgtttcgttaatgtcaaagtcacgaaagacactggaactgtcattcttaatactacgactacacggacgggtgtatcagaccgactaacagctgctgacggtagtgagttctacggcaaaaaagtaactttgcctgctttgggtgaaggcaaatttgtcgttcagataaacgtgttagatctcaatcagaagcctgtagcgacctataactataactggctaattgatgtcacccctccagcggcaaatgctcttaccgctaatactggttctggctctaccgctggtgacgtgtggaagcttggattagaggcaacggggcagtatgacttcacctcttcgggcgtaagtgatgcaaatggtattgataagggcctaatatatatttacaggcaggacggtagcctctacagcactacacagatgcagtatgacgtatccggccaaaagatgtaccacacttactctaagaattcagttaagggaaccggaataccagacagcaacctggatgaagactttactgcaaaagttgttatcttcgataacgcaggtaatagccgaacgctgccaactcaaaaatttcgctacgacaacacgctgggtgagatgacactgtgggccgttcatgatccaaatacgtcttccagcgtcgtacccggggtttctaattatccggcttacaaagccggtatggtcgttaacgaaaaccctattcgattagtctaccggatcccaaaatctaactaccgtgcttattcagaaggtgggcttcagttcatcaatcaatattccgcccccaaagagatagctgtagacagcacttatgcttatgttgaaatgactcttccctatggctcaattaatggggatatggctcgtatggcgaactttggccagtggggagggtattatccgtcatacagcctcgttctaaacccatctgcaaaccaaacgcctgcatttgcgggtacctgggtagatttcctcgatgacaaggggaactgggttaagtggaaggattttgagagtgtggcttcatcacgactgccaattaaaatttcccgacttcgttttaacgttgaagcccggccctttgcacaagagatcggcggtaaggcgacctgcaccattccggcaggaaaaacctcgtgtgaagcgcctgagacgtttgatatggccttgggtacccagggctacaataggatcctttacttcgttcgcagcatcagcaatcccattttgcggtctgagcaatggattatgacacgctggaacaataaacaactgccggtaataaactcgatatcatatgacgagactaacaagcagctggatgtactggcgtcacttgaaggcgatggtaactggttcgactcggtctcattgagggaattttatctttccgataagaacaccggtacccggatgtcacccacaggcgtaatcaaatctcgtatctcaggtaactacacgattgcttatgatttatcccgtcagtctgaaggaaaatacaacgttgaggtcaacatcagggacttcttccagaaccagaccaataaaactttcggagaaattgctctggataacactcctccgacagtggccataacattcgacggaaagccggtaaaagacgatacggtagtgtacggcctggagaacctcaggatcgctctggcagataatctgacaaccccgaggataacccgtcttcagctcgtaggtggccccacagctgataacgttgagcttacgtggtcaccggcaggcaaagatacatacatgcctgagtatccgaggctgttcccaaatttcgaaccatctgaaaattattcaattagcgtaacagttgccgatagtcagtcgaataccaaaacctatactcagaagttcagttatctaccgaataaccttgtgcagttacataatctacgcacattatcggtcagttcgcctctcaaaacgacagatggcgtaccccttgcgtacctgtccactaacgttctgcgtaagacaaatggagaaattgctaaaggggtccagaacgcaacgctgactgtgcggaaggatgcagccttcggtattaaatttaacggggcacaggcggctccaggtgagtcagttgaggtgcaaatagatatgggccagggggataatcttctgttacccgtttatccttccgaaaatgggaaagttggcacctcagaattcatgattcagatcgacgagttgaagtaa

SEQ ID NO: 105692 - DNA, 588 bp, Enterobacter aerogenes
atgttttcaaagcctatgaccactttcacaccagaacgtattgaacaaattttggaatttgccgagggtagtaacccaagcgaagcaatgagtctcagagctgacgaagttgctgtactggcacgtattggaaaggcagttatgtcgattgcgcctgtttatcagtgcgagttttgccaccatgacgcaaccgggcaacttcagtggcactgggaagatgtgaacaaagctttttatgataaatacgatccagacagacgcggaagacgtcgaatcctctataccgccccgccgatgcctttagtttcggctgacctgcttaacatggcttcatctgctattgaagacttgctcactaacaaagacagaagtggtgcgggaatgtggaatgacattccagaacagctacgacgcgcagcagaactggtaatggataatagccgggccgctgaaacagaagcgatgctgatgcgtctttatgtagaatgtgacacaggtgagcgcaggggcaacggcactcaatctggcgtagcaatgccttcttggcaaaccgttgaagaggcacgtgtgttgctaggggtgaaatga

SEQ ID NO: 105693 - DNA, 264 bp, Enterobacter aerogenes
atgacgcatactgccgtttctcaggctaatagtgctttgcagctacccacggtggagcatgtctacgctcttctgaaagcaaattgtaaacctgaccgctttgacgggcgtgacggacccgtgtggggccaggaatactcgtggaatctggcaaaagatcgcttacaggatctggagaaatacggtaaggcatatgtctcccgtcatgaagaccgtatgggggaaggatttagttttggtcctgacctgttaattattcgctaa

SEQ ID NO: 105694 - DNA, 762 bp, Enterobacter aerogenes
atgcaaatctcaactgaagttctgaacgtcttatctcgctgccgtgctgaagggaactttcttttcctggccgaccagctcgaccgcagcatttatgttaagacaaacaaagtgctcgaagccgccggtggcaaatggaaccgaaaagagcaggcacatatttttacggcggatgcagctgagcgtatcgagcaaatcattctgacaggttcggttgacatcccacgagatctgttcaatttcttccctacacctgagaatttagtcacagatatggttctacgcgctgaaccagctgccggggagcgtgtactggagccagagtttggtgatggccgcattctgaaagccttaaaactggcggctccggatgcattgattaccgggatcgaattgaacgatgagcgattccttgcagtgaagaacgatagtgtccttagcacaggagtcgagctggtgcataccgactttcttgggtaccagcccgatgaaacttttgatgttatcgttatgaatccaccattccttaaacgctctgacgttaaacatgtcatgcatgccatcgcaatgctcgctaagcgaggtcgcttacaggccattctgtcagctggggtattgttccgggaagacacactgacaaaagcgctcagggagcgagtcaaacaacttggcggacaaatttcgcctcttccggatgatacatttagggagtccggaacaaaggtcaaaacagcccgccttgaaattgatcttcgccgctaa

SEQ ID NO: 105695 - DNA, 765 bp, Enterobacter aerogenes
atgtataaattagtatctcctcgtgaactgactgagattattaccggtttactgcttaaacctgaactccttggtgagctggactcaccagaaaagcatcggatgtttatggcagatttaggccgcgtggtggccgaacattgtggaggtctggtaaacagcgtcgtcttgccaggaacagaagttacagtgtcggatgggttaccgcttaatggccagccggtacgttatctcggaatcaaagagaacatccctcacctccttgtagagcctgatgcttccttaccttcgctcgctaaaaacgtctggatgtatgcagatcctgaaggctggaaagaacattttggagctgaggaagactgccttactcctgaaatgatgcagctgttccgtaaaggtatccaggctcttcagaaagagcatgacacccctgaaattagcctcacacttcaggactggcgcctggaggaggaaacactgccagaagaggacagtcaggcctatcaggtcagcgttaccggccaacataacatccactgtgaagttgttaacaaggaaggtaacccctgttttggtgtcatgttcgaaatcgatcagggtgtgcctgccttacacatcaacaccggcggggatatgttgctccacattcattgcgcccataacggactcgttctgacccctgatgcaagcggtcagcgatttgataaggctcccgttgaccgcttctcttataacagcccatccctgctgttgtctgccgactaa

SEQ ID NO: 105696 - DNA, 525 bp, Enterobacter aerogenes
ttgaaaccgatgctcaaaaaagattttttttcagctattgaaaaccttctcaaagctggctttcaacctcgcttttacactgttaacagtggccgaatcggtctcattacattcactgataaaaatggaacaaaacaggttgaacaggtttattcctgcacttctttagccgccaatacttttggaaagcgcttcaccacttggttagaagaaatttttcaaaagcataatgaagaaaaagtagctgattccgggttcgaggttggtagccgtgtctgggataaattgatgtatacgttgcgcaccatttcagaaattcgtgccgggggggtgctggtgctggataacggtgcacagcgtacactggatgaagtgcaaaaaacggcacctgaaacaaaccaggtggagccaaaggaaatctcttcacttcaggagctgctgaacgcttccaaaaatctggagccgacttcgcctgagctaattgcggctcttaatgaggctctgtcaaccgccataaaacggtga

SEQ ID NO: 105697 - DNA, 432 bp, Enterobacter aerogenes
atggcgatgaataaaaaagaacaagccgcgtatgatgagctggtggcacaggccagaataaaccgcgctttacgctggtctgactatggcgttgaacgcgatatgcccgtaccagaggtctcgggggaataccaaaacggctggagcttcaacaccgccactggcactgtttatccgacatggagcggaactacggttcacggcacacgggaagagggagaggttgtcgatgcaacctcccgccgcatgcgaggcatgaatggtagccagaacggcataccacaatacagcaccaaagaacgcgccctgaaggcattacgctgttcgcttgaaatcaagtttgccatgcagctggatgccatagataaagctatcgcaaaagaaatagagctgtccaccgctcgccgggagagcgatacatcagatgcctag

SEQ ID NO: 105698 - DNA, 258 bp, Enterobacter aerogenes
atgcctagcggtaaaccatcaattcaggcccgtgatcagaggggccttaacgccctgaaagaggcggttccagcgacggcacaactacagatgcgggttacccctgaacgtaaactgcgttacgtcaatcaggcaaaggccgaaggtctgggtctaacagactgggtccaaaagcatatggataacgtgtgtgatctggcaggccagcctgaaataaccatgtacaaagatgatggagaaacaagtggccaaaaataa

SEQ ID NO: 105699 - DNA, 189 bp, Enterobacter aerogenes
gtggccaaaaataacaacagtctcaaacagcatgtcttcaatatgctgtcggctggcagcgaacttaaagaagtgaagcgttttctcaccagcaagcgagttaaagcccgcctggcagtgtcaatgatccacgagcaggcgattgctgtgcagaacactgaataccagaattatccggcttatagctaa

SEQ ID NO: 105700 - DNA, 252 bp, Enterobacter aerogenes; identical to SEQ ID NO: 31754

SEQ ID NO: 105701 - DNA, 2391 bp, Enterobacter aerogenes
atgaaaatcaaactagccctgcttattgcatttgcaggtttcagcgcaggagcttccgctgaaatcgcagaattcagctttaaagataccctgaacgttaaaaagaccgtatcgcctgcatccgtatggattaatccggtaacgagctttgacgttgccgttatttccggtctggaccgttatattacgctcagtctgctgaaaagtgacgggagcctcatctggagcacgaaaagcagcctggttaccgttgatgaccgtaccacatcttcgacaggctttgattattacggcaagactctgaccgtaccagcgatgggagaagatagcttcaccctcagagaggtgattaccgacttgcaagggaaggaggtctcccggcaggattacccgcttgcaattgaccgaacgcctccggcaacgggtaccataagttatacgagaaatgggtggaactttggcagcgaagcgatcttcacttcagtaccagccggtatgcagtacgccagcgtccaggcactggtctttaatggactgagtgataaaggttccgggcttgctaatgctgaatatttcataaccgatgccgctggagtggagcgtaaaaagccagcggaaattaatacagtggaaggtagcgtaaccgttcaagtcgccgacgcaagcagcaatgccctggcaccggaaaaccgctctgaatataaagtggggatctacctttatgacaaagcgggaaacaggagcgaactaagccgccgaagcgtaattgatcgggttaagcctgacgatatcatccaggtgcaggacgccactaccggatcatgggtctcctatcagtctggcatgaccgtcttccagaaccctatttccgtacgggtattaaggaagaaaagtgactttactgctgttaacggttccaaatatggctgggcggactcgaatttccagacgtccgatagcacttataatatctatactttcaaatacatatatccaaatgtgggggatacttatcatgaatttcagactctggcgggaggagtaagacgaattcatcataactccctcaacttcactccagccccggcgatggaaatagccccgaagatagtggctaaagagatgtaccggagtgataccagtgagtggttaactcaggcctcaatcagcgttaaaaccgccaccattagccgcataaaggtaaccgcagaaccccgaccatacgtgcaaaagttcagaacggtaaaaaatgcagcctggttctgcactattcctgtcggacaaagttcatgcgagatgacggttaacttcaactacaccagtgacaaaggatttgagtatctgcatctttactcgggaaaagatggtgacagcatattcgatgcgcttgctggtaattttacggttatctgggataacaacccaccggtggttaatgtcgctcaggtaaacaaggcctccaagacaatcactatgacggccaccgataatgatcgcgtcaacgcctggaacatcagctactgggataccaaagttttcgaagccacccttaaaaatgcccggggggaaactttcaccctgaagcctgtgactgtcagtgaaagcgattataaaaccaaaaacgccactttctcatacgctggtctaccggacggggattatacggttgttagcgtgtctgccacggatcttgttggaaacacaggaaccaaaacgcttaatgcaccgctgaaaattgactcaacgcttccggttattgcgttcagctttaatggcgcagacgcagaaggaaaactggttaaagggcttgagaacctacgcataagcgttactgatgcctctggggatgcttccctgatatcgcttcagctcgctggtggacctaactctgaaaaggtcacccttgcattcacgccgctatccaaggatgtctttattcctgaataccccagaatcttccccaatactgacgaatcgggacagatgtatcatctggaggctctggctattgacgaatcaggtaaccggaccactaaaacgcttaattttacctaccagccagctaacctgattatgctggataatctcaagacgctggccacagccgtagcactgaaagcaacggacaacacgccgctggccatcatccgaaccagtgtgttgcgtcgtcaggacggttctatcattaccggacagttaaacggaaccctgactgttcagaaaaacgcccagttcggcgttacggttgccggagttacggtccagcctggtgaaactaaatcgctgtcactggatcttggtaatggtgaagagcgcacatatcccgttactcccgctgtaagtggtcaatctggcacggccacatttactatagaattccctcaaacataa

SEQ ID NO: 105702 - DNA, 471 bp, Enterobacter aerogenes
atgaccaaatattatgatcgcagtggaattgaaatctccagcgcaaaaatccgctgtgttgattctgtaaaaggtactgcggaatatacttttcgtattgtttgcgataaatgcaatgggcggggagagcgtaagcatttttatagaagtcgctgtatggcttgtaaagccacgggttacagcctcgaaacgacccgtactgcttacacgctgaatgcgctgtaccgcattaatgcgcaagctgcccgcaaagtgtcagcatccctgcaagacgagcgtttaaggactgaaagcgcccacagttctgcgttcacagcatggtgcaggtctcatcaaaaaatggttgatgcaatcacccaacaatccagtagtaataattttctggaaagccttaagtcttctttaacccaccagcgtcagttaagtgataagcagctggcagttgccgcccgcattttaggtattcattaa

SEQ ID NO: 105703 - DNA, 297 bp, Enterobacter aerogenes
atgatccattcatttaaagacagacggcttgaaaagttcttccgtaatggaaaaacaacggcaggtattccttctgaaattattaacgcgattctgtgtcgacttgaaacgctggataatgtccagagtgagcgggagttattatccaacagcttgcgttatgaacgcttaagaatgacgtcaaaccgttattcctccattcgagtaaactctaagtatcgattattctttgaatggaatgatggcgcacataatgttcatttgtctgcacatgactataaatcgctcatccattaa

SEQ ID NO: 105704 - DNA, 849 bp, Enterobacter aerogenes
atgaagctattttcaatttcatcccgggatacaagcatggacgcgatgttttatatccaggccagtactaaacaacaggcaagttacatatttagtaccctttccccgaagcctactgcgaactgccagcttacagatttgcagaatgagacggtcgtcccttccataagccctatttcgctttcacttaacccctggtcgatcaattcccagtcccgaacccgggaactgcgtatggccacgcatggtcttaacctgatctgtgcagtcacggatgagcatacccgtcagatagttgacttttgcgataaccttggacagcagcttaaggatccggacgacaaaagcgcctgggttaagctcattaattctgaatgcgctttgcttaattctccgcgtctctatcccgttctgcttgagccggatacaccggcacaatttgaaatctttgtgccagctccggaagatggagaacacgacacggtcatagccagcgttgttaaagaatgtttcggagatgaatgccggtacagagtaacggacaaagcttttgcaatgtcggaaaagccagtcatcaggctggaagctcatttcaatgacaaacgcgaaaaggttttagaactgaccttttcctgtttcaatctttcactctcagcgtccgtgcatgaaaaccagctacgtcagattttgttactttgcgaagactttggcgtaaggcttcagggtagagcaggggcatcctgccacgttaatatgcgcagtgcttaccgtcgtcttgctcatgttggcaccggctctcgcccaggtgatgacagtgatgtgggcactgttgcaaatagtcggtggtga

SEQ ID NO: 105705 - DNA, 957 bp, Enterobacter aerogenes
atgcgcatttttatcgatgatggttcaaccaatatcaaaatgctgtgggaacaagatggcgaaactttcacccatatcagccccaatagttttaaacgaggctggtctgccaccttcggcgccgggaagccatttaactacaccgtggatgatgaaaagtactctttcgacctgatcacccccgatgcgttacccaccaacaatattgattggcaatacagcccgttgaactccatcgctgtccaccatgcgctgttgaccagcggtctggaaccgcaggatgtcgagattgtggtcaccctgccgctgactgaattttatgatgaagatgcgcaatatcgtcttgataacattgagcgtaagaaaaagagcctgctgcgcgaagttaaattgaataaaggcgtggtgttcaatatcaccaaagtcaccgtgcgtccggaatccattccggcgggtatcagcctgtgtgatgagctgaaaccgtcgcattcggtgctgattgtcgacctcggcggcaccacgctggatatttcgatggtggccgggcaaatgacctcggtttcgcgcatttacggcgacccgaagctgggcgtgtcgctggtgaccgacgccgttaagctggcgctggcgcgggcgaataccgatacctccagttataacgttgatcagataatcatcaaccgccacgacgaagagtatttgaccgataacatcaacgatccggatgcggtatccgaggtgaaaaaggttatctccaatagcatcgaacgcctgacgactcgcgttctgacggcgattgatagttttaaaggctattcgcacgccatcgtgattggcggcggcgcgccgctggttgccgatgcgattcgcgaacgtatggggctgcgcgaagatcgctttgtggtggccgacgagccgcagttcgccctcgtgcgtggtctgaaaattattggttaa

SEQ ID NO: 105706 - DNA, 495 bp, Enterobacter aerogenes
atgtcatcattatcgaacacgttaatcgttcgtttattacccgtaacagggtcgataactgttgtagtatcgcttagcccaccctgctggacattaaacgcattcacaaattcagtacctttggtcaaaattccttgttcaaaggcgtctttaacggagatatttcgaaatccgatatcattccccagcagctcagcaaacccttttccgcttccctggatcagattatcgttgccggaaataacaatggtgtcagaggtgggggtaaaaggcgtaacctccctatctgcagcaaaggctgaggaagatatcagcgaagcactaccaagcaggcctgccgcccaggcgcgaatcaggcgggacgttttggttttcttctttccagcggcaaattctcctgcaacgacccagtcctgcaatgattcgttccaaataattttatacgatttattcatctgttatttatcctgttttcacgcggtatttatgaaataa

SEQ ID NO: 105707 - DNA, 1116 bp, Enterobacter aerogenes; identical to SEQ ID NO: 31727

SEQ ID NO: 105708 - DNA, 273 bp, Enterobacter aerogenes; identical to SEQ ID NO: 31728

SEQ ID NO: 105709 - DNA, 168 bp, Enterobacter aerogenes; identical to SEQ ID NO: 31729

SEQ ID NO: 105710 - DNA, 819 bp, Enterobacter aerogenes
atgactcaaaaccagggttctgagccagtaccggcgagccggacagggcagctcatcagcgcccgggatatggccatgcagaaattcgaagaagggatgcggttaatctcggaagcgtcggaactgtgcggtctctctctcttcaccagcagaattatgcagcccaacgcatttggtcttccgtcgtcactggatcgcaccatcgaggaggggcgtaaggaaattgaccgtaaaacgtggaaaaggctctttgaagaaataggtatggaccggtactggaaccataagcaaaaagaagcctttaacgaatccctacgtacggatccgcccgtcgcttccctggagattgttaagggaacattacagcatgcactggctaacagacgagacacgcttgcagaaggtttcgttgatgttctcaacaagcttgaccgaagttttaaaagcaatgcacggcaatatacaatgccgaaaaagcttgttcttcgggggatttttcctggtgtgaacgtactgaggtacaacggtttctcgcaggacaatcacttttgtttacgcgactttgagaatattgtatgcatctgttctgatactccaacacctgcaaccggcggtgggctgagtatggtcgacaggctgacggccatgagaaatacagatttcacaggcgaggtctgcgatgagaatggctggcggtgtcgcctgtttgagaatggaaacgttcatatttgtatcgacagtatctcgcttctgaatgctctgaacgatcttatcagcatatattttgcaaaccagcttccggccgcaggaaaaaaatga

SEQ ID NO: 105711 - DNA, 1206 bp, Enterobacter aerogenes
atgatgatcgaaaacgataaagaaaaaagcctgaacgatgctacctcgccagaggtgcagaatgacatccgcagcgaatccacagaaaaatcaaaggaaatgggtcgttcaaggtactcatctattgcgatgatcgattacttcaatgcaatcgaacgtctgtgcgaagagaaaaaaattaacccggaaaatatcgatctgagcttcaaagttcactggctcagaaacgctgttggcggctcgtttgcaaggtcacaggagatgttcgctgagtaccagaagtatgttaaagaggttcctgaagaggcccgttacctggatatacccgatgaggtgaaggttgcactcggcgatattatctcgtacatcacctggcactaccgtagaagctataccgcaatacagagtgatagtgttaaaaaagctgaagcacgtagcatgcagctggaggaggaggtaacgcagcttttacagcggcttgagcaaagcgctaccgatatggatgagctgaaacttgagaatcaggcgctacagggtcgattagagatccgggacagtaccgtcaaggagttagaaacaaggctgaatgttgccgaagcagaactcgaaacctgccatcaccagttagatagcacacggcatgaattaagcctcgcacagcagtcaaatgactcactctcccagcaactggctgaacgtaaaacagagatcgctggtcaccttgaatatcaaaaaaagctgaacgaagagatcaacactcagcgttctgataatgccggtctttccagacaatgcgaccagttaagtcagactgtgtcagatacaaaggcagagagggacaggtttgaacaggaattgattgctgcacagaacctctgtgctgagctgaaaagtgcactgtccgggaaggagggtgacctggtggcggtgaatgccgagcttactgaactccataaactaaacgagtcgctgagcgccgacctgaaaaaagtaactttggtcagccagggctatgaagcggaagtggctgaacaaagcagtgaattaaaaacgctccagtccaaagtaatgaagctggaagctaccctggaggcagagaaaacaatctcagaatccctgaaaggcaccattgatacattgactggtgcaatggcagggggaggtactggaaagtcaaaacagccgcgtagtagaaaaacatcatga

SEQ ID NO: 105712 - DNA, 204 bp, Enterobacter aerogenes
atgtcatacatgctttcactaagcgaacagacaaaactgaacgctttcctgtcagggatccttgatgattacaagactggggttatcactcagatacaagctgttggtaaaatcggtaacgtgttttctgcactggaaagtggagactcaaaaaaggtagtgcatttgttgactgaaggacgaaaactcctgcggacgggctga

SEQ ID NO: 105713 - DNA, 1320 bp, Enterobacter aerogenes
atgagccaaaaattcgcagtgatgattgcttacgacgacgatccaaacgtcaaaaggtactcacctgactttcaaacgcaggatgagtttgctaaagggtggcagtcggctcttaaaaaggcacaccacacctcaggtcaaaaatcagtcatcacctgcggatgtcgtggaaaaggagaaaagcgactttatgttcgtgctttaccgaacggtgatgcctttattctcgtcaaagccgctaacacgggcattgagcatgatccttcctgtgtattcttctcccttgatgcccggcataccggcctgaaaggatatgcgagtggtgtggtccggattacaaccgaaggtgatatggctgtaaggctcggtatcggtatgacagagaaagatcctcctgaaaaatcagaagtgcctcccctgccccatgttcagcgaccagaaggaggtcaggcctcaatgaccctcctgggcttgcttagtcttttgtggacagagtctggtctgaatgtctggtacccgaaaatggcagggaaacgtaacgattcactggtacggtatcgtctgcttgaaaccgctaaacaaattcgtaccggcagagcctgcataggtgaccatttattcattggtgtacctgacccgaaacaacctgtcgctcagtcgcaaattcagcgtctttcatcacaggcgatgagtgataaacgtctcatgctcctgtcagttttacctcgctacgatgctgaaaagcatgagaagccacttaaatttttacccctgcggaattttggggggctaccgctgatttttttcaattcagaaggccattgggatagcgtaaagaaacgattttcatcggagtacgcagcatggaaatccggggcgaaaatagttgtctttgcgttgacgtcaccagctgcggtaaccggcagaggcccttctgtaagagctcatcaaattgtgctgatgcacgttagcgagaactggatacctctggactcctcctatgaggcggttgttgcagaaaagctggatgcagagcaccggcagtacgttaagcccatgcgttatgatgcgagtattagtgaggtgttccctgacttctacctgctcgacacaaaaagcgataagccgttcccgatggaagtatttggtatggccactcctgcttatctggcccgaaagcaactcaaaaaagattattacaaccgtgaatatgggccttatggatggtggcactgggatgcgaccacagcatctgaaactatggtgctgcctcattttccagaatcacgtaaacctctttcaactggcacacctgcttaa

SEQ ID NO: 105714 - DNA, 168 bp, Enterobacter aerogenes
atgacgtatttcgaatcagctgaaggtgagacggtatctaaagaacgagcattacaagaactgtccaggcattgcgttcccgaaacagatttcgaagaattctttagcgacatgggcgtaaaggaacagtatgacgctcaggaagtgttgctttggttgggatattaa

SEQ ID NO: 105715 - DNA, 1428 bp, Enterobacter aerogenes
atgaaacgttacactcatgatcttgagacagacctgaatgatgtggataaaacaccatctctgatccacaaaactttgttaacagcttcgactatttatgacctgaaatatctggctcaggtattaaatgatgaaaatggcagtaattggtcccgtgcatcccttaaacgtcaggttacatgcatacctgagcattgtgatctgagtatcgcagatggacgctatctacagactttaataccttcacgacctgctgattatgaggacaggcactttagctttatcgatctgtttgcagggataggtggactgcgaagcggatttgatgccatcggtggtaaatgtcttttcacgagcgaatggaatacttattccagccgtacttaccgggcgaactggtattgcgatgagaacgagcaccgcttcaattcagacatccgtgacatcactcttagcaaccggcccgaggttactgatgacgaggcatacaaatttatcgatgcctctatcccggatcatgatgttcttcttgcgggatttccatgccagccattcagcatcgccggtgtcagtaaaaagaactctatgggtcgcaaacacggtttcgagtgcgacactcagggtacgctcttctttgatgtggccaggatcatccgggcaaaacaacctgcaatttttgttctggaaaacgtaaaaaatctgaagagtcacgataagggtaatacctttaacatcatcatgaaaacgctcgatgagcttggctacgacgtcgcaaacagcgaaagcacgggcgcggatgatcctaaagtcatcgatggccgtcatttccgaccccagcaccgtgaacgtatcgtccttattggttttcgccgcgacctacgtctgaaagacggttttactctgagagatattaaagacttttatccggacaagcgcccttctctctcagatttactggatccgagcgtagatagtaaatacatcctctcccctaaactctgggagtacttatacaactatgcaaagaaacatgcggcaaaaggcaatggttttggttttggactagtagatccttccaatgttaatagtgtcaccagaaccctctcaagccgctatatgaaagacggatctgaaattcttattgatcggggctggtctcatgagctgggagaaactgatttccataacacatacaacatggaccgtcggccacgcatgctaacgccacgtgaatgcagcaggctaatgggcttcgataaacccggggaaagtgttttccgtatccctgtgtccaatacacaggcttacagacagtttgggaactccgtggtcgttgatgtctttgcggccgtcgccaaactgctgaagtctcgaattgaatttgcagcctcccagcgcttgcggcagttttacgacgaagtcagctga

SEQ ID NO: 105716 - DNA, 981 bp, Enterobacter aerogenes
atgggcagacaccaaccctgtcccaccatggcagtggagacaggcaaacgaaaagcccagaaaggtgaaagggaagaaataaccatgatgaaagagcctcatccgttacttcagttggtactaaacgattccggtcgtctaaccatgcctgtttattatagagatcaacagtattgcccgacttgccttacaaaggtgttgaagagtgaggatggaagtttggcgcacctcggggaaataaatcaaaatacatgtagaccttctatttcagtagttgtgacaaaagcaattattgaaatgttatgtgacggggaaaaaatatttgtaaatccaatacgataccgaggccgggtgctggcaccctcagtaattttttctcccgacactcacactttcaaaccgtttataaatacagactatcagcctgtgggagcaaactggaaaagtgaaaagggatataaactcggtctgttttatctcaaagatcgagccaactctatcaataaagaggaatttgatttcattgccgttatagaccctaaggcaatgcagaaagaatttatttcggcctggtctgaggttgatgaaaaaaatccattggaaacgctgaagcagatcttacgatctaaaaacaactcttctttatgggtaaaatggcctggcaaaattgagcatgcgcaaaaaggaaattgcaacgaaaattactggttcgattatcaatctgataatcaggaagtgaactgtacggtctctgttgtaggtatcgaaggtaacagttccggtgagacaatttatagattgcaaactttgctaaagcgtaagctcaatgaatatcaactggttcggtctttagggactattatgcttcttgataataccgggaatatgattccatcaaaccatccttattttgaagtcatctcaaaagcatgtataaatggagtgcgtgactttgttcgtcaaaacccgtgggtagtctga

SEQ ID NO: 105717 - DNA, 258 bp, Enterobacter aerogenes
atgatagtttcagaagcaattttttattcttctattatttcctgggttctttattggtggtttattggaaatattactaaaaaggtagggatgcttgttgttccactcacgcttaccttcggatgttacatttatgcaattcatttggatgattccgaacagcaaaccaatttacgttgggagcagatcggttttattacctttataattgtgataatgtgggcaggaaagtttgtgatgaaaagactatctgaatga

SEQ ID NO: 105718 - DNA, 255 bp, Enterobacter aerogenes; identical to SEQ ID NO: 31731

SEQ ID NO: 105719 - DNA, 198 bp, Enterobacter aerogenes; identical to SEQ ID NO: 31733

SEQ ID NO: 105720 - DNA, 276 bp, Enterobacter aerogenes; identical to SEQ ID NO: 31734

SEQ ID NO: 105721 - DNA, 828 bp, Enterobacter aerogenes
atgaataatactgttacagcctgtgtggacggttcactttcaacgcggtcagtgtgtgaatatgcggcgtgggcagcccgcactttgcaatcacagctagcactgttgcacgttatcgaaaaagacagcaccccggtagtgtcagacctgaccggcactctcggcatagacagtcagcaattgctgaccgatgagctggtagaaattgaagggcaacgtaatcgcctgctgatggcccaggggaaagcaatactggaaagttgtgctgaactgcttcaaaaacagggaagcccggatgtgcttttgatgcaaaaacacggtacaccggatgaagttctggcagagctgagcgaccttcgtctcatggtgctggggcgtcggggtagccagcatccggtaggctctcatctggaaagcgttattcgtctgcaaaagaaacccctactggttgttccggagaactactcagtgccttccagagtcatgctggcttatgatggcagtgaagaaagcaggagtaacctggaacgtctgacgatgagtcccttactcagggggctggagtgccaccttgtcatggtaaacggtaagaaggaagagctgctgaccgcacagcaaattttacgtgacgcggatatagaaaacagcacaacacatcttaccgggcaatcagtcggggacgcgcttattcgttacgccgaggaaaatgctgtcgatctgatagtgatgggggcctacggtcattccaggttgcggcagttctttatcggtagtcatacctccgaaatgctgcaaaagacgcaacaaccgcttcttatcctccgttag

SEQ ID NO: 105722 - DNA, 1290 bp, Enterobacter aerogenes
atgttactggctggtgctatctttttattcacgctcgtcctggttatctggcaacccagagggctggggattggctggagtgcctcactgggcgcaattctggcattgctgactggcgtcgttcatctgggggatattccggtggtctggcagatagtgtggaatgcgaccgccacctttatcgccgtgatcatcatcagtcttctgctcgacgaatccggcttctttgaatgggccgcgctgcacgttgcccgttgggggaatggccgggggcggctgctcttcacctggatcgtcctgcttggtgcgatggttgcggcactgtttgccaacgacggtgcggcactgatcctgacacctatcgttatcgcgatgctgctggcgctgggattcagccggggagcaaccttagcgtttatcatggccgcagggtttatcgctgacacggcaagcctgccactgattgtctcaaacctggtgaatatcgtctcggcggatttctttaagcttggtttctcagaatatgccgccgtgatggtcccggttaacctggccgcgattgcggctacgctggtgatgctgcatctgtttttccgtaaggacattcccgccgtttacgacgtttctctgttgaaagaaccgaaagacgctatacgtgatgtgaatacctttaaaaccggctggctggttctggtgttgcttctggtgggattcttcggactggagccgctgggcgtaccggtcagtttggtcgcagccgctggtgcattgcttctgtttgctgttgcgaaaaaagggcatgccattaacaccggtaaggtgctgcgtggtgcgccctggcaaatcgttatcttctcgctggggatgtacctggtggtctacggcttacgaaatgccggtctgacccactatctctcttccttgctgaatcagctggcagagcagggattgtgggcggcaacgctgggtacgggcttcctgacggccttcctgtcatcagtgatgaacaatatgccgaccgtgctggtcggggcgctgtcgattgatggcagcacagcgaccggtgttatcaaagaagcgatgatttacgccaacgtcatcggcagcgacctggggccaaaaattacccctatcggcagtctggcaacgttactgtggctgcacgttctgtcgcagaaaaatatcaaaattacctggggatattacttccgggtgggcattgtcatgacaatccccgtgctgtttgtcacgcttgcagcactggcgcttcgtctgtctttcactttgtaa

SEQ ID NO: 105723 - DNA, 321 bp, Enterobacter aerogenes
atgctacagcctgttcagctttttaaactgctcgccgacgagacccgttcaactatcgtgatgcttctcagggagtccggtgaaatgtgcgtctgtgacatctgtgcggcaaccgcagagtctcagccaaaaatttctcgccatatggcccttttacgtgaagccgagctggtcatcgaccgtcgcgaaggaaaatgggtgcattaccgactgtcgccacacatgccagcatgggctgcgggtattattgatacagcctggaactgtgaacgagaaaacatacgcaacaagctcagtagcgtggcatctgtctcctgctga

SEQ ID NO: 105724 - DNA, 705 bp, Enterobacter aerogenes
atgaccgacttaccagcaatcgaaccggcttattttgatgatgcgcttgccagcaaacttacgggcaacaacgaaaccatgccgcgaattctcatcctgtacggttcagtacgagagcggtcctacagtcgttttgcagcggaagaggccgggcggttgctggcaaagatgggggctgaggtgaaaatatttaacccatccggtctgccgttacccgatgatgcgcccgaaagtcaccccaaagtgcttgaactccgcgagctggtcaggtggtgtgacggaatggtctggagttctccggaaagacatggcgccatgagctcggtgatgaaggcccagattgactggatacccctgagtgaaggtgctgttcgtccttcccagggtaaaacgctggccgtcatgcaggtttgtggtggttcacagtcgtttaacacggtcaatcagatgcggatacttggccgctggatgcggatgttcaccatccccaatcagtcgtcagtgccaaaggcatggcaggaatttgatgatgaagggcgcatgaaaccctcaccctggtatgacaggattgtcgacgttaccgaagagttgttcaaaatgacgttactcctgaaagggcacacagcctacctgtccgaccgctacagcgaaaggaaagagagtcatcaggagctcgcggcacgggtcaatcaggccaaaatctga

SEQ ID NO: 105725 - DNA, 435 bp, Enterobacter aerogenes
atgtctgttatccttgagcacattagcaacaagccttacgaaatggcaccttttttcagtgatttactaagctgtggagtgatgagtccgtgcgccgggcatgaagataatgaattaaatttgcatgaatatgtagtccgcaaccgcccctcaaccttctttgtcagggcggcgggcctcagtatgatcaatgccggtatcaatgatggagcaatactggttgtggatcggtctttaacagcacgacacggctctatcgtcgttgcgctggtggatggagagtttacggtaaagatcttacacacgtatcctgagctgcttttgatgccttctaatccagcctataagccgatacgtgtaaatcctgaatcccttgagatatggggcgtcgtcacctttgcactgaatcagttcagccatgtacatgcacgttga

SEQ ID NO: 105726 - DNA, 1260 bp, Enterobacter aerogenes
atgtacatgcacgttgatattaacggagcctatgcggcatttgagtgtgcgatggatcccaagctgtcaaaaaagccgctcatcatagccagcaataacgattcgtccgtcattgcaatgaataaactggctaaaagcgttggtattaagcgtgggaccccaatttttaagtgcagggatttgattcagcaacaccggatcgaagtccggagctctaactttactttgtatgaagactactcaaatcgcttccatgaaacgctggaaagcttcgcgcctcaatcgagtcgatatagcatagatgaaaatttcatgttattgaaaaacatgaacaagataatagattatgaagattacggccggttgatcagaagtacacttcttcataatctgtcccttacctgtggtgtgggttgttcaagcaccaaaaccctcgctaaattatgcacctatgcgagcaaacgatgggcagctacaggcggggttgtagttttgactgatcaggccaggatcaggaagctcctgagcctgatcagtaccagagaaatatggggtattggtcgaaagattagtgaacgcctgtcggctttcgggatcatcactgccggtgatttttataatagcgacgttcgctttttacgtaaaagctttggcgttgaaatcgagcgtacctggcgggaactgcatggcgaaccatgtttccggctgcacgagtctcctcctgtcaggcaacagattatcgtttccagaagttttggtcagcgccttaatgagataggcaagctacatgaggcagtttcattttttaccgcccgggcggcagagcagctgcgcaaggatggctcgtggacccgtcaaatcacagtcttcattcagagtagcaattatgcgcaaggtgaaaaccgctacagcaattgtggtatcgagccgcttaccgctacacaggacacccgcgatctggttgatgcagccatgaccatcctgaaccgcatttacagacccgggatagcgtatgcgaaagcaggggtaatgctctccgctatgactgacggcacagagcaactcagcctgtttgatactcgcccggccaggcctggcagtcaggcactgatgaaagttatggaccggttcaataaagaaaagcgcggagctctgtttttactgggggaaggcattcaacaggattttcgtatgaagcaggccatgctatcaccgagatatacgacccgctgggatgaattactcgttgtaaaagcgtag

SEQ ID NO: 105727 - DNA, 810 bp, Enterobacter aerogenes
atgtctaaagaattttatttaaaaccgatggccacgattttaatttctgcggttattgctaccgctgcctcggcgttaatcacggcaacttattttaaaccgaaggtgctcagtgaggaagaaattggcaaaattgccgctacttacctggtaaaaaatccccattatttagtggaagcaggtaaggcgctggaaaatcagaacgtgagtgcctcagtggaacgaataattccatatgcgccagctctgctggataccaaggagacgccaaacatcggccctgatgacgccgacgtcgcggtaatcgagttcttcgactatcagtgtatttactgcatgcgggttacacctgttgttgaatcggtaatgaatcagagcaaagatgtaaaattcttctttaaagaattcccgatttttgccggttcaaaacctgtatctgccatgggggccgctacgggtctgcacgtctatcagaatttcggtgctgaagcctatcgtaagtaccacaacaacctgatggctgtggctcataccttcatgacctctcaacgcaaattcgaactcactgactttaatactgtggtggaaaagtcagggtttaacagcacgttttctgacagggaaaaaaaccggtatgaaaacgtgatctccggcaatatgcagctgggcgaagcgctcgggatcaccggcacacccggtttcatcattatgaatatgaaaaagccgaatgcggcgactaccacatttatccccggggctatggacgcagcaactttgcagggcgcaatcgaaaaagctcgcggggcctaa

SEQ ID NO: 105728 - DNA, 612 bp, Enterobacter aerogenes
atgattaggcagggctttatactcacaaccgcaatgcttttgagtggatgcggatatcatttcgcaaaccaggtagatgcgtacgatctaatgcctcgtcctgttacaaataaaaggtttcagatagtccctccggacgaaagtattcagtccagaatgttttcaggccgttttgctgatggattagcaaaaaaaggagtcattatttccactcaccagccagattatgtgctcaggttccgaatcagcagctcacaggagaacatgcagtatagcgagcagcttcttactggggtgacaggctacgttgtagataaaaagacaacgagaactgacaagcatggcgaattgcatactgactatgactacaagccagtcgatggggtaataggcactgagacgatgtcgcagatgcactatatgcgacagctggatgtcgaggtatacccgtcagcgaaaggagcaaagcaggttctgaaagtgagtatgcaaagcaatgcacctgtgccgtcagacagcattgcttattcagcaatgatcgacgcctttactgataaatttgatgcgccgctgcgttccggaaattatgttgcagtgatcccctggaactga

SEQ ID NO: 105729 - DNA, 423 bp, Enterobacter aerogenes
atgtcgatactcagtagcttcgtcatcagagcaacggggatacctgacaaaaagtatctccgggatcccgtaataaaacgttgttataaacgtctgagtcgtagggtgcctgctctaatgacggggtggcttctgtgcattctgggttcagggtatgtcagtatggcactggaacagcctgatagcactgtattactcagtctgctgctgttgtatgttatgtcaggcattttactgatgcagttccagtatatgtattcagagcgaagcataggctacaagttctacctggaagtgcttatgaatgcagctgccagtactcaacataaagaacagttacagtatctgttcattaataagcccaattccatcacgatgggcgatctttaccgactttatgattttaatgggggagggcgatag

SEQ ID NO: 105730 - DNA, 393 bp, Enterobacter aerogenes
atgaaatctactttactgagtacgttaatgctggttgctgtaggtgtacagcccgttttcgctgcacaatgtcagtacggagcctgtggaacggaaaacgatcccggaatcggatttctgatgtcatcggtacaaatggataaaggtgaacatctaaaggaactctctggtgttgcgaccacaggtgacaccatctctaaaaagatggaaagctacctgggaaataaaaagctcaaggtaaacaccgacagtacccgcaaggggccgggtaataccaccatcaggcctacagatgagctcgccccaacgaggcaactaaaagttatccggcccgaactggtaaaaaatcccgattcgcagctcgtggtagctttcaatgagcgcctggcctga

SEQ ID NO: 105731 - DNA, 750 bp, Enterobacter aerogenes
atgaaaaaaattattaaggcatcggtattacttctttcattaagtaccgccttcacgatgaatgccgagccggttaatacaatggtactgccagatgcagcccgggataagctcaaagccattgggctttcaatcgagcacgtcgaaccctcgccagtaaaagatatttttacggtgatttccagggagggggtaagttacgtgagcaaagacggagattacatttttaccggaagcttattccacgtgaaaggtaaagatgtggtaaacaccactgagcaggccattttaatgggcgtccgggaattcgcatccaaaacaaaatccatcgactacaaatcaccaaacgaaaaataccggcttgctatctttaccgatataacctgtggatactgccaaaaactgcatcatgatctgaagtcttatcttgatgccggtatttcgattaagtttcttgcattcccacgtgcaggactgaactcggtagtagccgggaacatggccaaaatctggtgttcagcaaagccaaacgaagctctggatgcagcgatgaatccggtttcaactatcccggaaggacgtcctgatgaggcttgcttaaacattatcaaatcgcatttccaggtggcctcaacaatcccgctgcaaggtactcctaccatggtgacactaagcggcaaaccgcagttatttacggggtggctgagcccggaaaacctggtgacccaaatgggcgctgcgcaaaagtaa

SEQ ID NO: 105732 - DNA, 540 bp, Enterobacter aerogenes
gtgtttacaccaccagcagatgatgtgaaacctattcccgttcctgatgagatttacactcagtgcattacggatgccgcccgctacttcggaattgatgctgaactggtttttacgttgtttgacaatgaaggcggtaaggttggtactttcagcaggaatactaacggcacttatgatattggcccaatgcagatcaactcatccaatctacctgaaataaaaaagcatttcccgacggtaacgtggcgggttctggcttacgatgcttgcgcaagtttctgggttggaacatggtggctctatagaaaaattgttgatcgcaagggcaatgtgtttgaagggattgcagattacaacagcaaaaccccaaaggtacgtgcaaagtacatatttaacttcatggtaaagtacaatcgccggatccagcagcgtaacgggatgggtgagctttatcaatggacccagcaacctcctcgatacaatggccatatagctaaaaatgtcccggagcaaaacccgactcctgttgttaaataa

SEQ ID NO: 105733 - DNA, 558 bp, Enterobacter aerogenes
ttgtcttcttctgcaagaaatttatttaagattctctcttctttcttgatccagaaaaaccctcatcatgaagaagtatgtgttcatgaagaaacaacagctggtttatgggcccctctccctgattcgcatgtcgtgcttttcttagatttcgatggggtttgccacaggtgtaaaaatgaaacctttgagcgaatgccactgttagagaaattgctggataactgccctgccatggtgattgttatctccagctcatggcgtgagtgcgctaatacaagttatctgaaatctctgttccgggtgccttatagagacaaaatcataggtgcaaccggttcggtatatttaaaacacggacagactggtgtgcgggctgccgagtgtgaggactttgtcttttcacatcgagttaaagcatttatctgccttgatgacgacgaatcattatttccggccggttatccgcatttgcacaaaaccgattattacacgggcctcaccgaatctgaccttgcagctcttaacgcaaggtaccatcagctcatgggacgctga

SEQ ID NO: 105734 - DNA, 1062 bp, Enterobacter aerogenes
atgctgcatcactgtcaggctaagtcactggatgacatataccttgaggatattccccacatcatacatccggccacggcggtacatgacctcgaagataccgccctgccaaaccggattattcaggaatggaatttaccgcagggatatacacagtttgtcagccggtatcaccagttccaccatcaacgcccctggctcgcttaccgcgatacgcttgacgacatcagatacggtaagatcgttctgcttagaaaagacataaccggcaatgccgggccgggggttatatcaaatggcaacctacgcaatgacctgcccctgtccctctttacccgtctgcgcgatatcatctctcgtcagttgaaacgcccggggtattacgttcgatcaacgacaccagcacagcacgcccaatcaacaaaaaccattaattccaaagcggctggtcgtcttctcgcagctggcgggctttataatggaaatgtggagggatttcgacatacggctgaacaacttggcggcgaagctgttgaaggctatgaccaggtattgaacgaaacaacttcaggtatgctggttgcagcggcttcacttctggttatccgaaatccaaggtctgcggatgaattgacaagttatctcggcaagtacaaaaaagcacacgttttgctcgatgatatgaatgttagcgaattgaactacatgcgccgagacagagctgaatatttagctctccgtggacaattcaacaatactgtacgccctaacttccttaaatcactttcagaccacccagatgccctggctacgtttgaacctaacgatttgatgaaacttgcaacaggcaaggtcccctctgggtggcaggttcaccacaagatccctcttgatgatggtggcacaaacgctatagacaacctggtacttattcagaattcaccataccattcagcactgtcgaaagcacaatccatcattacgaaggatctaccgtataattcaagcaccaaagttctatggccatcgccgaacggtgttatctacccggtaggaaagtaa

SEQ ID NO: 105735 - DNA, 507 bp, Enterobacter aerogenes
atgaaagatttaactcaactactcagcagcttaaagaggttgatggttgcagatcactaccctttagccagcccggtagccccggaagtcttgaaagacttaatctgcaatccgcctccagtggagtgggcagatcacaaaaagagcgcctatatagatatacagaaactcattaaaaccaggcttgattatgcccaagtgtttaatgctatggatggttttgagtacaacggacttacgttttataaccttgttcaggcagagaacgaaaatctattgtggtcaaatatttacatacgcaactttgaagcacgagacaatgaaatctacgttgacccaaatctcactgataaggtgttaatcggagaagatggcatgtcacttttcgcttatagttttgcagacgactgctttcagataagagacaaagcatctactgattatgttattgaatctcatacagagtttgatagatttttgtcttcactgattcaaaccgtcagttga

SEQ ID NO: 105736 - DNA, 3951 bp, Enterobacter aerogenes
atggattacaacatatataccctgggtgatattgattttgtctggtcggcttttaccggtattgccctgatcttttctcaatatactggtgtaaaagagttcctgaccacggccgccgttgtagcaggtgtgagcctattctataaaacgtggctatggcttcaggctccgaccaaaaatgaattaccgtttttctcctggtttttggggttgatccttttcatgatggcaatggttcgagtggatgtaactattgaatctgtaaagtcgggagaggtcagaaacgtcgacggaattccaatttttattgctgcgatggcaaccgtcaccactaacttaagccagggtttgctgaaggattataaaacagcgtttgatccgctttctccggtggacctgtctgcaacaactctggacgatgacatcaccctcggtccgatgatccgattcgtgaagtttttgcaatggggcggcgatagccagggctactgttccgcatttcctgaaccggccagcgggctagggccaatgaacgtatgtgctaccgttcagtctcttgcatacaactgcctgaaggctacccaaaactcaagcgcaaatattgccggtaaagaaactatttttaacgatattttctcagctaatctggcagatagcatggaccggattaatcaggcgatgaaaggcgcactgaagaatgcctctgccagtattgttggcgctaacggttcaaaatctggtacgtgtgatgaggtctggtcaactgtgaaacaggttaccagtacagctgaagctcgccagactatttcccttataggacagacaaacggcatccttactccagacgaagcaaatggtgcacctaccggcgcaagctttactgatgttatggcgtcagcaaatggtatgtacggtaaggctattggttcgtatgacgccaccctgaacctgttcattatgaatgagctcagaaatggcgcaagcaaatataagaccccactcggtctggcttccgatatgcagttgtttgaggcttctctgaagcgaaccaacacaatggcttcacagggccagttgtggttacaactgtcgggagcagcaatcgcattccttgaaatgtttgcttatatggttgctccatttgctttgcttatgctgctggcgttaggtggtaatggtgttgccgctgcggcgaaatatttgcaacttatcctcttcgtgaatatgtggccgcttacggcagtaatggtcaacgcgtatgtgaagaaagtcgcgacggccgacttggatacctggagcaccctcaacagccagaataatgccgtcacgtggatgggactcccagggcttgcggaaacatacagttcatacctgtctgttgcttccgccctctatgctctgattccggtactcacattattcctgatgacacagtcgattcacccgatgatgaatgcggttaagggagtgacccccgatgcgccggtggatactggtcatgtaacgcccaaagtatgggatggccctaacagcggtaaatcttcatttggtgacgtgacacgaaccgccttaaccagtaccggtcagggatacagcgatggcggcgcagttgattcaagtaatttccgtcttggaatgtggaatgctggttcaagtatcgctaacagccagggacaaggatcagctgtaacctcatcagttatgagtgcggcaagtaattcattccaggctggttacagtcagatgagcgaaattggaaggtcaggacagtcgagccagcagttctcaaccaacctgcaaacaatgaagcagatctcggataagattggtgcctctgtagcagaaggtattgcaacgaaacatggggtgagtgcgtctcagatggccagcattgcttcaaatgttattctcaacgctgggcttaatggaggtgttggaactggcaatggagccgggctgaaagcggctgtagcagggcaattgagtagcggtgcatctaagaccaatacaggcagtgactcgctttcaaatgacctttcaaaagcaatcacgaatcagcttagccaggattctgcgttaactgaccagttcagtaaagcggcgtctcaggtaagcagcgatcagatatccaatactaatgcgtttaaagaagcatcgtcgaaaatgaaccaggcgacacagacgatggcgcaaaatatttctacatcggtttcgactaacgcaagctccaatagtggaatgagccttgattctaaacaaagcattaacctggacaggttctccgattctattcgcaacaaaaacttcagtgatgatgatgtaaggaattttgctcgtaagaatgggctggatgagaatgcgtttatggagaaattcaactcctataacgataccttcaaggccagtaatcagcttggatcgcagcttcaacgtactgacgcgcttgtggctgcaacccgagatttcagtgagcaaaaaattgcgattgataccgcccggggagagacggccgaaagtaataaacaggatctccgtgaaacctccagcctgcttaaaagtctggtttccgacttcggtggtaatgcacagcagctgctacctatcaccaatcagctcgacagaatttcaggtgacgggtcaggaattaatactatcactcaggcacaggatagaactcctgacagcgtaaatacgtctggcgtgatgagtgcgtcacgcgtaggggaactgggtggaagtgtagattcgcaggctaaactcggtctttcctccaacgctcaggacgcgacacagcatgtccctggaaaaagtgaagctggctttactccgtataaccttgataacgcgggcaaaggcgatattcagggaatacataacaacaacgtgggccgcacttattctgatgaagaaaggaatgtgcttaattctctcgaaaagaatggacctgtactgaataatcagggtgtagagaaagtcgtcaattcgggtcaggatgtcagaaatgcagaaggcacatttaacgatctggaaaaggttggaggtcgggtggttggtgatggaatggatcaacgagccactgctttgaacagtatgtatcagagcgggcaagttcgtggcttatctaataacactgataactactttagtcgtgttgccaacaacccgaacttaagccgggacgataagcgagctgaattggcacagcaagctgtctttacctatggtgccagcaccatggctaccggtgccgaaagagagcagctcaaagcggatacccagaagatccttaatgaactgggtaactataacgttaactggagtatgaatgacgttaagagcatccatagcagtttcaacactcataacagagctgatggttcacttgagtcagtcgtacgggcaaacctgggagaaggtgggtcgggcggtggtctcgttggtaaccgcactcagaccgtcacagatcgcttggttggggaaaagatagaggccaacactgagcggggcgcgatttctggtgcgctactcgggggccagcaatttgtttcggatacgctaaccagcgttggggcgaaaccggtaaatgagatgcttacgggagcgggcatccttcaaacccagacatcgatagcaaatgatgcctctaaccctgcaaatatgcctgattctctccagggtaaagtccttaatcacatgcagatgtctgatggcgtcgcagctgtaagtgaccggtatcagagtattagcagcgacggcgtttcgacttatgcgaatgcagcgcagaactctgaaagggctatccggcagcaattgacggatgacccacgctttgggcctcagaaagcagatgaattcattcagtacatgaagtcagagctgagcaacacaaatgagccttaccagtcacgtgtcgataaagcggatcagtggcttaatgaaaataaaaaataa

SEQ ID NO: 105737 - DNA, 1416 bp, Enterobacter aerogenes
atgcgcagtaatgccgttttcaacttcaaaaagttacttttgtctctttctgtttgtgctgcaattttagccccgactgcaaatgcagacaacgcaatgcgtaacattttcaatggcatgatgacgtctaccagcccggccaccttttccacagcaacccgtacaggcatagttggcgggtcaatgtcttaccgaacaacaaacgttaataccaaccttgtttccatgtcgtttccaaaagcttctgtcggttgtaacggtattgacgtttttcttgggtccttcagcatgatcaacggggaccagcttgtgcaggtggcccgtggtattgcccagggtgcggctatctatgcttttaacgttgctgtttcagctatttgtgctgactgtgctgcaacgattaatgacatccaaaacaaactgcaagcgctaaataaatttgcgaaagattcatgcaatgcaacttactctttcctttctgaaaacgtgggtacgccaagccagttcgctaactcagttagctctggaccagcctcaattctgggatcgattaatggtcttattcctgattttggctcatcgatgacaaagtcacctgaagctgtcacttctcaggttaaagcaaaggatcccgaagagttcgctgaaaaattcagtggtaacctcttctatatgtcgttcatggatattgataagggaacgatgaacatcggaggggtaacggagttatccggttataaactggcagaacaacttatgtctctcgtaggtactgtcattatcaactgggatagcaaaggcgaaaaagcgggaatggaagtccgcccgtctaccatgactgtcacggattacatcatggggccaccagctggcggatcaattaaaatgctcaagtgttctccggcaccagatccatcatccccacgaaaggctcagtgccttgtcatgtcagaagttaatgacggtggttttaagggattgaaggataccatttctgatcttcttttaaacgtacagaaaaaaatcatcaacgacgttcgtgtttcagatgatgaattacgcattatctcctatatcggcatcccgaccattatcgactctttgcaaacattcgaagcaccggaagggtacgcatacattcaggacatcagcactattgctgcgacgagcctcgtaatcaacatgttgcgccaggttgaggccaaaatttcaaccatgagcataccgagtgagtcgctgtcgggtaaaagggatgatctcaaccgattaacagacaatctctcaaaacaggttaaagccgcctatgagctatcgcacagccaggtcggtaccagctcggacgtcatttcaacctgggataaccgtcgcctgcaacggaaggctttcactgaaagtattcgtggcacacgtaactga

SEQ ID NO: 105738 - DNA, 1047 bp, Enterobacter aerogenes
atgactcgtattgcattagcgccttcaaagatggttttgcttatgtctttggtaattactggtgcccacgccagccctgagcaacccctaataaaagatacgccctttgtatctggccaggcttataagaagggtttcttctggtatgacgatcctgctaaaaaaagcgaagctgaagaagaagaggttttgccaccaaccggtgctgctagctcgccttcaaaagaggaaatggtagatttaaattcaaaatggctaaaagagaatatgcctcgactgttaacgcaggcaatggataaccctaccgcagaaaatctatcacgttattacacggcgcaaaggttaatgctggatatcagtacgcgtttttctgacaaatcaaaagattattttcttaaaaacccgatgatgtctgaaaaacgcaggcaaccagtggaaaaggtggcactggatgctcaccgcactgttgttgaaaaaaatcagcaaacggtaatgaaagatatctttactaagtcaggtttatttttctttttccagagtacttgccagttttgccacgaagaaagccaaatacttcaatttatgcagaactattattcggtagatattcttccaatcagtatggatggaaggccattgcataatggcctttttcaggattttaacatccccaacgcacaaattattgatcaatttaaaattcgagaggtacctacaattttcctggtttcaaaggatgggacatcagctcagcgcattagtgaaggcatgatctccgctgatgaattaaagaacactattatacttgccgcgaagggcatgaatctgatcgatgacgcttcgttccagtcaactctagatattaaaaggcaatataccatcggcgatgatggcgttattaccgttaataaatccgaaatggaatcagacccattcctacttcaaaaaataatggaccaaaaactcgaaggctatgacatgcctacggccgatccggtcaattatctcaatgctggcggcagttttggaggcacttatgcgcagtaa

SEQ ID NO: 105739 - DNA, 1179 bp, Enterobacter aerogenes
atggcttcatcaagagtatctgtttctgatgatagtgttgatggtgttgatagactgatctataaccactgtttgaataaaaaaaatctctctgatttttttgggaagtcacgagtaacgttcaataaaatactttcggacttagaagaaaaagaacttgttggtgcacctatttatcaaaacaaaaatcatctttacacccgctgggatgttcaaaaaataatggatgccctgggttatcccaagtaccgcgaacattactttagcagagctattgttactcagaatcataaaggcggtacagggaaaagcactacatctgtagctttagcagtagcagctgctttagatctacaactcaatgcacgtgtattaatgatcgaatgggacccacaaggttcgattggaagcagcatgattcaaagtgtctcagaagatgatgtcttccttacagcaattgatgcaatccttggaatttatgaagaaaattctgagtataaaaaatatttagattcaggattctctgaagaagaaatcatcactaatatgcctttttcaacgcatctgccaaacttggacgtaataacggcttttccgacagatgctcgttttaaagataaatactggcaatgttctagagaagaacgtacgtctttgttactacgtttcaaggaagttatcttaccggtactgaagcagaactatgatttgattattatagacactccacctgaagattcacctttgatctgggctgctgacgaagcggccgatgggattcttgtcgcagtgtcaccacgtgaatatgattacgcctctactacagacttcatgcttacaataagtgaaaggtttaaacaatcaccaagtaagggcgacaatttaaaatggttcaaagttcttgctgtcaatgtagatgacaaaagtccatatgaaagaatagttttggataaattaatcagaactgttcaggaccttttgatgtccgctaacataaaaaattctgaagcatttaaggcagctgcttccaaagggcgtacagtgcttgatatcaaaaaatcagaggaactttgttccgcaaagcagcttgatgtcgcagaagaatctgtattacaggtatatcagcaatttataaatgaaataaaaagtttttcagctaagcaaggagttaacgcatga

SEQ ID NO: 105740 - DNA, 2682 bp, Enterobacter aerogenes
atggaagctatcaataattacaatagcggtttaaatcgccatcaattaggtgggtttatccctgtttacgatcaattagcagggactcactattttttgattgatggcaacagattagggtttatgtttatctgtaatccatcccctggagtttttgataatcagcaagatgttcttgctgaaatgttcaaaatggatttccctacagatactgtctgtcaaatatctctgactgcattgccagacctgactttacagcttagtgcttggtcagctgtgcgaggtgggcgtatgactgggaacgataagcttaaagcagatctgcttaatggttatcagttggactactacgacagaagtatgcataagcctttaaaacctgatcatgataaccttatgttgagggattttcaggtatggatctcgctatcgattcctttacagtctgcccttcctaccgagctggaacattcgcgtatcgattcactttactctgaacttgtaagtaagttaattacgattggattgcatccgtttaaggtcgatgcagaaaactggctctattgtatagataaggtcgtaaaccccggaaagaactcccggtgggctgaaggtttcatagacgttaacactatgaaaaggcttaatgaacaagttaacgttcccggccgtaagtatacagtcacagaaaatcatttctcatcagtcacacaaagtgacgacgaatctgagcatcgttacttcaaacaactttccgttgtaaagtttcctgaatacgtcaatttcggttgtatgtatgagttagtagttaactggatgcatggacgtaagacaattttcagcccatttatgatcactcagactgttcagtttgccgatccgctcaagttgtcaaaagaaaacgtccgctacaaagcaatcactaataaacaggcaagtataccttcagttgtcacattctgccctcgcctgcgggatatggataatgactacatggccgtaactcgcgagcttgaggatggcgcaaagcttttaagagggtatcttactttcactgttatgggtagtaatgccaattctgtgcagacagcagctaacgatctcaaatccttttacctcgaaagccgggtcaaagtagcagatgattcctttatcgttttcccgtcatttatgtcatgtctgccaatgtgcaatgacccaaagacaattttcgaccttgaccgttccgaagtagtgagcaacaccggagcggctcatatgacaccgatctttgggccctggaaaggtaatacagatagaccagtactgagtttagtttctcgtgaaggtcaactcatgggacttgatattttcaagacttctgcaagctataacatggttattggtgcaacgtcaggtgcagggaagtcattctggacagcatatctaatcaataactatcttggagctggaccgcgatctaataacctcgttcattatcgctcaacatttaagcattttttagaaaacgaatacccagatgatgatcctgacggtgctcaagtatttgttgtggacgtgggccgttcttaccaggggattgcggaacaatatacaaacagtcaatttattgatttcggtaaaacccctgacttcaccctaaatccctttgccttcctaactgacatcactgttaacgacgatgtatttaacgaagcacctgaatttaccggtgaatcaacttcaaacgatgcagaaaaagacaaagttgctcagaccataatggttttgaatcagctaaaaattatggcttcagagaaaggccttatcgatgattatcaacaatcagtgatgcttcagcttattgcagaagagtaccaagaatccagaaaatcaggtcggaccggttcaataaccggctttgctctgcgttgcaagaagcatgaagacaaacgtataaaggatattggggagcaactcggagcatggtgcgaaggtggaatttatgggcaccggtttaccgatacgttgcctccaatcaacttcgacagcagatttattgttttggaactggaggagctaaaaggcaccccccaccttcagacagttgtattaatgtctatcattcaggctgctcagcatgcaatgttcatcaaaaaagatgggcgtcgtcgcttgttcatccttgatgaagcatgggagtacattcgtcctgataattcatcaggtgccggaaatcaatcaaaccaattcttctcttccttcctcgaagcggcatggcgtaggttcaggaaaacaaactgcgctggcatctgtatcacacagtcgtttgaagattattttacttcttctgttggccgggccctgactgctaactcgccttggaagataatcatgaaacaagaaaaagaaagcattgaagcaatgaaggctaataaatatttttctacttcagatgcagaatatgaacgtatgaaaaatattcgtacagtcaaaaaggtgttttcagagatgttagtcaggttcgaaaacttccaagagatctgtcggttatacgtagaccggaaaatggagctttgttttactacggatagtgctgacaggagtaaattatgggaaattcaaagccgcgagaattgtagctatggcgaggcaatagaaattctctatgctcaagaagtagcagcgggtttggccgcgtag

SEQ ID NO: 105741 - DNA, 684 bp, Enterobacter aerogenes
atgacagccgttatccaactgaaattagcgcctgtggcttattcaaaaaccgaaattaagccagttggtcagttacctgtcatgtacgataaaactttaaaaatgggtgcccctacttcatccattggaccacggcctatttctggtgtaccggttaattcaaacgtaaggatgactagcagttatagcactgcctcttcaactggtaaccctttcgttcatccggctgcggaagtcgttaaacaaacaagctatccggtttctgctggaaatgccccacgctacgttgcacctaattctgatatcagccctggtaaggatatgtactctctttacaatggccagcccgttaacccgactctcaaccctgggcagatccagcaataccgttcgcaaggttataaacaagctgtagtggctcctgaaccacttgctgttctgcaacaggggaaagtaatgagaattacttttgcaccttataccgatgataacgatgcgcttaatcttcccggctacgtttatgtcaacgtaaaaccgcaaacatggattgctggcaagaattcgacctcaaacccagctcgcatagttcctttagaagtacaggatgcggcccgggaaaatatgcagcagcaacaaaaagcaactaaagctgtctcttcgaacggcattgttagacaactgtaa

SEQ ID NO: 105742 - DNA, 279 bp, Enterobacter aerogenes
atgaacatcaaaagattggtactcagtgctctggttgtaggtacatcctcatatcttacggggtgctccatcggtagttccgaatccgaatgtccaggcattgaaaagggcgttatctgtaaaggtcctcgcgaagttatggagttaactaataatcgagatgatctgtctgcactggcgggggaagagtcggaatcgggaaaggagaaatcggctgtcaatgacagccgttatccaactgaaattagcgcctgtggcttattcaaaaaccgaaattaa

SEQ ID NO: 105743 - DNA, 483 bp, Enterobacter aerogenes
atggatagtttagaaaaaaaagaatcgcctgaatcagctggacctgaaatcactaaaaaaatggtgcgagaaaggacaacaaaaaaaattaccttcgaaattgatattgaaaaaatattgaagtatttatttttcttcgcctttgccgtattggtcattatttatggttataaaggctttatgaatgtttacgattacttcaataaacaatcccagccttcgtacaagattgcagtgcttgacatgcctgaattacgtaaggaatttttcaagcatcacggaggccgtactgctgacaatgatagatctcaattcgaagaatatttcagaacattaatgaagatctaccgtgaccgtggctatttaattattgatgcaacgcttgccgttactgtaccggatagtgttgaaatcgtcacttatatggaacttgaagatagctctgaagcggtacaatcaagttcttataatgcaaagaagtag

SEQ ID NO: 105744 - DNA, 303 bp, Enterobacter aerogenes; identical to SEQ ID NO: 24284

SEQ ID NO: 105745 - DNA, 378 bp, Enterobacter aerogenes
atgtcatatcttgaatatatcaatgaagtaaaagtgtccgggatagttatcagtgctgtggagaaaaaaatgactgaccagagtataggtttgttaataaagctcaaaaataggatgaagacagaagttgatggtgaaatcactgagagagaattttcagttcaaatcaaggtgtcgcctgaaatgtattcaacctgtttcactggtataaatcagggtgatgagttgatggtctccggttatattgttgtcgatactattatgattgaagggagagaacatcctcttgactacatgagagtggtagcaacaagtaagttggctcacatacctaaacctctaaaaggttttggacaaagtagctttaatcagatctga

SEQ ID NO: 105746 - DNA, 873 bp, Enterobacter aerogenes; identical to SEQ ID NO: 31763

SEQ ID NO: 105747 - DNA, 1785 bp, Enterobacter aerogenes
atgggtaagccaacagaagagcaaagacctgttatcgagaatgctagcgcaaacaatatggtgatagcagcgcctggatcaggcaaatcgttcaccatgatagaagcggttatatcgattctcaaaaagtatccatatgcaagaatcgggatggtgacctttactcgcgctgcaacaaacgcacttgcagcaaagttacaaaagcgattgagcaagaaggatcttgaccgggtgctggtggatacttttcacggactcgttaagaagcaactggacatgattcgctggccgggaaagatgttgatagggccagcacagagatctgtcattcaccgggctttgaaagaatccggtgtaacgatgaagtttgctgaagctgaattcgttattgatgctatcggcagagaaatggatacggatgtgatttcagttcggcataacagacaacagatccatttgtttaatacctatcaggcgttatgccagaaagaccatgtggcggacctcaatgctctttcaaaatttgttgtcggtcaaatgcattcgggaaaaatgcgcacgttagatttgacacatttgatagtagacgaagttcaggatactgactctatacaattctcatggatagcattgcatacaagagctggagtctatacgagtatagttggagacgatgatcaggccatctactccttcagatcctcaggaggagtcaaaatatttcaacagtttgaaaaacacttcagacctaacatattttacttaaacacatgctttaggtgtgaacctgaaattttagaggtggccggagcactgataggaaagaatgtttaccgttatgccaaagagttacgctcggcaaaaaagggagggggaaaggtcacttttcgttcatatgtagatatggaggaacagatacagggtattttaagccttataaatcaggatccacatggatgggcaattctaagccgcaataatgctcacttggatgagctagaaagtttgatcgaacagccagtaattcgttacggaggtaaatcattctgggatgaaaaagaaacaagcgatgtgttaagccttatggcctttttccgacaatcaaatgatcctcgcttaatgaagagagtattggcattgtttggagaacaggaatcagttttggatgaagtggcattgagtatgagaggaagaaaagttacttttggcgaccttgccatcccggaggacagttctctcgaaacaaaaacattacattcaaacttcgtgcgctttacccaggaaagttctgataaagttgagatagcaaaacgtttcgccaaccttacgaaatggatggaatcgtcgtcaatcaagatgaggagtaataaaggtacagcaaccttaacaaaaattgctttagacacttgtaaacagtgggcagaaaagactggttggatgaatatgataaatcgtgctgctgcaatgtcattaggccctaggaagaaggacgaggaatacagcccagagaaagtagtcctatcaaccttgcatggttcaaagggtcttgagtggaataaagtaataataatgagttgtaatgcggatcagataccaagtaaaagatcagttggggaggaggcaatagaagaagaaagacgtttgctttatgttggatttacgcgtgcagaaaagcaactttttgtaatgtggtatggtgatccttctttctttttaagagaatgcagtgaagaaaagataaaagaagcagctaatattcgaatttctccactttatacagaataa

SEQ ID NO: 105748 - DNA, 873 bp, Enterobacter aerogenes
atgaaacttttacgtttagtatctctggtctcttctgtcgtcattggtttttccctatcgggttgtgccggtgacaccggcactacgccaggcaccgctctgaatgcgtacagtcacggccagtactggcatgctaatgcaaatgattctgtcgccaagaatgcctattcgtttgctggtttcgacgttaattttaaggagcaagaggttactcctggaggggatgccgacaactttctttctaagtatctcatcaatagttcgatgggctacgtaacaggcggtctaaaaggttttgggatcatgagcctcagctctttgtacagttcttctgacgccgaatacatccaggtcaatcaatacctagtgttcgtccccaatccaaaaaaattgccttacaatgatgaaagtttggtacgtgagggagctaagtatgtttttgagcatacaaaagcaactcaggcctcatttggatacaaccctgaaaaacagaaagcagctctggccacatgtaaaattgatatggcagtcgtcaataaatggagtacctgtgatctgccctctaagcctgatgctgatgttttccctacagattcaatgtacagctttcaggcgattcgccccgcaacaggaaccgaaattcctgagctaaaccttcccgctggtgattacgctgtaattcgttatgtgttcatcccatttaaaggaaacgaaacaagcgctgatttttcgggtatcattttccgttctgatagcccaaatacaacaactccagggggtgttgcagcctccatcaacggaaaagattattacctctttaccggtgaatacggtaaaaaaggcttcccagaaaaaacattgaaagccaagtaa

SEQ ID NO: 105749 - DNA, 3189 bp, Enterobacter aerogenes
atgaaacttagaaaaacgatagcttcaactattattgcatcaatgattgccaatactatgagttgggctttttatatctctctcataaatatggtaatgactcctcgtatttatgcggcagacgctatatttgaccagctcgaaagtaactttaatcttgctaatcctaacgcaaatcgcaatgcgacaaccagtgctcaggacattgttgagaagtacaagaatgcggattcaggcgagaatgtcagtgggaagatcaccgagaaatacgtgggtaaagccgaatccgctaatcttaatctcggaaagtatggggcagggaactcaaatgaaagtgtcatgaaaaatgccgcatccgatggaaagtccattggtagcgccgtacaactgccgagtatgtctggagggacaatcaattcaaactataccaaggaaggggcaaagctgctctctcgggatgctaatggcaacattggtataagcagtaatcccaatactactcctggaaccaaaacaaataccggagagattttcagctcagagcaaaagcacagcgatattaagttcaatgccgcagatcgttatggggatgaggatggctttgtaaacgatataaagaatcggaaaagccagttatttgatgctcaaagttatgatggcgttgcctaccgcaccctcgtaaatgctaacaaggacaacccggcatcatctataaagcctaacgatcccatgtttactgcggggagaaatgagataacaaatgctgttgctggtactggaaactggcttcagaactgtaatgttgagacctctaaaaaaacagtaaccacacactatcctgattacaaagagttctactgtaactcgcctaagcaagataacttcagcagctgcacgataacccgtgatttttcagtccctgtttacatttcaggcggaaacggagacatgtcgatgtgcggcgataattgtgtgcgtatatggtttggtcgccgtgatgacaactactggagtgacggggtatatgataacgaactgacattaaaattccatccggatgcaaaattggcctcagcaaagattgttaacgcggagtgggatgaccacatgcgggtaacacttgatggcacgcagatttttgctcacatagatggtgcatatcgagaaagtgactatccggctcctaagggatcttgggagttaaaaaaatcgtggaaactcgacaaggtttacgatgtgactgataaggtcagaaaatcggtgtatgaggagcctgatcgagaagtgacaatggcatccagagtatgggttggtgggaagggtgaagggtattttgaggttgagctgacttttgaaaatatgaagctcgaagataagcacgtccaggaaccagctggttgttacgatgctgtacaagctccgaatacattctgccgtttcgatcggtttaaagatatggatgttggcacaaaacggcttccggaaagcgtgctttcattggcaaagcctctgtatgaaggtgataaaggatttcttacctggaagacaaaccttgaaggctacttttgtgatccattggccaaagacaaaatttgctcttatgacgctagtggaaaaattatgaaagacgctaatggaaaggacctctgttacaactatgaagaaataaagagtatgcctgatgcatgtagtgcttataaaaatgatgcagcatgtgtactcgataaacaaacatgtgcagagggttggttcgatgagggcactaacagttgctacatgtatgaacagaaatacacctgtgacagagggaaggatgtagttcgggaggttgaatcttctacaaatgcctgtgttggcatgatcccatgttcaggtggaacatgcgaaactgggccaaaggaagagaacaacgattttggaaaagttgcggcttattcaaacatggttcagtacatgcagggcgaagccaaatgcgaagaccctaacgatgccaattcatgttccgtctttgaaggaaaacctgaatggtgtggtcgttcagtaggctttgtaaatggcctggcaaagacggactgctgcgaagcaccacagggaaccgcaggagcacttgaaggtatcatgcttgccggatctatgatcagaaacacaaactggaccagagttaatgctcagctaataaaatggaccggcggtgatacaggtacatgggcttctatgtctaatgcggtcggagagtggactgcatcagctggtaaaacagtagggcaaatgtggaacaacgtcacgagctccttaacgagcgtatatgaaaacgtcgctggtaatctaagcagggcagttgggtcttccgcaacttctggaggggcaggaggtgctggccagttggcacaggaaacaatgtccagcttcggtataggtcagcttaagcagatggcaatgaagaaagcctacgaattgctaccagatacagttcgtgactttgtctttaagaacgttgctactaccggaggagaggttgtcttctcggctgcggttcaaaactttatgcttgcattaaacgtgatcggttggatttatacagcctatcaggtcactaaaatgcttttagaaatgttggtagcatgcgaccagaaagagatggaagcttctattcataagaatcaaaaatcctgttttacattagatacggaacgatgcgtcaaatatctgaatgttggtttcacaaagaaatgcgttaaaaaagcaacagacatgtgctgttataattccatgttgtcacgcgttattatgcaacaagcttatccgcaattaggaatagaccctgtcgcctctaattgcgtggggctatcaataaagcaaatacagcaactggatttcgataaaattgatctgacggagtggattaatgatgcagttcaggtaggagaagttcctgatcaatattcaaaattctccgaagaatcaattgtggaaaacttaccattccagaatgagaactatcaacttccatcagaacgtaccaaggaagcaatgggcggtgaagaaaatatgataaaggccagacaagaaaatgctcaggctataaaagaggaaaatgtagattgtagctatttacctcgaccggccatatgtgaggtaggttcaactacgctggatccggttacgggcaagcagttgccgaaatattga

SEQ ID NO: 105750 - DNA, 597 bp, Enterobacter aerogenes
atgctcaaattactgattattggcgagtgcactgctgaaccctatatagatgccagcctgacctatataagcgaagtggaccctatgtgggaaagtgatctgcttacactcgtcctgaatccagaggcagtagtttttgcaaacccaattgcctcaatggtgtgcgctgctgactgtgtagcagtaacagcaggaaaggataatctcgctgcatacttttgtgccggatgcgatggcaacctttatccattaaccggccacatttacgcaaatgatgacgctgtaaggacgagttcactgataacccagcgtcttctgactaaactacatcgccagggaatgctgatgcgaacgatgggagcagacgcaatgtgtgagaaaacgtgggaatactttacacctcgttcccagtatcggctttcaatgcttttcccaactcctgaggcgaaagggccggattgctgtcatcgtcttggtgattcggtacatgactggtcaacccttaaaggtgggcgcaaaaaaataggcaatgataattatgtctatatgttgtggcgttacaatgactgttgcgtcagatatataccaggcgcttga

SEQ ID NO: 105751 - DNA, 1047 bp, Enterobacter aerogenes; identical to SEQ ID NO: 30071

SEQ ID NO: 105752 - DNA, 414 bp, Enterobacter aerogenes; identical to SEQ ID NO: 30070

SEQ ID NO: 105753 - DNA, 810 bp, Enterobacter aerogenes; identical to SEQ ID NO: 30069

SEQ ID NO: 105754 - DNA, 1356 bp, Enterobacter aerogenes; identical to SEQ ID NO: 30068

SEQ ID NO: 105755 - DNA, 228 bp, Enterobacter aerogenes
atgacatggagaacgaccagaacacttttacagcctcaaaagctggagttcaatgagtttgagattcttaatcccgtagttgagggcgcccgaattgtcggcattggcgagggtgctcactttgtcgcggagttctcactggctagagctagtcttattcgctattttgtcgagaggcatgattttaacccacatttcccaagtaaggcgctgatttcgctgtcctga

SEQ ID NO: 105756 - DNA, 582 bp, Enterobacter aerogenes; identical to SEQ ID NO: 30066

SEQ ID NO: 105757 - DNA, 318 bp, Enterobacter aerogenes; identical to SEQ ID NO: 31740

SEQ ID NO: 105758 - DNA, 306 bp, Enterobacter aerogenes
atgaatgtacatctgaaatatgatacgataaagcactatcactttgattggctaacgcctgctggcgactatcctaattcagcggttatgctcgtaggtttccgtgatgggcgctggattattgttcaagagttcggaaatgattatagctgcttcgagggcgttctgaagaatggtgatgatcttaatacggagcctaaattctattccgacttagaaagcgtagcggttgctgcttttggcatgatgaagcagatatatccccagtaccaagatagcacgttagaagaattcctcgctggataa

SEQ ID NO: 105759 - DNA, 672 bp, Enterobacter aerogenes
atgtatagaaaggttttagctctttcagccttactgatttctgcttgttccaccgataatcctcataaacaaagtatgcaccacaatgattttgagctttcggactcagctgtaaaaattcaaatcaagtctggaaataagacaatctccggctcaggtacttggatcgatgaacaacatattcttacagcttcacatttatggcttgatgcaagcaaggattatagtctaagtataataacaaggaatgggagccaaccagcaacagttatcaatattgatgatcctaagaaccgggacctcgctcttttaaaagtagaaaaaaatactattgtcaaagccccacctaattggaagcttccagtatgtgataatgttctagctccaggtgagtctgtttgggttctatcgggaatgtataatacgctttcaaatacgtatgcttcccccgactcaacctactattataaaggaatagttggttctgatggtttgactgctttttatcaaaatggagttagtggaagcgctgtgttaaaccaatctaagagttgcttatatggtgttgtgagtcaacaagacattaaaaagatcaatgtctatcagatatatattacgaagattactacaaatgaaattatacgcggattcataggttataaaaataattaa

SEQ ID NO: 105760 - DNA, 177 bp, Enterobacter aerogenes; identical to SEQ ID NO: 31741

SEQ ID NO: 105761 - DNA, 408 bp, Enterobacter aerogenes
atgtccccggaattggtatcaggcattgcacgagtggcgcatgaaaagctactttcagttttgacggagtgcggcacaaagaagacgaaaggcacatgcctttttgcaagctatcttgtatgttatttagcaaaaactaaaggtctagatgctgttgttcgtgggggtaacggtgcagatgatggcggtatatttacagagagtggtggctttggccattattggtgtgaattgaacttcgaagaagtgcaatattatattgacatcacttccgagcagtttgggtttcatccatacatagtgaaacgcgtcaacgatataacaggatggccacgatatattcctggtgatcaggaaacggtcgatagtcatttagaacaattattacgcgacggctatacagaatag

SEQ ID NO: 105762 - DNA, 426 bp, Enterobacter aerogenes
gtgtttgcgggaaaaaaatcggcccagatccgcgaaattttaatcagcgagtcagcttgggaagaaatgacctgcttattcgcaccttccctagatgcctgtgtatccatgctcggaaagatactaaaaaaaatgtctaacaaaaacggtatctcacaaacggaagaatctgaattcgcatttcttttaacaaactatattaaacagactttgacttttagagaatggcaacgcaatgctgacggaaatcaacgactgcactttcttattaatatctacggtgcaaaagaagacggtggcgaagtggttttaagaccatttattgtaaatcctgatgaattaatgcttactccagcggatgtcgttgaatttaattcgcaggttatcaacgttgatcggcagcgtcatcctgagtggttccgttaa

SEQ ID NO: 105763 - DNA, 150 bp, Enterobacter aerogenes; identical to SEQ ID NO: 32306

SEQ ID NO: 105764 - DNA, 612 bp, Enterobacter aerogenes; identical to SEQ ID NO: 94343

SEQ ID NO: 105765 - DNA, 570 bp, Enterobacter aerogenes; identical to SEQ ID NO: 94783

SEQ ID NO: 105766 - DNA, 468 bp, Enterobacter aerogenes; identical to SEQ ID NO: 103228

SEQ ID NO: 105767 - DNA, 786 bp, Enterobacter aerogenes; identical to SEQ ID NO: 94346

SEQ ID NO: 105768 - DNA, 639 bp, Enterobacter aerogenes; identical to SEQ ID NO: 31788

SEQ ID NO: 105769 - DNA, 1038 bp, Enterobacter aerogenes
atggctgaactattaaaatctgaaagtcctgtttcaccatcagtgcaggatatcactgaagctttaaaaatcgttgtcgatgatggaagtaaagctgcaaaactggtttgtcttaatgaaagaaacgaattagttcccttgcttacacaaaatagttttgttccagatttccgtgttcgccatgagggtctcaatccttttaactatcttattgatgggctggaaaggttttcgcatcacagcgaatctagtaactcactggaatcgactgatgtatctcaccaatacgatgaaattagccggttaaatgttcaccatgcacttcatgcttctggtttagttcctcaggatgttcacctctttgttactttaccacttagccagttctatactgctttaggggaaacgaatattgaaaatattcagagaaaaaaagataatctgatgaaaccagtagagcgttatcttgacggtaaacgctattcttttaacgttttgtctgtgactgttttccctgaatctttaccagctgtgacccgggcagatgaaattgaggatattgcttcatttgaatcaagtttggtaattgatcttggtggtactactcttgatgttgcaagtattactgggcaattagaacagatttcgaaagtaaaaggttttgaccgtattggttgttctattgtttacgatgagatcagcaggtatcttgaatctgagaaactgaatacgagtaatgcttacattcatcatcttgttgataatcgtcatgataaatcagctttgaaggttgcagaggacaagcgtgacggtgtttttgatgcggtaaactctgcggtacagaagttgcaaagtaaagtaatcagagcggttacacaagtcgaagagaggcctcataatgttttccttgttgggggaggttcatatctcatcgaaacagctattcgtaaacattttgaaacggctaaagttatcatggtagacaatccgcagttcgcattatctttggcaattgctgatactatttattcagaataa

SEQ ID NO: 105770 - DNA, 948 bp, Enterobacter aerogenes
atggcagctgagcacgtccaaactatagaccttacaaacttctccggaaggattttctttctggcagatcctcatggacattactctgcgctgtgcaacttgatccaatcagttacaaagccagaagaagagatagtaattttctctactggaaatttgtttgactatgggccggaacccatagaattgatgaaggcgataaacagtggctttttcgatggacgttttgtgaggcatttctcagctgccggagccggagaagaaatgttaaaaaaattgttaccattaaacaaagaccggagaacattttaccccagcacatacctcaatgagagatggtgtgtaatgggcggaaagtggcataaagctgtgaatcgttactatttagaggaagaggtaaaaaaacttcttaatacccagcttggtacgatgatgcagattttactaaaaggcgatataaaaattggggtttgcccttctgattacgcccctatccgcacatcattcactgatacttataatgcgcttcaagcattcaactatgccaatgtgaatatttttcagagccagtttctattcggtatggaccatgccgtaataccaatgatgataaatgacgtcaaccttatggtcctaggtaggaatcctgtaaacagcattcgaaaagcccatggtcgtactcaaaacaatcttccagtactgatcggtaattgtttgcatataaatactggatcactctatatgtcaaaattagaagaccaggtaatagttgctccgggtataccgcaaactgactcaccagcacttacattagtagaaataatcatgaagaacaatccagttttattgtgtcatcagctaatacaaacaacaaacaagttttattcacttaaaacctatcctttagaactcgattcgattgaaaacaacattgaggtaacaagatga

SEQ ID NO: 105771 - DNA, 837 bp, Enterobacter aerogenes
atgaagataaattggaagattatctcaatttcaacattacttttgcatcttcacgcagcagctgcaccacatcaagagaaagagcatagaaaagatgctttttcttctgccgcacagaaaagtgattcacttatatctgctaaagcggagcttataaacggaaggtggtttataaatggtaaatataggcctgttctaaagaccagcatgaccaaaaccaatttcttagaaatcatgaatgtttcaaataaagaatcactttttattgtgataccaaaacttgagtataatatcattgccaaaaataaaatcttactaaatgaaaaaattgcattaagcgaaggcacatccggaaaaagcattgtttgggtcgagccaaaaacaagtctaactatatcgtttataaatgaccttgctaatacgccccttcaggctatcgtttcgatcacaagaaacaacaaagatataattgccatctttggaccggatcagggtaaagggtttactcttcccggaaatacgtctaatgatcaagtgtccgttcctgactattctgacctaaatataaaaaaacttaacatacctcaaagtgttggtaatccagtaaccatcaatcctaaagagaagaattacctcttagttggacaaggaaaatatgaaatcttatctcttcctaaatatcaacatttagtattttctgaacccgtttatattgagaaaagaaaaaatatcctcggtggttatggttattggacgaaagaaacaattctctaccccggtgaatcattatcttttataacgagcgccaaaaacaatctaaggaagcgggatgattaa

SEQ ID NO: 105772 - DNA, 522 bp, Enterobacter aerogenes
atgattaaagttatcacacttttattgtttgcattactgactggttgtcagtcagtagaaagtaaaatcgaagaactcccgacagttggttttgaccctattctatacaataaaagtgaggcctttactgacggaaaagttactttacgtgtcgaaagttcaggaactgatgtttggcttgtcgccaagaatggaaccagaagttttattgagctttcaggcctaacgctaggtggtagtcgttgtgcttacaatgcccgtagtaagcaacttttgcccccaggcagcgtaagcacattcgtagttcctacggttggaatgcttggactttgcttcaacaatgaagatcaacttatgtttattaaccgtgcttttagcagaatctctcccaaagcaaaaggaaaagattcgctttcgcttttattttctgttagttacgattttcccggaaaagcggacctaattactaaccacgattttcaagagttatatcttttatttttgaatgaggataatctatga

SEQ ID NO: 105773 - DNA, 582 bp, Enterobacter aerogenes
gtggttttatcaaaagtgactttttatatggcaacttcagacttcgctcttaaaaaccataatgttaaagcatttggtcaggatgcagcccttgtcattgagatgaacaatgaagatgttagctcatcaaaaccttcacctttttcaaatgagattgataattattatcttacattgcacgtcgctccaaggaacgcaaaaaaagattatgactggggctcaaaccgttctgtacttctaaaattgtcgacgaatgaagttatgcagatggcatctgtatttcttagaatcatgcatactttaaagattgataagaggaaaacctcacatcatggccacgtcgtatacaaaaatataagcgttaccccaaacgagaggggcggtttgttgttatccgcagggatagttccagtcgataaagatggcttaaaacccttcatgcacatggtccccgtctcacaaatggattgcgttaaaattggcctctacatacttggatatcttgctcaaaaaacgccctgggtaagctccgagtctataattaccgcgcttcgcttatctgaagccaagaattcaaaatag

SEQ ID NO: 105774 - DNA, 426 bp, Enterobacter aerogenes; identical to SEQ ID NO: 31762

SEQ ID NO: 105775 - DNA, 741 bp, Enterobacter aerogenes; identical to SEQ ID NO: 32313

SEQ ID NO: 105776 - DNA, 1524 bp, Enterobacter aerogenes; identical to SEQ ID NO: 32314

SEQ ID NO: 105777 - DNA, 627 bp, Enterobacter aerogenes
atgagcatctccaccacgaaacgccgcaatgaagaagtcaacgttggtctttctgatcgtcggaaagcagagattacagccccaaagtttgatctgtttggtgaaactttcgagtttgcggaaattttctctgcgactgtcatcagttccaacccaacaaatgctcagatcttggtaaaaacaaatgatggcgatgaaaagcagatttcagcctatggtatcgcggtcaggaactcacacaggattcgtctatacgagcttcgaaagtatagcaacgataactcctgtgtcgtatatgccgatgcgctcattattaattcaaacacgggtgagtataaagtaaacttaaacaggaaaaccgtcattattccagcttttctgacaatgctatttcataatgcttcgacagcatctttcttcagagtaatgccagttccgaagtggttttatattctcttcactttgctttgtttggcttctttcattgcattttgctcattgcttgtgggattcaaagatggatatgtgtgggatgagcacaagtatatgtggatcaaatggattaaaagaagaagcgctagatttgatcatgaaatcagaaatcttatcgatttagtaaaaaaataa

SEQ ID NO: 105778 - DNA, 861 bp, Enterobacter aerogenes
atgggcatgggcgccgcccgcgcctgcctgcaggcgggcctgaacacctggggcgttgacatcaatcccgacaactgtcgcgcactgctggcggcgggcgccaaaggcgcgggccccagcgcggtgccgttcgccgcggaactggatgcagttgtgctgctggtggtcaatgccgcccaggtgcgggggatcctgttcggcgagagcggcctcgccgcccatctgaagccgggcaccgtcgtgatggtgtcgtccaccatcgcctccgccgatgctcaggccattgccgaggcgctggcggagtaccagctattgatgctcgacgcgccggtatcgggcggcgccgtgaaagcggccgccggcgacatgacggtgatggcctccgggagcgatgccgcctttgcccgactcgcgccggtgctggacgccgtggccggcaaagtctaccgcatcgggagcgacattggtcttggctcgacggtaaaaattatccatcagctgctggccggggtgcacatcgccgttgccgccgaagcgatggcgcttgccgcccgcgccgggatcccactggagacgatgtatgacgtggtcacccacgcggcgggtaattcctggatgtttgagaatcgcatgcagcacgtcctggatggcgattactcgccaaaatccgctgtcgatatttttgtcaaagatctcgggctggtgaatgacactgcccgggcgctgaccttcccgctgccgctcgctaccaccgcgctgaatatgttcacctccgccagtaatgccggattcggtcgggaagatgacagcgcggtgatcaagattttcaacggcatcaccctgccgggccataaacagtga

SEQ ID NO: 105779 - DNA, 633 bp, Enterobacter aerogenes; identical to SEQ ID NO: 30074

SEQ ID NO: 105780 - DNA, 681 bp, Enterobacter aerogenes; identical to SEQ ID NO: 30073

SEQ ID NO: 105781 - DNA, 1620 bp, Enterobacter aerogenes
atgcctgtacttttcagggtgaaagttattccgctggttttacttctggcaatgatctttgcgtttttacttaactggccaatattgctgcatttttacgagattttgtcgcatttagagcatgtcaaaattggttttgtcatttctattccctttgttctggttgcggcgcttaacgttgtttttatgcctttctcagttcgttttctgctgaaacctttctttgctttactgtttatcactggctcactggtcagttattcgacactaaaatataaagtaatgtttgatcaaacgatgattcaaaacattattgaaactaacccccaggaagcgcattcctatcttaatggctcaattattatatggttcgtctttaccggtatccttcctgccatcctccttttttcaataaaaattcaatatcctgaaaaatggtataaaggcattgcttaccgtttgctctccgtgctggcatcgttgagtttgattgcaggtgttgccgcactttattatcaggattatgcctctgtcggccgcaataactcgacattgaataaagagatcatcccggcgaactacgcttacagcactttccagtatgttaaggatacgtactttacgactaaagtgcctttccagacgctggggaatgatgctaaacgcgtcgtcgctcacgaaaaacccacgctgatgttcctggtgattggcgaaacggcacgcagccagaatttctcgatgaacggttattcgcgtgataccaatgcctttaccagcaaatccggcggcgttatttcgtttaaaaatatgcattcctgcggtaccgctaccgcaatatccgttccgtgcatgttctcgaatatgaatcgcaccgagtacgacagtaaaaaagcatctaacagtgaaaatttcctcgacatcgtgcagaaaaccggtgtctcgctgttatggaaagagaacgatggcggttgtaaaggcgtatgtagccgcatcccgactgtcgaaattaagcctagtgataacccgaaactgtgcgatggcaaaacgtgccatgacgaggtgatgctggaaaaccttgatgatgaaatcgccaaaatgccaggtgataagcttgtcgccttccatatcattggcagccatggaccgacttattacctgcgttatccggctgagcatcgccacttcatgcccgaatgtgcacgtagcgatatcgaaaactgtactcaggaacaattggtcaacacctacgacaacacccttcgttatacagactatgtattagctgagatgattgaaaagctaaaaaattacagcgatcagtacaacaccgtgctgctttatgtgtccgatcatggtgaatcattgggcgaaagcgggctatatctgcacggcacgccgtacaaactggcaccggatcagcagacgcatattccgatgcaggtctggatgtcaccgggctttatcgccgggaaacacatcaacatgtcttgccttgaaaataatgcggcgaaaaaatcatattcccacgacaacctgttctcatcgattttggggctgtgggacgtaagcaccagcgtctataatcctgaccgcgatttgttccgcgaatgccgtggctaa

SEQ ID NO: 105782 - DNA, 477 bp, Enterobacter aerogenes; identical to SEQ ID NO: 32316

SEQ ID NO: 105783 - DNA, 876 bp, Enterobacter aerogenes; identical to SEQ ID NO: 30085

SEQ ID NO: 105784 - DNA, 657 bp, Enterobacter aerogenes; identical to SEQ ID NO: 31789

SEQ ID NO: 105785 - DNA, 1260 bp, Enterobacter aerogenes
atgcggcttatcgccaccgccattgtcaggcgtgcccccaccattatccgggtcaatcggcgtttccccgttgttggtcaggtaccagttaccggcattaccgccctgcccgcgtgccagggtgtagtcgtaggcgccggcgacaatacgtcctttctgagtgaactcaccggcagaattaccgccgacggagaccacctcaatcccattgagggttttcgcaccgctgccgccggcattggtcaccgccacctgggtggtgccgctggtattgccgtccaccaccagtttgtcggtgagcgagttatcaccgccgagttgggtgttgaggttcagcgtaccgccgttaccggcataatccccggcaacatgcaacgtgttacctgccgtcgttgcgcccggcgcgctgacgttgatcaccccgctgttactcaggttttgaccgatggtaaaggtatggcctccgctcgcgctggtatcaagcgcgccaatggtcagcgtaccgcggttgttcacatcgccggccgtgccgccaaagccgccaaactgcgtaccttccgccacattcacggtggaggaggccagcatgacgtcattaccgtcgctgcccaactgcaggccgccggcattcaggttggtggtaccggtgtactgcgcggcgtcggcggtcatcgtgaccagaccggaaccgtttttgtccacatcgccgctgccggtaaggctattgctcagcaggccctgtacaccttcgttcagcgccagcagaccgttatccacgattgccgcagagcccagaccggcaatgtcgttcagctccaccgtggcgccgctggcgatggtcgttgccgcgttcatctgcgcattcgcgccattgaccgtcagggtaccgccgttaaccgccagcgccccgttcccggtcagcccgccgttcacggtaccgccattggcagtggccaggctgccgccattaaaatcggtggtcgccccggcatcggtattcagcaggccaacgctctggctgtggccattcaggtcaacggtggtatccgccgcctgatgcagttccgatgtttgccccagtacgttatcgttgttcgccagcagcgtaccgctgcgaacgtccgttttcccggtatagtcgttcgccaggttcgacagggaaacggtattgcccgcgccgccatcaatcgccaggtcgcccgcgccggtgacctgggcgctgagatctgccgccgcgccggtggcgccctgcgcatttag

SEQ ID NO: 105786 - DNA, 1494 bp, Enterobacter aerogenes
atgactaataaattcacatccaagatttcctacacagatgccttaacggtagttacctacaagcagcctaagctcagtatagatgttacagacattcttcagggctcagatatacctgtaaccctgcttgataacgatgaacctataccagcaggcaccgctgaggttctctggtcagaggataaagtcaactgggtgcagggagatacaacttacactgtggcttcagctgataccctaccgtctacgatttatgcccggatgcgttaccttgattccgatgaactggcagaggagtcttcatggaaggaaacgtctgctcggttggcagccgcaaaacccaagcgcctttctgtctcggtaacgggggtttcaaaggtagaggttggtcaaaaagttactttggaaggtaagttcacgaaccctaacagtaagtaccagaatggtaataacgtagttgaagaatggaaaacaccggatggccagacatttaagggctcttcactgtctgttacccttactgagcaaatgttggataaacagggatatgctgcttttgaatacagtgcatggttagcggacaataaggagaatacggtttctacccgtagagtttctgtcaaatcgtgggtttataaatttcccgagatgaaaataagctccaaacttaaatacgacatggcaccgaccaccctacgcgttgcgttgagcggtattaaggatggagactatcctggtgttacttattcccgtgaatggatctacgacaaagagaatctggtaatcactaaagatgaaggtgacaccaaagaatttacaattgaaaatcctggcaaatatacattgatggttgttttcaaagataaccgaaacaatgaacagcgtatcgaaaatacctttgttgtcgatgaacaaacgccaatgaacgttgagatgacacccaagttctctaacaaatatatgagagctccactcgatgtaaccttaaggtcaaacatcaagctatctcattcggcggactcgatagatacggtcacatacaaggtgaacggtgaagtaatacccagcggcaaaaattattgggctcaactgatctcgggtttaaaagaaaagaaatacgagattacaattgatgttgttagtaaacttggacagagaggttcagcatctgttgagtttgatgtcgttaaaaacgcagtgcctaattgtacattgagctacacggaaaccaacctaagctggagctttaccaataaatgtgatgatactgatggaaaaatggttagatatgaatggttcatcaacggcgaattaaggaacgttttcggtagtacggctacactttctaaaaaccttaaccgtggtaagcaggacataaaagtaattgcttatgatgatagtggagactttgcaacacagcacgtgacagttttcggaccggctgaagaggcaagtaagtctgaaaacactgtatcaataccaagcagtgagtag

SEQ ID NO: 105787 - DNA, 570 bp, Enterobacter aerogenes; identical to SEQ ID NO: 34949

SEQ ID NO: 105788 - DNA, 501 bp, Enterobacter aerogenes
atgccccactttgggcgcggcgttgggcgccgcaagatgaaagctctgtgtgaaggcttggatattaagaccttggatgatttcaatgccatcaccgaagagcagatcgttagcgtcgacaaattcagctacaaaactgccgcaaaagtgcttgcaggtatggctgaacatgccgagctattcaacaagattcaatcaatcatcgggttcaaacagcaggtcacttcgggggatcgttttaccggtgagaagatcgtgatcaccggttttcgtgacgcggccttggagaagctgattgaagctgagggtggtgaagtgcaatcatcagtctcgtcgaagaccaccatggtgatcgcggcatccacttccggatcttccggcaaattgaagaaagtgcacgatctcaacaacagcggaaaggcaaatatcaaactgattgatctggccaccttccgtaagcaatatctggaacaaccagcatcgactggtttggagttttaa

SEQ ID NO: 105789 - DNA, 642 bp, Enterobacter aerogenes
atgaattttacccggattgacctgaatacctggaatcgcagggaacattttgccctttatcgtcagcagattaaatgcggattcagcctgaccaccaaactcgatattaccgctttgcgtactgcactggcgaaaaccggttataagttttatccgctgatgatttacctgatctcccgggctgttaatcagtttccggagttccggatggcaatgaaagataatgaactgatttactgggaacagtcagacccggtctttactgtctttcataaagaaaccgaaacattctccgcactgtcctgccgttattttccggatctcagtgagtttatggcgggttataacgcggtaacagcagaatatcagcatgataccaggttgtttccgcagggaaatttaccggagaatcacctgaatatatcatcgttaccctgggtgagttttgacggatttaatctgaatatcaccggaaatgatgattatttttccccggtttttacaatggcaaagtttcagcaggaaggtgaccgcgtactattacctgtttctgtacaggttcatcatgcagtctgtgatggttttcatgcagcaaggtttatcaatacacttcagctgatgtgtgataacatactgaaataa

SEQ ID NO: 105790 - DNA, 501 bp, Enterobacter aerogenes; identical to SEQ ID NO: 38943

SEQ ID NO: 105791 - DNA, 249 bp, Enterobacter aerogenes; identical to SEQ ID NO: 32317

SEQ ID NO: 105792 - DNA, 576 bp, Enterobacter aerogenes; identical to SEQ ID NO: 32318

SEQ ID NO: 105793 - DNA, 201 bp, Enterobacter aerogenes; identical to SEQ ID NO: 31764

SEQ ID NO: 105794 - DNA, 519 bp, Enterobacter aerogenes
  misc_feature (309)..(318): n is a, c, g, or t
atgtccaagcaacagatcggggttgtcggtatggcagtgatgggccgcaatcttgcgcttaacatcgaaagccgcggttataccgtctccgtattcaaccgctcgcgtgataaaaccgaggaagtcatcgccgaaaatccaggcaaaaaattggttccttattatacagttaaagagtttgttgaatcgctcgaaacgccgcgccgtattctgttgatggtgaaagcaggcgcaggtaccgatagcgcaattgactcccttaagccctatcttgataaaggtgatatcatcattgatggtggtaacacnnnnnnnnnntcttccaggacacaattcgccgcaaccgagaattgtccgcggaagggtttaatttcatcggaacaggcgtatctggcggagaagagggtgctcttaaaggtccatcaatcatgccgggtggccaaaaagaagcgtatgaaatggttgcccctatcctcgagaagattgcagctcgcgcagaagatggtgaaccttgcgtga

SEQ ID NO: 105795 - DNA, 840 bp, Enterobacter aerogenes; identical to SEQ ID NO: 6027

SEQ ID NO: 105796 - DNA, 534 bp, Enterobacter aerogenes
  misc_feature (450)..(459): n is a, c, g, or t
atgagcgactacatacctaaaaagagagtgctgcttatactggattggtatgtcccccttaatattttattgctgattctcgttatgtgtgtctttttcacccgttatacatttggatacggtttattgaatgggtgcctgcctgctgatttttatatgattgatcattcggataaaagtattaaaactggtgaactcatagcatttaacatgccgaaatcggtacgttttatcccagaaaatgaacgagtcataaaaattgttgccggtgtgggcggtgacaaacttaaagtaacaatggatggggtttataacggggacaaattttttgaagctaatgcacgtcgtatttcgaagaaatacaatattccgtccattttgattgaaaaagaattgataattcctgaaggcgaagttttcctaattgggcaaaccgatcactcatgggannnnnnnnnnatgggattcccgtttttggggaacagtaaagctgaattcagtaattgggaaaacatatgcgatcttttaatgtaa

SEQ ID NO: 105797 - DNA, 432 bp, Enterobacter aerogenes
atgatcgagcgtgaaggtggagttattcttcagctccacatcggacatgtgctggattttgtcggcatccttcagggtataaaccgaattgttgagagccagcgtgttgtggcccgcgccgccatccagggtggtgaacaacaccgggttttcctctgcggtgatattcgtcagttcgaacaggtcatcgcccgcgccggtggtgaacgcggttttagcctggctgccgtgctccagggttaccgtgttattgccgctcagcagattgacggcgccggtcaggttaccgttagcctggttggtaaagtgcaccgcctgcttatccacattcatcaccagcgcatcagcggccgtagaggcaatggtgccgctgttcacaaagtccgtggtgtggccattgttgatatccaccacctgggtagcggatgttga

SEQ ID NO: 105798 - DNA, 786 bp, Enterobacter aerogenes
atgattgtcaaaggaaaatttgaatctcctttgattacaattgatcctgatagcttcagtcagtatcaagtaactcaagtaccgacaattatttctagggagcaagctcgttttgcaaaaatggtaggctccttcaacgttgagttttttcagcgagaacttgctaaaaaacccgatcaggatattttcccggttgctggtaccacttatcccgttgaagaaaagagcatcattaaagaactggaagaacgtgcacaaaaatatgactgggaaggtgcaaaaaaaagggccgtttctgacacatggaaaaatcaatggatggtcgacctccctcctgcccaggaacacaaagaatttttaattgaccctacagtgagggtcactcaggacgtaaaagataagcagggccgtgtaatagcttccgccggtgagttgattaatccactttcgagatttcctcaaaacctgacgatgataattttcgatccactcaatccgggccagctggtatgggctgagcagcagtatcgacaacgtctgggtagtggaaaagtaatgccaatgtttacccgtatccaaaaagataatggatgggatcacctaaatgatttacgtgaaaaatttaacggtaaggtgtttaaagttaacgaacagatcatctcacgctttcagattaaaaacacacctgcgcttataactactgaccaagataaattccggatcaccctgtttagcgaggcagaagtccgtggtatcggagccccaaatctttcagaggaaaaataa

SEQ ID NO: 105799 - DNA, 273 bp, Enterobacter aerogenes
gtgtgggtcaattcgcgtaagggccgcatcatcacccgcgcgcaggtcagcgatcggccgaataaaggcgcggtgtacatgacctaccagtggtggatcggcgcctgtaacgagctggtgtcagagaacctgagcccgataaccaaaacgccggagtacaagtactgcgcggttaacgttgaacggattgccgatcagcgcgcggcggaacagtacgtgatcgaggagtacaacaaactgaaagcccgcctgcgcgaaagcgcgatgggttaa

SEQ ID NO: 105800 - DNA, 273 bp, Enterobacter aerogenes
gtgtgggtcaattcgcgtaagggccgcatcatcacccgcgcgcaggtcagcgatcggccgaataaaggcgcggtgtacatgacctaccagtggtggatcggcgcctgtaacgagctggtgtcggagaacctgagtccgataaccaaaacgccggagtacaagtactgcgcggttaacgttgaacggattgccgatcagcgcgcggcggaacagtacgtgatcgaggagtacaacaagctgaaagcccgcctgcgcgaaagcgcgatgggttaa

SEQ ID NO: 105801 - DNA, 261 bp, Enterobacter aerogenes
atggcagctgttgatctgttacttgacagccaattcgataggaaaataatttttcttataactgatggttatccgaataaatcggaatttactatcgtcgaagttatggaaaaggctaaatgtaatggaatagaaatcgttggtgttggtattaagactgatgaaataattggttttgaaacggacactttcgtaacagttgatgatacttctttattgtctattgaagtcagtaagctagttcatcaaatactttcttaa

SEQ ID NO: 105802 - DNA, 255 bp, Enterobacter aerogenes
atgaatgaagagatcacggttgttggtaacaaagcatcggaatcttataaaacacaatgggctctcttttttagtacccttttagggaatattaatccaactaatatttcctttgtgacggcctatgtcctcgatgccctttcacctgaactacaggctaaaacgagtgagtctttacaggagcagataaatatcattaggcttaaaggtctgctcaacaccacgagcctgcatgatatttatctgttcctgtaa

SEQ ID NO: 105803 - DNA, 159 bp, Enterobacter aerogenes
atgaccaattactttacaaaaggtaaattaatgaaaggtatggaaatcaaaaaaaagccacttttattgatctggatcaataaaagtggcatatctttcgctcaagtaaaattgacctcggccgatggtagtctatttagcgtgacgaaaatgcgctaa

SEQ ID NO: 105804 - DNA, 552 bp, Enterobacter aerogenes
atgtcttccattcaactctgcgccgcgcatcaggcgacctctggcttcgacggcgatgcgatcgcccagtacatgcgtaccgactttattacgctgcaggaacatttcagcgtccatgaggcgcgtgaacactttatctcgcagctcgccagcgacgatattcccggccaggtatttgtcgtcgccggtaacaagctgcgcggcagcttatcagtcaaaaaacttttgcaggaggcagaggtaggccagtctattcgctacctgatggatagctgtctgtttcgcgtcaaacccgacgatgagcgccctcaggttattgccgaactcaccgagcgcggcctcgatctggtgccggttgtcgataaaggcgagctggtcggctgcctgatggaaaaagaaattgcccatctgctggaggatgacgtcaccgaagacgcccagctgcagggggcgacgctaccgctggaaaaaccgtatctggaaatcagtccgtggacgctgtggaagaaacgctcggtctggctgctactgttatttgttgccgaagcctaa

SEQ ID NO: 105805 - DNA, 453 bp, Enterobacter aerogenes
gtgctgcagcattttgaagaggcgctggaatcggccatcgcgctggccttcttcatcccgttactgatcggcaccggcggcaacagcggaactcagatcacctcaacgctggtgcgttcgatggcgctgggtgaagtccgtttacgtgacatgggacgggttatccgcaaagaggtgtcgacctcgtttctgattgccctgaccctgggtctggcgggctgcctgcgcgcctggatgatggggattggcatggaaatcacgctgatcgtcagcctgacgctggtctgcattaccctgtggagcgcggtggtgtcttcggttattccgatgttgcttaagcggatcggtatcgacccggcggtggtttccgcgccgtttatcgccacgctgatagatggcaccgggctgattatctatttcaaaatcgcccagtattttcttgggttgaactga

SEQ ID NO: 105806 - DNA, 612 bp, Enterobacter aerogenes
atgccttttgctcaaatgatgcgtgacaagttagccctgattaaaatggatggaagcacagttgctgatctaaaaggtagtgtccaaaagggtaagatttacattatgagaggggatatttcgattgaaccaggtgatgaattgcaccgtgaaatgcctggtggaaaattcgaagagtatatagtcgttgaacccaatttccgccaagggcttcatgggattcctgcacattatcaaactgaagttaggaggaaaaataaccagttacagcaagccgcatcggttgcatcacatacgacaaactataacttttatggagataacagcagggttaacaataactcgattgataactccaataattttacaggaagtgatgagagcgttcgacaggttctggctattcttaacgcagcaagaaaagatgttgagacatcatctatggaacctgttgatacacaaacaacaaaagcaactttcgatattgtcgaaagccagatacaggctaaaaccccatctaagccagtaattaaaacgcttcttgcgggattacctgttgtagctcaggccttaccttctgtagtaaaacttattgaaatgtttcaaagttaa

SEQ ID NO: 105807 - DNA, 1680 bp, Enterobacter aerogenes
atgaaaccagtaaaacgcctttacctttccggggatgaagttcacctgacggatgccagcctggtgctggagcttaacagttgcggccgcggatttattacggcagagacgacacaggattacaccgggaaactggtgcgccttgatgtgggatacagcgatttaattctgcggtggtttactggttatgtggagcgctcgcaaccctcggaaaatggctttcagcgtctatttgtccgggagctggtcggcgtctttgataaattatggccgtgttcatttcaacatccaactttgcgcagcgtggccacctggctggaagaaaacagcgggatcgccgtaagcgtgccggatgccggttattccgataagccgatcccccactttacgcacagcggcagcggttatcagctgctgaagaatctgggcaaagcgtttggtatcacggattacatctggtaccagttgccggatgctggtctttatgtcggaggggcggaactggcattgtttgcgggtaagcccgtgacaatcccggctgaattcagccagggcgctgccggtggtaattccatgacattgccggtcattcagagcctgcggcctggtgttgaaatgaacggggagcgcataacccgcgtgcatctggaaaatgacacaatggccgtcacctggacaccacgcaacaaagccaccggcgaacccttgcagaaaacgccattacagcgccagattgaaagccagtacccggaactggctgcaggtcttcatttgccaaaattcgccagggtgcttgcccccacggaagaagtcagcagcgggaattttgccgatccgttccgcccgcgatatgccgttaacgtgcagttgcttgatgctgagggcaacccggataaacaaacaccggtctattcagccgtgccgctgccggtaccgatggccggaaatgatgctggtatgtatcagtttccgcctgaaggtaccctggtggaagtgggattcacaggtggcagacctgataagccatttatccgccagactgtgccggagggtaacagcctgccggatattaaaccgggcgagcagctgcagcagcagcgtgcggaagtatcacagcgggttacgcaggccggtgactgggtgagacagaccgatcaggccattgatgaatcgtcaatgaccagggttatcaaagccgatacggaaagccgtgaactggtcagccgtgacacaacaatcaaagccacggataacacccgcgtgctgggtaccgccacgctgatggccggtgccattcagcaggtgagcgccggagattacagccaggcggtgaaagggaactggctggccagtgtcagcggtaatgctgaaagcagaattgccggtaatcatacagtgcatgctggcggggatctgactgagcagatcgggaaaattcgcaaaagcgtggcggcgattcagcagcagataattgcgccggtggtgtggattggttccggcagtatcaacgtggcacagctgatgctggatacccttgacgtattaaaggagctggcggaacagacggccagccatacccacagtaatacgggtgcccctacgaatgcgggcgctatccgtggcgctggccagaaagccgatcagcttaacggtaagtactcgccggtgattggccagtaa

SEQ ID NO: 105808 - DNA, 222 bp, Enterobacter aerogenes
atgactcagcacatttcaatcacattagctgtcccatccatttcggttgaaaagtacagtgaactcacagggttatctgtagacactatcaacagtatgctcgcagacgggcgccttaagcgtcatcgtcttcgtaaggataaaaaacgtgaaaaggtaatgatcaacattgcagccatgacagtggatgcgcttgccgattgcaatgtcgtaatcaattga

SEQ ID NO: 105809 - DNA, 270 bp, Enterobacter aerogenes
atgtttgacaaggtgttcattcctgatggtttatcatcaccatctgtgatatcaaacgagaagaactcttattttattgagagggatttcacagatgtagttgatggtgattggttaatctccattgatggaaagcattctataaaacaagttattagaattcctgataataaagttaagattaactatgggaatatcactattgatatgaacattaatgaccttgtattcatcggcaaagttatagcagaattcaagataagaggctaa

SEQ ID NO: 105810 - DNA, 1134 bp, Enterobacter aerogenes
atgaatattactcgattaaaactgaaaaattggaaaaacttcaggaatattgatgttcctcttcatgaccgtgtttatatcatagggccaaatgctgtcgggaaatcaaacttcctcgatgtctttcgctttatgagtgatatttgtagagatggtggtggtttacaaaaagcagtcaatgatagaggaggcataacaaaactccgttgtctgcaagcgagaaatgataccgaagtaggtataaccatatattttgaggaagacgataacgagtggatttatgaacttatcttcaaggcatctggccgaggaaaacagttaattcacgtcactagtgaaaatgtttataaaaatggtgagcatatattaagtcgccctaatgctcatgatcatgctgatgcagttcagttgactcaaacacatcttgagcaaattttagcaaataaaaattttagagtgatttcagatttcttcacatctgttacatacctgcatatagttccacagttactaaaattcgccaaagaaattggtgttaataaaatagacgatgacccatttggacaagggtttctcgaccgattagcaaatactcaaacacgaaccagagatgcttggttaaaaaaaatacaagcaggactatctattgctgttccgcagtttaaagagttacgctttgaaagagatgaatcagggcaaccacacctcgaagcaaggtacgagcactggaggccaaatgctggatggcaaaaagaagagcagttttcagatggaacattacgtttaatcggtttgatgtggtcacttcttgagaaaagacagctacttttaatggaagaacctgaattatctttgaacagtgaaattgtgaaatttatacctgaaatcattgaaaacacgcttaaaggtgctcgaaatcaaaagcaaatcatcatcagtactcacagtccatcgttgctaagtaataatatcgatggcaataacattattctatttacagcatctgaaaatggtactacagcgagaacacctacagctgatgaactggatgcaatgagagccggtttctctgctgctgaaatcatgttgcctcatacgactcctgccaatataagtaaaattgcagagatctag

SEQ ID NO: 105811 - DNA, 552 bp, Enterobacter aerogenes
atggttaaaatcattgcctctaatggccattttgaaataaaaaacaaactaggcaaacagggatgcggttatctaacgagcaacctcgaaaaatttaacaacttagcagcacttcatcatgtattggttgtactagatttagaccttaaagaaaatgcagttacttttcgcagtgaaatcgaaaataaattaagaaataaacatgaaagacttaaaataataattcctatcagagagattgaaagttggattttggccgatagaggggggctgagtgattactttagaatatctaaagatagaattgatagaactcctgatgaattattggatcccaaagagaaaataatcactcttgcaaagctctcaaaaaatagtgttataaagcgagggattcctcccaaagcaggagctgccgcaaaagttggcctctcctataatacaattttgagcactttcattagagatcattgggattttcgtagtgcaatggagcattcgccaagtctatgtgaaacagtgcaactaattgaatcaattgaaaatgtttag

SEQ ID NO: 105812 - DNA, 138 bp, Enterobacter aerogenes
atgatcggcaaagactttgcacagcaactgtttaacctgcaggagcgcgtcgctttcgtgaccggcgccggcagcggcatcggccaaaccatcgcctgcgcgctcgccagcgccggcgcgcgggtggtctgtttttga

SEQ ID NO: 105813 - DNA, 453 bp, Enterobacter aerogenes
atggaaagcgagcagtggcagcgggttatcgatatcaacctcaccggcgtatggaactcctgcaaagcagaagcggaattgatgcaggagtccggcggcggatcgataatcaatatagcctcgatgtcggggattatcgtgaaccgcggcctcgatcaggcgcattacaactgttcgaaagccggcgttatccatctgtcgaaaagcctggccatggagtgggttgataaagggatccgcgtcaacgccatcagccccggctataccgccacgccgatgaatacccgcccggagatggtgcatcagacccgcgagtttgaaagccagaccccgatgcagcgcatggcgaaggtagaagagatggccggcccggcgctgttcctcgccagcgacgccgcctcattctgcaccggcgtggatctggtggtcgacggtgggtttgtctgctggtaa

SEQ ID NO: 105814 - DNA, 306 bp, Enterobacter aerogenes
ttggcaaatatttgtcaggagtatgcgaccaagcgctatcgttccaatgtgattaactggggaatgctgccgctgcagatgaaagaggcgcctgatttcgaggtcggcgattttatctatatcccggcaataaaaagcgcgctgaagggcgagttaagtgatatcaccgcttttgtcgttagcgaccatcgcccggtgcagcagataacgctgtatatggagaaattaacctcatcagaacaagatattatcaaagcaggtggccttattaattataataaaaatcaattaataaacggccattaa

SEQ ID NO: 105815 - DNA, 369 bp, Enterobacter aerogenes
gtgagcgacaaagatatcgagcaacaaattcaggttaaaggattaaccgcaccgcgtgtaactccgcagcatattgaagatactattgaatacgaaatgtatttcacagcgtacgatgcttttgcaggcgctgcggcggaaaaccccgactgggtatacgctccaatcagtgcgttaaatagcgcaaaacttcttacattctgtgtgctgacacttaaaaacggctttacagtcaccggtgaaagcgcctgcgccagcccggaaaatttcgaccctgaaatcggacgcaaaatcgcccgcgacaatgcggtgaataaaatctggatgctggaaggctatctgctgaaacagaaattaagcgaacagtaa

SEQ ID NO: 105816 - DNA, 327 bp, Enterobacter aerogenes
atggctggtaaaagaatgaccagcttcatcagtgccatattttcaggcgtaaggttttatttccctgaagagaagaagttaccagttccgacttctgaggtacggtcctatgcaattattaacgttcgggaagatggctacatgcttcttgaatcaacaaaaagtggctggtttccagccacaacaaaagtttataaagactacggatctgctattgaagacggaataaccctttccagcgggatctgggaatggtcagaagcttttatttcttctcaacttaaacactttctgatgggagatatttatatattgtcttcacattaa

SEQ ID NO: 105817 - DNA, 2556 bp, Enterobacter aerogenes
atggcgggcaagtcactgggaactcttactatcgacttggttgcaaaagttggtggatttgtttcagggatggataaagctgagcgtgcatcagccaagtggagcaagcaggtacaagatgatgtagcaaaatccagtgctgcactggcaggactaggagccgcagctgtgactgctgggttggctgttggcacagccggatttcaattactgaaatcaacatccaagcaaatagcagaaactgatcgctgggcaaaatcattacaattatctacccaggagcttctggcttggcagtttgctgcggaaaaggcaggggtatctggtgaccaaatggctgatatcttcaaggatattggcgataagattggcgacgcggtattaaataaatcaggtgaagccgttgatgcgcttaacgctcttgggttatctgccgagaaattatcaaaagtaagtccagataaacaattgcttgccataggtgaatccctagggaaaattggtaccaacgccgagaagacaacaattcttgaaagtttggggaatgacctttcaaaattgcttcctttgtttgatcaaaacaaccaaaagcttaaacagtttattgaccttgctaaagattatggagtagctcctgatccatcctctattgatgatttagtaaaggtaaatcaactttttgaagatatggaggcccaagttgcagggctcaaaattgaaattgcggcgggattagcaaaggtcgatctaactcctttacaaaactcactcgataagcttcatgatgtgctgactgatcctgtagttcttcagggtatttctgatctagtatcagaagtagctcagcttgccggatggcttgtaaaagctgctgctggagctggtcaacttgctgccagtacaggaaaccgttttgcggcgcttagtggcaagatagacctttcgaatatagatcaagttaatgaacgcattgcttatctgcaaaaaacacttgaaggtaaaaaagggttttactctcaaagtgagtcaatgtttggatggattactggggtagatgacagcgctaaatcacttaatgatgagttgttatctcttatagaaacaagggataaattttctaaagccagtaaagaggtgcttcctcttcagactgccactgtggggaatgacaacccgtttgctttgcctcctggaggtacgaacggaaaacctgttaaatcgctagcaagtaaaacagataatgcatttaacagtaggctgctagacctacaaaaacaagctgccctcattgaaacaactggaaaaaaaaccgcagaagttaccgaactggaaaaggttaattttgatgttaccagtggcaacctaaaaaaattatcagaaggacagaaggaccaactgcgaacggcggctaaaatccttgactccaaaaaggaagagctacgtcttaatcaggaaaattacaaattatctgaatttgtatctggtcttgatagacagaacaaaataataaaacaaggatttgataatgatatttccggccgcgcattgggggtaaaggatcgtagtcggatgcgtgaaacaaacagcattcaacaggactttgagtcaagacaagaggatttattaaaacagtatcaatctggtgatatcactaaatcactttatgattctaaaactgacgcattaaaagctgcccttgaagaacgcctgaagattcaagaggattattataaagagtctgatgatttacgtaatgattgggagtctggtatatcaagttctttagctgatttcgctgatagttcaagtgattattatcagcaagcagctgacgcgatgacatcaatattaggttctgcgactgattcaatttcagaacatttatatgatgttatcagcggtactgaatcgatgggggacgcaataaaaggaattttttcagaccttggtaagtcagtcataaaagctttggttgatatggctgcacaatggatagtatatcaaggtgttcagatgctggtgagcaaaacagcccaagcctctgcgattcctgcaatgattgctaatgcgcaagccacagctttgcaggctcaacttgccgcttttgcatcaacggcagcgattccaatagtcgggccgggattagctcccgcagcaatggcttcagcggctgcggttacagagcccatggttgcagcaatttctgctgcttcactttcgggtatggctcatgacggtgtcgattcagttcctgaaactggaacctggttgcttaaaaaaggagagcgtgtaaccaccgcgaaaactagcgcgaaactcgatgccactctggatcgggtcagtaaagactctactggcggtaaattacctgatgttcgtatcagtaccgttgtgaatggggatcctgaccagagaactctggctttattgaaggaaacgcagaagcaagcggtacaggaagctctgaatgtgagcgcaaatcagatagctacaggaaccgggaaaatcggcaaggccatgggctatggttggaatgccgggaggaagttaacctga

SEQ ID NO: 105818 - DNA, 468 bp, Enterobacter aerogenes
atgaagagttcagggcagttactatcgctggcaggtgtaattcttgcggtgtactcattgttctttatggatgtgagtgtcgaggttggagatggtacaagagttaataacattgggctaatggctcagcagcaaaattatttattaatcgcgattgtcctttttattgctggtatctttatttccttctctggaagaaagaagtcattgccagaggtggatttcacgaaaatagaatcatgctcggcggatgattttgtttccttgaaagatggtgaaccattcctgaatatgctagctgtagacaatcttgcaatgatgtttttaaaaaaacatggttccagtagcgttaatgatatccttttcatgaatatgcctttaatcgataggttagaacaaggtctccctgaaacactaaggaaagactttaaatctacccttaaaaggaggttaaaggataattgttaa

SEQ ID NO: 105819 - DNA, 231 bp, Enterobacter aerogenes
gtgaacgctgataatcttagtgcagcgtcttatctctataacgagatgaaagaactacagcgtcttaaaagtgttatcgaaagtggggctgggctgggtgtaacaattcaatcaacctaccaagataatgattttttggacgctgtacgcccacatgctgtggcagagcttgaacgtcggatcgatgaaaagagaaccgcattgataagattaggcgtttccttttcttag

SEQ ID NO: 105820 - DNA, 1050 bp, Enterobacter aerogenes
atgaaaaatactgtaaaaatatccagtgttgagttggtcaacgctgactgcctgcaatttctcccgacagtccctgataactccattgatctgatagttacggatccgccttattttaaggtgaagccgaacggttgggacaaccaatggaaaggggatgaggactatttacgttggcttgattcctgcctggcgcaattctggagggtattaaaaccttccggcagcatgtatctgttttgtggccaccgacttgccgcggatattgagctattggtgcgtgagcggttcaatctgcttaaccatatcatctgggctaaaccttccggtcgctggaatgggtgcaacaaagaaagccttcgttcctatttcccggcgactgagcggatcatttttgccgatcactatcagggtccatataaaccgaaagatgatggattctcggctaaatgcaacgagttaaagcagaatgtgatgacgcctttgattacctatttcaggggcgccagagaatcgctgggggtaacgtcagcacaaattgcagccgcaacgggcaagaaaaatatggtttcccactggttcgggttgagccagtggcagttgccgaatgaaaccgattatctaaagctgcaggcattgtttcagcaaattgctgaggacaagcattcgcgcaatgagttggagaagcctcaccaccagctggtggcaacatggcaatcactaaaccggaaatattcagagctccagcaggaataccagcgtttacgcagaccgttcagcgtttctgccctggtgccttataccgacgtctggactcataaacccgtccagttctaccccggaaaacatccatgcgaaaaacctgccgacatgctacagcaaatcattgctgcgagcagccggccgggtgaggtggttgctgatttctttttcggatccgggtcaacgctaaagcaagcagctctgctagggcgaagggccatcggggtagagctcgagacagagcgatttgaccaaaccgtaaaggaaatacgcaatctcttaggttag

SEQ ID NO: 105821 - DNA, 204 bp, Enterobacter aerogenes
atgttgaaagctaaagtcgtcaagttctatggcggtatatcaaaaaccgcttcagcgctgggtgtaactcacagtgctgtgtgtcagtggggtgatgtcatcccagaaaaacaagcgctctacattgagcgccttacagatggaaggttgaagtacgacgcttccctctaccacaagagtatcaacacaacgactcaacagtaa

SEQ ID NO: 105822 - DNA, 633 bp, Enterobacter aerogenes
atggataccgttggcagcaggttaagatttagacgtaagcagaagaaacttacgcaacgtgatgttgctgagtgggccggcgtcagcgcgtctgcggttacacaatgggaaaatgactcaaccaagttatcaggcgagaatcttgtgttggtatgtcagtgtctgagatgctctcccgagtggcttatttttggtacaggcgatatcgagaacggtatcaacataaacctgatatctgtcagagaagtgcctgtaatctcttgggtacaggctggtaactggaccgaggttattggcgatccagctaatgagctagttaaaactacaaagaaactatctgaatcagcttttgcattacgtgttaaaggtcactctatgacttcgagccaagaacttagcattcctgatggttcggttgtcattgttgagccagaatacggttttgttgatgaggcaaatggcaaaatagtgatagcccaaaccgttactggtggcgaggcgaccattaaaaagcttgccatagaccctccattttcctatctcatacctctaaacccggcatttaagcctatagaggtgaaccaagatacaaaactgatcggtatagttaagcaaataatcatcgatctctaa

SEQ ID NO: 105823 - DNA, 1197 bp, Enterobacter aerogenes
atgagcgacttcgatagaattgaggaattagcaggagaaggggtctactcaggcgtagaactcgaagacgagatgtctcaggatgacaactccgacaaggagccattcgatacagattcaatttcaattactcctaagacagtagcattggatactgtcttacgccgtataaaaaataatacaataaaactagctccagattttcagcgtagttatgtttgggataaaaaaaggaaaagtcagttaattgaatcaatgatgctgaagattccattaccgatgttttatgtttctgaagataaaaatggtgtatgggaagttgttgatggattgcagcgccttactactattaaagattttattttaggaccagactatgatggtaaaggatttaaattatctggattagagttctggagcactccatatgatggctatgattattttaatttagagaagaatgatgaaaatataaaaataatcaataatattatggagactgaactatcattcatcattataaaccctgaaacaccagaaaaagttaagagaaatattttcaagagaatcaacacaggtggaatgcggctatcaaatcaagagattagacatgcgttatatcaagggcgcgccagcatactattgaaatccatggttgaaaatgatgtttataatgatgttgtaggtagaacagtcaaagatgacagaatggctggtagagagcttatactaaggtatttagcttttacattattcggctaccataattattatggagatatggatgattttttatcaaacacaatgaaagctttaaataatgagaaaattaaagaactccctttaattgatatacctgaggatgacgttatcattaacacgttcgaattaggtttgcaccgaacatatgagatttttggagaacattcttttcgaaaatcgttacctggagataccagaaaaacacccgttaacaaatctcttttcgaactatggttgtacttattaacaagagctaaaaaagactcatatgacgaaatcatcttgaaaaaagatattttactgaatgaatataaagaccttcttaaaaattatgagtttatgaattcaataagccgacatggtgctggagtacaaggcgctaaatttcgtaaagattgtcttttggacttactaaagagagtaatcaatgcttga

SEQ ID NO: 105824 - DNA, 1071 bp, Enterobacter aerogenes
atgcttgataaacttgttttaaaatcatttaaatcctttatctattcaaagttagaactttctaacataactgtactcactgggctaaatagcagtggtaaaagttcagttctacaagcaataagaatgtgcaaattagtagataaagaccactcaccttatattcaaggatttggtgggtttaccgatctcaaatcaaaattgacctctcaacaaaagcctgtgcagattcttctttctagtaaagaaatgaaaaactatctatatctatcactaagagaaaatataaacaaacacagaacaagaatagataggttttcggtagaatatatctcagctgatagacatggtccatgcgtaacattacctattatgcctcaggatattgatgatattactgttggtgaaaaaggtgagtactttgcagattattactcaaaatttgaaagtgttataatacctgaaaaacttcgccatgctaattcaacaggaaatacgttaaagcatcaaattaatcactggatgggagaaatatcacctggtgttgatttgaatttctccgttacgaaagagcaagatatttcccatctaggggttaatggtttcagagcaactaatacagggtttggaataagttattcactcccgatcgtgttaagtgcattagtaatgtcttcagaggctcccctagatagcttcaagcagtcaaaaatgaaagcatggcattctaataaaaataaaattttaataatagaaaatcctgaggcgcatttgcacccaaaaggccaaacagctctcggattattgttagctatagcatcttcttgtggtgtccagataattgttgaaacacatagtgaccattttattgatggcgttcgattagcagtcaaaaacgtaggtgctacactggctcaaaaaagtatcatttattattttacgcgtgagaaagataaggatacaaaaatagagaaaatcagaataaaagaagatgggaagctcacaagctggccagaaggtttctttgaccaaagcacaattaatttatctaaattagcaaaaaaaaaatga

SEQ ID NO: 105825 - DNA, 909 bp, Enterobacter aerogenes
atgaatataatcaactacttagatgagagatgggtggtggagttatgtgctaatattcaagataactccaaagaacttgagtgtttcttagaattggccgaagctgttaagaaaagctgcggacgttcaagcctctctctcacctcaaatatatggataattaaatgcggtcacgataatttatgtgacatcttatatggccctttaactcaagatcctgatttaagggattaccttttaagactggcaagaatcattgatgaaactgatagttatgaaatagacaaacctgaaaatcacgcatataattcagaagctcacgcggctttacactataataagacaggcggccttttatataaagaaaatgaagaattaccttggtgggatgatagttctatgatattaattgactgccaagataaaatactttctttattccgaaaacttcctatttaccacaatatgggtctagacgaatttgatagttatctagagaaatgctttcctaatatatattttctcgatgatgcgagagatttttctaaaacagatattagcgaaaaaaacgacacgaaactttcggttattataaagcatttatcatatcttaatgatcatgcacaatatgactaccttatagatccagaacagtttgagcaaaaagcactttctcatggtgtagaactatctagagaaagcagtagtacaaaacgaaaccaagatgcagttaaagaaagaacaaaaaaaataaatgaggaggctcttttctttgaattacacaccaaactcagtagagaaaaaggtagaatccattttcatataggctcaagcctgagcgaaaaaataaataaattaagtgaaggtcatctaatagttggcattgtgtgcaaacacttatcaacttaa

SEQ ID NO: 105826 - DNA, 153 bp, Enterobacter aerogenes
atgagcgaaaatgcggcgagccaaactccgcagcaatcaggcagcaagaaagggaaacgcaaaggcgcccttctgctcctgaccttgctctttgttattgtggccgtagcctacggcatttattggtttttagtcctgcgtcattatgaatga

SEQ ID NO: 105827 - DNA, 1659 bp, Enterobacter aerogenes; identical to SEQ ID NO: 90568

SEQ ID NO: 105828 - DNA, 327 bp, Enterobacter aerogenes
atgaccgggaagaaagggctgagtatggccggactgccatggattgcggccatggctttctttatgcaggcgctggacgccactattcttaataccgcgcttcccgcgattgcgcatagcctcggtcactccccgctggcgatgcaatccgccattatcagctacaccctgacggtagcgatgctgattccggtgagcggctggttggccgatcgctttggcacccgcaaggtctttatcgttgccgttagcctgtttaccctgggctccctcgcctgcgcgctttccacttcgcttcccgaattggttgtcttccgcgtcatctag

SEQ ID NO: 105829 - DNA, 441 bp, Enterobacter aerogenes
atgtcctctcaatctgcagaacgtatcggcggatggctactggcgccgctagcgtggttactactgaatcttctgggaagttcgtatttactgattcgttacacttttgccctgacgacttcccagacttgggcactcatgaaagcgatgggccctgaccatctggcgctctggctggcttcgctgctgttcgccgtcgcgatgtggtattataccctgtggctgacgatagcgtttttcaaacgccgcgtggtggtacccaaacactacattatctggctgcttatttctctgctgctggcgattaaggcgttcgctttttcgccgatttcggatcttctggccatgcgccagctgctgtttccgttgctcgctgcggcactgtttgcgccctattttcgacgctctgcgcgggttaagcggaccttcgtcaatccgtaa

SEQ ID NO: 105830 - DNA, 714 bp, Enterobacter aerogenes
atgtatagagcaaatcaaattgtaaaaacaataagcaaaatgaattcttatgctccttataatcaaataaataaaaaaagtaatttacttagaaagactcaagtatattcatttcttatatctttcttctctcttgtactaatggttataatgatagctacttataagatctttagccttccaaaagaaccatttattttacccgcattctgtttatatattctcaattctatttctggtatagtatatctattcacacctattattccagctttaaaattcatgttgaattttaaaaaggaaatttttaatgatctaatttgtgaaattgacaatgatgaacagaacatacaaaaactgctgccatactcgttggctgagttgaactattcaatagattggttgaatctaaagatacaacgattgaagtcaagagtaaatgatttctttggagagaagactgctgttttatcaataattggattagcatactctacagctcaaggttttggtggattaaatagattgggtgatgccatatcaaaagggcttttcaattctggcactgcaaatacattaattgtatttggattagcttttcttttagggttatcactcggagcattagcacttaagaatattgtgaatcatttgcaatatctgaaagaaattattgaaatggcgagaagagttaaagaaaaggatgaggcatag

SEQ ID NO: 105831 - DNA, 909 bp, Enterobacter aerogenes
atgactaaaaatatagagttgaacttcgacaatactgaaactgaatcaacagaaaacatcgtaaatttaagaaagcattgggaaggattatcttcaactggagcgaaatgggaaatatataatggagattcatcccagatcataaaagaccttccaaaagatagtgttgattgtgcaataacatcacctccctatttttggcttagagactatggtgttgatggtcaaattggcttggaagattcagtgcaagagtacgtcaatgctattgctgatgttatggacaatgtgaaagaagccctcaatcctgaagggactttgtttatgaatattggtgatacatattattctggaaaaggtcaatcacaaggtaaagatagaaaaagtaataaacgccgtttcggtcttagagctgtagataaaagtggtggaatgggtattggtttacaaagaaaatctatgattggaattccatggcgagtagctattgaaatggctactcgtggatgggttattcgtagttcaatcatttggcatagagaaaaatgtctgcctgaatcggttaaagacagaccaagccgaagctatgagtatgtgttcatgtttgttaaaagcagaaaatattattttaacaaacaagaattgatagaacaaaaagtcgaagaggatatgtggactatcccagcaagaccgaaaagcgggggggggcttgatacagcaccatacccggatgctttagtcgagagatgtctaaaaattggctgtaagcctaatggtaccgtattggacccatttttgggtagcggaacaacttgcagggtagcggcacagatgggatattcatcgattggtatagatcttaatcctgagttttgcgaatattctgcattaaatatggagaacatttga

SEQ ID NO: 105832 - DNA, 585 bp, Enterobacter aerogenes
gtgactccgattcggacagcgactcggattctgacagcgactccgactccgacagtgactccgactccgacagcgactcggattcggacagcgattcggactctgacagcgattccgactccgacagcgattcggattcggacagtgactccgattccgacagcgattcggactctgacagtgattccgactctgacagcgactcggattccgacagcgattccgactctgacagcgattcggactctgacagcgattcggactctgacagcgattcggactccgacagcgattcggattctgacagtgattccgactccgacagcgattcggactctgacagcgactcggactctgacagcgattcggattccgacagcgactcggattccgacagtgactcggatagcgacagcgattccgactctgacagcgactcggatagcgacagcgattcggattctgacagtgactcggattcggacagcgattcggactccgatagcgattcagattccgatagcgattcagattccgaaccgcaggcaaatgatgatacgcatacggcagctatcgataccgtag

SEQ ID NO: 105833 - DNA, 876 bp, Enterobacter aerogenes
  misc_feature (656)..(665): n is a, c, g, or t
atggcgctaagtatcgataatgtaagagttttttcaagggtgttcagccgcccagttttcgaggctttagccaagggaagagaaccgtctaatgtcttggattttgtgtctttctctgatgaaatgaagcaggatgggcaaccattacatacattttttagtgaatgttataaagagttatccagaaattatagaaatgagtatgtttacaaaacagaagtagccaatcgaatagtttttgggaggcatagtccccggacctcatccttattaagtgagcttcatgtcggaaagtctattgttgatattgcaatttttaacggaacatctacagcgtatgaaattaaaacggaatatgataccccgcgtagattgcaaacccaaaccccagattatttaaaagcattcgataaagtttatgtggttactcatccaaatttatctgaaaaatatgctgagattgttccagataaagttggtgttattgcattaaataatagaggtagccttaagatagtgaaaaatgctgagtcaaatttagctaatgttgatatattatatatttttcgtatgctgaaaagaagtgaataccttccagcaatagaaaaattcattggcgagaagatcaatttacccaacgggcttatttactgtcnnnnnnnnnntatttatgcattctgcgaggatatatttaaaagaatccctcaggatatagctcacaatatttacattaatgcaatgagaggcagaacgacaagtgatgatattgtaagctttgttaattgccttcctagttgccttcgtgtgttgggaatgtcatctgctttatcaagtgttcaacgtaaaaagatcctcacggttttggggatagtgtag

SEQ ID NO: 105834 - DNA, 228 bp, Enterobacter aerogenes
atggccgacgctatggatatcgcacaacagcgcgagcaggcagaacgcgagcgccttatccacaacgcgcgcagccatatcgctgcgccttctcgttttacctgcgaagagtgtgaagccccaatcccggaggaacgccgcattgcaattcagggcgttgcgctatgtgtcacctgtaaggaaatcgcagagcttaaaggtaaacactataacggaggtgctgtatga

SEQ ID NO: 105835 - DNA, 582 bp, Enterobacter aerogenes
atgagcattattaatacgacaattagtcagcatgccaaacgttggcttaatgatggatacttatttattgataccgaaactactgggttgggtgacgatgcggaaatcgttgaaatctgcattatagataaaaatggttttattatgcttaacacgctaattaaacctactaagcctatccctgatgaggttatcgctattcacggcattaccaatgaaatggttgctcatgctccaacttggaaagatgttcacggcgcagtagccaatctgttctttaattatggtttcgttatttataatgctgattatgatactcgcctgatacgtcaaacagcggaattaaatggattagggactgacgggctatcttcatttatagatcactccctgtgcgccatgatgttatatgcagaatatcgtggcgagccggggagatatcacggttataaatggcataagttagtcgatgcagccgcgcatgaaggggttgtggttgaagggcgggcacaccgtgctttagcagattgcaaaatgacattaggtgtcattaaagctttagcgcaaggcggtgcagcatga

SEQ ID NO: 105836 - DNA, 273 bp, Enterobacter aerogenes
atgagcctccgcatcgaaatcggcgacaaatggattattaacagcgaccagtatcaattcattttgagcgagaaaaaggtcgcaaaaagcggccgtaaagctggcgaggagtggcttgatactatcggctactatccgaaaatcgaacagcttatttccggcctgattcatcatcacatccagcagtcgaccatcacctcaattgaggaaatggccgctgagattaagcgtatcggagaaatgtgcgcctcctcaatcaaggcggcggcatga

SEQ ID NO: 105837 - DNA, 291 bp, Enterobacter aerogenes
atgacggaaggtgaaaaaagcgtcctgtcactgtttttgatcggcgtgctgattgtcgtcgggaaagtgctggccggtggtgagcccattaccgccaggctttttattggtcgcatgctgctgggcggctttgtctcgatggtggccggggtggccctggtgcagtttccagacctgccgcctgccgccgtgtgcggatttggctcgatgctgggtatcgccggttatcaggcggtggagattgcgattcagcgcaggattaaaaaaggggaaagcgatggcggtcattaa

SEQ ID NO: 105838 - DNA, 450 bp, Enterobacter aerogenes
atgaatgacttcaaaccctttgaggacaagctcgccgggttgatagcggctctttctcctgccgggcggcgtcggatgactgccgacattgcgaagaaactgcgccagcggcaacaacagcgcattaaatcgcaaaaagcgccggacggttcgccctttgccccgcgtaagcgcccgcccgtcagggcaaagcaaggccggattaagcgcgagatgttcgcgaaactgcgtaccaaccgctatatgaaagcgagcggcggcgacagcgcggcggtggtggaatttaccgggaaagtgcagcgcatcgcccgcgtgcatcagctcgggctcaaggataaaccatcaccaaaaagcgccgaagttgaatatccacaacgtcagcttttgggatttacagaagacgaccggcaacttgtggaaagcatcattatcgactacctcgccgattaa

SEQ ID NO: 105839 - DNA, 594 bp, Enterobacter aerogenes
atggcgaccgggtcgtcggagctggaacagcgagccgccgctgcgtgcgccgtcatcagcaatttatctgtgcctctgcgtgatttgtggaacccctggagatgccccgtaaaatttctgccgtatctggcgtgggcgttttctgtcgaccgctgggaagaaagctggtcggaaacagagaaacgccaggcggtaagtgatgctttctggatccaccaacgcaaaggcaccgttgccgccgttcgccgggtgattgaaacgctgggctacagcatgacactccaggaatggtgggaggtggccgaccccgccgggacattccgccttgagattgacctcaatgacattggtatcactgagtcaatgattaaggagcttgagcggattattggagatgcaaaacccgtcagtcgccatatatcgcagctaacgttatcggtgagcactaaaggcattgcaaatatagggtgcgctatttttgacggtgaagaaataacaatttatccggctggttataccccggatgaaagtatttattacgacgggaaagcccattatgacggaaattatcatttttcaggtgacagcaaatga

SEQ ID NO: 105840 - DNA, 2028 bp, Enterobacter aerogenes
atgaatattagtgaaaaaccacaatgggaaaataatatcagtatgcttgcccgccaacaaaaggttgaaggcgggagagatggcgcggccaacattcaggcacagcaattggcaaatcgcactaactatttgaaagagcaactggacgcctataataacttaattaaatctggcgatttgccattccctgatttagccacggcacaggccgcaatagatgccggaaaaattccactggacgcccctttctcttatcgttctgagagtgatgaattttgggcgatagaggggaaaaatgtcgcaggtactgcaacgccagttattgataaagatggcaagcctaaggcataccccaccgcgaaggctgtagaaaccgccgcatttgtggcgcgggaagttgacgacaggacctctgaagtattacgcgtgccgagaatgtttgacgaggaagggctgaggattgtcggtgggttccttgataaagaaggtcactccccggtatacggtaatgagcacggggatgtaggacttgcgaatttaaaggtaaaaattattacggatggccttgcgctggctgcttttcatagccgtgatatgacaaccgaatttttccgcttatcaaaaaatggcgggctcattattggcaatgtggaaatatttcagatccccggccctgcgggcattgtatggaccgacaaaaactatattccctacgctgctgatccaaaattcgcagcatcgtcagggcaggacattccagcgatggggggcggggttactccggttgccaaatctgtcaggatcaggatgtgcgacagcatgggggtgcggtctgatggtcaatcgcttgcgttggggctggccacaaacctgaccaacaaccacgccctgtcgattattcagcgctacgcaaatatgggcttcagcaaaaataacaactctgacaccaccggtactgacacgatggtaccactggttgagaaagactatacaccggtagaaggtacataccctggtggtgagactccctgcaccggcatgacagataagttaaccgaattgcttatgcaggaatcggggcttgattttggcgagctggggagtttcttcttttcttctgcgccgggaaaaggcggacagcctattgagaacctgatgaaagggaccgtgccctatcagcgtatgcttgatcacgtatcaaacacggttcggctttgtgctgagcaggggctgacccatgccgaactggcggtggcgtttatgcagggcgagtcagattacagcgcatcaaccactcgggcggtgtatctggaacgtcttctgcaataccgcgatgactccactgcggataaaatggcaataaccgggcaacaatttgaaccgttatttctcagctatcagttaagcgcgcacagggcttataacaaatctgttcctgtcattgcgctggcccagcgagacgcagcattgcagggtaaatcctggctaagtgcacccggctatattatggattacaacgctgatcatattcacgctgtcaattattcgtatcaaatgtgggcgtattatcacggcatccttatttacaaattattgcaggatgacctaaacgacagagagcgcggcctacatcgccttgatgttattgatgagtttcggcaaggggttattaatgacctgttgctaaacgttccggttaaacccgtggtattcgataccacctgggtcactgctgcgccaaatatggggtttgatatccgcagtccctctaatgtgatgattgacattatttcatctgtttcaatcgtcgggcaggaccgagtccgaattattacaacccgtccactggcggatggggagtttatctcttacggctgggggcggtctggcgacgctgcgggtaacgggcgagtgtccggcccgcggggcaatgtcagggacagccagggagaccttgacggatatcactatatcgacggtgcaggaacagcgcgggcacttcacaactggttaaatattattgggtga

SEQ ID NO: 105841 - DNA, 798 bp, Enterobacter aerogenes
atggctactgtttttcgttctctagatgtcgaaattaccggcagcggtttaaaaccgatttacgttccgtttaaaactattccaggcctgatcgctggctggcgaccgggccaatcaggactgacagatattagcggtaacgggcatacactgacagcagtaggagagccggtggttacggatttgtcttttatcggcgataaactaaacgggtttaaaacctccgttcctgacggtctggagagaacaatccttgccgtgttccgtcacccggttgacgttgataccattgcgccagcttctacatatggctacccggtaagcaatctcatgcagaatgtttcgacccagggtcggggtttcggcattgtcggaaccagcaatgtattggcatcaattgccaggcgaaatgcgctggtaggcgcgaacgtaaaaaactcaactctgctgtctgttgccacaggcccggcagatccattcggtggacgaaccgattttaattttgtcggtgctgacaccagtggtgcaaatttatccgctcacatgtactacccgaaaaacaatgattctctacagaatggggtcctgaatacagcgtcagggacgcttgccactcgcgcgataggggggggggttaacctgctgcactgggaagatcccacgtctccagaaacaccctattcaggcatggaattgctggaagttttattttacgaccatcagttaacgctggctgaataccagacgcaatatgctcagtcaaaagcgtatgcggcatcgatcggattttcgatctaa

SEQ ID NO: 105842 - DNA, 1071 bp, Enterobacter aerogenes
atggataaactcttttactcgcgcctgacgcccgccggagaacaaaagtttgcagcggcggcggtgtctggtgaaccggtcagttttcatgagatggcggtgggcgatggcggcggaatcctgcctgacccctcacgcattgacgggctggttaacgagcgattccgggcgcaaataaaccgtgtagtcatcgctgaccaggctgctaacgtcatccgcgttgaaatgatcatgatgccgcaggtgggggggttctggctacgcgaggcggcgctctacgatgatgaggggatttgtcttgccgtcgcgaatatggctccgacctataagccgctgcttgcggagggggccgggcgattacagtcggtcaatatgtggattgccgtcagcaaaaccagcgatgtgacgattaaagcagacccgacagttatcctggctaccgttgcagaggtgaatcgcatcgccggggaggcgaaagattacgccgataaaatcgtgggagacctcgacactgatattcagcgggctatttctgacgctatcactacggcaaagcgtgatttttgggaagacgataaccccgtgggtacgacgcgattttttaatcagaacgtcaacccgaatgaaaagtggccctggtcaacatgggtgtataccggcgaaaacaaaacgatccgcgtcggcaaggctgacggttcagacgtcgggcagaccggcggcagtgataacgtcactctccagcaggccaacctgcccgccgtccagattgatgtgagtggcgaaaccagtgaacaggaggagcagaagataagaacatctgaaggcggcgagcacaatcatggtggcgtagccggtaaggatgacccgtgggaaataggcggggatgtgcggcagctctttaacccgaaagaactgggtgtcacggatatgggcgggaagcatgaccatgaagtaattgtgcccccgcataagcactcgaccaaaggtaaaaccgccaacctcggcgaaggtaaatcgttcagcgtggtggaagcgcacaccctgctgatgtgctggagccgcgtcgcctga

SEQ ID NO: 105843 - DNA, 930 bp, Enterobacter aerogenes
atgagtcataatgctgagataatcgctcaggctattacagcgattaaacccacacccgattatctgaaagattatatattcccttttgttattgcttttttctctgcccttctcggtgggatttcagctatttatattaacaggcaccaagaactaaagaacattgccaaagaaaactatatctctgccaatcaggtgtttttgttggctcaggagtgcttatctaatttagtcgccataaaatacaattatgaagatatcaaatcagatcacccactagttagggctggacagtttccaacaataattacgaatcttgatgatatcacattcaatgctcactccctttattttatacgaacaataccaacagctaacagaaaagccagtcagaaattaattggatttataaagtacagaatactaagaaagaaaatcgaacaaccatcggctgaagaattacgaaaatcttggaggaacattgtaaaaatctcttctatgtttgggaactataaccaggtgatgggccttttacggatgagaaacactatgaatgaggaagttaagcaattattatcagaaggtaataatataatgctttacgcccctattgaagaggttagaaaaagaattggggataaactctgtggtggctttgttgatgttacagaatctgtcatctccctaactgattatgttatgcaggaactacacaattttctactcgagttctctgaaatagcagaaagcaacattgaacttaaaagaataaaagaatggggccgatttccaatatataaaaacactcaggaagcatttttggaatgtatgaaaccaatcatcaaaccaaattataagattttatctgaatatacaggggctccggaggagaaactacgaagcagatacaattttaatgagatggcttag

SEQ ID NO: 105844 - DNA, 231 bp, Enterobacter aerogenes
atgagcaccattcaagacattcgaaaccagctatcaactctggtcacagagacacacaaggttgcatgcgccctagatataggtgacgagcgaaccgaggcatttgagctatacgaagcacttcgtcgacttcagcgccagggcgccgccggagaaattctctcagcaactaacccacttctcgcctcgccttattacgacgagcgctgggaagaagatgaagatgactaa

SEQ ID NO: 105845 - DNA, 240 bp, Enterobacter aerogenes
atgttcaagttaattcagcgtggtcagatttacgctgaccagcacggttggcccgtcatcatccacagctgcacatcacagatagtccgctactggcgacagggccggataaacaccgcttcaatagatcgttttaacaataattttgagcacctcgatcaccgtggggcgacgcagatacacgccgtactggaggcgagcgagcacattaaatcgctgcgcgcccagcgtgcggcataa

SEQ ID NO: 105846 - DNA, 360 bp, Enterobacter aerogenes
atgatggattacagcaagctaagtgatggggagattagcgtcaggttggcctatttcctcaaaccaaaatacagcgccaccattcacccgcacgagagttctgccgcgcagctgtcatggaactggttcaacacggtacagaacaccggttatttcccgctgcggcgcgccgaagagctttacccggcaatgaagaaacaccggatcggcctcatcccatcaggcaagaccgtatggacagcatcacacgaatccggagtcatctctactcaccgtaacccgctgcgcgcggtcgcgattgtattcctcatgctgcaggagaaagaaaaagatgcaggagcagcgaaaaagtgcaggtga

SEQ ID NO: 105847 - DNA, 921 bp, Enterobacter aerogenes
atggatagtgatgatatgaagttcagaatagtttacgatggcccggctttagacacgcatgaaatggatgtgcgtgatctcgcgcctgcgctattgtcattatctgatgctttagaggaggccggtcgcactatctatggcaaggaacgacggatttctgtaaaagttaacgcctctttcaaggctggttcatttggcgtcgatctcatagcacaatcatattcgataaccagtcaaataataggtgccttttctggtaatggtgcttcagctgcatgcaatatcataagtttggttggttttggatatttaacatcaaaacattgtgctaaaggtctcgttcaactgataaaatggttaggtcctaagaaaatcaagcgtatagagcctacatttgacgggaatgtaaaaatattcactgatgaagaaaatgaagtttttgactctcaagttcttgaactatataaaaataaaaaattaagaagatctcttgaaaatgtaataacaaaaccgttagagagagacggaattgagaacttcgcggttaccactgataatgggaaaacctttgtagaagtcagtaaggaagaggctgcatttttcaaggtcgatagtaaagaagatcttataatatctgagtctataaccgaaagagcactccatccgctagatatctcatttcgagaagggcataaatggcatttttcagatggggctagtccgtttcatgcggaagtaagtgatgagaaatttctaaaagccattgatgatcaatcagttgcatttgctaagggcgatcttttgctggtcgatttaaaaataactcagtatttgacagataaaggtgttagaacttcctacgagatagtaaatgtcaaaaagataataaacccgcaacggcaaatagatttgccattttaa

SEQ ID NO: 105848 - DNA, 684 bp, Enterobacter aerogenes
atgaataacgaaaacggattaacaccgagccagttggcggaacgtaacgcaactctggtaactgaaattgagaaatgccgcgagctttcaggctgccaggctggcgtagacctgcaggactgggtgaagcagctggcggcggagaacttggctctaaaagcaggagtcacttacttcgcatactcgcctgaatacggttttgattatttcaaagataaacagagcgctatcgacacagcacaggcggagattgacgcataccgtgaggacgcagacgacggctggagtgaagatgttcagcgcgtgtcatggggtgtcgtgattcagcaggctcaaggcttcgatgcccaaggcaagcatacctcccataaccagcatacctatcaaacatgcgattaccggctggttgacttggtatcaactcccgccaccgatcgcatcgtagccgggattaaggctgatggtcgcgttgaaggtgcgcactttgtggctaaccgtatgctggctgcctgggatgcgggttttatcgaagactcagccaaaaacgccgccgatatcgcccgtatgattctcacctcaaccgagtttatggcagatgcgccagagggtgatttcgaccgttcttttgctgatgacatcttggcagatatcgccaagcagttgcgcgagggggccgacaaatga

SEQ ID NO: 105849 - DNA, 462 bp, Enterobacter aerogenes
atgagccgattaaccgccattatcagcgccatagtgatttgcctgatagttagtctcggatggctggccagtcactaccacgacaacgccaccgagttcaaaagacagcgtgacgagaaggttaaagcgctaaacctcgcgaacgagaccatcaccgacatgacaacccggcagcgtgatgttgcagcgctcgatgccaaatacactggagaactggctgatgccaaggctaatatcgatcagcttgagcgtgatgttgcttctggcaagcgtcggttgcagctcaacgcaaaatgtcccacgagcggagcgtccggaaccggcggcatgggcgatgcttccggcccccgacttgctgacgccgctgaacgcgattatttcaccctcagagagcgaatctccaccatcaccgagcaagtgagctacttacaggactacatccgaacgcagtgcttgaaatag

SEQ ID NO: 105850 - DNA, 210 bp, Enterobacter aerogenes
atgtctataagtgaacgcaaaccaaaatttaagaccggtgatatcgtttatttagtttcagccggcccggcgatggctgttcaggaaccaatcattaacacctacaaggaatttactggcgattactggtgccagtggtttgcggggaggaagcaagaaagagcaagattcccagaggactcattgactgcaaccaacccaaagccgtaa

SEQ ID NO: 105851 - DNA, 852 bp, Enterobacter aerogenes
ttgtccttgataatttgtgtgtcaatgcattttaggtgtgcacttatgaattttgatgattcatttcctaaccgagtatcgatagcaagaaccgctcttggcctgactcaggatgaactagcccagaaggttggtgttgtaagaaggcaaattgctgcttacgagggcggagaagcaaaaccaagaaaaaatgcattgcagaatcttgcggctgcgctcggaacaacaacatcctggctaacaagtggtgtcggcgatgggcctgacatcagtaatgtaaaaaaaactattacggtgccagagattcctgtgctttctcacgttcattcgttttcttttgaggctgaggactttatttcctcttcatcaattatcgatttcattccagcgcctcccggtgcgcacgaaaaatgtttcgcacttgagatctcaggtgactcaatgtccaccgactcaggggatagtttcccccatggaaccatagttacatttgacccagacaaggagccaaagagtggcgactacgtaatatgctggttgaatgacactggcgaaaatactttcaaacaactgatactcgaccaaggccaaccttaccttagggccttgaacaatcgatactatcccgtaattcgaccaacccccttgcttatcatgggcgtagcaattcattcacagcgatttctcaacaaaaaaacgcatctcgaacaaataagcatgtttgaggatgaccgctgggcagaacgcgaaaactcaaactcgcaaaagcatctaaaactcatagataggataaaaaaccttgaagaaaagatggatttaatccttaacttcatgcaaaacaaaaacaggtaa

SEQ ID NO: 105852 - DNA, 174 bp, Enterobacter aerogenes
atggaacaaaagcaaagtaacggcaagcagatctcctaccgtcctcgtaaagaggtccgtgattttttggaggataacgctgctaaaacatatcgttctgtgcaggggatgatggattacttgatggacagaattatggatttggagaaaaaaggtgagattactatccagtaa

SEQ ID NO: 105853 - DNA, 474 bp, Enterobacter aerogenes
atgcccacttgggggaggctttttaacttatggggtaggcaagtgaagattattggttatatagcgattgcaatagggttaatctttgctgtatcggcgttgttcatggatgtgacagtagcgacaagcggtggttacagggttaacaatcttggattaatgtcatcgcgccaaaattacatggtatttggagggttcgtagccatcgcaggtatcatcatcgctctggtgggagataagcttaaagggtccgaaacttcagtcaaatgcccttattgtgcagaattaataaatcccgaggcggtgaagtgtaagcattgcgggagtgatgtaacccctttgaagacaatagttaacactgacgatgctgcggacagtgataggctggctgacgttaatgtaaagttaatcgcggggattgtgctggcggtctttgcggcgattatcggcgcaataatgttttaccgtcaatga

SEQ ID NO: 105854 - DNA, 474 bp, Enterobacter aerogenes
atggcagatatcctctacccacacgactatctcccaatgccactgcaggaaggctatgggttccagccagtcagtcctttgaaacgaactcaactctctactggccgcgcgcgacaacgcagggcgtatacctcgactcctacggaagcgactgtatcctggtttatggagagcgatgttcaggggctcacgtttgaatcgtggtaccgcgatgcgctctctgatggtgcagcctggttcatgatgaagttgcaaaccccagcaggcataaaattctacaaatgtcgttttacggatatctatcagggaccagtgctggtggctcctatctactggcggtactcggcgacgttggagttatgggagcgcccactattgcctccaccgtggggtaactaccccgagtggatcgcaggtagttcactgcttgatatcgcattaaacagggagtggccaaagcatgacggtgcttaa

SEQ ID NO: 105855 - DNA, 1752 bp, Enterobacter aerogenes
atgacaacaactaactcagatgtttacctcccatcttttggtgtatatcttcaatcagcgtctttaattagttcattaaccgcagttgatatgactgataaactacaggaagccatcaacaaggcaaaagaattaggcgtggcattagataccgggatcaggtcagtaataggcccagcaccatcaggttatatttacgttacaaagtcttttgatgttactggattaatcgaattaaaaggaagtcttcctataggggttatcccagaaactttttctgcaaccatgtttactgcagagacaccaaagcgagggattgtaatgcgtaacatgaatgcccgttatgatgcaaatgggaagcaatatgcttttactacgagcggtgggcagactttcgactctcacggagtctatgggctacgggatatgcctgaaaatgtcgtagggatggttcacaccacgtcgtattctcattttaacggccctgtatgggggcgtcgattcagtacggcaatcatgctggctaacacttatgatgtttctattgctgcacaatgggcggttgtagatagtgggtctaaaaattatcctgcatttttcgttggttcttacccctacgctgatgttcctgatgagtctaatagtgtcactttcccaaggttattgttgcatacaaataagtatcgagatgccgagctcattggaagcaagattaatgttaatgcggtgcacgcggaggattgcactattggcacaatctctgggataactcctcgtgggtttgatcaattcactccaaatgggattgcgtccctagtatttgccgtaaccgggggtagtatcggaaacataaattataacattaatagtgaatcaacaaataatggatgcttacttattaatgcgctcggcacttccgttggatctatttactgtgacaggggaagtatagatactctcgtgagcgatgtttattaccttggtcgaggaggtgccgtgaataatatttatacggcaggaagtttgtatacggatggaggttctaaaattgtaatcaattcagccatagttggaaataacctaatcaacaaatctgttcattcattaattcttcgcactgatgtcactggagatgttattaattcaggaactatcgattatatggtttgtaaaggcaatttcactcaggaccaatacgcaataataaacggtggtcagatatatggagtaacgaccatttcagcatcaagtgaaattaccaacgtgacattcaatggtgaattctcttcttcggctacgctaccccgactacgccggtgtacttttaatggagcgtttacaaacactggaggcggacgttttgataattgcaccatccctaaagtagatattaaatcagttataaacaaaccaacttatattgactgtaacataggaaacgttacagcaggaacagctaatgggaaggctattttcagaaattgcagtatcggaagttacaacttcgatagtggtaatcagttaatggtacgtatacttgacggttcctgtggaactatcaccatgaataacatcacttcatctttaataattattgatggtgtatcatgttcatcaggaaatgccattgctggttggactataccagtaggaactggggtgggttttggtacaaaaacgataaatccttatactgcatcaggctgggtacttatcaacaataatggtatcgcttcctggaaaccgatttag

SEQ ID NO: 105856 - DNA, 558 bp, Enterobacter aerogenes
atgagcgctcaatacggattttttatcgattccgcccgttgcaccggttgcaaaacctgcgagctggcctgtaaagactacaagaacctgacgccggacgtcagcttccgtcgtatctatgagtatgccggcggcgactggcaggaggacaacggcgtctggaatcagaacgtttttgcctactacctttccatcgcctgtaaccactgcgaagacccggcgtgcaccaaggtctgcccgagcggagcgatgcacaagcgcgaagatggttttgtggtggtcaatgaagaggtgtgcattggctgtcgctactgccatatggcctgcccgtatggcgcgccgcagtacaagaaaccgatttgcgtcgagtcctgcccgctgcgggcgctggacttcgggccgattgccgaactgcgtgaaaagcacggccaactggccgccgtggcgccgctgccgtcggcgcacttcaccaggccgagcattgtgataaaaccaaacgccaacagccgtccgtgcggcgataccaccggctatctggccaatccgaaggaggtctaa

SEQ ID NO: 105857 - DNA, 246 bp, Enterobacter aerogenes
atgagcgaacttttttccagtcctgaccatacgctggacgccctggggctccgctgcccggagccggtgatgatggtgcgtaaaaccgtgcgtaccatgccggtgggcgagaccctgctgattattgccgacgatccggccaccacccgcgatattcccggtttttgcctctttatggagcatgaactggtggcgcaggaaaccgaagccctgccgtaccgctacctgatccgtaaaagccactga

SEQ ID NO: 105858 - DNA, 666 bp, Enterobacter aerogenes
atgaatccctttactaccgtacagcgtaagaaagcgctcgtctggctttcgctatttcatctgctggtgatcacctccagcaactatctggtccagctgccgatctccatttttggtttccataccacctggggggcgttcagttttccctttattttcctcgccaccgatctgacggtacgcattttcggcgccccgctggcgcgacgcatcatcttcgcggtgatgatcccggcgctgattatttcctatggcatttcggcgctgttttatatgggcgaatggcagggctttgccgcgctgggcacctttaatctgttcgtcgcccgtatcgccgccgccagctttatggcttatgcgctggggcaaattctcgacgtccacgttttcaaccgcttgcgtcagaatcgtcgctggtggctggcgccgacggcgtcgaccctgttcggtaacgtcagcgataccctggccttcttcttcatcgccttctggcgcagtccggatccgtttatggccgcccactggggagaaatcgccacggtcgactactgctttaaagtgcttatcagcatcgtcttcttcttgccgatgtacggcgtgctgttgaatatgctgttgaaaaaactggcggataaatctgatttgtcggcattgcagccaggttaa

SEQ ID NO: 105859 - DNA, 558 bp, Enterobacter aerogenes
atgcgcaatttggttaaatatgtcggtattggcctgctggttatggggcttgcggcctgtgataacagcgattcaaaagcgccgaccgtcggggcggcagcagagagcaataccagcggccaggcgattagcctgctggatggtaaactgagcttcactctgcccgcgggcatggccgaccagagcggtaagctcggtacccaggccaacaatatgcatgtctattctgacgccaccggccagaaagcggtgattgtgattgtcggcgacaacactaatgaagatctggcggtgctgtccaaacgtctggaagatcagcagcgcagccgcgacccgcagctgcaggttgtgtctaacaaatcgattgagattaaaggccacaccttacagcaactggacagcatcatctccgccaaaggtcagaccgcgtggtcttccgtgctgctcggtaagatcgatgacaaattgctgaccctgcaggtcactctgccagcggacaaccagcagcaggcgcagaccgaagcggaaagcatcgtcaacacgctggtcattaactaa

SEQ ID NO: 105860 - DNA, 1221 bp, Enterobacter aerogenes
atgcccgaacccgtcgccgaaccggcgctcaatggactgcgccttaatctgcggattgtctccgtcgttattttcaactttgccagctatctcaccatcgggctgccgttggcggttctgccgggctacgttcacgatgtgatgggttttagcgccttctgggccgggctggtgattagtctccagtatttcgccacgctgctgagccgaccgcacgccgggcgctacgccgatctgctcgggccgaaaaagattgtcgttttcggcctgtgcggctgtttcctgagtggtttgagctacctgctggcagcctggagcagcagctggccactgctgagtctgctgctgttatgccttggacgagcgatcctcggcattggccagagctttgccggcacggggtcgacgctatggggcgtaggcgttgtcggctcgctgcatatcgggcgggtgatttcgtggaacggcattgtgacctacggcgcgatggcgatgggcgcgccgctgggcgtgctgtgctattcatacattggcctcagcggcctggcgatggtcattatggcggttgctctggtggctatcatttgcgcgctaccgcgaacggcggtgaaggcaacgaaagggaaagcgatgtcatttcgcgcggtgctgggccgggtttggccttacggcatggcgctggcgttggcttctgccggctttggggttatcgcgacctttattaccctgttttatgacgcgaaaggctgggacggcgcggcctttgcgttaacgctgttcagctgcgcgtttgtcggcacgcggctgctttttcccaacggtattaaccgcctcggcggcctgaacgtggcgatgctctgttttagcgtggaggttattggcctgctgctggtgggctttgcacagacgccgctgatggcgaaagtcgggactttcctcaccggcgcggggttctcgctggtcttcccggcgctgggcgtggtggcggtaaaagccgtaccgcagcataatcagggctcggcgctggcgacctataccgtatttatggatttgtcgttggggataaccgggccgctggccgggcttttgatggcgtggaccgggataccgacgatttatctggcggcggcagggctggtgatggccgcgctactgctgtgctggcggttaaaaaaacggcccccggtggttgaaccggaggccgctgcatcagggcaataa

SEQ ID NO: 105861 - DNA, 723 bp, Enterobacter aerogenes
atgaattttaccctgaacataatcgactggcaggcgagagcgcctgggctttgcgaagccgaacagtggcagcaatggtcacggtattcgcacaccatcgatccggcggccccggcggccaaactcaacgaactgccaatgatgaccgctcgccgacttagctccggcagcaagctggcggttgagtgcgggctggcgatgctgcgccgccatgagatcgacgccgttctctataccagccgtcacggcgagctagagcgcaactatcggatcctccacgccctggcgatggagcaagcggtatcgcctaccgatttcgccctatcggtacataattccgccgtcggtaatctgacgattgcggccaaaaagcccattgcgtcgtcatcgctttctgccgggcgcgacactttccagcagggattatatgaagtcatggggcttctgcaggcaggttatcaacgcgtgttgatggttgattttgatggttttctgccggatttttaccattcgcagctgccgacggctatgccgacctggccctatgcgacggcctgggttattgagtccggcggcgaatggcagtgccaggctgagcgctatgatgccgttcctgaaagccccctaccgcaaagcctgctgtttttacggcactatctgcagaattcccatacgttcaccctgcccggcgagcgcgtgcagtggcgctggagccgcgcatga

SEQ ID NO: 105862 - DNA, 816 bp, Enterobacter aerogenes
atgacgccgcttttgcaacggttaaatcgcctgtggcgcgcggcgatgaccggtttttgtttcgcgctgtttggcgtcggtgggctgctgctctcactgatctggttcaatctgctgctgatcgtagtgcgcgatagcacccgccgtcgtcgtctcgcacggcgcagcatttccgccagctttcgcgtttttcttaacgtcgtgaaagccgtcggcgtactggactaccagattaaagggcgcgagattttacgtcaggagcgcggttgcctggtggtcgctaatcatcccagcctcatcgactacgtgatgctggcctcggtgatgccggaaaccgactgtctggtgaaaagcgcgttgctgaaaaacccatttgtcagcggcgtgatccgcgcggcggattatttgattaacgatcgcgccgataccctgcttccggccagtcggcaacgcttacagcagggcgatactattttgattttcccggaaggaacccgaacggtgccgggagaaaaaatgcagctgcagcgcggcgcggccaatatcgccgtgcgctgcggcagcgatttacgcgttgtcgttatccgctgtaccgagcatatgctgggcaaacagagcaaatggtacgacccgccgcgaacgaaaccgttatttaccgttgaagtcggagaacggctacgaatagaccaattttacgatgccaacacacaagaaccggcgctggccgcacggcagttaaaccggcatattttgcttaaattagaatcaggcgttgcgcctgaaacaggaattaatgatggaagcgctctatcttga

SEQ ID NO: 105863 - DNA, 258 bp, Enterobacter aerogenes
atggaagcgctctatcttgaaattaaaaatctaattatcagtacattgaacctggacgagttgtccgctgatgatatcgacaccgatgccgcgctgtttggcgatggtctgggtctggactccatcgatgcgctggagctgggtctggcggtgaaaaaacagtacggcgtggtgctgtcggcagaaagcgaagagatgcgccagcacttcttttccgtcgccacgctggcatcctttattcaagcgcagcgtgcctga

SEQ ID NO: 105864 - DNA, 252 bp, Enterobacter aerogenes; identical to SEQ ID NO: 87712

SEQ ID NO: 105865 - DNA, 582 bp, Enterobacter aerogenes
gtgtcgggcatccgctcgctgccggtcgtttcaattatgacggggttattactgctgacctggccatttttgatctggtttggcctcgcgcataacagcctgccatggctgttgccgctaatggcgctactgctgtttttacgctttcgccagacccggcgacagtcagggccgttgagcgtggtcactcagatcgttgcggtagccggcatgacgctgtgcattgccagctacctgctaaagacccatcagctactgctattttacccggtggtggtgagcggcgtgatgctggcggtgtttggcggttcgctgtggtcaagtatgcctgtagtcgagcgcctggcgcggttgcgggacccggttcttcctgagcgagccgtgcgctacacccgccgggtcacccaaatctggtgcgcctttttcatcggcaacggcggtatagcgctggttaccgcgttatacggcgatatgtcgctatggacggcgtggaacggcatgatttcctatctgctgatgggcatgttgatggccggagagtggctggtgcgccagcgggtgattaaacgagataaaccatga

SEQ ID NO: 105866 - DNA, 1350 bp, Enterobacter aerogenes
atgatgcagcccctcacgctggcccagtggctcagcgccccgcgtccgccgcaaacgctgattgcgtggcaggaagcgcacagctggacgctggcgcatctgcgctatgatgtcgctcacctgcttaacaacctgcaacaacagccaggcgagcgttgggcgctctgctttgacaacagctacctgtttttggtcgcgctgttggccacgctgcatgcggggaaaacgccagtgcttcctggccatagccgagcggcgctattacacgaacagcgagcgcttttcgacggcatcctgagcgataagacgctgccatggcgcgggccgctgcgggttatccagtccgccatggcgaccgcatcccacgaatacgcgttcccggcgatcggcgataacgcctgcattgagctttttacctccggttctaccggtgaaccaaagcgaattagtaagcccgttaagagtctcgaccgcgaggcggcgctgatagccgcgcactatgccgggcgcctgacaggcagtcgggtagtggcatcggtcgcgccgcagcacttgtacggcctgacgttccgtctgttcctgccaatggcgctggggttgccgctgcacgcggcgatgattgagtacgccgagcagctggcggcattaagccatgatcatcattatttgtttatcagtagcccggcttttctcaaacgtctcgactatcggcttatcccgccgccggtcgcgatgattttgtccgccggcggcaagctgccctggcaggatgccgtgcacaccgctaactggttcaatacctggccggatgaaatctacggcagcacggaaagcggggttatcgcctgccgccagcgcctgcaggataatgcgccgtggcagccgttccccggcatccgctttcagccgcagggcaacacaattcgtctattttcgccgcttatcgccgacgataacggcctggttatcgatgatattttgcatttcaatgaaagcggtcaattccagctggcaggtcgtcgcgaccgggtagtgaaaattgaagagaagcgcatttcactaagcgaagtggaataccggttactgcaactggatggcattcttgaggccgccgtcctgccgattacccgcggcagccgccagagcgttggcgcgttgttagtgctcgatcatgacgcccgccgccgctgggggaaaagccaggaattacaatggcggaaagcgctgcgcgcctcgctggaacctgtggccatccctcgctactggcgggtggttgacgagatccccgttaatagcatgaataagcgtgtctacgcgcaattacaggagttatttcatgaagccccatga

SEQ ID NO: 105867 - DNA, 354 bp, Enterobacter aerogenes; identical to SEQ ID NO: 87709

SEQ ID NO: 105868 - DNA, 1692 bp, Enterobacter aerogenes
atgccgctagctttctctccctgcgtgctgatcccctgctataaccacggcgccatgatgccccgggtgctggcgcgcctgcagccctttggcctgccttgcatcgtggtggacgacggcagcgatagcagtacgcggcagcagttggagcggctggcggcggaaaccgctaatctgaccttaatccgcttaccacagaacgcgggcaaaggcgcagcggtgatccgtgggctacaggccgcagcgcaagccggtttcagccacacggtgcaggtcgatgccgatggtcagcacgccatcgaagatattccgcaactgttggcgctggcgcaggcccatcccgaagcgctgatttccgggcaaccgatttacgacgactccatcccgcgttcccgcctctacgggcgctggataacccacgtctgggtatggattgaaacgctgtcgctgcagttgaaagacagcatgtgcggttttcgcgtctacccggtgacgccaacgctacagctggcgcagcgcgtgtcactcggccagcgaatggattttgataccgaagtgatggtgcgcctctactggcagggaaataccagctattttgtgccaacccgcgtgacctacccgccggacggtttgtcgcattttgatgccatcaaagataactgccgcatctcgctgatgcacacgcgtctgttcctcggcatgctgccgcggatcccctcgctgttgtttcgccgcgcctcgccgcactgggcgcgtcagcaggaggtaaaaggattatggggaatgcgcctgatgctactggtgtggcggctgctggggcgcaaggcgttctcgctgctgctttatccggtggtcggcgtgtactggctgacggccgcgacggcccgccgtgcttcgcaacaatggataacccgcgtgcgcgaacagttcgccgctcgccagatgccgataccgccaacgctaaccagctatcggcacttccagcgcttcggcgaagcgatgctggataaaatcgccagctggcgcggcgagttgcagttcggccgcgacgtggtttttaccgcaggcgccgaggagacgctaaatatcagcgatccgcgggggaagctgctgttggtttcgcatctcggtgatgtcgaagcctgccgcgcgctggcgcaactacagggcggcaaaaccatcaacgctctggtattcagcgaaaatgcgcaacgttttaaacagattatgacggaaatggcccctcaggccgggctcaacctgatgccagtgaacgatatcggcccggataccgccatcctgttgcaagaaaagctggagcgcggcgagtggatcgcgattgtcggcgaccgtattgcggttaacccgcagcgcggcggagaatggcgtgtctgctggagccgttttatggggcaagccgcccccttcccgcaggggccatttatcctcgccgccattttgcgctgcccggttaatttgcttttcgctctccgccagcagggcaaactgcgcatttactgcgagccgttcgccgacccgctgctattaccgcgcgccgatcgccaacaggcattgcaacacatcatcgaccgctacgccgaacggctggaacactacgcgctgcagtcgccgctcgactggtttaactttttcgatttctggcgtttgccggatcccaaaaacaaggagtaa

SEQ ID NO: 105869 - DNA, 423 bp, Enterobacter aerogenes
gtgcttaacgatccccgttttactgctgaagtagagctgactattccgtttcatgacatcgatatgatgggcgtcgtgtggcatggcaactatttccgctacttcgaaattgcccgtgaggcgctgcttaaccagttcaactacggctaccggcagatgaaagcctcaggctatttgtggccggtggtcgatacccgcgtgaaataccgcgacgttatcaccttcgagcagcgcattcgcgtgcgcgcgcggatagaagagtttgagaaccgcctacgcattggctacgaaatttttgatgtcgatagcggcaagcgcaccaccaccggctacaccatccaggttgcggtggatgaaaacagccgcgagatgtgtttcgtcagcccggatatcctgtttgaacgcatgggggttacgccatga

SEQ ID NO: 105870 - DNA, 606 bp, Enterobacter aerogenes
atgagattactgctgctgttagggctgtttatcagcccgctggtcagcgccctcacgcttgatgacctgcaaaaacaatttagcgaacagccggtggtacgcgcccacttcgatcaagttcgcacgattaaggatctgccgcagccgctgcgatcccaggggcagatgttgatcgcccgcgataaggggttgctgtgggatcaaacctcaccgttcccgatgcagctgttgctggatgacaaacggatggtgcaggcgatcaacggccagccgccgcaaaccattactgccgaaaacaatccgcagatgttccagttcaaccatttgctgcgcgcgctgttccaggcggatcgaaaagtcctggaagataacttccgcgtggaatttgccgataaaggcgaaggccagtggacgctgcgcctgacgcccatcactacgccgctggataagatttttgcccgcatcgatttggccgggaaagactatctggaacatattcagctcaacgacaagcaaggcgatcgcaccgatatcaccctttcccaacaccaattgacgcctgcgcaactgaccgatgacgaacgccaacgctttgccacccagtaa

SEQ ID NO: 105871 - DNA, 2319 bp, Enterobacter aerogenes
atgacgaacgccaacgctttgccacccagtaaacgccccgcgttgttatgggccgtcgtctgcctgctcctggcgggcgcgctgctggcgctgctgccgcaggcccggctcaacagcagcgtactggcgatgctgccgaagcagacgcttggcgcaatcccgcccagcctgaacgacggttttatgcagcgccttgatcgccagctggtctggctggtcagccccggtaaacaggccgacccgcaggtggccggcgactggctgcgtctgctgcaaacctcgaaggcgctggcagacgtcaaaggcccaatgaatgccgataatcagcaggcctgggggacctttttctggcagcatcgtaacggtttaattgaccccgctacccgcgcgcgcctgcaaaacggcggcgaagcgcaggcgcaatggatcctctcacagctctattcggcattttccggcgtcagcggcaaagaactgcaaaacgatcctctgatgttgatgcgcggctcgcagctggcgatggcgaaaggcggccagcggatgcaactgcaggatggctggctggtgaccaaagatgcccagggcaacctctggtatctgttgcatggcgaactggcgggttcctcattcgatatgcagcagacgcaccggctggtcactacgctcggagagctggagaagcagtggaaaacgcagcatccgcaggcgcagctgctgtcgcgcggcaccgtgttctatagcgattacgccagtcagcaggcgaagcacgatatttctacactcggcgcggcgacgctgttcggcgtgatcctgcttatcgtcgcgacgtttcgttcgctgcgcccgctgctgctgtgcctgatttccatcgccatcggcgcgctggccggcaccgtcgtcacgctgctgctatttggcgagctgcatctgatgaccctggtgatgagcatgagcatcatcggcatctccgccgactatacgctctattatctgaccgaacggatggtgcatggcgcggaatcaaccccgtggcaaagcctcgccaaagtgcgtcatgcgttgctgctggcgctacttactaccgtggcggcttatctgattatgatgctggccccctttccggcgattcgccagatggcgctcttcgcggcggtcggcctgagcgcctcgtgtctgacggtaattttctggcatccatggttgtgccgtggacttcccgtgcgcccggttccggcgatggcattgttgttacgctggcttgccgcctggcgacgccataaaaagctgtccatcggcctccccgtcgcgctggccctgttctcgctggcgggtctcgcgacgctgcgggtggatgatgatatttcgcagctccaggcgttgccgcaggatatcctggcccaggaaaaagccatcaccgcgctcaccgggcaaagcgtcgatcaaaagtggtttgtgatttacggcaaaacggcccagcagacgctgcagcgcctggaggcatttatgcccgcgctgacgcaggcgcaaagcgacggcctgctcggcggatatcgcgctatccccctgaattcactcgctcgccaacagcaggatcttgccctgctgcaacgcgccgcgcccaccgtcagtaacgtgctgaaccacgccggactggcaacgatcaatcccgatctcaacccgatgccagtgaccgtcgacgtctggcttgccagcccggccagcgaaggctggcgactgctgtggctgacgctgccggatggcgaaagcggcgtactggttccggtaagcggcgtgaaagacagcgcggcgctaaaaacgcttagtacacaacaggctggcgttgcgtgggtcgatcgcaaaagcgatttcgaccagttgttcgcgctctaccgccacattctaaccggcctgctgggcgttgcgctggcggtgattgcctgcggcgctatgctccgccttggctggcgcaaagggctggttagcctggtgccgtcggtattgtcgctgggatgcgggctggcggtgctggcatttagcggccacgcggttaacctgttctccttgctggcgctggtgctggtactgggcatcggcattaactacacgctgtttttcagcaacccgcgcggtacgccgctgacatcgctgctggcggtcaccctggcgatgatgaccaccttattgacgctcggcatgttggtgtttagcaccacgcaggccattagcagttttggtattgttttggtaagcggcattttcgccgccttcctgctttcgccgttagcgatgccgaccaaaaaagagaaaaaaagacgatga

SEQ ID NO: 105872 - DNA, 585 bp, Enterobacter aerogenes
atgagaagaccatcattctggcgcgccttcgcgctactcgccgccttattgctggccggctgcagccgttcgcagccggagccgcaaggccgcccgcaggcgtggctggaaccgggtacgcgcgtcacgttgccgccgcctggtatctcgccggacatcagctcgcagcagttgctcaccggcagcttcaacggccaaacccagtcgctgctggtcatgctcaatgccgatgataaaaagctcacgctggcgggtctgtcatccgtcggtatccgcctgttcctggtgacctatgatgaaagagggctgcgcgctgaacagtcgatggtggttccgcaactgccgccagccagccaggtgctggccgatgtgatgctcagccactggccggttagcgcatggctgccgcagttgccaaaagggtggacgttgaccgagcgcggcgacaaacgcgaactacgtaacgcgcgcgggaagctggtcaccgaaatcacctatatcaaccgcaaaggccagcgcgtgccgatcagcatcgaacagcacgtctttaaataccacatcaccattcaatacctgggtgactga

SEQ ID NO: 105873 - DNA, 1170 bp, Enterobacter aerogenes
atgatctacatttccgccgtcggcatgattaacgcgctgggccgcgataacgatgatatcgccgccaatttggctcgcggtattgcgcccggcatgcgtccgcgcgaggggtggctacaggggcatccgcaggcggtgttcgcgggcgtggacggcgaattgcccgccattcccgatacctttagcgcccatcgttcgcgcaataatcagctgctgctggcggcgctggcgcaaattcagccgcaggtggatcgcgccatcgcccaatacggacgagagcgcgtggccgtagtgctcggcaccagcacctcggggctggatgagggtgacgcgcatgtcaccctgacgcttggcggcaaggaaagcgcggcctggcaatatccgcaacaggagctgggcgacccatcgcgttttctcagccactggctggcgctggatggcccggcatttacgctgtcaaccgcctgctcctccagcgccagagcgattatcagcggacgccgactaattgaagccgggctggcggatgtggcgatcgtcggcggcgcggacaccctcagccgaatgccgatcaacggctttcacagtctggaatcgctctccacgacgcagtgccagccatttgcccgcgaccgtaacggtatcactatcggcgaaggggcggcgctgatgctgttgacccgcgaaccgcagccagtcgcgctactgggtatcggcgagtccagcgacgcctggcatatttccgccccgcatcctgaaggagagggggcgatccgcgccatccagcaggcgctgggggatgcgggcatcgcccctgaacaagtgggttatatcaacctgcacggcaccgccacgccgcttaacgatagaatagagtctcacgtcatcaacgcgctatttggcgttcgggtaccctgtagttcaacgaaacacctgaccggacacacgctgggcgccgcggggatcaccgaagccgccatcggcatgctgattctgcagcgaaacctgccgctgccagcgcaggatttcagccagtcgccgcgcgatgaaacactaccgccatgcgggatcatcgaacatccccagccgctgccgcgaccgattatcctgtcgaactcttttgcttttggcggtaacaacgccagcatcctgctcgggagcattcaatga

SEQ ID NO: 105874 - DNA, 477 bp, Enterobacter aerogenes; identical to SEQ ID NO: 87702

SEQ ID NO: 105875 - DNA, 732 bp, Enterobacter aerogenes; identical to SEQ ID NO: 87701

SEQ ID NO: 105876 - DNA, 1230 bp, Enterobacter aerogenes
atgacacgccgtgtggtcattaccgggatgggtggcgtcaccgcatttggcgaaaaatggcaggatgtctcggcggggctgaagagatataaaaacgccgtacgcgccatgccggagtggcgtatttacgacgggctgcatacgctgctgggcgcgccgatcgatgatttcaccctgcccgaccactatacccgcaagcgcattcgcgcgatggggcgcgtatcgttgctctccacccgcgccactgaactggcgctggagcaggccgggcttatcgacgatgccatactgagtaacggcgaaaccggcatcgcctacggttcatcaaccggcagtaccgccccgatgagcgaatttgccaccatgttgacggaaaagcacaccaataatattactgctaccacctacgtgcagatgatgccgcataccaccgccgtcaatacgggcctgttttttggcctgcgcggccgcgtgatcccgacgtccagcgcctgtacctccggaagccaggcgattggttacgcctgggaagcgattcgccacggctatcaaacggtgatggtcgccggcggcgcggaagagctttgcccgtcggaggccgcggtattcgatactctgtttgctaccagccagcgcaatgagcagcccgacattaccccctccccctttgatgtgctgcgcgatgggctggtgattggcgaaggggccggtactctcattctggaagaactggagcacgccaaagcacgcggggcgaccatttacggcgaaatcatcggtttcgccaccaactgcgatgccgcgcatatcacccaaccgcagcgtgaaaccatgcagatctgcatggaacaatcattaaaaatagcaggcctgagcgcccgggatatcggctacatttcggcccacggcaccgcgaccgaccgcggcgatatcgccgaaagccaggcgacggcggcgatttacggcgatagcgtgccgatctcctcgctgaaaagctatttcggccatacccttggcgcctgcggggcgctggaagcgtggatgagtctgcagatgatgcgtgagggctggttcgcgccaacgctgaatttgcataatccggacgccaattgcggagaactggattacatcatgggcgaagcgcgccagattgattgtgaattcctgcagagtaacaacttcgccttcggcggtattaacacctcaatgattattcagcgctggtcctga

SEQ ID NO: 105877 - DNA, 603 bp, Enterobacter aerogenes; identical to SEQ ID NO: 87699

SEQ ID NO: 105878 - DNA, 384 bp, Enterobacter aerogenes; identical to SEQ ID NO: 87698

SEQ ID NO: 105879 - DNA, 339 bp, Enterobacter aerogenes; identical to SEQ ID NO: 87697

SEQ ID NO: 105880 - DNA, 1656 bp, Enterobacter aerogenes; identical to SEQ ID NO: 87696

SEQ ID NO: 105881 - DNA, 903 bp, Enterobacter aerogenes
atgaaacaagtcggcttacgcatagatgtcgatacctttcgcgggacgcgtgatggcgtaccgcggctgctggccctgctgggcaagcacgggattcaggcaagcttctttttcagcgtcgggccggacaatatggggcgccatttatggcgcctggtaaaaccgaagtttctgtggaaaatgctgcgctccaacgcggcctcgctgtatggctgggatattctgctggccggcaccgcgtggccggggcgcaggattggcgcgggtaacgaagaggttattcgcgccgccgcgcacatccatgaagtgggcctgcacgcctgggaccactacagctggcaagcgtggagcggcgtctggccgcaggaacgtctgacgctggaaattgaacgcggtctgctcgaactggaacgcattatcggccgcccggtgacctgctccgccgtcgccggctggcgtgccgaccagcgggtggtaaaagcgaaagaatccttcgatttcctctacaacagcgattgtcgcggcacgcggccattcctgccgcagattggcggcgggggctccggcaccgtacaaattcccgtgacgcttcccacctgggatgaagtcgtcggtagcgctgtggataccgccggcttcaaccgctatctgctggactgcattcatcgtgacaagggaacgccggtctataccatccacgccgaagtggaaggcattgcctacgccgatcagttcgatgcgctgctgaccatggcggaggaagaagaaatacaattttgcccactgagccagctgctgcccgctgactttagcgagctgccgtcaggcaaagtggtccgtggtgagctggctggccgggaaggttggcttggacgtgaacaattactgggctcgggtgtatga

SEQ ID NO: 105882 - DNA, 1986 bp, Enterobacter aerogenes
atgaaagcagtagtcttcgcttatcacgatatgggttgcgcaggtattcagtcactgctgggtgccgggtatgacatcgccgctattttcacccatccggataaccctggcgaaaaccaattctttggttccgttgcccgcattgccgccgagcaaggtatcccggtatgggcgccggaagatgttaaccatccgctgtggattgaacgtattcgcgagatgaagccggatgtgctgttctcgttctactaccgcaacctgctgtgcgatgagatcctcaatatcgcgccgaagggggctttcaacctgcatggttctctgctgccgaaataccgcggtcgcgcgccgctgaattgggtactggtcaacggcgaaagcgaaaccggagtgaccctgcaccggatggttaaccacgccgacgcgggcgatatcgtcgctcaacaagctgtggctatcggcccggatgacgcggcgctggcgctgcaccgtaagctgtgtgccgctgcctccgatctgctgggccaggcgctgccggctattcgtgagggtaagactgaggagcgggcgcaggaccacagccaggcgacctacgttggccgtcgtaccccggaagacgggcgtctcgattgggacaaaccggcgcagactctgcacaacctggtgcgcgcggtatccgatccgtggccgggcgccttcgcctatgccggcgcgaacaaatttatcgtctggaaatcccgcgtgcgcgccgatctgccggcggcgaaacccggcaccgttatctccgtcgcgccgctagtggttgcctgtcagcagggggcgctggaaatcgtcaccggccagaccgaacgcggcgtttacatgcagggcgcccagctggcgcaggcgctggggctggtgagcagcgcggtgctgagcagcaaaccggtggtggcggtgaagcgccgtacccgcgtgctgatcctcggcgtcaacggctttatcggtaaccacctgaccgagcgcctgttgcaggacgacaactatgagatttacggcctggatatcggctccgacgccatcagccgtttccttgactgcccgcgtttccacttcgttgaaggcgatatcagcattcactccgagtggatcgaataccacattaagaaatgcgatgtggtactgccgctggtcgcgatcgcgacgcctatcgaatacacccgtaacccgctgcgcgtgttcgaactggatttcgaagagaacctgaagatcatccgtgactgcgtgaaatacaataagcgcattatcttcccgtcgacctcggaagtgtacggcatgtgcaccgacaaaaacttcgacgaagataattccaatctggtggtcgggccgatcaacaaacagcgttggatctactcggtttctaaacagctgctggaccgcgtgatctgggcctatggcgataagaacggcctcaagttcaccctgttccgtccgttcaactggatggggccgcgtctggataaccttaatgccgcacgtatcggtagctcccgcgccatcactcagctgatcctcaacctggtggaaggttcgccgattaagcttatcgaaggcggcaaacagaagcgctgcttcaccgatatcagcgacggtatcgaagcgttgttccgcatcattgagaacaaagatggtcgctgcgatggtcagatcatcaacatcggtaacccggaaaacgaagctagcatcaaagagctggcggaaatgctgctcgcctgcttcgagcgccatccgctgcgcgatcgcttcccgccgttcgccggcttccgcgaagtggaaagcagcgattactacggtaaaggctaccaggacgttgagcatcgtaaaccgagcattcgcaacgcgaaacgctgcctgaactgggaaccgaccgtcgagatggaagagaccgttgaacacactctggacttcttcctgcgcaccgttgagctcacggacgataaaaactcatga

SEQ ID NO: 105883 - DNA, 984 bp, Enterobacter aerogenes; identical to SEQ ID NO: 87693

SEQ ID NO: 105884 - DNA, 1140 bp, Enterobacter aerogenes
atgagcgaatttctgccgttttcgcgcccgtcgatgggcgacgcagagctggctgcgctgcgtgaagttttgcaatcaggatggatcactaccggtcctaaaaaccaggcgctggaagaggcgttttgccaactgaccggcaaccgccacgccatcgccgtcagctccgctaccggcggtatgcacgttacgctaatggcgatgggcattggccctggcgacgaagtgatcaccccttcgcaaacctgggtctcgacgctgaacatgatctgtctgctgggcgctacgccggtgatgatcgatgtcgactacgacaatctgatgattacccctgaggcggtggaagcggcgatcacttcgcggacgaaagcgattatacctgtccactacgcgggcgcgcctgcggatatcgatgcgatccgcgccgttggcgagcgccacggtataccggtaatcgaagatgccgcgcatgccgcgggaacgcactataaaggccgccacgtcggctggcgcggcaccgcgattttctcgttccacgcgatcaaaaatatgacctgcgccgaaggggggcttatcgtcaccgatgatgacgagctggcttcccgcatccgcagcctcaaattccacggcctgggcgttgacgcctacgaccgccagacccacggccgcgcaccgcaggcggaagtgattacccccggcttcaaatacaatctggccgatatcaacgccgcgctggcgctggtgcagctggataagctggcgcaggcgaatcaacgtcgcgctgaaatcgcccaacgctacctgcgcgagctggcggataccccctttaagccgctgaccattccggcatgggatcaccaacacgcctggcacctgtttattatccgcgttgatgaagcggcctgcggcatcagccgcgatgtcctgatggaaaaactcaaagccatgggcataggcaccggtctgcacttccgcgcggcccatacgcaaaagtattaccgcgagcgttttcctgaagtttcgttaccgaataccgaatggaacagcgcgcgcatttgttctatcccgctgttcccggatatgaccgacgacgatgtcacccgcgtcattaccgcgctgcatcagttgtcaggacgttga

SEQ ID NO: 105885 - DNA, 504 bp, Enterobacter aerogenes; identical to SEQ ID NO: 87691

SEQ ID NO: 105886 - DNA, 861 bp, Enterobacter aerogenes; identical to SEQ ID NO: 87690

SEQ ID NO: 105887 - DNA, 1569 bp, Enterobacter aerogenes; identical to SEQ ID NO: 87689

SEQ ID NO: 105888 - DNA, 948 bp, Enterobacter aerogenes; identical to SEQ ID NO: 87688

SEQ ID NO: 105889 - DNA, 834 bp, Enterobacter aerogenes
atgacgctgttcgcgaccttccgctggccggtaaaactggcgctactcactattgcgctgctggcggcaatcgccatgagcagcggctggtggctgccctatgacccggcggccatcgttctccatcaacgtctgctctctccgggcgacgcccactggctcggcaccgatcatctcgggcgggatattttctcgcgccttctcgccgccacccgcgtctcgctgggcgcggtgatggcctgcctgctgctggtgctgctgatcggccttacggtgggcggcgccgccgggatggtgggcggacgtgtcgatcgcggcctgatgcgcctggccgagctgtttatgaccttcccgacttcaatactgtcattctttatggtcggtgtactcggtaccggtcttagcaacgtgattatcgccattgcgctgtcgcactgggcctggtacgcaaggatggtgcgcaatctggtggtctctctgcgccagcgcgagtttattctcgccgcgcgcctgagcggcgcgggacattggccattgtttcgtgaccatctggccggcgcggtgatcccttcgctgctggtgctcgcctcgctggatatcggtcatatgatgctccacgtagccgggatgtcattcctcggcctcggcgtcagcgcgccgacggcggaatggggagtgatgatcaacgacgcccgccagtacatctggacgcagccgctgcaaatggtctggcccggactggcgctgtttatcagcgtgatggcttttaatctggtgggcgacgcgctgcgcgatcgtctcgatcctcagctgatcgcggagcataaccactga

SEQ ID NO: 105890 - DNA, 765 bp, Enterobacter aerogenes; identical to SEQ ID NO: 87686

SEQ ID NO: 105891 - DNA, 792 bp, Enterobacter aerogenes
atgaatttactcagcgtgaacgcagtgagccacgattatccccaccacggtgcggtattgcgcgatatccagttcgacatcgccctcggtgaaacggtggcgctgctcgggcgcagcggctgcggcaaaagtaccctggcgcggatgctggtcggtctcgaaacgccgcggtatggcgatgtcgcctggcgcggcgcatcgctgacctccctgaagggggaggcgatcggcgcctttcgccgcgatattcagctggtgtttcaggatgccattagcgcggtgaatccgcgcaaaacggtgcgcgagattatcagcgagccgctgcggcacctgtttagtttatcgcgtgaagagcgtacgcagcgggtggaggagatgctgctggcggttgacctcgccccggcgctgctcgacaagcgtccggcgcagctcagcggcggacagctgcagcgcgtgtgcctggcgcgggcgctggtggtccggccgcagctattaattctcgacgaagcggtatcgaatctcgatctgatgcttcaggcggatattatcgccctgctcaaacgcctgcaggcgcagttcgccaccgcctgcctgtttatcacccatgacctgcggctggtggagcgtttttgccagcgggtactggtgatggatagtggacgcctcgtcgaaaccgccgcggttagtctgccgctgcgccttacatccgctgccggacaggcgctacagcgcgcggtactcccgccctttccccgcactctgcttaacgaggccatgctatgcagcgcgtaa

SEQ ID NO: 105892 - DNA, 402 bp, Enterobacter aerogenes; identical to SEQ ID NO: 87684

SEQ ID NO: 105893 - DNA, 360 bp, Enterobacter aerogenes; identical to SEQ ID NO: 87683

SEQ ID NO: 105894 - DNA, 276 bp, Enterobacter aerogenes; identical to SEQ ID NO: 87682

SEQ ID NO: 105895 - DNA, 1014 bp, Enterobacter aerogenes; identical to SEQ ID NO: 87681

SEQ ID NO: 105896 - DNA, 1194 bp, Enterobacter aerogenes
gtggaaaggtttgatgccattgtgatcggcgccggtgcggcgggaatgttttgtgcggcgcaggcggggcagttgggctgccgggtgctgctgctcgataatggcaaaaagccggggcgcaaaatcctgatgtccggcggcggccgctgcaactttactaacatgtatgtcgaacccgcggcatatctcagccaaaacccgcatttttgcaaatctgcgctggcgcgctatacccagtgggactttatcgagctggttggcaaatatggtattgcctggcatgagaagaccttaggtcagctgttttgcgatgattccgcggagcaaatcgtcaatctgctgctgtcggaatgtgaaaaaggcggcgtacagatccgtctgcgcagcgaaattctcatcgtcgaacgcgatgaacaaggctaccggctacaggtgaacggcgaaatgctgacggcgaagaagctggtgatcgcttccggcggcctgtcgatgccggggctgggcgcgtcgccgtttggttacaaggtggccgaacagtttggtctgaaggtgctgccgacccgcgcgggtctggtgccgtttaccctgcataaaccgctgcttgagcagctgcaggtgctttccggcgtttcggtgccctctacgattaccgccgagaacggtacgctgtttcgcgaaaacctgctatttacccatcgtggcctttccggcccggcggtgctgcagatttccagctactggcagcccggcgagtttgtcaccgtcaacctgctgccggactgtgatcttgaggcgttcttcaacgagcagcggggcgctcatcccaaccaaagcctgaaaaacaccctcgcgatgcagctgccgaagcggctggtcgaatgtttacagcagcttgggcagatacctgatgtgacactgaagcaactgaacgttcgcgatcagcaggcgctggtggagacgctaaccgcgtggcgcgtgcagccgaacggaactgaaggttatcgtaccgcggaagtgaccctcggcggcgtggataccaatgagctttcgtcacgcaccatggaggcgcgcaaagcgccggggctttactttatcggtgaagtgatggacgtcaccggctggcttggcggctataacttccagtgggcgtggtcaagcgcctgggcctgcgcgcaggcgctggcggaagcttaa

SEQ ID NO: 105897 - DNA, 1497 bp, Enterobacter aerogenes; identical to SEQ ID NO: 87679

SEQ ID NO: 105898 - DNA, 336 bp, Enterobacter aerogenes; identical to SEQ ID NO: 87678

SEQ ID NO: 105899 - DNA, 438 bp, Enterobacter aerogenes
atggcttacaaacacattcttattgcagtagacctatcaccggaaagcaaagtgctggtagagaaagcggtttctatggcgcgtccctacaatgcgaaagtttccctgattcacgtggatgtgaattactccgacctctacaccggtcttatcgatgttaatctgggcgacatgcagaaacgcatctctgaagagacgcaccacgcgctgaccgagctttccactaacgctggctacccgattaccgaaaccctgagcggcagcggcgatctgggacaggtgctggtcgatgcgattaaaaaatatgatatggacttggtggtctgcggtcaccatcaggacttctggagcaagctgatgtcctccgcgcgtcagctgatcaacaccgttcacgttgatatgctgatcgtaccgctgcgcgacgaagaagacgaataa

SEQ ID NO: 105900 - DNA, 1473 bp, Enterobacter aerogenes; identical to SEQ ID NO: 87676

SEQ ID NO: 105901 - DNA, 753 bp, Enterobacter aerogenes
gtgaaaatctgcttaattgatgaaacaggcgccggtgacggcgccttatctgttttggccgcccgttgggggctggagcatgatgctgagaacccgatggcgctggtgctgacggacgagcatctggagctgcgtaagcgcgatgagccaaagcttggcggcatctttgtcgatttcgtcggcggcgcgatggctcatcgccgcaagtttggcggcggccgcggtgaagcggtagccaaagcggtgggtattaaaggcgattatctgccggacgtggttgacgccaccgctggcctggggcgcgatgccttcgtgctggcgtcggtcggctgccgcgtgcggatgcttgagcgtaacccggtggtcgccgcgctgctcgacgatggtttgaaacgtggctatgccgatgcggagatcggcggctggctgcaggagcgcttacagttgattcatgcatccagcctcaatgcgttgaccgatatcaccccgcgcccacaggtggtgtatctggatccgatgtttccccataagcagaaaagcgcgctggtcaaaaaagagatgcgggtatttcagtcgctggtggggccggatttagacgccgatggtctgttggcgccggctcgacagctggcaaccaaacgagtggtggtgaagcgtccggactatgcgccgccgttggcggatgtcgccacgcctaacgcggtagtgaccaaaggacatcggtttgatatttacgccggtacgccggcgtaa

SEQ ID NO: 105902 - DNA, 2043 bp, Enterobacter aerogenes; identical to SEQ ID NO: 87674

SEQ ID NO: 105903 - DNA, 843 bp, Enterobacter aerogenes
atgctcagttatcgccacagctttcacgcaggcaaccacgccgacgtccttaaacacaccgttcagagtttgatcattgaatcgctgaaagagaaagaaaaaccgtttctctacctggacacccacgccggcgcgggccgctatcagctgagcggcgagcacgccgaacgtaccggcgaataccttgaaggcatcgcccgtatctggcagcaggacgatctaccgaccgagctggagccgtatatttcggtcgtcgagcacttcaaccgcagcggtcaactgcgctactaccctggttcgccgcttatcgcgcgccagctgctgcgcgagcaggacagcctgcagatgacagaactgcacccgagcgatttcccgctgctgcgcgccgagttccagaaagacagccgcgcgcgcgtcgataaagccgatggctatcagcagctgaaggccaagctgccgccggtttctcgccgcggtctgattcttatcgacccgccgtacgaaattaaaaccgattatcaggcggtggtcaccgggatcaacgaaggttataaacgcttcgccaccggcacctacgcgctgtggtatccggtggtgctgcgcgcgcaaatcaaacgcatgatcaaagatttagaagccacaggtatccgcaaaattctgcaaatcgagctggcggtgcgtccggacagcgaccagcgcggcatgaccgcctccgggatgatcgtcatcaacccgccgtggaagctggaacagcagatgaataacgtgctgccgtggctgcacagcaaactggttccagccggtaccggtcacgcgaccgtgagttggatcgtaccggagtaa

SEQ ID NO: 105904 - DNA, 1353 bp, Enterobacter aerogenes
atgagcaaacattatgattacctcgccatcggcggcggcagcggcggtatcgcctcgattaaccgtgcggcgatgtacggccagaagtgcgcgctgattgaagccaaagagctgggcggcacctgcgttaacgtcggctgcgtgccgaaaaaagtgatgtggcatgcggcgcagatccgcgaagcaatccacctgtatggcccggattacggtttcgataccaccatcaaccatttcgactgggataagctggttgccagccgcagcgcctatatcgaccgtattcatacctcttacgacaacgtgctgggtaagaataaagttgatgttatcaaaggtttcgcgcgctttgtcgatgcccataccgtggaagtcaacggcgagaccattaccgccgatcatatcctgatcgccaccggcggccgcccgagccacccgaacattccaggtgtggaatacggtattgattccgacggtttcttcgaactgccggcgctgccgaagcgcgtagcggtagtcggcgcgggctatattgccgttgaactggccggcgtgattaacggcctgggcgccgaaacccacctgttcgtgcgtaaacacgcgccgctgcgtagcttcgatccgctgatcgttgagactctggtggaagtgatgaacgccgaaggcccacagctgcacacgaacgcaattccgaaggcggtagtcaagaatgccgacggcagcctgactctggcgctggaagatggccgcagccagaccgtagattgcctgatttgggcgattggccgcgaaccggcgaccgataacttcaacctggcggcaacgggcgttaaaaccaacgataaaggctacatcatcgttgataagttccagaacaccaacgtgccgggcatctacgcggtgggcgataataccggcgccgtcgagctgacgccggtcgccgtggccgcaggccgtcgtctgtccgaacgcctgtttaacaacaagccggaagagcacctcgactacagcaatatcccgaccgtggtcttcagccacccgccaatcggcaccgtcggcttaaccgagccgcaggcgcgcgagcagtacggcgacgacgccgtgaaggtgtacaaatcgtccttcaccgcaatgtataccgccgtgacctctcaccgccagccgtgccgcatgaagctggtctgcgtcggcccggaagagaagattgtcggtattcacggtatcggcttcggaatggatgagatgctgcagggctttgcggtggcgctgaaaatgggcgccaccaaaaaagacttcgacaataccgtcgccattcacccaaccgcagcggaagagtttgtcactatgcgttaa

SEQ ID NO: 105905 - DNA, 1149 bp, Enterobacter aerogenes; identical to SEQ ID NO: 87671

SEQ ID NO: 105906 - DNA, 1410 bp, Enterobacter aerogenes; identical to SEQ ID NO: 87670

SEQ ID NO: 105907 - DNA, 1308 bp, Enterobacter aerogenes; identical to SEQ ID NO: 87669

SEQ ID NO: 105908 - DNA, 1017 bp, Enterobacter aerogenes; identical to SEQ ID NO: 87668

SEQ ID NO: 105909 - DNA, 624 bp, Enterobacter aerogenes; identical to SEQ ID NO: 87667

SEQ ID NO: 105910 - DNA, 1149 bp, Enterobacter aerogenes; identical to SEQ ID NO: 87666

SEQ ID NO: 105911 - DNA, 1659 bp, Enterobacter aerogenes; identical to SEQ ID NO: 87665

SEQ ID NO: 105912 - DNA, 528 bp, Enterobacter aerogenes
atgcccgaactgcttacgccgcggctgcgctgctcgccgctgcagcttgacgactggtctttttttctcagcctgcaacaggatccgcaggtgatgctctatgttgcggataaccggcccatcgccgatatccgcgccgcgtttgatgcacgcctgccgctctggtcgcctaagtcctcgcactggctatgcctggtggttcgcgatcggcaaagccatacgccccttggcctgaccggctattgccatcacgatgatgatatcgccgaagtgggctttctcttcgccccacaggcgcaggggctaggctatggatatgaatcactgtgtgcgctatgtgattacgcattttctacaggcggcattcgtcgtcttaccgccagcgtcaccgccggaaaccaggcctcaagacagctgctgctaaaaacaggatttatacaggaaggagagctacgcgagagctactggttacatggccgttggcacaatgactggctgtttggcctgatgcgccacgattaccaataa

SEQ ID NO: 105913 - DNA, 423 bp, Enterobacter aerogenes; identical to SEQ ID NO: 87663

SEQ ID NO: 105914 - DNA, 609 bp, Enterobacter aerogenes; identical to SEQ ID NO: 87662

SEQ ID NO: 105915 - DNA, 759 bp, Enterobacter aerogenes
atgacacaacgtatcgctttagtaaccggcggcagccgcggtctgggaaaaaacgcggcgctgaagctggcggcgaagggaaccgatattattctgacttaccacagcaaccagcaggcggcgcgggaagtggtgcgcgaaattgagcaaacaggagcgaaagcggcagcattgccgctgaacgtcggcgataccgccagttttgcaggctttgtacaacagctgacgcaatgtctgaaggagaagtggcagcgcgacagcttcgattatttattgaacaatgccggcatcgggttgaccgcgccgtttagcgagaccagcgaagggcagtttgacgagttgatgaacatccactttaagggaccgttcttccttacccagcagctgctgcctttgcttaaagacggtgggcgcattctgaacgtctccagcgggctggcacgctttgcactaccgggctattccgcttatgcggcgatgaaaggtgccatggaggtgttaacccgttatcaggcgaaggagctcggcgctcgcggaatatcggttaatatcattgcccccggcgcaattgaaaccgactttggcggcggcgcggtgcgcgataatgccccgcttaaccagcatattgccgcccagacggcgctaggccgcgtcggcctgccggatgatatcggcgatgctatcgccgcgttgctgagtgacgagcttggctggatgaacgcccagcgcgttgaggtttccggcggcatgtttttataa

SEQ ID NO: 105916 - DNA, 900 bp, Enterobacter aerogenes; identical to SEQ ID NO: 87660

SEQ ID NO: 105917 - DNA, 1032 bp, Enterobacter aerogenes; identical to SEQ ID NO: 87659

SEQ ID NO: 105918 - DNA, 1323 bp, Enterobacter aerogenes
atgcaagccacagccactactatcgacaacgcgcaagacgccacgccggttaactcgcgtaataaagtcgtcgtcgcctcactcatcggcaccgccattgagttcttcgacttctatatttacgccaccgccgcggttatcgtcttcccccatatctttttcccacagggtgatgccgccgccgcgacgctccagtcgctggcgacgttcgccatcgcctttgtcgcgcgcccgattggctcagcgctattcggccactttggcgaccgcgtaggccgtaaagtcacactcgtcgcctcgctgctgactatgggcatctccaccgtggtcatcggcctgctgccgggctatgaaagcattggcatcctggcgccgatgctgctggcgctggcgcgctttggtcagggtctcggccttggtggcgaatggggcggggcggccctgctggcgacggaaaacgctccgccgcgcaaacgcgcgctatatggctccttcccgcagctgggggcgccaatcggcttcttcttcgccaacggcaccttcctgttgctgtcgtggctgttgagcgaccagcagtttatggaatggggctggcgcgtgccgttcatcttctccgcggtactggtcattatcggtctgtatgttcgcgtgtcgctgcatgaaaccccggtgttcgctaaggtggcggcggcgaaaaaacaggtcaaaatcccgcttggcacgctgctgactaagcacgtgcgcgtgaccgtgctcggcaccttcatcatgctggcgacctataccctgttctatatcatgaccgtttactccatgaccttcagtaccgctgccgcgccgattggcttaggtttgccgcgtaacgaagtgctgtggatgctgatgatggcggtcattggttttggtgtgatggtgccggtggcgggcctgctggcggatgcctttggccgtcgtaaaagcatgattatcatcaccacgatgattattctgttcgcgctgttcgcctttaaaccgctgctcggttccggcaacccgattctggtcttcgccttcctgctgctgggcctcagcctgatggggctgacattcggcccgatgggcgcgctgctgccggagctgttcccgacggaagtacgttataccggcgcctctttctcctataacgtgtcgtcgatcctcggcgcgtcggtcgcaccatatattgccgcctggctgcagggcaattacggcctgccggctgtcggtatctacctggcggcgatggcggcgctgacgctgatcgccctgctgttgacccacgaaacccgccatcaatcgctgtaa

SEQ ID NO: 105919 - DNA, 2052 bp, Enterobacter aerogenes
atgaccagaacccgtaaaacgattgctattatctcgggaacgattgtgctgttaatcgttctttttttcatcgtgttggcgacctttgactggaaccggctcaagccgacgatcaatcagaaagtttccgccgagctcaatcggccattcgccattcgcggcgacctgggcgtagtgtgggagcgacagcctgaggagcgcggctggcgtagctggatcccgtggccgcatgtgcatgccgaagatatcgtgttgggcaacccgcccgacattccgcaagtgacgatggtacatctgccgcgcgtggaagcgacgctggctccgctggcgctgctgagcaaaacggtctacttgccgtggattaagctcgaacagcccgacgtccggctgataaggctgacggaaaacagcaataactggacctttaaattagcttcagacccggcatccgaaaaagccaacccgccatcggcctggtctttccgccttgataatattctcttcgatcgcggcaacattgccattgacgataaggtaacccgcagcgatatcgcgatcgtggtcgatccgcttggcaaagcgctgccgtttagcgaagtcaccggtgcgggcaacaaagcgcaggcgacaaaagccggcgattatatctttggcctgtcggtgaaggggagctacaaaggccagccgctgagcggcagcggcaaaattggcggcatgctggcgctgcgtagcgatagtaccccgttcccgctacaaggcgattttcactctggtaatacccggatagcgtttagcggcacggtcagcgatccgcttaatgtcggcgggctcgatctgcggctgaaattcgccggcgactcgttgcgcgacctctacgacctgaccggcgttctgctgccggaaacgccgtccttttccaccgatggccgcctgcgcgccgactttaaacataaaaacggcatgcgttttgactatcgcgattttaacggccggattggcgacagcgatatccacggttcgttgacctataccaccggcaaaccgcgaccgaagcttaccggcgatctggagtctaaacagctgcggctggcggacctcggcccgctgattggcgttgattccggtggcggggcgaagaaatcctcatcacgtaaagcgggagatgccgtacagccagcgggaaaagtcctgccggccgatcgctttgagacggataaatggcaggtgatggacgccgatgtgcgcttcaaggggcggcgaatcgaacacggcggtactctgcccatcagcgacctggcgacccacattattcttgaacgcggcgacctgcgtctgcaaccggtgcgctttggcctggccaacggttcgattgccggcagcgtgcatctgcagggcgataaaaaaccgctacagggcgaagccaatttgcaggcgcggcggctcaagcttaaggcgctgatgccgaacgttgaaatgatgcagaaaacgctcggtgagatgagcggcgacgtacaactgcgcggcagcggtaattcggtggcggcgctgctcggcaacagcaacggcaaccttaagctgctgatgaatgatggtctgattagccgcaacctgatggaaatcctcggcttaaacgtcggtaactttatcatcgggcagatttttggcgatgaggaggttcgggtgaactgcgcggcggccaatattgatgtggtcaacggcgtggcgcgaccgcaaattttcgccttcgataccgagaacgcgctgattaacattaccggcaccgccagctttgcctctgaacagctggatctgaccgttgacccggaaagtaagggcctgcgggtgattactctgcgttctccgctgtacgtgcgcggtacctttaaatcgccggatgccggggtgaaagccgggccgttgattgcccgcggcgcggtggcggcagcgttagcgacgctggtcacgccggcggccgctttactggcgctgatctcgccggcggaaggcgaggcgaatcagtgccggacgattttgtcgcagatgaaaaagtaa

SEQ ID NO: 105920 - DNA, 930 bp, Enterobacter aerogenes; identical to SEQ ID NO: 87656

SEQ ID NO: 105921 - DNA, 1500 bp, Enterobacter aerogenes; identical to SEQ ID NO: 87655

SEQ ID NO: 105922 - DNA, 1287 bp, Enterobacter aerogenes
atgaaactctctctcttcaaaagcctctatgtccaggttttatcggccatagctatcggtattttgctgggccatttctacccggaacttggcgcgcagatgaaaccgttcggcgacgccttcgtaaaactgattaaaatggtcattgctccggttatcttctgtaccgttgtaacagggattgccgggatggaaagcatgaaggccgtcggtcgtaccggtgcggtggcgctactctactttgaagtggtgagtaccattgcgttgattatcggtcttatcatcgtcaacgtagtgcaacccggcgcgggcatgaacgtcgatcccgcgacgctggacgcgcacgcggtggcagtctacgccgagcaggctaaagatcagggtgttgtcgcctttctactcgatattattccgggcagcgtgattggcgctttcgccagcggtaatattctgcaggtgctgatgtttgccgtcctgtttggctttgcgctgcatcgtttaggcagcaaaggccagctgattttcaacgtcattgagagcttctcgcaggtcattttcggcatcattaacatgattatgcgtctggcgccgatcggcgctttcggggccatggccttcaccatcggtaaatacggcgtcggtaccttggtacagctgggccaactgattatctgcttctacatcacctgtatcctgttcgtggtgctggtactgggttctatcgcgcgggccactggatttagtatcttcaaattcattcgctatatccgcgaagagctgctgattgtactggggacctcttcgtccgaatccgcgctgccgcgaatgctggataagatggagaagttgggttgccgtaaatcagtggtggggctggtgataccgaccggctactcctttaacctcgatggcacctccatctacctgacgatggcggcggtgttcatcgcccaggccaccaatagccatatggatatcttccatcagatcaccctgctggtggtgctgctgctctcttcgaaaggggccgcgggcgtcaccgggagcggatttatcgtgctggcggcgaccatctctgcggtagggcatctgccggtggcgggcctggcgctgattctcggtatcgaccgctttatgtccgaagcgcgcgcgttgaccaacctggtgggtaacggcgtggcgaccgtggttgtcgcgaaatgggtgaaagaactcgatgccaaacagctcgatgatgtgttgaataaccgcgttcccgcggacaaatcgcaagaattatcctcgtaa

SEQ ID NO: 105923 - DNA, 2007 bp, Enterobacter aerogenes
ttgcgcgtcagccgctcacttacaattaaacagatggcgatggtcgcgagcgtgtccatggcgtttgtcctggtcttttgctctattttgctgtttcacttcgtgcaacagagtcgctataccacggccacgcaattagaaagtatcgcccgttccgttcgcgagcccctgtcggcggcaattttgaaagccgatattcccgaagcggaagccattctgggccgcattcagcctgctgggatcgtcagccgggcggatgtggtgctaccaaatcaatttcaggcgctgcggatgcgctttattcccgaacgcccggtgccggtgatgatcactcgcctgtttgaactgccggtacagatatccctgccgatttactcgcttgaacgcccggcaaatccgcagccgctggcctatctggtgctgcaggcggattcctatcgcatgtataaattcgtcatgagcgcgctcgcgacgttagtgaccacttacttacttttggtgcttattttgacggtggcgcttacctggtgcattaaccggctgattgttcgcccgctgcgcgccatcgcccgcgagcttaacgatattccgccgcaggagcggctcggacatcagctgagcctgccgcgactgcaccaggatgatgaaatcggcatgctggtgcgttgctacaatcgcaaccagcagtctttgctgcgtcagcatgatgagctatcgctgcaatcgacccgtttcccggtgtctgagctccccaacaaagcctttttgatggcgatgctggagcagaccacaacccgtccacaaccctcggcgctgctggtggtagcctgtgagaccttgcaagatgccgcaggcgtactgaaagagagccagcgcgagatgctgctcctgacgctggttgagaagctgaaagcggttatcccacccaatatggtgctgacgcaggtgagcggttacgatttcgctattttcgcccccggactcagcaagccgtgggaagcggtgtcgttaagtaagcaagtgcttacttctattagcgagcgattgccgctgcacggtgtccagctgcggccctgcgccagcgttggtatcgcgatgtttaatagcgaactgagcgccgaacagttttatcgtcgggcggtttccgccgcggtgacggcgcggcgcaagggcaaaaatcagatcgagttctttgaccccgagcagatggaaaaagcccagcgtcggttaatggaagagcatgacatcctcaccgcgctcgagaatcagcagttcgccatctggtttcaaccgcaggtggatattgccagtggcgatatttgcggtgcggaagttctgcttcgccagcgacaggccgatggcggttggtcgctgccgtgcgatctgattgagcgtattgaaaactgcgggctgatggtgccggtaggctattgggtgatggaagaagcctgccgccagctggcagcctggcagcagcaggggatcatgctgccgttgtcggtgaatgtctcgttactgcagttgctgcatcctgaccgcggcgttgagttgctggcactcatagaacgctatcgtatcgccccgggcaccctggtgctggaggtgacggaaagctgccgtctcgacgatccgcaggcggtgattgacctgctgcgcccgctgcgcgacgccggcacgcgtattgcgctggatgatttcggcatgggttatgccgggttgcgccagttgcaacatatgaaatcgctgccggttgatatcctgaaaatcgacaaggcgtttattgatatgttgccggatgataccagtatggtcccggcgataattcagctcgcacgcgggctcaagctgcggatcgttgctgagggcgttgaaaaagaagaacagctgaaatggttgcaagcggctggcgtggatgtcgctcagggttacctgtttggttgcgccttgccgctggaaagctttatgcagcgcttcctgcaggccgataagaacgatgcaagtttgtaa

SEQ ID NO: 105924 - DNA, 3486 bp, Enterobacter aerogenes
atgcgcaagttctcactaagcttcatcacgctgtctgtcggccttggcctgttgccgctggcgcaggcggagaatacccctgcgcagcagcatctgctggaacaagtgcgtcttggcgaggccagcagtcgtgaggacctggtgcgtcagtcactctatcggctggaactgatcgacccgaataaccccgattatcttgccgcgcggacgcgctatctgctgcgccagggcgacaccgccggcgcgcaaaagcaactcgatctgctggcaaagctggctccggaatcgtcggcgctacaagcgacgcgtaacgagatgaagatcagtaccggtagcggtcgccaggcgttgcagcaggcgcgattgctcggcgttgccgggaaagtcgatgaagccgtcgccgcctatgaaaagctcttcggcggcgtcccaacggataccgaagccgctatcgaatactggacgctggtggcgcgattgcccgctcgccatagcgaaggcgtcagccagctgaaaaaacttaatgccacaaccccggataacgtcacattattgacctcgctggcgaagctgatgttttcagataacaagccgcaggaaggcttcgcctatctggaacagatggcgcgttcggcctcaggccgcggaattgcggctgatatgtggctcggcgaaattaaaagtatgccggtcagcagaggcagcgttcaggcactacagcgattcctgctccagttccccgccggttccgccgccgctaacgcccgggtgttgctggcgcagcagcaaactcaactgcaagacccagccttcctcgccaaaagcgaagggctggcggcggtgaaatccgggaatgcggcgcaggcggtggccgatctgcagcaggcggtacgcgccgatgcccgcgatagcgatgccgtcggcgcgctgggcgccgcctactcacagcgcggcgaccgggcgcgggcggtggcgcagcttaataaagcgatcgcgatggatccgaaaagcccgaatcgcgataagtgggacagtttgctgaagaccaaccgctattggttgttgattaaacagggcgataacgcgctgaaagcaggccaactggcgcaggcgcaaaatgcgtacgcccaggcgcagcgggtggataacaccgacagctacgcggttctggggttaggcgatgtcgccgcggcgcgcaaagatgacgccgccgccgaacgctactatcgccaggcgttacgcatggatcgcgacaataatctcgccgtacgcggtctggcgaatgtttatcgtcgtgaatcgccggaaaaagccagcgcctatattgccagcctccccgccagccagcggcgcagtattgatgatatcgaacgcagtcttaccaacgatcggctggaaaaacaggccgaagcgctggaaagccagggcagctgggcgcaggccgcggaggtgcagcggcggcgtctggctctggatcctgaaagcgtgtggataacctatcggttggcgaaagatctggtcagcgccggccagcggccggaagcggacgcactgatgcgtaacatggccaaccgcaagccgggcgatgccgaacgggtttacgcctacggcctctatttgtccggtaataatcaggatgatagggcgctggcgcaaattaacgcgctgccgcgcggacagtggaccgataatattcgtgaactggaagggcgtctgcaaagcgacaaagtgatgcgcgaggccaaccaacttcgcgatagcgggcaggaagcgcaggccattgccttgattaaacagcagccggaatcgatccgctacgatctggcgttggcggattgggcgcagcagcgcggcgatagcgcagaggcgatagcccagtaccatcgggtgctgagccagcaggctgataatggcgatgcgcgtcttggcctggcggaagtctatctcgccgagggcgataaaaacgccgcccgcgcgcaggtcgcgcagttgaaggatgcggatacggaatcgatcaacatgcagcgccgggtagcgctggcccgcgccggatttgacgataccgcgggcgcgcaacaaatatttgaccgcatcgtgccgcaggcgaaaagccagccgccgtcgatggaaagcgcgctggtgctgcgtgatgccgcgcgtttccagacgcaaagcgagcaaccacagcaggccctggaaagctataaagacgcgatggtggccgctggcgtgacccgcgttcgcccgcaggataatgacacctttacccgcctgacccgtaacgatagtcaggatgactggctgaagcgcgggatccgcagcgacgccgccgatctttatcgccagcaggatcttaacgttacccttgagcacgactattggggatcgagcggcaccggcggttattcagacctcaaagcgcacactaccatgttgcaggtggacgcgccgttgtatgacgggcggatgttcttccgtaccgatgtggtgaatatgaacgccgggtcgttttccactaatagcgatggcggttattcgccgagttggggaacctgtggtgaaattagctgctatggcggcagtaaaaatcagagcgatggcggcgccagcgtagcggttggctggaagaacgacacctggagcggcgatatcggcaccacgccgatgggctttaacgtggtggatgtcgtggggggactgagttatagcggcgatgccggcccggtcggctataccgtcaacgtccaccggcgacccatttccagctcgttgctctccttcggcgggcaaaaagataatcctaacgacggccataccggcactacctggggcggcgtccgcgccgccggcggcggcatcagcctcagctacgataaaggcgaggctaacggcatctggtcatcgctgggggctgaccaactcaccggcaaaaacgtcgaggacaactggcgcgtacgctggatgaccggttactactataaagcgatcaatgaaaataatcgccgggtgaccgtcggcctgaccaatatgatctggcactacgacaaagacctcagcggttacacgctgggccagggcggttactacagcccgcaggagtatctctccttctcggtgccggtcatctggcgtcagcgtaccgaaaactggtcgtgggaactcggcgggtcggtgtcgtggtcccattcgcgtacgcaaactcatgcgcgctatccgttgctgaatttgattccttcacagtatcgctacgatgccagccagcaaaaagaagagggcggcagcagccagggtttcggttataccgcaagggcgctggtggaacggcgagtcaccggcaactggtttgtcggcgcggctgtggatattcagcaggctaaagattacaccccgagccacgcgctgttgtacgtgcgctattctgcttccggctggcagggcgacatggatatgccgccgcagccgttggtgccttatgcggattggtag

SEQ ID NO: 105925 - DNA, 1107 bp, Enterobacter aerogenes
atgaacgcatttcgtggggtacttctctcggtattgatgctggcggcggggcaggttagcgccgcctgccagtggcccgcctgggagcagtttaaaaaagcgtatgtcagcgccgaagggcgggtcatcgaccccagcgatgcgcgcaaaatcaccacctccgaagggcaaagctatgcgctgttcttcgctctcgcggccaacgatcgccagggcttcgataagctgttccagtggacgcagaacaacctggcgcagggcgatctgcgcgcccatctgccgggatggctatgggggaaaaagagcgaggatgaatggacggtgctggacagcaattcggctgcggattctgatttgtggatcgcctgggcgctgctggaagccggacgcctgtggaaggttgataactatactgaggtaggaaaagcgctgctggcgcggattgccgatgaagaagtcgctgatgttccggggctcgggccgtcggtactgccggggaaagttgggttcgcggacgacaagggttggcgctttaatccaagttatctgccgccgcagctcgccacctattttacccgctttggcgcgccgtggccgaagatccgcgacagcaatctgcgactgctgctggaaacggcgccaaaaggcttctcgccggactgggtgcgctatgagaaaggtagcggctggcagttgaaaaccgataaaccgattattggcagctatgacgctatccgcgtctatctgtgggtcggcatgctcaataacgccgataaacaaaaagcgccgctgttggcgcgtttcaaaccgatggcggttcagacgatcaaacagggattaccgccggaaaaaaccaatatcgccagcgggaaaacgactggcgaggggccggttggcttctccgccgccatgctgccatttttacaagatgacgacgcccgcgcgctacaacgccaacgggtcgccgatcattatcccgacgcggacgcctactacagcgcggtgctgacgctgttcggccaggggtgggatcaacatcgttttcgtttcgccgcgggtggcgaattacaacctgactggaaccaggcatgcgcaagttctcactaa

SEQ ID NO: 105926 - DNA, 2316 bp, Enterobacter aerogenes; identical to SEQ ID NO: 87650

SEQ ID NO: 105927 - DNA, 2619 bp, Enterobacter aerogenes
atgatccgcctgagtacgttgctgctggcgccgccggtgggcgagcgcttgagtgaacgttatgatgactatcgtcagcatggcgcgtcggtgctttcggcttttctcggttgcctgtgggcgtcgctggcgtgggcattcatgccgcttgagacgccgcgctggcaagctattcgcgaacaccatggcgactattttccgcatattaatccgcatcgcccacgcccgttagatccgctgcgctatttgctgcagtcgctctggctgctggcgacccgggtgccggaagcggataaaaaaataaactggcgctcgctggcggcgctggaaggggttcacgggcgctacgcgcagtggctggaaaaattaccggagaaggtcaacacccgtaccggccacctcgataagcaaaaagagcttgaacatctgcatccgcagctgcggcggctggtgcttggcaccattaccttcttctcgctgattctggcgctgttgtgtatcacccagccgtttaacccgctgtcgcagtttatcttcctgctgttactgtggggcgtcgcgctgctggtgcggcgtattccggggcgtttctccgccctgatgttgatcgtgttgtcattgaccgtttcttgtcgctatatctggtggcgctatacctccacgctgaactggaacgatccggtcagcctggtgtgcgggctgattttgctgtttgccgaaacctacgcctggattgtgctggtactgggctatttccaggtggtgtggccgctgaatcgccagccggtgccgctaccggaagatatgaacgaatggccgacggtggatatcttcgtgccgacctacaacgaagatctcagcgtggtgaaaaataccatctacgcttctcagggtatcgactggccgaaggataagctcaatatctggatccttgatgacggtggtcgcgaagagtttcgccagttcgcgaaagatgtcggcgtacattacatcgcgcgtaccagccacgaacatgccaaggccggtaatatcaacaatgcgctgaagtatgcgaaaggcgagttcgtctctattttcgactgtgaccacgtgcccacccgctcgtttctgcagatgactatggggtggttcctgaaggataaaaagctggcgatgatgcagacgccgcaccacttcttctcgccggatccgttcgaacgcaacctgggccgttttcgtaaaacgccaaatgaagggacgctgttttacggcctggtgcaggacggcaacgacatgtgggatgcgacctttttctgcggctcctgcgcggtaattcgccgcggcccgctggatgaaatcggcggtatcgccgttgagacggtcaccgaggatgctcacacttcactgcgcctgcatcgtcgtggccacacctccgcctatatgcgcatcccgcaggcggcggggctggcgacggaaagcttgtcggcgcatatcggccagcgtattcgctgggcgcgcgggatggtgcagattttccgtctcgacaaccccttattcggtaaagggttgaagctggcgcagcgtatctgctacgtcaacgcgatgctgcactttttgtccggtataccgcggcttatcttcctcaccgcgccgctggccttcctgctgctacacgcctatatcatctatgcgccggcgctgatgatcgccttgttcgtgctgccgcatatgattcatgccagcctgaccaactcgaagatccagggcaagtaccgccactccttctggagtgaaatctacgaaacggtgttggcctggtatatcgcgccaccgaccttcgtcgcgctgattaacccgcataaaggcaagtttaacgtcaccgccaaaggcggactggtgaaggatgagtatgtcgattgggttatttcccgcccctatatttatctggtgttgctcaatctggtgggcgtggcggtcggcatctggcgctttatgtacgggcccgaaaacgaaattttaaccgtctgggtcagtatcatctgggtgttttataacttaatcatcctcggcggcgccgtggcggtgtcggtggagagcaaacaggtgcggcgttcgcaccgcgtcgagatgtcgatgccggcggcgattgcccgcccggatggccacctgttctcctgtaccgttcatgactactcggacggcggcctggggataaaaattcacggtgaagcgcgggtactggaagggcaacacgtgaatctgctgctcaaacgcggacagcaagaatatgacttcccggtacgcgtcgcgcgggtgaatggcggcgaagtcggtctgcaattgctgccgctgacaaaccagcaacatattgattttgtgcagtgtacgtttgcccgcgctgatacgtgggcgctttggcaggatagcttcccggaagataagccgatggaaagcctgctggatatcctcaagctggggttccgtggatatcgtcacctggcggagttctcgccgccgtcggtgaaggttattttccgctcgctcacctcgctggtggcctggattgtatcgtttttaccgcgccgtcccgaacgcgccgcggcggtgctttcggcagaaccggcaatggctcaacaatga

SEQ ID NO: 105928 - DNA, 738 bp, Enterobacter aerogenes
atggcgattctgggattacaaggcatacgcggcggcgtaggcaccacctccattaccgccgcactggcctgggcgctacagctgctcggcgaaacggtgctggtggtcgatgccagcccggacaatatgctgcgcttttttttcaacgttgatttcgaccatcacaacggctgggcgcgctcgttgattgacggtcgcgactggcgcgacgccggactgcgctacaccgcgcatatcgatcttctgccgtttggccgcctgacccccggcgaacgcgagcacgttgataaactgagtccgaccctggaacccatcgcagcgcaaatcaaattgctcgatcagcaggggagccaccgctggctgctgcttgatattccggaaggctactctccgcttacccgcgaactgctgagcgtctgcgatcgtgcgctgcaggttgtgcaccccgacggtaacagtcatatacgtctgcatcagcaggcgctgcctgccaacgcggatattttgattaacgacctgcgcgtcggcagccagctgcaggaagatctctatcaactgtggctggaaagccagcggcgtattttgccggtcacgattcaccgcgatgaagcgatggcggagtgtctggcggcgaaacagcctcttggcgaataccgccaggattcgctggcggcggaagaggtgttgacgctggccaactggtgcctgctgcactatgccagggagggggcggcatga

SEQ ID NO: 105929 - DNA, 189 bp, Enterobacter aerogenes; identical to SEQ ID NO: 87647

SEQ ID NO: 105930 - DNA, 1557 bp, Enterobacter aerogenes
gtggatattgtatatacgttgggtatttcatcgttatgggacgaagtatgccatatgcccgttggcggggtgtggtggcttaatgtcgaccgctatgccgacgccgtcagcctgatgaatcaaacgctggaaagccaggcgcaggacagcaaagtcgccgccgtagtgatgggcaaaaaccctaaagaagtcatgtcattaaaaaaagatcgcggccctaataaaatcgcattattcaccatgcccgatcgcccggaaggcctgagggagttgcaccgcgacctactttgttcgatggaacctggcaattatttatttattctgctatgtacagaaaattcctggcaaaatataaaaacagaagaattactccgttgggtagaaaaatcgaatcgatgggccaaataccataactgctctcttatgatacttaattctgctaacgataccgacaaacaactttccccgttattacgccagtatcgagccctttccgggctggcgagcattcgttatcagggcgatagccatctatttgatatcgcatggtggggcagtgagaaaggtattagcgcgcagcaacagttggttattttacacgatgatgagggctggcgactggcgcaaaacgaagaagcggtggtacagccgcgcagcgacgaaaaaatcgtcctcagtaatttgcgcgtgctggaaggggcccccgcgctttccgaatactggacgctgttcgaaaccaatgatgccgtctttgaagccggtcgtaccgcgcaagcggccaccctgctattttccatcacccagaacgaacaaatagagcagctcggccgctatatccataccctgcgtcgccagcgcggcagcgccctaaaaatcgtggtacgtgaacaaacgccgagcctgcgcgccaccgatgaacgcttgctgctaagcagcggcgccaacatggtgatcccctgcagcgccgggctttcacgctgcctgacgctcattgaaagcgtgcaaaagcagaaatttactcgccacgttccggaagacttcaacacgctgttgacctggagccggccgcttaaacttcgcggctatcaaaagtgggacgccttctgtgaagcggtcggcaatatcatggcaaacacgctgctgccgccggatagcaaaggggtgatggtggcgttacgccctgcgccggggctacgcgttgaacaggcattaaccctgtgtaaacctaaccgcatgggcgatatcgtgacgatcggtaataatcgattagtgctgttcttatcgttttgccgggtaaatgacctcgacaccgcattaaaccatatcttcccattaccgaccggagacattttctctaaccgtatgatttggtttgaagacaagcaaatttcagcggaaatcctgttgatgcggggcctctccccggacaactggaacaccccgctgccaattaccataggcaaaaacgaagcccttaacgttaagcacgatgggcgccagtggcggcgaatcccggaaccctggcggctctccaccgacggagaaccgcggtcatga

SEQ ID NO: 105931 - DNA, 198 bp, Enterobacter aerogenes; identical to SEQ ID NO: 87645

SEQ ID NO: 105932 - DNA, 1680 bp, Enterobacter aerogenes
atgaccaaagcaaaaactaccgctacgccgcttccgctatggcagtactggcgcggcctgtctggctggaacttctattttctggtgaagtttgccctgctgtgggcggggtacctgaacttccatccgatgcttaacctggtgttcctcgcctttctgctggtgccgatcccccgagaaaaactgcaccgggtacgccactggatagcgattccgctcggctttgccctgttctggcatgatacctggttaccgggtccggaaagcatcatgagccagggttcgcaaattgccggtttcagcgccgattacatctgggatctgatcacccgctttattaactggaatatggtcggcgccttctttgtgctgctggtgctgtggctattcatcagccagtggctacgcgttaccgtatttgtttcggctatcatggtctggctggttatcagcccgctgctgccctccttcaccttatggcctgccggtcagccgaccacggcagcggccacgccggcggcaacaaccggtggaaccacaacagccgcggcatccaccagcgctgccgccagcggcgatatcccgccgcagaccgaaccgccaacctcggctcacctcagcaactggctgaaaactttctatgcttctgaacagaaaagaaaaacgtcattccccgctcagcttccggaggatgcgcagccgtttgatctgctggtgatcaacatctgctccctgtcatggtcggacatcgaggctgccgggctgatggatcacccgctgtggaaacatttcgatattgtcttcaaaaacttcaactccgcgacctcctacagcggcccggcagcggttcgcctgctgcgcgccagctgcggccagctatctcatagcaacctgtatcagccatcgggcagcgagtgctatctgttcgaaaatctggcgaaactgggctttacccaacagctgatgctggggcataacggcgtattcggcgacttcctcaaagaggttcgctcactcggcggcatgcaaagtccattgatggatcagagcggtttgccggttatcctgcaaggcttcgacggatcgcctgtttacgacgaccaggcgacgctcgatcgctggctacagtctaccgagaagctcaacacgccgcgtaccgcgaccttctacaacacgctgccgctgcacgatggcaaccattatcccggccaaagcaaaacagccgactataaagctcgcgcgcagaaattctttgatgagctggacgccttcttcaccgaactggaaaaatcggggcgtaaagtgatggtggtggtggtaccggaacacggcgccgcgctgaagggggataagatgcaggtttccgggctgcgcgatatcccaagcccatcgattaccaacgtccctgcggcggtgaaattcttcggcatgaaggcgccgcaccagggcgctgcggtggaaatcactcagccttccagctacctcgcggtttctgaactggtggtgcgcgccctggacggcaagatgtttaccgaggataacgtcaactggcagcagtacaccgctaacctgccgcagaccgcggcggtatcggaaaactccaacgctattgtcattcagtatcaaggcaaaccctacgtgcagctcaacggcggcagttgggtgccatatccgcagtaa

SEQ ID NO: 105933 - DNA, 1014 bp, Enterobacter aerogenes
atgagtacgcaaaaggccgccacgcaacaaccgttgttgcaggccattgatctgaaaaaacactatccggtgaagaaggggctgttcgctccggaacggctggtgaaagcgctggacggcgtctcctttactcttgagcgcggtaaaacgctggcggtagtgggggagtcgggctgcggcaaatcgacgctgggccgtttactgacgatgattgaaatccccactggcggcgagttgtattatcaggggcaggatctgctcaagcacgacccgcaggcgcaaaagctgcggcggcaaaaaatccagattgtgttccagaacccgtatggttcgctgaacccgcgtaaaaaagtggggcagattctggaagagccgctgttgattaacagtagcctgagcaaagagcagcggcgtgaaaaggcgctagcgatgatggcgaaggtgggcctgaaaacggagcattacgatcgctatccgcatatgttctccggcggtcagcgccagcgtatcgccattgcccgcgggctgatgctggatccggatgtggtgattgccgatgagccggtctccgcgttggatgtttcggtacgcgcccaggtgctgaacctgatgatggatttgcagcaggatttagggctgtcctacgtgtttatctcccacgacctctcggtcgtcgagcacatcgctgatgaagtcatggtgatgtatcttggccgctgcgtagagaaggggaccaaggatcagatctttaataacccgcgtcatccgtatactcaggcgctgctgtcggcgacgccgcgactgaacccggacgatcggcgcgagcgcatcaagctgaccggcgaactgccgagcccgctgaatccgccgccgggctgcgcctttaatgcgcgttgccgccgacgctttggcccatgcacccagcttcaaccgcagcttaaggattacggcggccaactggtggcctgctttgccgttgatcaggatgagaatccggagaaagcgcgggcgtga

SEQ ID NO: 105934 - DNA, 984 bp, Enterobacter aerogenes
atggcgttattaaatgtagataagttatcggtgcatttcggcgatgagaatgcgccgttccgcgccgtagaccgcatcagctatagcgtgaagcagggcgaagtggtcggcatcgtgggggaatcgggttccggtaagtcggtgagctcgctggcgattatggggctgattgattaccccggccgggtaatggcggacaaactggaatttaacggccgcgatttgcagcgaatttcggaaaaagagcggcgccaactggtgggggcggaagtggcgatgatcttccaggatccgatgaccagcctcaacccgtgctttactgtcggctaccagattatggaagcgattaaggtccatcagggcggcaataagcaaacccgccgccagcgggcgatcgacctgctgaacctggtgggtattcctgacccggcgtcgcggctggacgtttatccgcaccagctttccggcgggatgagccagcgcgtgatgatcgcgatggcgatcgcctgccggccaaaactgctgattgccgatgagccgaccaccgcgctggatgtgactattcaggcgcagattatcgaactactgctggagttgcagcagcaagagaatatggcgctggtgctgattactcatgatctggcgctggtggcggaagccgcgcataaaattatcgtcatgtatgcgggtcaggtggtggagaccggcgatgcgaaagatatcttccgcgcgccgcgtcatccttacacccaggcgttgctgcgggccctgccggagtttgcccaggataaggcgcgtctggcctcgttaccgggtgtcgttccggggaaatacgatcgtccgaatggttgcctgctgaacccgcgctgcccctacgcaacggataaatgccggagcgaagagcccgcgcttgcggatctcgacggcggccgtcagtctaaatgccactacccactcgatgatgccgggaggcctggattatga

SEQ ID NO: 105935 - DNA, 903 bp, Enterobacter aerogenes
atgtcacaaattacagaaaataaagttgtcgccgcaccggtgccaatgaccccgctgcaggagttctggcactatttcaaacgcaataagggtgccgtcgtcgggttggtgtatgtggcggtgatgatcatcatcgcggtattcgccaactttctcgccccttataacccggcggatcagttccgtgattcgctgctggcgccgccgttctggcaggatggcggcagcctggcgcatctgctgggcaccgatgacgtgggtcgtgatattctctcacgcctgatgtacggcgcgcgcctgtcgctgctggtgggctgtctggtggtagtactgtcgctgatcctcggcgtggtgctggggctgattgctggctatttcggcggggtggtggactccatcatcatgcgcgtggtcgatatcatgctggcgctgcctagcctgctgctggcgttggtgctggtggcaatcttcgggccgtcaatcgtcaatgcttcgctggcgctcacctttgttgccctaccgcactatgtgcgtctgacgcgcgcggcggtgctggtggaagtgcaccgcgattacgttaccgcttcccgtgtggcgggcgccggcgcgatgcgccagatgttcgttaatattctccctaactgtcttgcgccgctgattgttcaggcgtcgctgggcttctctaacgccattctcgacatggcagcgctggggttcctcggtatgggcgcgcagccgccgacgcctgagtggggcactatgctttccgacgtattgcagttcgcgcaaagcgcctggtgggtagtgaccttcccgggtgtggcgatcctgctgacggtgctggcatttaacctgatgggtgacggtctgcgtgacgcgctcgatcccaaactgaagcagtaa

SEQ ID NO: 105936 - DNA, 1020 bp, Enterobacter aerogenes
atgttgcagtttattctccgacgtttgggactcgtcatcccgacatttatcggtattacccttctcacctttgctttcgttcatatgatccccggcgatccggtgatgattatggcgggcgaacgtggtatttcccccgaacgtcacgcgcagctgctggccgaaatgggccttgataagccgctgtggcagcaatatgcccattatatttggggcgtactgcacggtgatttagggatctcgctgaaaagccgaattcccgtgtggcaagagtttgtgcctcgcttcaaggccaccctcgaactgggcgtctgcgcgatgattttcgccgtcgccgtcggtattccggtgggcgtgctggctgcggtaaaacgcggctccatctttgaccacactgccgtggggctggcgctgaccggctactcgatgcctatcttctggtggggcatgatgctgattatgctggtttcggtgcagctgaatctgacgccggtctccgggcgtatcagcgatacggtattccttgacgataccctgccgctgaccggttttatgctgattgacaccgccatctggggcgagcagggcgactttattgatgccttaatgcatatgatcctacccgccatcgtgctgggtacgattccgctggcggttatcgtgcgtatgacccgctcatcgatgctggaagtgcttggcgaggattacatccgtaccgcacgcgctaaggggttgacccgcatgcgggtgattgtcatccatgcgctacgcaacgcgatgctgccggtggtgacggtgattggtctccaggtgggcacgctgctggcgggcgccattctgaccgaaaccattttttcgtggccaggtttaggccgctggcttatcgatgcgctacagcgccgcgattatccagttgtgcagggcggggttctgctggtggcgacgatgattattctcgtcaacctgctggtcgacctgctgtacggcgtggtgaacccgcgtatccggcataagaagtaa

SEQ ID NO: 105937 - DNA, 1608 bp, Enterobacter aerogenes
atgagtatttccttgaaacagtcagggatgctgaagcttggtctgagcctggtcgccatgaccgttgccgcaagcgtacaagctaaaaccctggtttattgttctgaaggttcgccggaaggctttaacccacagctcttcacctcgggtaccacctatgacgctagttcggtgcctatttacaaccgtctggttgaattcaaaaccggtacgactgaagttattcctggtcttgctgagaagtgggatgtcagcgaggacggtaaaacctataccttccacctgcgtaaaggcgtgaagtggcaggataataaagactttaaaccaacgcgcgagctgaatgccgacgacgtggtgttctccttcgaccgccagaaaaatgacaaaaacccgtaccataaagtctctggcggcagctatgagtacttcgaagggatgggcctgcaggacctgattagcgaagtgaagaaagtggacgataataccgtccagttcgtgctgactcgcccggaagcgccgttcctcgctgacctggcgatggactttgcttctattctgtcgaaagaatatgccgacaacatgctgaaagccggcacgccggaaaaagtagaccttaacccaatcggcaccggcccattccagctgctgcagtatcagaaagactcgcgcattctgtataaagccttcccgggctactggggcaccaagccgcagatcgatcgtctggtcttctccatcactccggacgcttccgtacgctacgccaagctgcagaaaaacgagtgccaggtgatgccgtatccgaacccggctgacatcgcgcgcatgaaggaagataaaaacatcaacctgctggaacagccgggtctgaacgtgggttatctctccttcaataccgagaaaaaaccgctggataacgtcaaagttcgccaggcgctgacctacgcggtgaacaaagaagcgatcatcaaagccgtttatcagggcgccggccagtcggcgaagaacctgatcccgccgaccatgtggggctataacgatgacgttaaagactacacctacgatcctgagaaggcgaagcaactgctgaaagaagcgggcatggaaaaaggcttcaccatcgacctgtgggcaatgccggtacagcgtccgtataacccgaacgcgcgccgtatggctgaaatgatccaggccgactgggcgaaagttggcgtacaggccaagatcgtcacctacgagtggggcgagtacctgaaacgcgcgaaagcgggcgagcatcagaccgtgatgatgggctggaccggcgacaacggggatccggataacttcttcgcgaccctgttcagctgcgccgcggcgaaagacggctctaactactctcgctggtgctataagccgtttgaagacctcattcaaccggcacgcgccaccgacgaccacaacaagcgtattgaactgtacaaacaggctcaggtagtgatgcatgaccaggctccggcgctgatcattgctcactccaccgtttacgagccagtgcgtaaagaagtcaaaggctatgtggttgatccgcttggcaaacaccacttcgataacgtctctgtcgaataa

SEQ ID NO: 105938 - DNA, 1692 bp, Enterobacter aerogenes
atgaaatacattaaaacgatgtcgcagcagaagctaagtttttggcttgcgctgtacatcggctggtttatgaacgccgcggtgtttttccgccgcttcgatggctacgctcaagagtttaccgtctggaaagggttgtccgggttggtggaactggtagcgacggttctggttactttcttccttctgcgcctgctgtcgttattcggccgccgggtatggcgcatattagcgacgctggtggtgctgttttccgcggcggcaagctattacatgaccttcctcaacgtggtcattggctacggtattatcgcttcggtgatgaccaccgatatcgacctgtcgaaagaggtcattggctggcatctgatcctgtggctggccgcggttagcgctttaccgctactgcttatctggagcaaccgctgccgtaagacgctgctacagcaggtgaaaacgccgggtcagcgggcgaaaaatatcctgatagtcgtgctggccgggctgatggtctgggggccgattcgcctgctggaagtgcgccagaagaacgtcgagcgcaattcagaagtcgatatgccgagctacggcggcgtgattgccaactcttacctgccttctaactggctgtcggcgctcgggctgtacgcctgggcacaggtggatgagtcgtccgataataagtcgctgattaaccccgcgaaaaaattcacctacgtagcgccgcaggatcttgatgatacttatgtggtgtttattatcggcgagaccacccgctgggatcatatgggtattctcggctataaccgtaataccacgccgaagctggcgcaggagaagaatcttgtcgccttccgcggcacctcttgcgataccgccaccaagctgtcgttgcgttgtatgttcgtgcgcgagggcggggcggatgataatccgcagcggacgctgaaagagcagaatgtgtttgctgttctgcaccagttaggctttgccggcgacctgtacgcgatgcagagcgagatgtggttctacagcaatacgatggccaacaatatcgcctatcgcgagcagatcggcgccgagccgcacaaccgcggcaagaacgtggatgatatgctgctggtcgatgaaatgaagcgcggcatggagcaaaacccgagcggcaagcgtctgattattctccataccaaggggtcgcattttaactatacccagcgatatccacgcagctttgcgcagtggaaaccagaatgtgtgggggtggacagcaaatgttcgaaggccgagttgattaactcctacgataacagcgtcacttatgtggatcactttatcgtcagcgtgctggaccaactgcgggataaaaaggctatcgtgttctacgccgccgatcacggcgagtcgattaatgaacacgaacatctgcatggcacgccgcgtatgatggcgccgccggagcagttccgcgtgccgatgatggtctggatgtcggataaatatctggagaacccggatcacgccgcctcctttgcgcgccttaagcagcaggcggcaatgaaggttccgcaccgtcacgttgagctgtatgacaccattatgggttgtcttggttatacctcgccggatggtgggattaatgagaacaacaactggtgtcgcgtgccggcagcggcgaaagcggcgaaggaatag

SEQ ID NO: 105939 - DNA, 1206 bp, Enterobacter aerogenes
atgaacgctgcaaacactcaatatacccgttggctcacgctgattggcacgatcattacgcaattcgcactggggtcggtttatacatggagtttgtttaatagttctctggccaacaaactggacgagccagtaagccaggtggcattttccttcggcctgttaagtctcgggctggcattatcctcttccgttgccggtaaattgcaggaacgctttggcgtgaaacgcgtcaccatggcctccggcatccttcttggcgtcggttttttccttactgcccatgctaacagcctgatgatgctgtggctgagcgccggtctgctggtcggtttggcggacggcgcaggctatctgctgacgttatctaactgcgtgaagtggttcccggagcgtaaaggtctgatttccgccttctcgattggcgcttatggccttggcagcctcggttttaaatttatcgatagtcacctgttggcgacggtcgggctggaaaaaacctttgttatctggggcgctattgtgctggtgatgattgtctttggcgcgatgctgatgaaagatgcgcctaatcatcccgcgacgaccaccgcgaacggcgttgtcgaaaatgatttcaccctcgctgaatccatgcgtaaaccacagtactggatgctggcggtgatgttcctgacggcctgcatgagcggcctgtatgtgattggcgtcgccaaagatatcgcgcagggcatggtacatctcgacgtggcgacggcggcgaatgcggttaccgtgatttctatcgccaacctgagcggccgtctggttctgggcatcctgtctgataagatctcccgtatccgcgtgattactatcggtcaggtggtctctttggtcggtatggcggccctgctgttcgccccgctgaatgcaatgaccttctttgcggcgattgcctgcgtggcctttaacttcggcggcaccattaccgtcttcccgtcgctggtgagcgaattctttggcctcaataatctggcgaaaaactatggcgtgatttacctcggcttcggtattggtagtatctgcggttcgctgattgcctccgtgttcggcggcttctatgtcaccttctgcgtcatcttcgctctgctgattttgtcgctggcgctctccaccactattcgccagccgaaaagcgaaatttatcatcaagcacacgcctga

SEQ ID NO: 105940 - DNA, 648 bp, Enterobacter aerogenes
atgataataaagaaatgcaatggcctccggggtgggttgatcccggcgtgcatcactatctgggtgtcgtgtgtttcatgcgctaatgcctggcaacaggaatatatcgctaacgatacaaaaagtaatacgtccgaacgctatacatgggatagcgatcaccaaccgcgttatgaagatattctcgccgagcgaatgagagcgtcagaagccccagcagggctggcgttgaatcaggccctggcgccgcctgatttgagtcacggcatgagcgtcggatggaactattcactggccagcggcgtgacctccgggccggtcgccagcttgcgtagcgatctcaatccgccgccagcgacgcgtcgcgcgggcgaaagtatttacgtcaacacgctcggctggcgtatggactatcagcagctgtggggcgtgcatccatgggcgcaggtgagctataaccagtctatctctatcgacaacaatgcgtcgattagccgtggcaaagacggtagctggggcgacgttacgctaggcgccgatatgccgctgggttcgcatctggcggcatgggccacgctttcgcaggcagataatgtgccatcgggtgaaaatacgctgtatctgatgggggtcagcgccaatttctaa

SEQ ID NO: 105941 - DNA, 564 bp, Enterobacter aerogenes
atgcaacgttgcggatgggtaagccaggatcctctttatatccagtatcacgataacgaatggggagtcgccgagagaacgccgcaaaagctgtttgaaatgatctgcctggaaggccagcaggcggggctctcgtggatcacggttctgaaaaaacgtgaaaactatcgtcaggcctttcaccagtttgacccggttcgcgtagcggccatggatgaagcagacgtcgagcgcctgctacaggatgcgggcattatccgccataggggaaagatccaggccatcatcggcaatgcgcgggcgtttctcgccatggaagccaacggtgaagcattcagcgatttcgtctggtcgtttgtcgataatcagccgcaaattacccatgcggcgacactcgccgaaatccccaccaccacaccagcctccgatgcgctatctaaggcgctaaaaaagcgcggctttaaatttgtcggctccactatctgttattcatttatgcaggcctgcgggttagtcaacgatcatgtgaccggctgctgttgctaccccgggagaccagcatga

SEQ ID NO: 105942 - DNA, 441 bp, Enterobacter aerogenes
atgatccaaaaatgggatgccacggagaccggcccgctactcgagttatggctggaaagcacgatttacgcgcatccgttcattgctgaaagctactggcgggaaagcctggaagttgtgcgcgatgtctatcttcccgccgccgccacctgggtgtggcaggagaatgacgcactgaaagggtttatcagcgtgatggattcgcgcttcgtcggggcgcttttcgtcgccccgcaagcgatccgccacggtatcggccgcgcgctgcttgatgaggtcaagcagcactacgactggttaagcctggaggtctatcagaaaaacgtgcgggcggtaaatttctaccacgcgcagggcttccgcatagaagactgcgcgtggcaggacgacacccagcacccaacctggattatgcattggccggcggatcaaatgcgctaa

SEQ ID NO: 105943 - DNA, 2331 bp, Enterobacter aerogenes
ttgtcaacttcatctgcaactaaaaccatcttaaccgcggcccactgggggccaatgctggtggagacggatggtgaaaatgtgatttcgtcccgcggcgcgctggacacccccttcgccaactcgctgcaaacagcggtgcgcgaacaggtgcacagtaaaactcgcgttcgctatccgatggtgcgaaaaggctatctcgcctcgccgcaacagccgcagggcgtacgcggccaggatgaattcgtgcgggtaagctgggagcaggcacttgatctgattgatgcccagcatcgacggatccgcgaaagctacggcccgcagtcgattttcgccggttcctatggctggcgttctaacggcgtgttgcataaggcggcaaccctgctgcagcgctatatgagtcttgccgggggctataccggacacctcggcgattattcaaccggcgcggcgcaggcgatcatgccttatgtggttggcggtaatgaagtttatcaacagcaaaccagctggccgcttatcctggagcacagcgaggtggtggtgttgtggagcgctaatccgctgaatacgctgaaaatcgcctggaacgcctcggatgaacaggggatcccctggtttgatcgcctgcgccagagcggcaagcggctgatctgtatcgatcctatgcgatcggaaagcgttgatttctttggcgaatcgatggaatggatcgcgccgcatatgggcactgacgttgcgttgatgctggggatcgcccataccctggtagagcatggctggcaggacgatgaattcctcgcccgctgtaccagcggttatgacattttcgcccgctatttgagtggtgaaagcgatggcgtcgccaaaaccgccgaatgggcggcggcaatctgcggcgtagcggcggaaaaaatccgcgaactggcgaaacttttccaggaaaacaccaccatgctgatgtccggctggggcatgcagcgccagcagtttggcgagcaaaaacactggatgctggtgacgctggcggcgatgctggggcagattggcacgcccggcggcggttttggtctttcttaccactttgccaacggcggcaaccccacgcgccgcgccgcggtgctggcctccatgcagggtagcgtagcgggcggcgtagacgcggtggaaaaaatcccggttgcccgcatcgttgaggccctggaaaaccccggcgcaagctatcagcacaacgggatgacgcggcgctttgccgacatccgctttatctggtgggcgggcggcgccaactttacccatcatcaggataccaaccgcctgattcaggcctggcagaagccggagctgattgtgatttccgaatgcttctggaccgccgccgcgcgccatgctgatatcgtcttaccggcgaccacttcgtttgagcgtaacgatctgaccatgaccggcgactacagcaatcagcatctggtgccgatgaagcgggtggtcgcgccgcgcgatgaagcgcgcgacgatttcgatgtttttgccgatctgagcgaacgctgggaggcgggcggccgcgaacgcttcaccgaaggaaaaaacgatttgcaatggctggagagcttctaccagattgccgcccagcgtggggcgcagcagcaagtgacgctgccgccgtttgccgaattctggcaagcgaaccagctaattgaaatgccggaaaatccggataacgcccgtttctcccgcttcgcggcatttcgcgcagacccgcaggctaacccgttaaaaaccgcgagcggaaaaattgaaattcactcgccgaccattgccgggtttggctatgccgattgtccgccgcacccgatgtggctcgaacctgacgagtggcacggcaacgccgaggtgggtcagctgcaggtgctttccgcccatccggcgcaccgcctgcatagccagttgaaccagacttcgctgcgtgaacgctatgccgtcgccgggcgcgaaccgctgactatccatccgctggacgcgcaggcgcgcaatatcgccgacggcgatctggtgcgggtgtggaattcacgtggtcaggtactggccggcgcggtggtcacggaaggtattcgtccgggggtgatttgcctgcatgaaggcgcgtggccggatatcgaccccgatgccggaatatgcaaaaacggcgcggtgaacgtgctgacgaaagatattccgacctcgcgtctgggcaatggttgcgccgggaatacggcgctggcatggctggaaaaatacgatggacccgcgctggcgcttagcgcatttgatccgccggccaatgcataa

SEQ ID NO: 105944 - DNA, 663 bp, Enterobacter aerogenes
atgaaaaaacgcgtactcatgattgctgctatcgttagcggcacactggctatttctggttgtactaccaacccttataccggcgaacgcgaagcgggaaaatccggcatcggcgcgggtatcggctccttagtaggcgcaggcgtcggcgcgctctcctcttccaaacatgaccgcggcaaaggcgcgctgattggcgcagcggcaggcgcggcgctaggcggcggcatcggttactacatggacgtgcaggaagcgaaactgcgcgaaaaaatgcagggaaccggcgtcagcgtgacgcgaaatggcgataacatcgtgctcaacatgccgaataacgtcacctttgacagcagcagcgccaacctgaaacctgcaggcgccaacaccctgaccggcgtcgcgatggtgctgaaagagtacgagaaaaccgccgttaacgtcgtcggctacaccgacagcaccggcagcaacgatctgaacatgcgtctgtcgcaacagcgtgccgacagcgtcgccagcgcgctcatcactcagggcgtagcggccaaccgtattcgcactaccggcatgggcccggcgaacccgatcgccagcaacagcacggcggaaggcaaagcgcagaaccgtcgcgtggaaattaccctcagcccgctgcagtaa

SEQ ID NO: 105945 - DNA, 1017 bp, Enterobacter aerogenes
atggcgaaagcggcgcgagcaaccatcagcgacgtggcgaaagccgcgaagaccggtaaaaccagcatttcacgctatctcaacggcgaaaagcatctgctttccgacgatctgctggcgcggattgaaaaagcgattgccgagctcaactaccgtcccagcctgatggcccgtggcctcaaacatggccgtacccgcctgattggcctgatcatcgccgatatcaccaacccttactccgtgaacgtgttaagcgggattgaagccgcctgccgcgaaaaaggcttcaccctgctggtgtgtaataccaacaacgaggtcgatcaggagctgcattaccttgacctgctgcgtagctatcaggttgaagggattgtggttaatgcagtcggcatgcgcgaagaaggcctcaaccgcctgcagcaatcctcgctaccgatggtgcttatcgaccgtaaaatccccgatttcgcctgtgatgtcgtggggctggataacactcaggccgccaccaccgccaccgaacatctggtggaaaagggttttgaagcgctgttgtttttaagcgagccaatcggctccgtaaacacccgccgcgagcgcctggacgcctttcgcgcgaccctacagcgctatgctggcgtggtggcggaaaacgccgaggtgccgctcaacgacggcgccatgatggataacgtcctgcgccagttccacgcccgccaccgcggaatgcgcaaagcggtgatttccgccaatggcgccctgacgttacaggtcgcccgttcactgaagcgcgttgacctcatctggggcagcgatattggcctgctgggcttcgatgagctggaatgggcggagctggcgggcgtcggtattaccaccctcaaacagccaacctggcagattggctatgcttcggtcgaacaggtcgtcaggcgtatcgaaggcggcagcgaccccatctgcgagcgggtcttctccggcgagcttattgtccggggatcaacgtctcgttaa

SEQ ID NO: 105946 - DNA, 750 bp, Enterobacter aerogenes
atggccagaaaaatcattgtcgtcaccgccgcttatggcaacgaccacgttaaagcgcttggcgggcagtccgccgtattaccctttatcgccggttccggcgccgatggcgtggaaattcgccgcgagctgttcagcgcggcggaactgaagcagttgccgacgctggcggccgacattgaaaaacaggggctgctggcctgctactccgcgccacaagcgctgttcaccgacaacggcgagctcaatccccatctcccgtcgttacttgaagaagcgcaaaccctcaacgccctgtggctgaagctctccctcggtcatttcatccataaccaacagctggagacgctgcgcgacattctgagcgccagcggcatggcgctggtggtggaaaatgaccagaccgattgcggccaactggcgccaatgcagcgcttcaaagccgcctgccgggtccatcagatgccggtgacgctgactttcgacatgggaaactggctgtgggtcggcgattcgccggaagaagccgcgcgccatctcgcccccgctgtcagctatattcatgtgaaggcggcggagcctcatcatgagaagtatcgcgccgtcccaccggaccaggcggacgctcgctggctggcgctgctcgataacctgcccgccgacgcgccgcgcggtattgaattcccgctggtcggcgacgacctgaccgccgtcacccgccattacgttgatctgttacgcgaggattaa

SEQ ID NO: 105947 - DNA, 936 bp, Enterobacter aerogenes
atggaaaacttagatgtcattaccattggcgaagccatggcgatgtttgtcgccaccgaaaccggcgaactggcggaggttgaacgctttatcaaacgcgtcgccggcgctgaactgaacgtggcgaccggcctggcgcgcctggggctgaaggtgggctgggtgagccgcgtcggcaacgatagctttggccgcttcgtgctgaattcgctggccaaagaaggcatcgacgcgcgcggcgtggccattgacgagcgctacgcgaccggcttccagatgaaatctaaagtcgaaaatggaaccgatcccatcgtggaatatttccgtaaaggatcggctgccagccatctgtcgacagaagatttccgcgctgattacttcaccagcgcccgccatttgcacttaagcggcgtcgccgccgcgctgtccgacagctcgtatgcattgctggaacatgcggccagggtgatgaaagccgaagggaaaaccctctcatttgatccaaacctgcgcccggtattgtggaaaagcgaagccgagatggtggagaaactgaaccgcctcgccttccaggctgattgggttttgccaggcttaaaagagggcgtcattctcaccggccagcagacgccggaaggtatcgctgatttctatctgtcgcgcggcgttaaggcggtagtgattaaaaccggctgcgacggcgcatggttcaagaccgccaacggcgaacagggcgccatcgcagctattaaagtcgacaacgtggtagacaccgtcggcgcgggtgatggctttgccgttggcgtaatcagcgcgctgctggaaggcaaaacgctgacgcaagccgtgaaccgcggtaacaaaattggctcgctggccattcaggtacagggcgatagcgaagggctgcccacccgcgaagcgctgggcgaataa

SEQ ID NO: 105948 - DNA, 1281 bp, Enterobacter aerogenes
atgaacagttcaacaaatgcagcaaaacgttggtggtacatcatgcctatcgtgtttatcacgtatagcctggcgtaccttgaccgcgccaacttcagctttgcatcggccgcgggcattaccgaagaccttggcatcaccaaaggcatctcatcgctgcttggcgcccttttctttcttggatacttcttcttccagatcccaggagcgatttacgctgaacgccgcagcgtgcgtaaacttatctttatctgccttatcctgtggggcggctgcgcctcgctaaccggagtggtgcataacatcccggcgctggcggccatccgctttattcttggcgtggtggaagcggcggtcatgccggcgatgctgatttacatcagtaactggttcaccaaatcagagcgttcacgcgctaacactttcctgatcctcggtaacccggtcaccgtactgtggatgtcggtcgtatcgggttatctgatccaggcctttggctggcgtgaaatgtttatcattgaagggatccctgctgtgatttgggccttctgctggtgggtactggtgaaagacaaaccgtcgcaggtgaactggctggcggaaagtgaaaaagcggcgctgcaggaacagctggagcgcgaacagcagggtatcaaagcggtacgtaactatggcgaagccttccgttcacgcaacgtggtgctgctgtgtatgcaatatttcgcctggagcatcggcgtgtacggtttcgtactgtggctgccgtcaatcatccgcagcggcggcgaaaacatggggatggtcgaagtaggctggctctcttcagtaccctatctggcggcaacgattgcgatgattgccgtctcctgggcttccgataagatgcagaaccgtaagctgtttgtctggccgctgctgctcattggcgggctggcgttcatcggctcctgggccgtcggcgccaaccatttctgggtctcttataccctgctggtgatcgccggcgcggccatgtacgccccgtatggcccgttctttgcgattatcccggagatgctgccacgcaacgtcgccggcggcgcgatggcgctgatcaacagtatgggagcgctgggttctttctttggttcgtggttcgtcggctatctcaacggcgcaaccggcagcccgtccgcctcgtacattttcatgggtgtggcgcttttcgcctcggtatggcttactttaattgttaagcctgctaagaatcaaaaacttccgcttggcgctcatcacgcctga

SEQ ID NO: 105949 - DNA, 972 bp, Enterobacter aerogenes
atgaagccgtctgtcattctctataaaacgctccccgacgatctgttacaccgtctggaggaacacttttccgtcacccaggtgaaaaacctgcgtccggaaaccgtttcgcagcacgcggaggctttcgcccaggcggaaggtttactgggttcgagtgaaaaggttgacgccgcgttactggagaaaatgccgaagctgcgtgcgacctctaccgtgtctgtcggctacgacaattttgatgtcgatgcattgaacgcgcgcaagattttgctgatgcatacgccgaccgtgctgaccgaaaccgtcgccgatacggtgatggcgctggtgctgagcaccgcgcgtcgggtggttgaggtcgctgaacgcgtgaaagcgggcgaatggaccaggagcatcgggccggactggttcggctgcgatgtacaccataaaaccctgggcatcgtcggcatgggccgcattggcatggcgctggcgcagcgcgcccacttcggtttcggcatgccgattctgtataacgcgcgccggcagcatccacaggcggaagagcgcttcaatgcgcgctactgcgatctcgataccctgttacaggaagcggatttcgtctgcctcattctgccgctgagcgaagagacccaccacctgttcggcgaagcgcagtttgccaaaatgaaatcttccgccatcttcattaacgccgggcgcggtccggtcgttgacgagcaggcgctgattgcggcgctgcaggccggtgagatccacgctgccggtcttgacgtctttgaacatgaaccactggcaaaagattcgccgctgctgacgctgccgaacgtggtcgcgctgccgcacattggttccgccacccacgagacccgctataacatggcggcctgcgcggtagataacctgattgacgcattgaacggcaaggttgagaagaactgcgtgaacccgcaggtgaagtaa

SEQ ID NO: 105950 - DNA, 1359 bp, Enterobacter aerogenes
atgaagaaaacaaccatcgatattcaggcttttatcaacgaacatccattcaccaagtaccaatggatgattctcgccttatgttttattaccgtcgcgatggacggatttgataccgcgattattggttttatcgcctcagacctggtacaggaatggggggttgagaaatccgcgctgggcccggtaatgagcgccgctctggtcgggctcgccgtcggcgcgctgacggccgggccgctcgccgatcgtattggccgcaagaaagtgctgattatgtcgatcctggttttcggcggctttagtttgttaaccgcatttgccagcagccttaaccaactgacattattgcgcttcctcaccgggttgggcttaggcgcggcaatgccgaatgccgcgacgctaatgagcgaatatgctccggaacgccgccgcgcgctgatggtaaacctgatgttcgtcggcttcccaatggggtcgtcgctgggaggctttctgtcggcctggatgatcccgcattatggctggcaaagcgtgctggtgcttggcggcgtgatgccgctgctgctggccgtggcgttaatgttcctgctaccggaatccgcacgctatatggtcgtgaaacggcagccggcgcagcggatcgccgccatcctgaagcgtatcgcgccgttgccggatgcggttgaatttgagctacgtgaagcaggccaggtgaaggaaaagtcagccattggcgtgattttctccccgcgctacgccgtgggcaccgtgatgctgtgcctgacctattttatgggattgctgattttctatctgctgaccagttggctgccgctgcttatccgcgagaccggcgcctcgatgagccaggcttctatcatcaccgctctgttcccgctcggcggcgggattggcgtgctgatcctcggcgcgctaatggataagatcaaccctaacaaagtggttgccgtcggctggctgctcaccggcgtctttgtttgcctggtgggtttctcaaccagcaatctgctgttgatgggggtaatggtgtttatcgctggcagcattatgaacggcgcgcaatcatcaatgccggcgctggctgccgggttctatccaacccagggccgcgccaccggcgttgcctggatgctcggtatcggccgcttcggcgggatcctcggcgccttcagcggcgctttcctgatgcaggcgcaattgtcgtttgaaaccatcttcaccatgctggcgatcccggcgtttttatccgccatcgctctggtagtgaaatacaaactgagccagcgccaacctgccgttaagccaaatgacggtaaaaacctacagaaagcctaa

SEQ ID NO: 105951 - DNA, 291 bp, Enterobacter aerogenes
atggaatataaagatcccgtatttgatttgttgagtaacctggaacagattgtttttaaagaccagccgcaaacggctacgcacgcccgtaccccaagcgtttttaatgaattcgaacggctgcgtaagggcacaggccttaagacagatgatttcgccaatgctatgggcgtcagcgtcgcgatggttgaagagtgggaatcgcgacgggtaaaaccttcatccacggagctcaaattgatgcgcctgatgatggccaatccacagctctcaaggcagctaatagattga

SEQ ID NO: 105952 - DNA, 213 bp, Enterobacter aerogenes; identical to SEQ ID NO: 87623

SEQ ID NO: 105953 - DNA, 1620 bp, Enterobacter aerogenes
atggctcattgtgcccacaccccctcttttgttttacatcaggtcacctgtcagttcgcgacgggacagacgctttttggcccgctgaatttatcgctggaaccgttgctttgcggccttgtcgggcgaaatggcgttggcaagacacgcctgttgcgtctgctggcgggccttgattctccttccggcgggcacatcgaacggtcagccaccgttgcctgggtggcgcagcagccgaccctcaccgccgggacaaccgtcgcctcgctattgggttatgcgtccctattcgacgccctgtcccgccttgaacagggaaaagggctggcaaatgacttcgaactgttggatggccgttgggatctgcccgaccgcctgagttcagccttctgcgatgccgggctcccggcattcgccgccgatcgtcctgccttttcgctcagcggtggcgaacgaatgaaggcgctactgtgcggcgcattcgtttctggcgcggactatctgctgttggatgaacccaccaaccatctcgatcgtcagggccgtgagtggctgtatcaacagctgaaactctggcggggcggggccttaatcgccagccatgaccgtgaattgctggccctgatgccgaggattattgagctgacgtcggcggcgctgcgcaactacggcggcaattatgctgaatatcagcagcagcgtgaagcggagcaacaggctgcccgctcggcgctggaacatgccgcaatcgaacggcggcgcacccgggcgcggatgcaaaaggagcatgatgcggcccagcggcgttcggcgcagacgctgcgtaccgtcgatacgctgaatatcgcctctttcgagcgtgtgaagtacaaaggggcggcaaaagagcgtcctggcacgctgcgccgtcagcatcgcgaacagaactgtagtctgaatgccgctgtgcaccaggcacgggagcgggcagaagaagataatccggtgatgttcacactgcctggcagtgaagtggctgccggcaagcaggtactggtgctggaatcgctgcagttggctcactcatcccccgcgccgctcgactggcgggtggatggcccgatgcgcatcgcgctaaaggggccaaacggctgtggcaaaacaacattattgaaaaccctgatggggctggagcaggcaaccgctggcgacatccggctgtcggtgagtgcggcgtatctcgatcagcatctgacgcagctggatttatcattgtcggtgatggcgcaccttaacctgggcgataccccactggatgagggaatactgcgtagccgtctggcgcagctccagttgggagctgacaaggtcagccttccgctggcggcgttaagcggcggcgaacgcctgaaagcggcgcttgcctgcgtgctctggcggcgggactcaactcaattgctgctgctggatgagccaaccaatcacctcgatctggcgtcgatccaggcaattgaaagcgcgctggcgacgtatcccggcgcgatgctggtggtatcgcatgacgaggcatttttacagggtctgaagctgacccattgtctggagtggagggaaacgggctggcattttgccgccctctga

SEQ ID NO: 105954 - DNA, 2070 bp, Enterobacter aerogenes
atgtctgagaaaactttcctggtggagatcggcaccgaagagctgccaccaaaagcactgcgcagcctggctgaatccttcgctgccaactttactgcggaactggacaacgctggcctcgcgcacggcgccgtcgaatggtttgccgcgccgcgccgtctggcgctgaaagtggcgaatctggccgcctcgcagccggatcgtgaagtcgaaaaacgcggcccggccattgcccaggcgtttgacgctgaaggtaaaccaagcaaagcggccgaaggctgggcgcgcggctgtggtattaccgtcgatcaggctgaacgtttgaccaccgataaaggcgaatggctgttgtatcgcgcccacgttaagggggaaagcgcgcaaacgctgctgccgaacatggttgcgacctcgctggctaagctgccgatcccgaaactgatgcgctggggcgcttctgacgttcactttgtgcgtccggttcacaccgtgaccctgctgttgggcgatcaggttgtcccggcgaccattctgggtatcgcttccgaccgtatcatccgcgggcaccgttttatgggcgagccggaattcaccatcgacaatgcagaccagtatccgcagattctgctggagcgcggtaaagtgatggccgactacgccgagcgtaaagccaaaatcaaagcggatgctgaagcggcggcgcgtaagattggcggtaatgctgacctgagcgaaagtctgctggaagaagtgacctcgctggtcgaatggccggtagtgctgacggcgaagtttgaagagaaattcctcgcggtgccatccgaagcgctggtttacaccatgaagggcgaccagaagtacttcccggtctatgcaaacgacggcaaactgctgccgaacttcatcttcgtggcgaatatcgagtccaaagatccacagcagatcatctccggtaacgagaaggtcgttcgtccgcgtctggccgatgccgagttcttcttcaataccgaccgtaaaaaacgtctggaagataacctgccgcgtctggaaaccgtgctgttccaacagcagctgggtaccctacgcgataagaccgatcgtattcaggcgctggcgggctggattgccgaacaaattggcgctgacgttaaccatgcgacccgcgcgggcctgctgtccaagtgcgacctgatgaccaacatggttttcgagttcaccgacacgcagggcgtgatggggatgcactacgcgcgccatgacggcgaagcggaagatgttgcggtcgcgctgaacgagcagtatcagccgcgttttgccggcgatgcgctgccgtctaacccggttgcctgcgcggtggctattgccgacaagatggacactctggcgggtatcttcggtatcggtcagcatccgaaaggcgataaagacccgtttgcgctgcgccgcgccgcgctgggcgtactgcgtatcatcgttgagaagaacctgaatctcgatttgcaaacgctgaccgaagaagcggtgcgtctgtatggtgagaagctgactaacgccaacgtcgttgatgacgtcatcgacttcatgctgggccgcttccgcgcctggtatcaggacgaaggctatggtgttgatactattcaggcggtactggcgcgtcgtccgacccgcccggcggatttcgatgcgcgcatgaaggctgtgtcgcacttccgtacgctggaagagtcctccgccctggcggcggcaaacaagcgcgtatccaacatcctggcgaaatccgacgagaccctgaacgatatcgttcatgcctcggtgctgaaagaagcggcggaaattaagctggccggtaatctggtggtgctgcgtgataaactccagccttacttcgccgaaggccgttatcaggatgcgctgattgagctggctgcgctgcgcgagccggttgatgagttcttcgaaaatgtgatggttaacgctgaagacaaagatgtccgcatcaaccgtctgacgctgctgtccaaactgcgcgagctgttcctgcaggttgcggatatttcactgctgcagtaa

SEQ ID NO: 105955 - DNA, 912 bp, Enterobacter aerogenes
atgcaaaagtttgataccaggaccttccagggcctgatcctgaccttacaggattactgggctcgtcagggctgcaccattgttcaaccactggacatggaagtcggcgccggcacatcccacccaatgacctgcttacgcgcgttggggccagagccgatggcgaccgcctacgtacagccttctcgtcgcccgaccgatggccgctatggcgaaaacccgaaccgcttacagcactattaccagttccaggtggtgattaagccgtccccggacaacattcaggaactgtatctcggatctctgaaagagctgggtatggatccgactatccacgacatccgcttcgttgaagataactgggaaaacccgactctgggcgcctggggattgggttgggaagtgtggcttaacggtatggaagtgacgcagtttacttacttccagcaggttggcgggctggagtgtaaaccggtcaccggcgaaattacctacggcctggagcgtctggcgatgtacatccagggcgtggacagcgtatacgatctggtctggagcgatggcccgctgggtaaaaccacttacggcgacgttttccaccagaacgaagtggaacagtccacctataactttgaatatgcggacgtagacttcctgttcacctgcttcgagcagtacgagaaagaagcgcagcaactgctggcgctggaaactccgctgccgctgccagcctacgagcgtattctgaaagccgcccatagctttaacctgctggatgcgcgtaaagccatctccgtcaccgagcgtcagcgctatattctgcgtatccgcaccctgactaaagcagtggcagaagcttactatgcttcccgtgaggcccttggcttcccgatgtgcaacaaagacaaataa

SEQ ID NO: 105956 - DNA, 300 bp, Enterobacter aerogenes; identical to SEQ ID NO: 87619

SEQ ID NO: 105957 - DNA, 996 bp, Enterobacter aerogenes
atgcaggaaaaaataagctggattaccaacttgcgcggcatagcatgcctgatggtagtaatgattcacagtaccacctggtacattacccatcctcatagcatcagcttgttcgaatgggatatcgcgaatctgcttaactcggcatcacgggtcagcgtcccgctttttttcatgatttcaggatatctgttttttggcgaacgcagcgcccagccccgccattatctgcgcatcgcgctgtgtattctgttctatagcgcgctggcgctgctctatatcaccctttttacccacatcaacgttgagctgtcattaaaaaatttactgcagaagccggtgttttatcacctgtggtttttctttgccattgtggtgatttatctgctctcgccgctgattcaggtgaagcaggtcagcggcaaaatgctgctggcgctgatgctggtgattggcctcatcgccaaccccaatatggtaagcatcaaggcgggcggcattgaatggctaccgataaacctctatatcaacggcgataccttttactacgtactgtacgggatactgggccgggcgatcggcgccatgaataccgacagaagaggactgaccctgatgtgcgcgctactgtttaccgccgcggtgtgggtcatttcacgcggcacgctgcatgaactgcaatggcgaggcgattttggcgatacctggtatctgtattgcgggccggctgtgtttatctgtgcaatctcgttattcaccctgggcaaaaacatcctcaatagccgtgagctcccgggtatcgcgttaatctccagacattcattaggcatttatggctttcacgcattgtttattcacgctctgcgcgccagcggccttgagctaagccgctggcccttgctggatattgtgtggattttcgccgccgcgctgttgggtagcctggcgctgtctacgctggttcagcgaattgatcgccgtcggttggtgagctga

SEQ ID NO: 105958 - DNA, 378 bp, Enterobacter aerogenes
atgaaattaaaacgtacgacggcaagattagtcatgctgctgggttcgctggtttacctcatcggcatctggcgaacgtgcccgctgttcagcggtaaaggctattttcttggcgtgctggtgatggggatgtttgctgtcctcacccatcaacgaacggagcaggaagcgcagcgagatgatgattttatctccctgtgccggttggttctgttgctatcggcaggattgctgctggtcggtgcctggtttgttccggcgccgtggcgcgaaaaaagtatttacgtgatggcatggtttgtctgtatgtacggtgcgtcagcaacgtcttatcccgctaaagtcgcggataaagcgcgcaataactcagtggaataa

SEQ ID NO: 105959 - DNA, 1455 bp, Enterobacter aerogenes
atgtatatcgggattgatttagggacctcgggcgtaaaagccattctgctcaatgaacagggcgacgtactggcgacgcataccgaaaaactgaccgtctcgcgcccgcatccgctctggtccgaacaagatcccgaacagtggtggcaggcgacgaataccgcgatgcaagcgctgggcgcgcaacactccctgcgcgaggtaaaagctttaggcatcgccgggcagatgcatggcgccacgctgcttgataaacagcagcgggtcctgcgtcaggcgattttgtggaatgacggccgctgcggcgaagagtgcatgctgctggaagaaaaagtcggcgcttcgcggcaaatcaccggcaacctgatgatgccgggttttacggcaccgaagctgctgtgggtacagcgtcacgaagccgaaatctttaaacaggtcgataaggtcctgttgccgaaggattacctgcggctgcgcatgagcggtgagtacgccagcgatatgtccgacgccgccggcacgatgtggatgaacgtcgcgcgtcgtgactggagcgatgaaatgctcgccgcctgcgggctcagccgcgacaatatgccggccctctttgaaggctgcgaggtgaccggccatctgcgcgcagaggtcgctcaggtgtggaatatgccgcgggcgctggtggtagcgggcggcggcgataacgcggcaggcgctgtcggcgttggcatggccgatgcggggcaggcgatgttatcgctggggacctccggcgtttatttcgccgtcagcgatggttttctgagtaaaccggaaagcgcggtgcatagtttctgccacgccctgccgggccgctggcatctgatgtcggtgatgctcagcgccgcgtcttgtctggattgggcggcgaagttaaccggcctcggcagcgtaccggcgctgatcgccgcggcgcaatcggcggatgacaatgccgacccggtgtggttcttgccttatctttccggcgagcgtacgccgcacaacaatccgcaggctaaaggcgtgttcttcggccttacccatcaacatggtcccgccgaactggcgcgggcggtgcttgagggggtgggttacgcgttggccgacggcatggatgttgtgcactcctgtggtgtgaagccagacagcgtcacccttatcggcggcggcgcgcgcagcgcatactggcggcaaatgctcgccgatatcagcggacaacagctggatttccgcaccggcggcgatgtcggcccggcgttaggcgcggcaagattggcgcaactggccgttcatcatgatgcggctttctctgacctcctgccgcagctaccgctggagcaggcgcatctgcctgatgctcaacggtttgcccgttatgcgccgcgtcgtgaaacgttccgccagatttatcagcagcttaagccgctgatgtcataa

SEQ ID NO: 105960 - DNA, 1323 bp, Enterobacter aerogenes
atgcagacctatttcgatcaactcgatcgcgttcgttatgaaggcccgaaatcgactaacccactggctttccgtcactacaatccggatgaattagtactgggtaaacgcatggaagaccacctgcgtttcgctgcctgctactggcacactttctgctggaatggcgcggatatgtttggcgtggggtccttcgatcgtccatggcagcagccgggcgaagcgctggaaatggcgaaacgtaaagccgaagtggcatttgagtttttccataagttgaatgtgccgtattactgcttccatgatgtcgacgtttctccggaaggcgcttcgctgaaagagtacagcaacaacttcgcgcagatggtggacgtactggcggaaaaacagcagcagagcggcgttaaactgctgtgggggacggcaaactgctttaccaacccgcgttatggcgcaggggcggcgacgaaccccgatccggaagtctttagttgggcggcgactcaggtggtcaccgcaatgaatgcgacccacaagttgggcggtgaaaactacgttctgtggggcggtcgcgaaggctacgaaaccctgcttaataccgatctgcgccaggagcgcgagcagattggccgctttatgcaactggtggttgaacacaaacacaaaattggtttccagggcaccctgctgatcgagccgaagccgcaggagccgaccaagcaccaatatgattatgatgcctccacggtttacgggttcctgaaacagtttggtctggaaaaagagattaaactgaacattgaagccaaccacgccacccttgccggccactctttccaccacgagatcgccacggctattgcgctgggcctgttcggttcggtggacgcgaaccgcggcgatgcgcagctgggctgggataccgaccagttcccgaacagcgtagaagagaacgccctggtgatgtatgagatcctcaaggcgggtggcttcaccaccggcggcctgaactttgatgctaaagttcgtcgccagagcaccgacaaatacgatctgttctacggccatatcggcgcgatggacactatggcgctgtcgctgaaagtcgcggcgcgcatgattgaagacggcgagctggataaacgcgtggcgaaacgctacgccggctggaacggtgaattgggccagcagatcctcacaggccagatgaccctgaccgacatcgcgcactatgcgactcagcataacctggcgccgcagcaccacagcgggcatcaggaactgctggaaaacctggtaaaccattatctgttcgataagtaa

SEQ ID NO: 105961 - DNA, 996 bp, Enterobacter aerogenes
atgaagataaagaacctttgccttacgctctgcgcctcatcgctccttctcgccagcatggcgggcatggctaaagaagttaagattgggatggccatcgacgaccttcgtctggaacgctggcaaaaagatcgcgatattttcgtcaataaagcggaatcattaggtgccaaagtatttgtgcaatccgccaatggcaacgaagaaacgcaaatgtcgcaaattgaaaatatgatcaatcgcggcgtcgatgttttagtaattattccttacaacggccaggtgctcagtaacgttattaaagaagcgaagcaggagggaattaaagtcctcgcctacgatcgcatgattaataatgctgacatcgatttttatatttctttcgacaatgaaaaagtcggtgaaatgcaggcccaaagcctggttgacaaagtgccgcagggtaattatttcctgatgggcggctcgccggtggataataacgccaaactgttccgcgccggccagatgaaggtgctcaaaccttatgtcgatgacggcaaaattaagatcgtcggcgatcagtgggtcgacggctggctgccggaaaatgcgttaaaaatcatggaaaacgcgctgacggcgaataacaacaaaattgacgcggtagtggcttccaacgatgcgaccgccggtggcgctatccaggcgctaagcgcccaggggctggcgggtaaagtcgccatttccgggcaggatgccgatctggctggcgtgaaacgtattatttccggcacgcagacaatgaccgtttataaaccgattaccacgcttgccactagcgctgccgaaatcgccgttgaattaggcaatgaccagcaacccaaggctgacgccacgttgaataacggcttaaaagatgtcccctcgcgcctgttaacgccaattgaagtcaataaagagaatattgacgccacggtgattaaagacggtttccacaaaaagagtgaactgtaa

SEQ ID NO: 105962 - DNA, 1542 bp, Enterobacter aerogenes
atgtcctggttactcgaaatgaagaacatcaccaaagcctttggcgcggttaaggccgtggataacgtcagcctgcggctgaatgccggggaagtggtgtcgttatgcggtgaaaatggttcggggaaatcaacgctgatgaaagtgctgtgcgggatctatcctcacggcagctacgaaggtgaaattattttcgctggcgagacgttacaggcgaatcatattcgcgataccgagcgtaaaggtatcgccattattcaccaggagctggcgttggtgaaacatctcacggtgctggaaaatatctttctcggcgccgaggtctcacgccatggcctgctggattacgaaaccatgaccctgcgctgccagaagctattggcgcaggtgaatttatcgatctcgcccgatacccgcgttggcgatttaggcctgggccagcaacagctggtcgagatcgccaaggcgctaaataaacaggtacgtttgctgatcctcgatgaacccacggcatcattaaccgaacaagaaaccgcgacgctgctggcaattattcgcgatctgcaaaaccacggcatcgcctgtatttatatttcgcacaagctcaatgaagttaaagctatctccgacactatctgcgtaatacgtgacggccagcatattggcacccgcgacgccagcgggatgaatgaagatgacatcatcactatgatggtcgggcgcgagctcactgcgctgtacccaaatgaaccacatagtcatggcgatgagatcttgcgggtcgagcatctcaccgcctggcacccggttaaccgtcatatcaagcgcgtcaacgacgtgtcgttttccctccgccgcggcgaaatccttggcatcgccgggttagtcggcgccgggcgcaccgaggcggtacagtgtctgtttagcgtctggccggggcgctggcagggaagcatctttatcgacggacagccggtgacgattaacaactgccaacaggcgattgcccatggcatcgccatggtgccggaagaccgcaaaaaagacggcatcgtgccggtgatggctgtcggcaagaacatcactctcgcggcgttaaaccagttcaccggcccggcaagcagcctcgatgacgccgcggagcagcactgcattcagcagtcgattcagcggctgaaaatcaaaacgtcatcgccggatctggcgattggccgcctgagcggcggcaatcaacaaaaggcgattctggcccgctgcctgctgctcaatccgcgcattttaatcctcgatgaaccaacccgcggcatcgatatcggtgcgaaatacgaaatctacaagcttatcaatcaactggtgcagcaaggcatcgccgtcatcgtgatctcatccgaactgcctgaagtgctcgggctgagcgatagggtgctggtgatgcacgaaggcaagcttaaggccgatttgcataatcaaggtctgacccaggaacaggtgatggaagccgcactgaggagcgaacgccatgtcgaaaaacacgtcgtctga

SEQ ID NO: 105963 - DNA, 1182 bp, Enterobacter aerogenes
atgtcgaaaaacacgtcgtctgaaatcaaacttacgccatccgcccctgccgtttttccggcgctgaaagggctcaatctccaggttttcgtgatgatcgccgcgattatcgccattatgctgttctttacctgggttaccgacggcgcctatctgagcgcgcgtaatatctccaacctcctgcggcaaaccgccatcaccggcatcctcgccgtcggcatggtgttcgtgatcatttcggcggaaatcgatctgtccgtcggctcgatgatggggctgctcggcggcgcggcggcgattttcgacgtctggctcggctggccgctgccgctcaccatcctcgttacgttggtcatggggctgttgctcggcgcgtggaacggatggtgggtcgcctatcgcaaggtgccctctttcattgttacccttgccggcatgctggcgtttcgcggaattctgatcggtattaccaacggtaccaccgtctcgcccaccacgccggcgatgtcgcaaatcggccaaagttatttaccggacggcatcggctttggtatcggcgttattggcatggcggcctttatcatctggcaatggcgcgggcggatgcgccgacaggcgttagggctggcgaccaccagttctggcggcgccgttggccgtcagaccatcaccgcagttatcgtgctgggcgctatctggttgctcaatgattatcgcggcgtgccgacgccggtgctcatactcgccgccctgctgctggcaggcatgtttatggcgacccgcaccgcttttggccgtcgtatctatgccattggcggcaatctggaagcggcccgcctctccgggattaacgtcgagcgcaccaagctggcagtcttcgctattaacggcctgatggtcgctatcgccgggttgatcctcagttcgcgactgggagcgggttcgccttccgccggcaatatcgccgaactggacgccatcgccgcctgcgtgattggcggcaccagcctggcgggcggtatcggcagcgtggcaggggccgtaatgggggcgtttattatgtcggcgctggataatggcatgagcatgatggacgtcgccaccttctggcaatacatcgttaaaggcgccattttactgttggcggtctggatggattcggctaccaagcggagaacataa

SEQ ID NO: 105964 - DNA, 1179 bp, Enterobacter aerogenes
atgtttgaaaagcgtcaccgcattacgctgttattcaacgccaacaaagcctatgaccgtcaggtggttgaaggcgttggcgaatatctgcaggcatcacagctggaatgggatatctttatcgaagaggattttcgcgcgcgtatcgaaaacatcaaagagtggttgggcgatggcgttatcgccgattacgacgacccggagatagaaaagctgctggcggatgtcaaagtgccaattatcggcgtcggcggctcctaccataagccagaatgctatccgcctgttcactatatcgccaccgataatgccgcgctggtcgaaagcgcattcctgcatctgaaagaaaaaggcgtgaaccgtttcgctttttacgggctaccgacctccagcggcaagcggtgggcgatggagcgcgaacacgccttcagccagctagtcgccaaagagaaataccgtggcgtggtctatcaggggctggagaccgcgccggagaactggcagcatgcgcaaaatcggctcgccgactggctacaaacgctgccgccgcaaaccggcattatcgccgtgaccgatgcccgggcacgtcacgtcctgcaggcctgtgagctgctgcatattccggtgccggaaaaattgtgcgtcattggcatcgataacgaagaactgacccgctacctctcccgcgtcgcgctctcttccgtggcgcagggtacccggcagatgggctaccaggcggcgaaacttctgcatcgattactggaaaacgaagcgctaccgctacagcggctgctggtgccgccgatgcgcgtcattgagcgacgctccaccgattatcgctcgctcaccgaccctgcggtgattcaggcgatgcattatatccgcaatcacgcctgcaaaggcatcaaggttgagcaggtgctcgacgccgtcggcatctctcgctctaatctggagaaacgctttaaagaagaggtcggcgagaccatccacacggtgatccacagcgaaaagctggaaaaagcgcgcagcctgctggtctccaccacgctatcgataaacgaaatttcgcagatgtgcggttatccgtcgctgcagtatttctattcagtgtttaagaaagagtacgacgtgacgccgaaagagtaccgcgatcggcacagtgaagtgatgatgtag

SEQ ID NO: 105965 - DNA, 564 bp, Enterobacter aerogenes
atgccttacattacaaagcaaaatcaagcgatcacggcagatcgtaactggcttgtctctaagcaatacgacggccgttggtcgccgagcgagcaggcgcgtctgaaagatatcgcctcacgttataaagtgaagtggtctggcaatactcgccgtataccatggaactcgctgcttgagcgcgtcgacattattccaaacagcatggtggcgaccatggcggcggcggaaagcggttggggcacctcgaagctggcgcgcgtcaacaacaacctgtttggtatgaagtgcggcggcggcaattgtcgcggtgcgatgaaaggctactcccagtttgaatcggtcgagcagtcggttcaggcttacgtgagaaaccttaacacgcatccggcttattcatccttccgtaagtctcgcgcacagctgcgtaagacggaccaggaagtgactgccatcgcgatgatccacaagttgaaggggtactcgacgaaagggtcgagctataacaactatctcttcgctatgtatcaggacaatcagcgcctaattgccgctcatatgtaa

SEQ ID NO: 105966 - DNA, 2031 bp, Enterobacter aerogenes
atgaaactcgctgcgcttgcctcgctactgctgcccgggatggcctttgccgcctggacaaccgctgacttccccgcctttactgaacaggatgcaggccgtttcacgacgcaaaatgaggtgacgaagggtacccgccctttgcggataagttttgaccaacagtgctggcagcctgcgggggcgataaaactcaatcagatgctgtcgctggaaccctgccgggatacgccgccgcagtggcgcgtgttccgtgacgggcgctatacgctggaagtcgatacccgctccggtacgccaacgctgatgctgtcgctggcggaacagcacactaccagtacgcagccgctgctgcgccagtgccccaaatgggatggtaaaccgctgacgctcgacgtcggccaaacgttcgctgaaggaagccaggtccgcgatttttatagcggtaatatcgccacggtgaaagcgggcaaaatcacgctgcggcccgccgctggtagtaatgggctcctgctgcttgaacaagcgaatagcgccgccagcgcgccgtttaactggcacaacgccacgatctattttgtcctgaccgatcgcttcgtcaacggcaatccggccaacgacaacagctacgggcgccataaagacggtatgcaggagataggcaccttccacggcggcgatttacaagggctgaccagcaagctggattatcttcaacagcttggcgtcaacgcgctatggataagttcaccgctggagcaaattcacggctgggtcggcggcggcaccaaaggcgactttccccactacgcctatcacggttactacacccaggactggacccgtcttgacgccaacatgggtgacgaagccgatcttcggcaactggttgatgaggcccatcggcgcggtatacgcgtgctgtttgatatcgtcatgaatcacgccggttacgccacgctcgccgatatgcaggaatttcacttcggttcgttgtacctgaaaggcgatgaactgaaaaaaacgcttggcgagcgctggaccgattgggaaccggcgtcggggcaaagctggcacagcttcaatgattacatcaacttcagcgataaagcaggctgggaacaatggtgggggaaaaaatggatccgcaccgatatcggcgactacgacaatccgggtttcgacgatttcaccatgtcgctggcgttcctgccggacctgaaaaccgaatcgacgatcccttctggcctgccaaatttctatcgtcacaagccagataccgccgccaaagagatagccggctacacgccgcgggactatctgacccactggcttagccaatgggtacgcgactacgggattgacggtttccgcgtcgataccgcgaaacacgtcgaaccggacgcctggcagcagctcaaaacgcaggccacggccgcgctggcggaatggaaaaaagcgaatccgcagaaagcgctggatgatgcgccattctggatgaccggcgaggcctggggtcacggcgtaatgcaaagcgactactatcgccacggcttcgacgcgatgattaatttcgattatcaggatcaagcggcgaaagcagcaaactgtcttgcaaacatggacgccacctggcagcagatggcggacaagctgcagggtttcaacgtgctgagctatctctcctcgcacgatacccgcctgttccgcgaaggcggcagccgggcggcggaactgttattactcgcgccaggcgccgtgcaactcttctatggcgatgaatcttcgcgcccgttcggccccacgggctccgacccgctgcagggtacccgctccgatatgaactggcaggatgttgccggcagcgcatccgataatgtcgcgcactggcaaaaaatcgcccaattccgcgcccgccatccggccattggtatgggtaaacaacagacgctgacgctagagcagggctatggtttcgtgcgtgaaagcagcgctgataaagtgatggttgtctgggccggacagcaatag

SEQ ID NO: 105967 - DNA, 1257 bp, Enterobacter aerogenes
atgacattttcacttttcggcgacaaattcacccgtcattcaggcatcacccgcctgatggaagacctcaatgacggcctgcgcacaccgggcgcgatcatgctgggcggcggcaaccccgcgcaaatcccggagatgaatgaatacttcaatagcctgctggccgatatgctggataacggcaaagcccttgatgcgctttgcaattatgatggtccgcaagggaaaagcgagcttctgaccctgcttgcgcaaatgctgcgcgaagaattaggttgggagatcgaaccacagaatattgctctaacaaatggcagccagagtgcatttttctacttatttaacctgtttgccggccgccgtgccgacggcaccacccgcaaagtgctgttcccgctgacgccagaatatatcggctacgccgattccgggctggaagaggatctgtttgtcgccacccgtcccaacattgagctgctgccggaaggccagtttaagtatcacgtggacttcgaacatctgcagatcaccgaagagacggggatgatctgcgtctcccggccaaccaacccgaccggcaacgtcattaccgacgaagagcttattaagctggatgccctcgccaatcagcacggcgtcccgctggttattgataacgcctatggcgtgcctttcccgggtattatttttagcgaagcgcgcccgctgtggaatccgaacatcgtgctgtgcatgagcttatccaagctcggcctgccgggcacgcgctgcggcattatcatcgccaacgagaaaatcattaccgccatcagcaatatgaacggcattatcagcctcgctccgggcggcattggtccggcaatgatgtgcgaaatgattaagcgtaaagacctgctgcgtctgtcggagacggtgattaaaccgttctattatcagcgtgttcaggaaactatcgctaccattcgccgctatttgccggaagaacgctgcctgattcataaaccggaaggggcgattttcctctggctgtggtttaaggatctgccgatctccaccgagctgctgtatcagcgcctgaaacaacgcggtgtgctgatggtgccgggcgattacttcttcccggggctggacaagccgtggccgcatacgcatcagtgcatgcgcatgaactacgtgccggacccggagaaaatcgaggcgggagtgaaaattcttgccgaagagattgagcgcgcctggcaggagcaagacgcctga

SEQ ID NO: 105968 - DNA, 489 bp, Enterobacter aerogenes
atgaaccggtttattatcgccgatgcgcaaaagtgtatcggctgccgaacctgcgaggtggcctgcgtggtgtcgcatcagcaggatcaagattgttctaccgtttctgcaagacgctttgcgccgcggattcgggtggttaagagcgatgagctatcaacggcgacgctgtgccgtcagtgcgaggatgcgccctgcgcgaacgtctgcccggaaggggcaatacgccatgaaggcgacgtctggcgagtcgatcaacgcctgtgcattggttgtaaaagctgtatggtggcgtgcccttatggggcgatgacggtgatgttgaccgacgaaggcgtgcaggcgctgaagtgcgatctgtgcgcgcaccggcaaacggggccggcgtgcgtagcggcctgtccgactcaggcgctgcgctgtattgagcccgccgagctggaaagattaagcgccgagcgccgccgttgggcggcgcaggcaatgtaa

SEQ ID NO: 105969 - DNA, 1152 bp, Enterobacter aerogenes
atggctgcatcgactttttatattccgccagtaaacgttattggcgctggttctgttactgaagcgatgaatactatccagcaatacggatatcgtcgggcattaattgtcaccgacgcgatgctgaataaattaggtatggcgggtgaagtacaaaaggcgttacaggagcgggatattttcagcgtggtgtatgacggcgtgcacccgaacccgacgactctgaacgtcgaaagcggtctggcgctgctgaaagagaataactgcgactgcgtgatttccctgggcggcggttccccgcacgattgcgcgaaaggtatcgcgctggtcgcggcaaatggcggaaacatccgtgactatgaaggggtggaccgttcggcaaaaccgcaattgccgatgatcgctatcaataccaccgccggtacggcttccgaaatgacccgcttctgcatcattaccgatgtcgatcgccacatcaaaatggcgattgtcgataagcacgtgacgccggttctgtcggttaacgactcctcgctgatgatggggatgccgaaatcgctgaccgccgccaccggtatggacgcgttgactcacgctatcgaagcctatgtttctatcgcggcgacgccgatcaccgatgcctgcgcgttgaaagcgatgaccatgatttcgcagaatttaactcacgcagtggaagatggcggcaatgaacaggcgcgtgaagcgatggcctatgcgcagttccttgccggtatggccttcaacaacgcgtcgctgggctacgtccacgcaatggcgcaccagctgggcggcttctacgatctgccgcacggcgtctgcaacgccgtactgctgccgtttgtgcaggagtacaactgcagcgtcgccgccgcgcgtctgcgtgactgcgcgcaggcaatgggcgtgaacgttgccgggctgaacgataagcagggcgcggaagcctgcatcgcggctatccgcgagctggcgcgtaaagtcggcatcccggccggtctgcgcgatctgaacgttaaagaagaggatatcccgctgctggccagcaacgcgctgaaagatgcctgcggtttaaccaatccgattcaggcgactcacgaagaaatcatggcgattttccgcgccgcgatgtaa

SEQ ID NO: 105970 - DNA, 1860 bp, Enterobacter aerogenes
atgattattgccaccgccggacatgtggaccacggcaaaaccacgctgctgcaggcgattaccggcgtcaacgccgatcgtctgccggaagagaaatcacgcggtatgactatcgatctcggctacgcctattggccgcagcctgatggccgggtgttgggttttatcgatgtgccggggcatgaaaagtttttgtccaacatgttggccggcgtgggcgggatcgatcacgcgctgctggtggtggcctgcgatgacggcgtgatggcgcaaacccgcgagcacctggcaattctgcagttaacgggaaaaccgacgttaaccgttgcgttgaccaaaacggaccgcgtggacgcggcgcgggttgccgaagtccgggcacaggtggaatccacgctgagcgagctggggttcgacgacgtggctttcttcgccaccgcggcgacggaaaacctcagcattgccgaactgcgcagccatttgctccagctgaccgagcgcgcgcatccgcaacagcagcgttttcgtctggcgctggatcgcgcctttaccgttaagggcgcggggctggtggtgaccgggacggcgttatccggcgaggtaaaaatcggcgataccctctggctgaccggcgccaataaacccatgcgcgtccgcgggctacatgcgcagaatcagccggttgaacaggcgcgggccgggcagcgtatcgcgttgaacatcgtcggcgacgcgcaaaaagaggatctcagccgcggcgactggctgctctcggcgcagcccgcagaaccttgcgagcgggcgatcgtcgagctcacctgtcacgcgccgctcagccagtggcagtcgctgcatatccaccatgccgccagtcatatcactggccgcgtttcgttactggaaggcaatctggccgagctggtgctggatacgccgctgtggctggcggataacgatcgtctggtgttgcgcgatatctccgctcgtttgacgctggccggcgcgcgggtggtgacgctgaatccgccgcgccgcggtaaacgcaagccggagtatctgcaatggctttacacgctggcggcagcgcagggcgacgatgcgcaggcgttggatattcatctgcagcgcgatgcggtgcgtcttgacgagtttgcctgggcgcggcagctgagcgccgacggcctgacggcattaattaaccgtccggactacctgcaggccgggaatagcctgcttagtgcgccgctggccgcccgctggcagaaaaaactgctcgacgcgctggcccgttatcacgaccagcatcgcgatgagccggggccggggcgtgaacgtctgcggcggattgcgctgccgatggaagatgaagcgctggtgctgttgttgattgaacagatgcgcagcagcggcgtcattcaaagccatcacggctggctgcacctgccggaacataaagccgggtttaccgatgagcagcaggccatctggcagcgtgcggaatcgctcttcgccgatgagccatggtgggtgcgcgatctggcgcgcgatctgaacgtcgaagagtcgttgatgcgcgcggtgctgcgccaggcggcgcagcaggggatgattacggcgatcgtgaaagatcgttattatcgcaacgatcggattgttgaatttgcgcaattgatccgccgcctggatctgcagcgtggttccacctgcgcggcggattttcgcgatacgctgaatattggccgtaaactggcgattcaaattctcgaatatttcgaccgcattggctttacccgccgtcggggcaacgatcatctacttcgcgatgcgctgttattccctgaaaataaaaacggcgaataa

SEQ ID NO: 105971 - DNA, 1389 bp, Enterobacter aerogenes
atgtctaccgatactcgcgcgctttatacccggcttccggccattgaccgtttacttcgcgatcccgcttttgctttactgctcgatcgccatggccattcgcaaatcgtggcgcttctgcgccagatgttggatgaggcgcggaaacatatccgccaggcgcaggcattgccagagtggtgcgacgactggccgcaggagaccgccagccggctgaaccatagtcagcagagcgcgctgcgtccggtattcaacctgacgggcaccctgctgcacaccaatctggggcgcgctatccaggcggaagccgcggtgcaggcggtggcgcaggcgatgcgcgcggcggtcacgctggaatacgatctcgacgatgccgggcgcggtcatcgcgaccgggcgctggccgatctgctgtgtcggatcaccggcgcggaagatgcctgtatcgtcaataacaacgcggcggcggtgctgctgatgctggcggcgacggccagcgggaaagaagtggtggtttcgcgcggcgaactggtcgagatcggcggcgcatttcgcatccccgacgtcatgcgccaggccggttgtctgctgcatgaagtgggcaccactaaccgcacccacgccaaagattattgtcaggctatcaatgagcagactgcgctgctgatgaaagtgcataccagcaactacagcattgaaggctttaccaaagcggttgatgaggcggagctggcggaaattggccgcgaatatggcgtgccggtggtggccgatctcggcagcggttcgctggtggatttgagccagtacggtttgccgaaagaaccgatgccgcaggaactgattgccgcgggcgtgaacctggtgagcttttccggcgataagctgctcggcggaccgcaggcggggattatcgttggcgacagggcgctgatcgctaagttacagagtcatccgcttaagcgtgcgctgcgggcggataaaatgacgctggcggcgctggaggcgactctgcggctgtatctacatccggaggcgctggccgacgagctgccgacgctgcgcctgctaacccgccgcgccgaagatattcgccagcagggcgagcgcattcagcctcggctggcggcgcactatagcgattttgacgtgcgcgtcgaagcgtgtttatcgcaaatcggcagcgggtcgttgccggtcgaccgactgcccagcgccgcgttaacctttacgccgcgcgatggtcgcggcagccagctggaagcgctggccgcccgctggcgcgccttgccgataccgacgatcggcagaatttatgatggccgcttatggctggatctgcgctgtcttgaagatgaaccccggtttatggagatgttattgagatga

SEQ ID NO: 105972 - DNA, 609 bp, Enterobacter aerogenes
atgaaactgatcggcagctataccagtccttttgtacgcaaaatttccgttatcttgctggaaaaggcgatccccttcgagtttgtgaacgaattcccctataacgacgtcaacggtgtggcgcagtacaacccgctgggaaaagtcccggcgttgctgaccgatgacggcgcgtgctggtttgattcgcccattattgcgcaatatctggaactgctaaacgtcgcgccggcgatgctgcccgcggaacctctggcggcgctgaagatgcgccaactggaagccttgtctgacggcatcatggaggcggcgatcgcactggtgcgggaaaaagcgcgtccggcggcccagcagtcagaaaccgaactgctccgccagcgggaaaaaatcgctcgcggccttgatatgttggaagggtacgccgccgacggtaccttgcgtcacggtgagctgaatctggcgaccattactgccgcctgcgctattgcttatctgaattttcgtcgcgtggcgcccggctggtgcgcgacgcggccaaaactggtcaaactggtcgagacgttgtttcagcgatccagttttgcccgtaccgaaccgccagggagttga

SEQ ID NO: 105973 - DNA, 606 bp, Enterobacter aerogenes
gtgaaagcctcggttgccgagcaggcgcagattcagagccagctggatagcacgctgaatggcgaacagtcgcaggtggtgagcctgcgcgcgcagttggcggaagcgaaatataacctcgatcagaccaccgtccgggcgccgagcgatggctacattacccaggtgctgattcgcccgggaacctacgccgcgtcgctgccgctgcgcccggtgatggtctttattccgcaacagaaacggctaattgtcgcccagttccgccagaactcgttgctcaggctggaggccggcgatgatgccgaagcggtgtttaacgccctgccaggtcaggtattccacggtaaactggtcaacgtattgccggtggtgccgggcgggacttatcaggcgcagggttcgctgcaatcgctgagcgtcacgccgggtagcgatggcgtgctggcgacaattgaactggatcccgatgcgcaggtcgatgcgctgcccgacggcatctacgcccaagtggcggtctattccgaccatttcacccacgtgtcggtgatgagaaaagtgctgctgcgcatgaccagctggatgcactacctctatctcgatcattaa

SEQ ID NO: 105974 - DNA, 786 bp, Enterobacter aerogenes
atggacctgttgatcattttgacgtacgtggccattgcgtggtcggtatttaaaatattccgtattccggtaaataaatggacggtcccgaccgcggccctgggcggcgtatttattgttagcgcgcttattttattaatgaactataaccacccttatacttttactgcgcagaaagcggttatttctattcctattacgccgcaggttaccggcattgttagcagcgtgaccgataaagccaaccagcgggtgaaaaagggcgaggtactagttactatcggcccggcgcgcaaccaggcgcgtgtcgacaggctgcaggccgatctggtcaccgctctgcacagtatcaataccctgaaagcccaactgcaggaagcgcaggcgaacaccgtgcgcgtctccgccgagcgcgaccggctgtataaagattatcagcgctatttgaaaggcagccaggcgcgggtcaacccattttcggaaagcgatatcgataatgcgcggcaaaactatcttgcccaggatgcgttggtgaaagcctcggttgccgagcaggcgcagattcagagccagctggatagcacgctgaatggcgaacagtcgcaggtggtgagcctgcgcgcgcagttggcggaagcgaaatataacctcgatcagaccaccgtccgggcgccgagcgatggctacattacccaggtgctgattcgcccgggaacctacgccgcgtcgctgccgctgcgcccggtgatggtctttattccgcaattcggaaagcgatatcgataa

SEQ ID NO: 105975 - DNA, 366 bp, Enterobacter aerogenes
atgtttctcaattattttgcgctgggcgttctaatcttcgttttcctggttattttttacgggattattattttgcacgatattccgtacctgattgcgaagaaacgtaatcatccgcactctgacgcaattcacgtcgcggggtgggtcagcctgtttacgctgcacgtaatatggccatttttatggatctgggccaccctctatcagccggagcgcggctggggaatgcagcataagccgaatgacgcagggactgatggcgctgacagcgagctggcgcagctcaatcagcgtatcgctgaactcgaacataaaatcgcgcatctgcagccgacagcgccgccatcctcaacggagaaataa

SEQ ID NO: 105976 - DNA, 1911 bp, Enterobacter aerogenes
atgtcatccgatatcaagatcaaggtgcaaagctttggtcgtttcctcagcaatatggtgatgccgaatatcggcgcgtttatcgcgtgggggattatcaccgcgttatttatcccaacagggtggttgccgaacgagacgctggcgaagctggtcggcccgatgatcacctacctgctgccgctactgatcggttataccggcggtaagttggttggcggtgaacgcggcggcgtcgtcggcgctatcaccaccatgggcgttatcgtcggcgcggatatgccgatgttcctcggctcaatgatcgccggcccgctcggtggctactgcattaagaaatttgacgcctgggtagacggtaagatcaaatccggtttcgaaatgctggtgaataacttctccgccggcatcatcgggatgatccttgccattctggcgttcctcggcatcggcccggcggttgaagtgctgtcaaaactgctggcggctggcgttaacttcatggtggcgcacgacatgctgccgctggcgtctatctttgttgaaccggcgaaaatcctgttcctcaataacgcgattaaccacggtatcttctcgccgctgggtattcagcagtcccatgagcttggcaaatccatcttcttcctgattgaagctaacccgggtccggggatgggcgttctgctggcgtacatgttctttggccgcggcagcgcgaagcagtctgcgggcggtgcggcaatcatccacttcctgggcggtatccacgaaatttacttcccgtacgtgctgatgaatccgcgtctgattctggccgttatcctcggcggtatgaccggtgtcttcaccctgactatcctcaacggcggcctggtttccccggcttccccgggttccattctggcggtactggcgatgacgccaaaaggcgcctacttcgctaacatcgcggccattattgcggcgatggcggtctcctttattgtctccgccatcctgctgaaaaccagcaaagtgaaagaagaagacgatatcgaagccgcaacccgtcgcatgcacgacatgaaagccgagtccaaaggcgcggcgacgccgttggcggcgggcgacgtggctaacgaccttagccacgtgcgtaaaatcatcgttgcctgcgacgccggtatgggttccagcgccatgggcgccggggtactgcgtaagaaagtccaggatgccggactgagcaatatctctgtcactaacagcgcgattaacaacctgccgccggatgtcgacctggtgatcacccaccgcgacctgaccgagcgcgccatgcgccaggtaccgcaggcacagcatatttcgctgaccaacttcctcgacagcggtctgtataccagcctgaccgagcgtctggtagcggcgcagcgccacatcgacaacgaagtaaaagtcaccgatagcctgaaagatagctttgataatactgacaaaaacctgttccagctgggtgcggataacatcttcctcgggcgcaaagcggcgaccaaagaagaggccattcgcttcgccggtgaacaattggtgaaaggcggatacgttgagccggaatacgtgcaggcgatgctcgaccgcgagaagctgacctcaacctatcttggcgaatctatcgcggtaccgcacggtaccattgaagcgaaagaccgggtactgaaaaccggcgtcgtcttctgccagtatccggaaggcgtgcgcttcggcgaagaagaagatgaagtcgcgcgtctggtcatcggtatcgccgcccgcaacaacgaacacattcacgttatcaccagcctgaccaacgcactggatgatgaaaccgtgattgagcggctggcgaaaaccaccagcgtcgaagaagtcctatcgttgctgaataaataa

SEQ ID NO: 105977 - DNA, 1149 bp, Enterobacter aerogenes
atgaaagcattacattttggcgcaggtaatatcggacgtggcttcattggcaaactgctggctgacgccggtatctcccttacgttcgccgatgttaatcaggtggtccttgatgccctgaatgcccgtcatagctatcaggtccacgtggtgggtgaaaacgaacaggttgataccgtctccggcgtgaatgccgtcagcagcattggcgatgaggtggtggatctgatcgccgatgtcgacctggtgaccaccgcggtcggccccgtcgttctggagcgtatcgcccctgccatcgccaaaggcctggtgaaacgtaaagcgcagggtattgaacgcccgctgaatatcatcgcctgcgaaaacatggtacgcggcaccagccagctgaaaggccatgtgtttaacgcgctggcggaagaggacaaagcgtgggttgaagcgcatatcggcttcgtcgactccgccgtagaccgcatcgtgccgccgtcggcttccgccacccacgatccgctggaagtcaccgttgaaaccttcagcgaatggattgtggataaaacccagtttaagggcgagctgccgaacatcccaggaatggaattaaccgataacctgatggcatttgtcgagcgtaagctattcaccttaaacaccgggcatgctataaccgcctacctcgggaaactggcgggccatcaaacgattcgcgacgcgattctcgatgagcacattcgcgccgtcgtgaaaggcgcaatggaagagagcggcgcggtgctgattaaacgctacagctttgatgcgcagaaacacgcggcttatatccagaagatcctcggtcgctttgagaacccgtatctgaaagatgatgtggagcgcgtcggccgccagccgctgcgtaaattgagcgcgggcgatcgtttgatcaagccgctgcttggcacgctggaatacggcctgccgcaccggaacctggtaaaagggattgccgcggccatgcatttccgcagcgaagacgatccgcaggctcaggaactggcggcgctgattgccgaaaaagggccacaggccgcgctggcgcagatttccggtctggatgcggcaagcgctgtagtggcggaagccgttaacgactacaacgcggtaaaatga

SEQ ID NO: 105978 - DNA, 600 bp, Enterobacter aerogenes
atgatgtacaacctggcgcggccgatgccgcgcccaataccactcctgtcagatatgcaggcaataatggaagaaacacaggcatttgaaaaccgcgtacttgagcgtttaaatgctggtaagaccgtaagaagtttcctgatagccgccgtcgaactcctgacggaggcggtcaatattctggtgcttcaggtattccgcaaagacgattacgcggtgaaatacgcagtggagccattgctggacggcagtgggccgctgggcgatctttccgtacgcctgaagcttatctacggccttggggtgataagccgcgccgaatacgaagatgccgagctattgatggccttgcgtgaagagctcaatcatgacggcaatgagtacgctttcaccgacgatgaaattctcgggccgttaggcgagctgcactgcgtcgccgcgcttccgccaacgccgctgtttgatgagagcgataaggaactgctggcaatgcagaaactgcgctaccagcagatggtacgttctacaatggtgttgtctctgactgagctgatttcccgaatcagcttaaaaaaagccttccagaaatcaacgctctga

SEQ ID NO: 105979 - DNA, 225 bp, Enterobacter aerogenes; identical to SEQ ID NO: 87597

SEQ ID NO: 105980 - DNA, 363 bp, Enterobacter aerogenes; identical to SEQ ID NO: 87596

SEQ ID NO: 105981 - DNA, 1656 bp, Enterobacter aerogenes
atgaacctctggcaacaaaattacgatccggctggtaatatctggctatcgagccttatcgcctcactgccgattctgtttttctttttcgccctgattaagctcaagcttaaaggctatatcgccgccacctggaccgtagccatcgcgctgcttgtcgccctgctgttctataaaatgccggtcgaccgcgccttatcgtcggtggtatacggcttcttctacggcctgtggcctatcgcgtggattatcatcgccgcggtcttcgtctataaaatctcggtgaagaccgggcagttcgacattatccgctcgtcgattctttcgattacaccggaccagcgcctgcagatgctgattgtcggcttctccttcggcgccttcctcgaaggggccgccggtttcggcgcgccggtggcgatcaccgccgcgctgctggtcgggctcggcttcaatccgctatacgccgccggactgtgcctgattgttaacaccgcgccggtggccttcggcgccatggggatcccgattctggtcgccggccaggtgaccggcatcgatagcttcgccatcggccagatggttggccgccaactgccgttcctgaccattatcgtgctgttctggatcatggcgattatggacggctggcgcggggtgaaagagacgtggcctgcggtgatggtcgcaggcggctcgttcgctatcgcgcagtacctcagctctaacttcctcggcccggaactgccggacatcatctcttcgctggtgtcgctggtatgcctgacgctgttcctcaagcgctggcagccggtacgtatcttccgctttggcgatatgggcgccgcgcaggttgatcaaacgctggcgcgcacgcattacaccgccggtcaggtcattcgcgcctggtcgccgttcctgttcctcaccgccaccgtcaccctgtggagcgtaccgccgtttaaagcgctgtttgcgccgggcggggcgatgtatgacttcgtggttaacatcccggtaccgttcctcgacaaaatggtcgcccgtatgccgccggtggtgagcgccgcgacgccgtacgccgcggtgtacaaattcgactggctgtcggcgaccggcaccgccatcctgttcgccgctatactgtctatcgtctggttgcgtatgaagccaaaggatgcgctgaccaccttcgccgggacgttgaaagagctggcgctgccgatttactccatcggtatggtgctggcgttcgcctttatttcaaactactccgggctgtcatcgacgctggcgttggcgctggcgcataccggccacgcgtttaccttcttctcgccgttcctcggctggctgggggttttcctgaccggttcggatacctcgtctaacgcgctattcgccgcgctgcaggcgacggcagcccagcaaatcggcgtctccgatattctgctggtcgccgcgaataccaccggtggggtgacaggcaagatgatttcgccacagtcgatcgccattgcctgcgccgcggtaggcctggtgggtaaagagtcggacctgttccgctttaccgtcaagcacagcctgatattcacctgcatggtgggcctgattaccaccctgcaggcttatgtcttaacctggatgattccgtga

SEQ ID NO: 105982 - DNA, 774 bp, Enterobacter aerogenes
gtgaaagtgatgccaaaacgcctggctgacgacgtcgcaaatcgcgtccgggcgctgatagaagaacaacagctggaggcgggcatgcgtttgcccgccgagcgccagcttgccgtccagctcggtgtttcacgcaattcgctgcgtgaagcgctggcgatgctggtcaacgaaggggtgctacttagccgtcgcggcggcggcaccttcgtgcgctggcagcacgagccctggtcggagcaaaacatcgtccagccgctgaaaacgctgctcgccgacgaccccgactacagttttgatattctcgaagcccgccacgctattgaagccagcaccgcctggcatgcggcgatgcgggccaccgacgccgaaaaagaaaaaatccgcctctgttttgaagccaccctcagcgatgacccggatctcgcctcacaggcggatgttcgcttccacctggcgatcgctgaagcctcacataatgtggtgctgctgcaaaccatgcgcggtttcttcgagcttctgcaatcctcggtgaagcagagccgccagcgcatgtatctggtgccgccggtgttcgcgcgtctgaccgaacaacatcaggcggtaatggaagcgatattcgccggcgacgcggaaggcgcccgccaggcgatgatggcccacctcggttttgtccacgccaccattaaacgttttgatgaagaccaggcccgccaggcgcgtattacccgcctgcccggtgaccacaatgaaaattccagggagaactcgtga

SEQ ID NO: 105983 - DNA, 1185 bp, Enterobacter aerogenes
atgattatttccgccgccagcgactatcgcgccgccgcacagcgtatcctgccaccatttctgttccactatatcgacggcggcgcctacgccgaacataccctgcgccgcaacgttgaagacctctccgacgtggcgctacgccagcgcattctgcgcaatatgtcggatctgagcctggagaccacgttattcaacgaaaagctggcgatgccaacggcgctggcgccggtcgggctgtgcggtatgtacgcgcgccgcggcgaagtgcaggcagcgggcgcggcggacgacaaaggcatcccgtttaccctctctaccgtttctgtttgcccgattgaagaggtcgccccgaccatcaaacgcccgatgtggttccagctgtatgtcctgcgcgatcgcggatttatgcgcaatgcgctggagcgcgccaaagccgcaggctgctccacgctggtctttaccgtggatatgccgacccccggcgcgcgctatcgcgacgcccattctggcatgagcggcccaaacgccgccatgcgccgctactggcaggccgtcactcatccgcagtgggcatgggacgtcggtctcaacggccgcccgcacgacctgggcaatatctccgcctacctcggcaaaccgaccgggcttgaggattacatcggctggctggcgaataatttcgatccgtcgatttcgtggaaagacctggagtggatccgcgacttctgggacggcccgatggtgatcaaagggatcctcgacccggaggacgcccgcgatgcggtgcgcttcggcgctgacggcattgtcgtctccaaccacggcggccgccagcttgacggcgtgctctcttccgcccgcgccctgcccgccattgccgatgcggttaaaggcgacatcactattctcgccgacagcggcatccgcaacggtctcgacgtggtgcggatgatcgcccttggcgccgacagcgtgctgctgggccgcgcgtatctgtacgcgctggcgacccacggcaagcagggggtggcgaatctgctcaaccttatcgagaaagagatgaaagtggcgatgacgctgaccggggcgaaatccatcagcgaaatcagccgcgattcgctggtgcaaaatgccgaagcgctgcagacctttgatgcgctcaagcagggtaacgccgcgtaa

SEQ ID NO: 105984 - DNA, 474 bp, Enterobacter aerogenes
atgctgaacatcgtgttattcgaaccagaaatcccgccgaacaccggcaatatcatccgcctgtgcgccaacaccggcttcaatttacatatcattgagccaatgggctttacctgggacgataaacgtctgagacgcgccgggttggattatcacgagttcaccgccgtacagcgccacgcggattatgcggcgtttatcgccagcgcgaagccgcagcgcctgttcgccctcaccaccaaaggcacgcccgcccacagcgcggtaagctatcaggatggtgatttcttgatgtttggtccggaaacgcgcggcctgccggccagcatcctcgatgccctaccggcggagcaaaaaatccgtattccgatgatgccggacagccgcagcatgaacctgtcaaacgcggtgtcggtggtggtgtatgaagcctggcgccagttgggatacccgggcgccgtgttacgcagctaa

SEQ ID NO: 105985 - DNA, 822 bp, Enterobacter aerogenes
atgccgtgtgaagaactggatatcgtctggaacaatattaaagccgaagcccgggctttggccgactgtgagccgatgctcgccagtttttaccacgcaacgctactcaagcacgaaaatctgggcagcgccctgagctatatgctggcgaataagctggcctcgccgattatgcctgctatcgctattcgcgaagtggtggaagaggcttatgccgcagacccggagatgatcgcttccgccgcctgtgatatccaggcggtacgtacccgtgaccctgcggtcgataaatactcaacgccgctgttgtacctgaaaggcttccatgcgctgcaggcctatcgtatcggccactggctgtggaatcagggtcgccgcgcgctggctattttcctgcagaaccaggtttccgtctcgttccaggtcgatattcatccggcggcgaagattggccgtgggatcatgctcgaccacgccaccggtatcgtggtcggtgaaacggcggtgattgaagacgacgtatccatcctgcagtctgtgaccctcggcggtaccggtaaaaccagcggcgaccgtcacccgaaaattcgcgaaggcgtgatgattggcgccggggcgaagatcctcggcaatatcgaagtcgggcgcggggcgaagattggcgccggttccgtggtgctacaacctgtgccgccgcataccaccgccgcaggcgtaccggcgcgcatcgtcggcaagccggagagcgacaagccagcgatggatatggatcagcattttaatgggattcaccatactttcgagtacggcgacgggatttga

SEQ ID NO: 105986 - DNA, 1020 bp, Enterobacter aerogenes
atgaacgcgcttaatgctgcaatgactgtgatcggtgccggctcttacggcaccgctcttgccatcaccctggcaagaaatggccacgaggttgtcctctggggccatgacccgaaacatatcgcgacgctgcaacacgatcgctgcaacgccgcgttccttcccgatgtgcccttcccggacacgctgcgccttgagagcgatttagcgacggcgctggccgccagccgcgatatcctcgtggtggtgccgagccacgtcttcggtcaggttttgcgccagattaaaccgctgatgcgttcagatgcgcgtctggtgtgggcgacgaaaggcctggaggccgaaactggccgtctgctgcaggacgtggcgcgtgaagcgctgggcgatgacatcccattagcggtcatctccggtccgactttcgccaaagagctggccgccggcctgccgacggcgatttctctggcggcgacggatccgcagtttgcggaagaccttcagcgcctgctgcactgcggtaaaagcttccgcgtctacatcaacccggactttatcggcgtgcagctgggcggcgcggtgaaaaacgttatcgccatcggcgccgggatgtctgacggtatcggctttggcgcgaatgcacgtacggcgttgatcacccgtggtctggtggaaatgtcccgtctcggggcggcgctgggcgccgatccggaaaccttcatgggcatggccgggttgggcgacctggtactgacttgtaccgataaccaatcgcgaaaccgccgttttggcatgatgctcggacagggcatggacgtgcaaagcgcgcaggacaagattggccaggtggttgaaggctatcgcaataccaaagaggttcgcgttctggcgcagcgtttaggcgtcgaaatgccaataaccgaggaaatttatcaggtattgtattgcggaaaaattgcgcgcgaggcagcattgaccttattgggtcgcgcacgcaaggacgaacgcagcgccaactag

SEQ ID NO: 105987 - DNA, 468 bp, Enterobacter aerogenes
atgtcagaacaaaacagcaccgaaatgactttccagattcagcgcatctacaccaaagacgtttccttcgaagcgccaaatgcgccgcaagttttccagaaagattggcagccggaagttaaacttgatctggataccgcttccagccagctggctgaaggcgtttatgaagtggtgctgcgtgtcaccgtaacggcatcgctgggcgaagaaaccgcattcctgtgcgaagtacagcagggcggcatcttctccatcgacggcatcgatggcaaccagatggcgcactgcctcggcgcgtactgcccgaacattctgttcccgtacgctcgcgagactgttaccagcctggtttcccgcggcaccttcccgcaactcaaccttgcgccggtgaactttgacgcgctgtttatgaactatctgcaacagcaggctggcgaaggtgctgaacaacatcaggatgcctga

SEQ ID NO: 105988 - DNA, 252 bp, Enterobacter aerogenes
atggccaatattgagatctataccaaagcgacctgcccgttctgcatccgcgccaaagcgctgctgaacagcaagggcgtgacgttcaacgaactgcctatcgatggcgatgccgcaaagcgtgaagagatgatccagcgcagcggccggacgacggttccgcagatttttattgatgcgcagcacattggcggctgtgacgacttgtatgcgcttgattcacgtggtggacttgatcccctcttgcgctaa

SEQ ID NO: 105989 - DNA, 432 bp, Enterobacter aerogenes
atgcaagaaattatgcaattcatcggccgtcacccggtcctgagcatcgcgtggatcgcgctgctgggtgcggtactgttcaccacctttaagggcttgatgtcgaaagttaaagtcatcacccgtggtgaagcgacgcgtcttatcaacaaagaagaagccgttgttgtcgacctgcgtcagcgtgacgacttccgtaaaggccatatcgccggcgctatcaacctgctgcctgccgatatcaaagcaaataacgtcggcgagttggaaaaacacaaagcacaacccattattgttgtggatgggtccggcatgcaggcgcaagaacctgccagcctgctgaataaagccggattcgaaaaagtctttgtactgaaagaaggcatcgcaggctggagcggcgagaaccttccgctggtacgcggcaaataa

SEQ ID NO: 105990 - DNA, 1545 bp, Enterobacter aerogenes
atgtcggttactaaaaaacctatggtactggtgattctggatggctacggctaccgtgaagaccagcaggataacgccatttatagcgcgaaaacgccggtaatggacgcactgtgggcaaaacgcccgcacaccctgattgatgcatccggtctggaagtcggcctgcctgaccgccagatgggtaactccgaagtgggccacgttaacctcggcgcgggccgtatcgtgtatcaggatctgacccgtctggacgttgaaatcaaagaacgcaccttctttgccaacccggtgctgaccggcgcggtcgacaaagccgtcgccgccggtaaagcggtacacatcatgggcctgatgtcgcctggcggcgttcacagccacgaagaccacatcatggcgatggtagaactggccgcggaacgcggcgcagagaaaatctatctgcacgctttcctcgatggccgcgacacgccgccgcgcagcgctgaagccacgctggctaaattcgaagctaaattcaccgcgctgggcaaaggccgtatcgcctctatcattggccgctactacgccatggaccgcgacaaccgctgggatcgcgtagagcaagcctatgacctgatgacactggccaaaggcgaattccaggccgacaccgccgtggcgggcctgcaggcagcctacgcgcgtgacgaaaacgacgagttcgtcaaagcgaccgttatccgcgccgccggccaggccgatgccgcaatggaagacggcgacgcgctgatcttcatgaacttccgcgctgaccgcgcgcgcgaaatcacccgcgccttcgttaacgccgacttcgacggcttcgcgcgtaagaaagtggttaacctcgatttcgtgatgctgaccgaatacgccgccgacatcaaagtcgcttgcgcttatccaccagcttcactggtgaatactttcggcgagtggatggcgaagcacgacaaaacccagctgcgcatctccgaaaccgagaaatatgcgcacgtgaccttcttctttaacggcggggtagaaaatccgttcaaaggcgaagaccgtattctgattaactcgccgaaggtcgccacttacgacctgcagccggaaatgagctccgccgagctgaccgagaaactggttgcggccatcaaaggcggtcagtatgacaccatcatctgcaactacccgaacggcgatatggtaggccataccggggtgatggaagccgccgtgaaagcggttgaagcgctggatcactgcattgagcaagtggccgcggccgttgaatccgtcggtggccagctgctgatcaccgccgaccacggcaacgccgaacagatgcgcgatccggcgaccggacaggcgcacaccgcgcatactaacctgccggttccgctgatctacgttggcgacaaaacggtgaaagtggccgaaggcggcaagctttccgacatcgcgccaaccatgctgtcgctgatgggaatggaaatcccgcaagagatgactggcaagccgctgttcatcgtggaataa

SEQ ID NO: 105991 - DNA, 1272 bp, Enterobacter aerogenes
atgaggggaaaggcgacttattcaaatacatggatcgcaacggctgttcgatccgttctttacgccagcgcgcttagcgctggcgtattgctgtgcgccgcatccgctcacgccgatgaccgcgaccagctgaaatccattcaggccgatatcgccgccaaacagcgcgcgattaagcaacagcagcagcaacgcgcctccctgctcgcccagttaaaagcgcaggaagaggccatttccgccgccgcgcgcaaactgcgtgaaactcaggatactctcaatcagctcaataagcagattgacgacatgaacgcgtctatcgctaagctggagcgccagcgcgcctcccaggaacggaatctcgccgcgcagctcgacgccgcgttccgccaggggccgcacaccggcatgcagatgatcctcagtggtgaagaggggcagcgtaaccagcgcctgcaggcctattttggttactttaaccaggcccgtcaggaaaccatcgcccagctcaagcagacgcgcgaagaagtcgcggtgcagaaatcgatgctggaagaaaaacaaagccagcagcaaacgctggtttacgagcaaaaagcgcagcaggccaagcttgagcaggcgcgcaacgagcgtaaaaagacgctctccagcctcgaatcctccattcagaaaggccaacagcagctcagcgaactgcgcgctaacgaatcgcgcctgcgcggccgcatcgcccaggcggaagcggcagccaaagcccgcgccgaccgcgaggctcgtgatgcccaggcggtacgtgaccgccagcaggaggcctcgcgcaaaggcaccacctataaaccaaccgaaagcgaacgttcgctgatgtcgcgaaccggcggcctcggcgcgccgcgcgggcaggccttctggccggtacgcggaacaattcttcatcgttatggcgaacagctgcaaggtgaactacgttggaaagggatggttatcgctgcgtctgaaggcaccgaagtcaaagccattgccgatggccgggtgatcctcgccgactggctacagggctacggcctggtggtggtcgttgaacacggcaaaggcgacatgagtctttacggctataaccaaagcgcgctggtcagcgtcggtacccaggtccgcgcgggccaggctatcgcgctggtaggcagtagcggcggtcagggtcgtccgtcgctctatttcgaaattcgccgccagggtcaggcggtcaatccacagccgtggttgggaagataa

SEQ ID NO: 105992 - DNA, 933 bp, Enterobacter aerogenes
atgattgcacttgctgtagccggttcactggctatagctgcgccggtttttgccggtaaactctccatcgttatcgatgatttcggctaccgtccgcagacggaaaataaggtactggcgctgccgcctaccatctccgtcgccgtactaccgaatgccccccacgcccgggaaatggccactaaagcgcataatctgggccatgaagtgctgatccatctgccgatggcgccgctcagcaagcaaccgctggaaaaagacacgctgcgcccggatatgagcagcgatgagatcgaacgtattatccgtgaggcttacgggaaagtgccttacgccgtcgggctgaataaccacatgggtagcgccatgacctcaaacctgttcggcatgcaaaaggtgatgcaggcgctggaacgctacaatctctattttctcgatagcgtgaccatcggcaacacccaggccatgcgcgccgcccagggtaccggcgtgaaggtgattaaacgcaaagtgtttctcgacgacacccagaacgaggcggacatccgcactcagttcaatcgcgccatcgcactggcgcggcgtaatggttcggcgatcgccattggtcacccacacccttcaacggtgcgggtactacagcaaatggtctataacctgccgccggatatcacgctggtgcgcccgagcagcctgctgaacgaaccgcaggtcgacaactcgacgccgaacacgcccgtccaaccaaacgcgccgcaacagcagaagccgcgtaacccgttccatggcgtgaagtactgcaaaccgaagcgtccgctggagccggtgaacgccagccgcttctttagcatcctcagcgaaagcatcagccagagcgcgctggtccagtattaccagttgaaatggcagggctgggacagccccaccaactaa

SEQ ID NO: 105993 - DNA, 792 bp, Enterobacter aerogenes
atgtttaaactctcagtatgcttgctgacctgtaattcggcccgcttattacgggaagtattgccgccgttgttgcgggtggcagatgagtttattgtcgttgattccggcagtatggatgaaacgctacagatatgtcagcagtttggcttaacggttcaccatcacccctatgccgcccacggcatgcagatgaactatgcgacctcgctggcgactcatgactgggtgctgtgcatggatagcgacgaaatcctcgatgatgaagtggttgcggcgattctggcgcttaaggcgggagaggagccggatccgagctgtgcgtggcgcctgccgcgctactggttcgtgcttggcgaacaggtgcggaccatctatcccatctcatcgccggattacccggtacgtctgttcaaccgtcagcgggccagttttaaccagcgtccggtagacgatcaggtggtcggccatctgacctcgaccaggctgccgggctttgtccgccacgataccttctattcactgcatgaagtgtttaacaagctcaacagctataccacccggctggtgaagatgcagaaggtcaggccgtcgctcagccgcgggattatcagcgccatcggtgcgttttttaagtggtatttattcagcggcgcctggcgtagcggcaaggtgggggccgtaaccggtttgtacgccaccttgtacagcttcatgaagtattttaaagcctggtatgcctacaatggtaagcagcagggaaccgtgacggagaagcgcacggatccctga

SEQ ID NO: 105994 - DNA, 729 bp, Enterobacter aerogenes; identical to SEQ ID NO: 87582

SEQ ID NO: 105995 - DNA, 1026 bp, Enterobacter aerogenes
atgaaagcgttatccaaactgaaagcggaagaaggcatctggatgaccgacgtaccggaaccggaagtcggccataacgatctgctgattaaaatccgtaagaccgcgatttgcggtaccgacgtgcacatctataactgggacgaatggtcgcagaaaaccattccggttccgatggtggtggggcatgagtacgttggcgaagtcgtgggtatcggtcaggaagttcgcggctttaagcttggcgatcgcgtttccggcgaagggcatatcacctgcggacattgccgcaactgccgtggcggtcgtacccatctgtgccgtaataccatcggcgtgggggtaaaccgcccgggctgtttcgctgaatatctggtgatcccggccttcaacgctttcaaaatcccggataatatctccgacgacttggcatccatcttcgacccgttcggcaacgctgtgcataccgcgctttccttcgacctggtcggtgaagatgttctggtttccggcgctggcccgatcggcgtgatggccgcggcggtggcgaaacatgtcggcgcgcgtaacgtggtgattaccgatgttaacgaatatcgtctggagctggcgcgtaaaatgggcgtcacccgcgcggttaacgtcgctaaagagaatcttaacgacgtgatggccgagctggggatgaccgaaggcttcgacgtggggctggagatgtccggcgcgccgccggcgtttcgtaccatgctcgataccatgaaccacggcggacgtattgcgatgctgggtattcctccgtcggatatgtctatcgactggaccaaggtcatcttcaaagggctgtttatcaaagggatttacggccgcgaaatgtttgaaacctggtataagatggcggcgttgatccagtctggcctcgatctttcgccgattatcacccaccgtttcggtattgatgacttccagaaaggctttgacgcgatgcgttccggccagtctggtaaagtggtgctgagctgggattaa

SEQ ID NO: 105996 - DNA, 1194 bp, Enterobacter aerogenes
atgcgtggtgatttctataaacagttaaccaatgacctggataccgcgcgcgcggaagggttgtttaaagaagagcgtatcattacttcggctcagcaggcggacatcaccgtcggcgacagccacgtcattaacttctgcgccaacaactatctgggcctggcgaaccacccggaactgatcgccgcggcgaaatccggcatggacagccacggcttcgggatggcctcggtgcgcttcatctgcggtacccaggacacgcataagcagcttgagaaaaaactggcggatttcctcggtatggaagacgcgattctctactcctcttgctttgatgccaacggcggcctgtttgaaacgctgctggggccggaagacgccattatctctgatgcgctgaaccatgcgtcgatcatcgacggcgtgcgcctgtgtaaagcgaagcgtttccgctatgccaacaacgatatgcaggagctggaagcgcgtctgaaagaagcgcgcgaagctggcgctcgccacgtgctgatcgccaccgatggcgttttctccatggatggggtgatcgccaacctgaaaggcgtctgtgacctggcggataaatatgatgcgctggtgatggtcgatgattctcacgccgtgggctttgtcggcgaaaatggccgcggttcccatgaatattgcgacgtgatgggccgcgtcgacatcatcaccggtacgttgggtaaagcgctgggcggcgcgtcaggcggttacaccgccgcgcgcaaagaagtcgttgagtggctgcgccagcgttcccgtccttatctgttctccaactccctggcgccggccatcgtcgccgcttccatcaaggtgctggagatggtggaagcgggcagcgaactgcgcgatcgcctgtgggctaacgcgcgcctgttccgcgaaaaaatgaccgccgcaggctttaccctcgcaggcgccgaccacgcgatcatcccggtgatgctcggtgaagccaccatcgcgcaggaattcgcgcgcgaactgcagaaagaaggtatttacgtcaccggtttcttctatccggtggttccaaaaggccaggcgcgtattcgcacccagatgtcggcggcgcatacccctgaacaaattgaacgtgcggtggaagcctttacccgcatcggcaaacaactgggcgtcatcgcctaa

SEQ ID NO: 105997 - DNA, 933 bp, Enterobacter aerogenes; identical to SEQ ID NO: 87579

SEQ ID NO: 105998 - DNA, 1017 bp, Enterobacter aerogenes
atgatgtcgcaaagtctttatcgtacgctcagggcgcgctatccccaggcgattatcgacgtgatggcgccggcatggtgccgtccgttgttatcgcgcatgccggaagtcaatgaagcgattgccatgccgctgggccacggcgcgctggctatcggcgaacgccgtaaactcggccacagcctgcgcgatcgtcgttacgatcgcgcttatgtgctaccgaactcgtttaaatcggccttggtgcctttctttgccaacatcccgctgcgcaccggctggcgcggcgaaatgcgctacggcctgctcaacgacgcccgcgtgctggataaagacgcctggccgctgatggtggagcgctacgtggcgctggcctacgataacggcgtcatgcgctgcgctaaagaccttccacagccgctgctgtggccgcacctgcaggtcaacgacggcgaaaaatcacaggcctgcaacgcttttaatctctcaaacgatcggccaattatcggcttctgccccggcgcggaattcggcccagcaaaacgctggccgcattatcactacgccgcgctggcgaaaaagctcattgacgatggttatcagatagcgctcttcggctcagcaaaagataacgatgccggcaaagagatcatcgccgcgctcagcagcgagcagcaggcctggtgccgtaatctggccggcgaaacacagctggaacaggccgtgattctgattgccgcctgtcaggccgtggtcagcaacgattcgggactgatgcacgttgccgccgccctggaccgtccgctggtggcgctgtacggcccgagcagcccggactttaccccgccgctgtcgcataaagcgcgcgttattcgcctgattagcggctaccacaaagtgcgcaaaggggatgccgctgagggctatcatcaaagccttatcgacatcactccagagcgcgtcctgcaggagctgaacgaactgttagcggaaaaaaccgagcacgaggaagcgtaa

SEQ ID NO: 105999 - DNA, 972 bp, Enterobacter aerogenes
atgcgggtattgatcgttaaaacctcctccatgggcgacgtgctgcacacgctgcccgcgctaaccgacgccgcgcaggccattcccggcatccgctttgattgggtggttgaagagggtttcgcacagatcccttcatggcatgagtccgtcgagcgggtgattccggtggcgattcgccgctggcgcaaagcctggttttccgcacctatcaaagcggaaagaaaagcctttcgcgaggccgtaaaggccgtcaactacgatgctattatcgatgcccaggggctggtgaaaagcgccgcgctggtgacgcgtctggcgcatggcattaaacatggcatggactggcagtccgcccgcgagccgctggcgagcctgttttataaccgtcgccaccatatcgccgttcaacagcatgcggtagagcgtacgcgcgaactgttcgccaaaagcctcggctatgcccggccgcagacgcagggtgattacgccatcgcgcgccactttattcgccccgactcaccggtagcagagccgtatctggtcttcctgcacgccaccacccgcgatgataaacactggccggaagcgcgctggcaagagcttctcgatctgctggcaggtagcgccatacggatcaaactgccgtggggcgcgccgcatgaagaggcgcgggcaaaacggctggcggaagggcgcgataacgtcgacgtgttaccgcgaatgagtcttgagcaggttgcgcagattctggccagcgcacgcggcgtagtttccgtcgacaccgggctgagccatctgaccgcggcgctcgataaacccaatttcacgctctatggcccaaccgatccgggactgattggcggatatggtaaaaatcagcatatcgtccggccgccaaacggcaacagcaccagcgatattaccgctgagcatgttcagcaattgttgcaagcacagggactcgtgtaa

SEQ ID NO: 106000 - DNA, 909 bp, Enterobacter aerogenes
atgggatcgctgtttaagcaaatttatcgctatacccgcccgcgcgcctatcgccacaatgagaacctgtggccgtgggtaaaaatccgccgggcggaaagtggtgaaatttgtactttacagtacaaaggcaaaacggtaccgctggtcgatttaacctcgctgcgcaatagcatgcagggggaagtgctgctgacagcaaccggcccttcaacgcgcaacattgatttctccctgctgccaaaacacattccagtgatgggcgttaacggcgcatggcatctgtcggacaaagtcacattctcgctctataccattgtcgatatggagtttttcgataagaagcccgagattattcgccatatcgtccgccaaagcggcattcttttgttcaccaccatgcacggcatcgccaaaattctcgatcgccacgctgatgagttgcattgccgtttagcccttatcgaggatggctgttataagatttaccagcccaaaatcgcgagtcatgcgattcaacaagcgtatcaacatgtcgataccctacgcttcgatccccaacggcccgaggtgtgttttagtaccgatattcgacagggaatttttgatgccggcaccgtcgtctactgggctttgcaaatactggcctggctgggtttcaaaacgattctgataagtggtctggatatgaccaatttcagccagccgcgcttctatgaaacgcaacaaaaccaattaccttcttatctggcaacaaaagtagaaaatcttgttatgccgtcttttgcacttgcggctaacgtactgcaacaagagcagatccaggtcattaatttttcgccagaaagcgctattccagaaactatcttcgaaaaggtttcgtttaatgagtacttcaaaaataagtaa

SEQ ID NO: 106001 - DNA, 1170 bp, Enterobacter aerogenes
atgagtacttcaaaaataagtaatcttgcaaagcagggttactcggttgttttccctttatttctattttttagcgctattttttgcatgtccacccgcacgaataacctgctgcatttgtctattttattactgctgttgtcactgctgcgccaggataaccggcaggcgctggctgaagttttgcgtgaacagtggcaaacatggggggtgttggtagcgttcttcgtctacttctccctcagcaatatctgggggcatacgccgcagcatatcgactcaccgctaacacacggcgtttatctgattttttaccttctgctgatgtcgacgctcctgggtagctcgcaaacccgacggcttacgttgctgtctattgttgccggcgtcaccgtactttcaatctggaccctggctattgatcatactctggtattgaccgagcgggctgtatcgccagaaaacccagggccgactaacgtgatagatttggcaggctactgcggtatcggtcttttgatcagcggtatgttattgaaagaaaaatcgaaccactggttatatattccaattatcatcatgttggtgatgatgttgttaacccaaagtcgtgggccattgatctcactggcaatcgctatttgttgcactctgcatctacatctcttcacgcggcgtaatttgcttattattggcgcactgcttgtactgatcggattagtactttgcctgacgccagtgggcgacatgctgcttacccgttttgaagagttgggaacgcaaagcgggctacgcctgagcatctggcatcatacgttgatggaaatcgctgaccaaccgtggctgggacgaggtttcggctatgaactgaatttcatcaactacagcggtgagcacatcaccaccacgcatagcgtttatctcggttcactgctgaagggcgggattattggtttactgctgttgctggcagtgatcgtctgcggtttacatcaagcctggcgtaagcgccatgacgacagtcgctatagtctggccatcatgctgtatgcgctgatatttatggcttcccaggggatgtttattgtcagtaatccacgtgagacatgggtacttttctggctaccgctagggattgcgctcagtaagagtgtgctgaagaaacgctag

SEQ ID NO: 106002 - DNA, 1077 bp, Enterobacter aerogenes; identical to SEQ ID NO: 87574

SEQ ID NO: 106003 - DNA, 963 bp, Enterobacter aerogenes
gtgcacaatcccgcatttctcatcacgattgatacagagggtgataacctctggcaaaaacatgacagcatcaccacggagaatgcgcgctatcttccgcgttttcagcagctttgcgaaaagtatggcttcaaaccggtctatttgaccaattatgaaatggccatcgaccctttttatatcgagtttgctaaagatgtcattgcgcgcggcaccgcggaaatcggtatgcatctgcacgcctggaacagcccgccgaccgagccgctgacctcggatgactggcgtcataagccttatctcatcgagtatagcgatgccgccatgcgtgagaaggtcgactatatgacccatctactggaagataccttccagaccaaaatggtgagccatcgcgccgggcgctgggcgtttgacgagcgctacgcgcggctgctggtggagtacggttatcaggtggattgctcggtgacgccgcgagtgaactggaaaaccgctaagggcgcgccgcagggcgatggcggtacggactaccgacgcttcccgcaacatgcttattttctcgatgaaaatgatatcagccgcgaagggcattccccgttgctggaagtgccgatgagcattcagtataagcactcggcgtggatgaatagcgtgaagcagggctacgatcgtttgcgcggtaaagttcgttcgccatccgtgcactggctgcgtccaatgggcggcaacgtcgagacgatgaagaaagtcgtagaacaaacattgactcagggtaatgactacgtggaatatatgctgcactcgtcggagtatatgcccggcggcagcccaacctttaagaatgagcaagatatcgagcgtttatatgccgatctggaagcgttctttagttggctggccccgcaggtacgaggaatgtcgttggcagaatattaccagcgtaaaatcactcagcgataa

SEQ ID NO: 106004 - DNA, 1077 bp, Enterobacter aerogenes
atgacgcctgaaaccctctcctccggccagcagaacccggcgcggatcctggtcattaagctgcgccaccatggcgacatgttgctgatcaccccgcttgtaaacgcgctcaaacagcagtatcccgccgctcgcgtcgatgtactactgtatgctgagacccgcgacatgctggcggcaaatccggagattaaccagatttacgcgatcgatcgcaattggaaaaagcagggcaagcggcatcagctcaagatggaatggcagctcattcgctcgctacgccaacagcgctacgacatggtgctcaaccttgccgaccagtggcccagcgcgattatcagcaaattaaccggtgcgccgacgcgcatcggtttcgatttccctaagcgccgtcatcctttctggcgctactgccacaccgcgcttgcttctacccagcagcacaatcagctgcatacggtacagcaaaatctctctattctggcgccgctgggactggagattaatgatgcgccggcgcggatgggctacagcgaatatgactggacgaccagccgcgcgctgctaccggacggcttccaggaaaactacatcgtgattcagccgacctcgcgctggttctttaaatgctggcgcgaagcgcgcatgagcgcgctgattaacgcgctatcagcagaaggctacgcggtggtgctcacctctggccctgacgccaaagaaaagcagatggtagagaacatcatcagcggctgcccgcaggcgcgactgcactcgttagccggtcagttgacgctccgccagctggcggcggttatcgatcacgcccgcctgtttatcggcgtagattcggtgccgatgcatatggcggcagccctgggtacgccgctcgtcgcgctatttggcccgtcaaagctgaccttctggcggccgtggcaggtgaaaggcgaggttatctgggccggcgacttcggcccgctgcccgatcctgacgacatcaacaccaacaccgaagaacgctatcttgatttaatccctaccgacgcggtcatcgcggcggcgaaaaaggtactggcatga

SEQ ID NO: 106005 - DNA, 1128 bp, Enterobacter aerogenes
atgagtaaattcaggctggctctggtgcggcagaagtatcgccccgacggcggcgctgagcgctttgtctctcgcgcgctggaagccctcgacagcactaatctggaactaaacgtcatcacccgcgagtggcaagggccggttaaaccggactggcatattcacatttgtaacccgcgcaaatgggggcgcatcagccgtgaacgcggtttcgccaacgccgcgcgcgcgctctggcagagtgaatcattcgacctggtgcaaagccatgagcgtattccgggttgcgatctgtaccgcgccggcgacggcgttcatcgccgctggctgcaacagcgctcgcgcattttaccggcctggaaaagccgcctgctgtttgccgaccgctaccaccgttatgtgatgcaggcggagcgcgagatgtatcaggacgcgcatctgcgcggggtgatttgcaacgcagagatgatcaagcaggaaatcatcgaagacttcggcctgccggctgacaaaatccacgtcatctacaacgctattgataaccagcggtttctaccgcctggcgaagaaacctttgccgcattacgcgctaaatggcagctaccgctgaaagctagctgcctgatttatgtcggttccggctttgaacgcaaagggctggatgcggcaatccgcgccatcgcccccaccgaccgttatctgttggtggtcggcaaagacaaagaacagaaccgctatcaacagctggcaaaatcgctgaactgcgaagaacgcgtgcgcttctgcggcatgcagtccgaaacgctaccgttctatcagatggccgacggactgctgctgccgacgctgtatgatccattcccgaatgtaattctggaagcgatggcctgcggcctgccggttatcaccaccaccggctgcggcggcgcggagttcatcaccgaaggtgataacggctacgtttgcgacgcgctggatattaccgcgttacagcaggcggtgatggcgctgcccacgcgcgcgctgggctccgctgaaggcgcacgcgcccgcgaacgaattatggattgcaccagcgcgcgactgtcgacgcagctgctttctctctatcaggatctggtgaaataa

SEQ ID NO: 106006 - DNA, 1095 bp, Enterobacter aerogenes
atgcgcatattgtttgttatcgacggcctgccgggcggcggcgcggaaaaagtcgtgctcacgctggcggaacactttcttagccagggcgaacaggtatcgctattttcgctgcgcgacgtctgcgattatccgctgccggaagggctcgattatcaggttatcgccgaccgctgccgcaaaccgtggcgtaagctgacggaactctcccgccgcgcgcgtcagcttgatcgcgcgattaaacaagcagaacagcatggacgcttcgatctggtactgtcgaatctgcacaaaaccgatcgcattgtcgcctgcagccgggcattacagaatcgcaacgtttggttctgcctgcacggcgttttctcaacctcttatcttggtcatcgcaacggttttgaccgctggatgaagcagcagaaaatcaagcgggtataccagggacgcaacgtggtgaccgtttccgatgcggttggaaaggatttggtcgagcagttcgcgctgcgcccggcacagcttaaaaccatctataacccgttcgatatcgccgccattcgcgcggcggctgaggcgccggccgatattccccaaggggactatattatccacgttggccgcttccatcccggtaagcgccatgaccgactgattgaagcctacgcgcaaagcggcatcgacgcgccgctggtgctgctgggacagggaaaaccggaacaggaacagcggcttcgtcaactagcgcagcagttgcaggtcggcgatcgggtgctgtttaaaggctttcagcccaacccgctaccatggattaaacatgcgagaatgctaacgctcagctccgacagcgaagggtttggcaacgtcattgttgaagcgctactgctgaatacgccggtcgccagcacccgctgccctggcggggtaagcgagatccttcgcggcgaattgtcccgcggtcttgccgacctcaacagttctgcgctagcccagacgatgcaaagcatttaccatagcccgccggccattgattccgccgcgctggaaaaattcagcgtagagtcgatttgccaacagtaccgtcagttgcgcaacgcctga

SEQ ID NO: 106007 - DNA, 990 bp, Enterobacter aerogenes
atgagtcaaacgcctttattgagcatcgtggccgccgtgtataacggtgaaaaattccttgcgcaattctttgaatgcctcgaacagcaacagttggcaagctatgagctgatcctggtgaacgatggttctaccgacggtagcctggcagttatcgaccaatggaaagacaggctgcagaacgtcaccgtgctggagcaggagaatcagggcgtctcggtggcgcgtaataccggtatggcggcggcaagcggtaaatacctcgccttcccggatattgacgataagttctatcccggcatgtaccgcacgctgctggaaatggcggaaaagggcaatcttgatgtcgcgacctgcaatggccgctatgtgtacgaaagccgcgacgacattcatccgattttcccgccggaacgcctgcagtccactggcgtcctgccgggttacgtctggctgaagcaggcgctcgactcgcgtaagttcctgcacgtcacctggttgaacatctatcgccgcgattttattaaccagcaccatttccactttgagccgggcctgcgccatcaggatattccctggacgacggaagcgttactggccgccgagcgtgtgcagtacaccagcgaacaattttacgactattacattcactcggaatcggtgtcgcataagccagacaacgacgatacgctgatgcgctcagcgcgccattatatgaagatcctcgagatgctcagcgccatcaaccagcgctatccagacaaggtacggcacattcccgcctgccgctggcagatagccaaagaagggttggggattatccataccttcgactgcatgaaagatgagtcgaaaaagcatattatcattaaagaattcttcgaacgcggcatctggcgcctgatctggactaacgcctgcacgttccgtttacgctggcgtctgggacgccgctatttgcgcataaagcgctatctcaacgccgcatag

SEQ ID NO: 106008 - DNA, 1275 bp, Enterobacter aerogenes
ttggaattgctttataccaccctactctacctcattcagccgctggtgtggctgcgactgctgctgcgcagccgtaaggccccggcataccgtaaacgctgggctgaacgttatggcttctgtcaaaacaaggtagtgccggatggcattctgctgcactccgtctccgtcggtgaaacgctggcggcgatcccgttagtacgcgcgctacgtcatcgctatccttcactgccgatcaccgtcaccaccatgacgccaaccggctcagagcgcgcgatgtctgccttcggtaaagatgttcatcacgtctatctgccgtatgacctaccctgcgccatgaaccgtttcctcaacagcgtacagccgaaactggtcatcgtgatggaaaccgagctgtggccgaacatggtcgccgcgctgcacaaacgtaaaatcccgctggttatcgctaacgcacgcctatcagagcgttccgcgaaaggctatgccaaactcggcggcttcatgcgccgcctgttaagccgtattacgcttatcgccgcgcaaaatgaagaggacggcaaccgcttcctcgcgctcggccttaaacgtaaccaactggcggtgaccggcagcctgaaattcgatatttccgtcaccccggaactggcggcccgcgccgttaccctgcgtcgccagtgggcgccgcaccgtaaagtgtggatcgccaccagcactcacgacggcgaagaacaaatcatcctgcaggcgcataaaaaactgctggaaatcttccccgacctgctgttgatcctcgtgccgcgccatccggaacgcttcggcgacgcccgcgacatggtgcaaaaagccgggatgagcttcacgatgcgcagcaccggtgaaattccgtctaacagcactcaggtggtgattggcgataccatgggcgaattgatgctgctctacggtattgccgacctggcgttcgtcggcggcagcctggttgaacgcggtggacacaacccgctcgaacccgccgcccacgctattccggtgctaatgggtccgcacaccttcaactttaaagatatctgcgccaagctgcagcaggacgatggcctgatcaccgtcacggacgccgactcgctggtcagagaggtttctaccctgctgacggacgaagattatcgactgtggtacggtcgccacgcggtggaagtactgcatcaaaaccagggcgcgctgtcgcgtctgctacagttattgcaaccctacctgccgcagcggagccactaa

SEQ ID NO: 106009 - DNA, 771 bp, Enterobacter aerogenes
atgtcgacccgactctccgtcgtgatgatcgccaaaaacgccgccgacctgctcgccgattgcctggcgtcggtaagctgggcggatgaagtggtggtgctggactccggcagtaccgacaataccgtcgaactggcccgtagcctcggcgcccaggtctatagcaacaccgactggcaaggctacggcattcagcgccagcgcgcgcaagattacgccactcacgactgggtgctgatgattgataccgacgagcgcgttacgcctgagttgaaagagtctatcctcaaggtactggacgcgccgcagcgcggcgttatctatagcatcgcccggcgtaactacttcctcgggcgctttatgcgccacagcggctggtatcccgatcgggtgatgcgcctgtacgaacgcgcgcgttaccgctataacgataatctggtgcatgaatctctggatagccttggagctgaagtggtgccgctcagcggcgatctgctgcacctgacctgtcgcgatttctccggcttccagcagaaacagctcgcctatgccgcggcctgggcgcttgagcgccatcagaagggcaagaagacctcgatggcggggattttcagccatacgctgggcgccttcgtcaaaacgctgttgctgcgcggcggcgtgctggatggaaaacaggggtggctgctggcagtagtcaatgcgcaatacacgtttaataaatacaccgagctgtgggcactcagccgcggctactcggagaaagtgtaa

SEQ ID NO: 106010 - DNA, 480 bp, Enterobacter aerogenes; identical to SEQ ID NO: 87566

SEQ ID NO: 106011 - DNA, 810 bp, Enterobacter aerogenes
atgcctgaattacctgaagtcgaaaccagtcgtcgcggcattgagccgcatctggtgggcgctaacatcctgcatgccgtagtgcgcaacgggcgcctgcgttggccagtatccgaagagatttaccgcctcagcgacgaaccggtgctgagcgtgcgccgacgcgccaaatacctgctgctggagctgcgtcacggctggatcattattcatcttggtatgtctggcagcctgcgcatcctcagtgaggagcagccggctgaaaaacacgaccacgtcgacctggtgctgagcaacggtaaagtactgcgctataccgatcctcgccgctttggcgcctggttatggactaaagagctggatggtcatccggtgctggcgcatctcggcccggagccgctaagcgatgaattcaacgccgactatctccagcagcgttgcgcgaagaagaaaaccgccattaaaccctggctgatggataacaagctggtggtgggcgtgggcaatatctacgccagcgaatcgctgttttccgccgggatccatcccgatcggctggcctcgtcgctctcgcatcaggaatgcgagtggttagtgaagatgattaagctggtgctgctacgctcgattgagcagggtggaacgacgctgaaggatttcctgcaaagcgacggtaaaccgggatatttcgcccaggaactgcaggtatatggccgcaaaggcgagccgtgccggatctgcggcacgccgattatcgccagcaaacacgctcagcgcgcgaccttttattgccgccagtgtcagaagtag

SEQ ID NO: 106012 - DNA, 168 bp, Enterobacter aerogenes; identical to SEQ ID NO: 87564

SEQ ID NO: 106013 - DNA, 237 bp, Enterobacter aerogenes; identical to SEQ ID NO: 87563

SEQ ID NO: 106014 - DNA, 666 bp, Enterobacter aerogenes
atggatatacaggaatcattgatgccgcgggaaaaaatgctgcgcgacggtattgaaacgttgagcgacgttgagctgctggcgttgtttttgcgtaccggcacgcgtacccaggatgtgctgactttttcacacagcttgttacagcgcttcggttcgctgtacgggctgttatcggctgagatagaacaatttgcagatatcgacggtatcggcattgcgaaatatgcgcaacttaaaggtattgccgaactggcgcggcgttattttagcctgcggatgagagaggaaccgtcgctggtcacgccgctcatgacgcgagaatttttacaaagccagctcgccgatgaagaacgggagatctttatggcgatctttttagataatcagaaccgggtattgaaacatagccgccttttttctggtactcttagccacgtagaggtgcatccgcgagaaattgtacgcgaagcaatcaaagtgaacgccgccgcggtgatccttgcccataatcatccttcaggtagtcctgaaccgagtaagtcggataagttgatgaccgacagggtggttaagtgttgtagattcatggagatacgcgtgcttgatcatctgattattggccgcggcgcgtacgtctcttttgccgaacgtggctggatttag

SEQ ID NO: 106015 - DNA, 1215 bp, Enterobacter aerogenes
atgatgagtctggctggtaaaaagatcgttctcggcgtgagcggcggcatcgccgcctataaaacgccggaactggtgcgccgactgcgagaacgcggcgccgatgtacgcgtcgccatgaccgaagccgccaaggcctttattactccgttgagcctgcaggcggtttccggttatccggtctccgatagcctgctggatccggccgccgaagcggcaatgggccatattgaactgggcaagtgggccgatctggttatccttgccccggcaaccgccgatttaatcgcccgcgtcgccgccggtatggcgaacgatctggtctccacgatttgcctggctacgccctcgccggtggccgtcgtcccggcgatgaaccaacagatgtatcgcgccgccgccacccagcacaaccttgccactattgcctcacgcggcctattggtatggggcccggatagcggcagccaggcctgcggtgacgttggcccgggccgcatgctcgatccgctgactatcgtggagatggcggcgcagcatttctcgcctgtcaaagatttgcaacatctcaacatcatgattaccgcgggcccaacccgcgagccgctggacccagtgcgctacatcaccaaccatagctctggcaaaatgggcttcgcgatcgccgccgccgccgcacaacgcggtgcgaacgtcacgctggttagcggcccggtgtcgctgccgacgccgccgtttgtgcagcgcatcgatgttggcaccgcgctggaaatggaagcggcggtgcagaatggcgtgcaacagcagcatattttcatcggctgcgccgccgttgccgactaccgcgcagcgattgtcgccgacgagaaaatcaaaaaacaaggtgatgaattaacaataaaaatggtcaaaaacccggacatcgtcgccggggtggccgcactaaaaaatcgccgcccgtacgttgttggatttgccgccgaaacaaataatgtggaagaatacgcccggcaaaaacgtgcccgcaaaaatctcgacctgatttgcgccaatgatgtttctcagccaaatcaaggttttaatagcgataacaacgcattacaccttttctggcaggatggggataagcgcttaccacttgagcgcaaggaattcctgggccaattattactcgacgagatcgttacccgttatgatgaaaaaaatcgacgttaa

SEQ ID NO: 106016 - DNA, 459 bp, Enterobacter aerogenes
atgatgaaaaaaatcgacgttaagattctggacccgcgtgttggcaagcaatttccgttgccaacctatgccacctccggctcagccggacttgacctgcgtgcctgtcttgacgacgccgtagagctggcgccgggcgcaaccaccctgctgccgactggccttgcgattcatatcgccgatccgtctctggcggcggtgattctgccgcgttccggcctgggccataaacatggcgtcgtgctgggcaacctggtcggacttatcgactccgactaccagggccagctgatggtgtccgtctggaaccgcggccagcagagctttattatcgaaccaggcgagcgcatcgcgcagatggtctttgtgccggtggtacaggcggagtttaatctggtggaagaatttgacgccaccgaccgcggcgaaggcggattcggccactcagggcgcaaataa

SEQ ID NO: 106017 - DNA, 597 bp, Enterobacter aerogenes
atggcagaaaaacaaactgcgaaaaggaatcgtcgcgaagaaatacttcaatctctggcgctgatgcttgaatccagcgatggtagtcaacgtattaccacggcgaaactggcggcctccgtcggtgtttccgaagcggcgttgtaccgtcattttcccagtaaaacccgcatgtttgacagcctgatcgaattcattgaagacagtctgattacgcgcatcaatttgattttgaaagatgaaaaggacaccacggctcgtctgcgcctgattgtcctgctgattcttgggtttggcgagcgtaatcctgggctgacgcgtatcctcaccggccacgccttaatgttcgaacaggaccgtctgcagggtcgtatcaaccagctatttgaacgtatcgaagttcaattgcgtcaggtgatgcgtgaaaagaaaatgcgtgagggagagggctacaccctcgacgagacgctactggcaagccagctgctggcattttgcgaaggcatgctgtcgcgttttgtgcgtagcgagttcaagtaccgcccaacggatgatttcgatgcccgctggccgctggtcgcggcgcaactgcaataa

SEQ ID NO: 106018 - DNA, 642 bp, Enterobacter aerogenes
atgaagccgtatcagcgccagtttattgagtttgcgcttagcaagcaggttcttaagtttggcgaatttacgctgaaatccgggcgtaagagcccctatttcttcaacgccggcctgtttaataccgggcgcgatctggctctgctgggccgtttctacgccgaggcgctggtggattccgggatcgagttcgacctgctgttcggcccggcctataaaggcatcccaatcgccaccactaccgccgtcgcactggctgaacatcatgaccgagacctgccgtactgcttcaaccgtaaagaagcgaagacccacggtgaaggcggcaacctggtcggtagcccgctcgagggccgcgtgatgctggtggacgacgtgattaccgccggtacagctatccgtgaatcaatggaaattattcaggctaacggcgctgaactggctggcgtgctcatctcgcttgaccgccaggagcgcggtcgcggcgagatctctgcgattcaggaagtggaacgtgattatggctgcaaagtgatttctatcgtcactctgaaagaccttatcgcctatctggaagaaaagcctgagatggctgagcatttggcatcggtacgcgcttaccgcgaagcctacggcgtctga

SEQ ID NO: 106019 - DNA, 717 bp, Enterobacter aerogenes
atgcgtccagcaggccgtagcgctaatcaggtgcgtccagtaaccctgacccgtaactatacaaaacatgctgaaggctccgtgctggtcgaatttggcgacaccaaagtgctgtgcactgcctccatcgacgaaggcgtaccgcgcttcctgaaaggtcagggccagggctggatcaccgccgaatatggcatgctgccgcgctccacccatacccgtaacgctcgcgaagccgctaaaggcaaacagggcggccgcactatggaaattcagcgtttgattgcccgcgcgctgcgcgccgcggtggatctgaaagcgctgggcgagttcaccattacgctcgattgcgatgtgctgcaggccgatggcggtacccgtaccgcgtccattaccggcgcctgcgttgcgctggccgatgcgctgaacaagctggttgctgccggtaaactcaaaaccaacccaatgaagggaatggtggccgccgtttccgtgggtatcgttaatggcgaagccatttgcgatctggagtacgtggaagattccgccgcggaaaccgatatgaatgtggtaatgaccgaagacggtcgcatcattgaggtgcagggcacggcggaaggcgagccgttcacccatgaagaacttctcactctcctggcgttagcgcgagggggaatcgaatccattattgcgacgcagaaagcggcgttagaaaattaa

SEQ ID NO: 106020 - DNA, 864 bp, Enterobacter aerogenes
atgatccgcagtatgaccgcctatgcccggcgtgaaatcaagggtgactggggtagcgccgcgtgggaactgcgctcggtaaaccaacgctatctggaaacctacttccgcctgccggagcagttccggagcctggaacccgtggttcgcgagcgcatccgctctcgtctgactcgcggcaaaatcgaatgcaccctgcgttttgaacaggatcccagcgcccagggtgaattgatcctcaatgagaacctggcgaagcagctggtgaacgccgcgaactgggtaaaaatgcagagcgatgaaggcgagatcaacccggttgatatcctgcgctggcctggagtgatggcggcgcaagaacaggaccttgatgcgattgccgctgaaatcctcaacgccctgaacggcgcgctggacgactttatcgtcgcccgtgaaaccgaaggtcaggcactgaaaacgctgatcgaacaacgcctggaaggcgtcagcgccgaagtcagcaaagtccgcgcccatatgccggaaatcctgcagtggcagcgcgagcgcctggtcgccaagcttgaagacgccgaagtgcagctggaaaacaaccgtctcgagcaagagctggtgttgatggctcagcgtatcgacgtcgccgaagagctcgatcgcctggaagcgcacgttaaagagacctacaacattctgaagaagaaagaagccgtgggtcgccgcctcgacttcatgatgcaggagttcaaccgcgagtcgaatactctggcgtcaaaatccatcaatgccgacgtgaccaattcagcgatcgagctgaaggtgctgatcgagcagatgcgcgagcagattcagaatatcgagtaa

SEQ ID NO: 106021 - DNA, 618 bp, Enterobacter aerogenes
atgctgcttcatgttctttatctgattggtattacggcggaagcgatgactggcgctttagcagccgggcgtcgccgtatggacacctttggggtgattattatcgccaccgctaccgcactcggcgggggttctgtacgcgatatccttctcggccattatccgctcggttgggtgaagcatccggaatacgtcattattgtggcggttgccgccgtcctcaccaccatcgctgcgccggtgatgccgcacctgcgccgcctgttcctggtgctggatgccctgggcctgatcgtgttctcgattatcggcgcgcaaatcgcgctggatatgggtgaagggccgataatcgcgtctattgccgccgtgatcaccggcgtctttggcggcgtgctgcgcgatatgttctgtaagcgtatcccgctggtgtttcagaaagaactgtacgcgggcatctcttttgccgccgcggtgctttatatcgcgttgcagcactacgtcagcagccatgacgtagtggtcatcgccacgctgctcttcggctttaccgcgcgtatgctcgccctgcgctggaagctcggcctgccggtcttctactacaagcacgacgctcattga

SEQ ID NO: 106022 - DNA, 735 bp, Enterobacter aerogenes
atgaaagaaacagcggcaaaaagtgtgacaatgactgcctcacgcggcggcggcgtgtataataggctcgtatgtaggatctctttcgacaatcacatacaaaagacactcatggctcaaggcacgctttatattgtttccgcccctagcggcgcgggtaaatccagcctgattcaggctttattgaaaacccaaccgttgtacgattcccaggtttctgtttcgcataccacgcgcaatccgcgcccgggtgaagttcacggtgaacactatttctttgtcgatcacgataaattcaggtcgatgattagcgaagacgctttccttgagcacgctgaggtttttggcaattattacgggacctctcgtgaagctatcgagcaggttctggcgaccggcgttgatgtttttcttgatatcgactggcagggcgcccagcaaatccgtaataaaatgcccggtgcgcgcagtatctttattctgccgccgtcaaaagacgagcttgaccgccgcctgcgcggccgcggtcaggacagcgaggaagtcatcgcaaaacgtatggcgcaggcagttgcagaaatgagccattacgcggaatatgattaccttattgtgaatgatgattttgataccgctttaggcgatctgaaaaacattatccgcgctgaacgtctgcgcatgagccgccaaaagcagcgacatggcgctttaatcaccaaactattggcagactga

SEQ ID NO: 106023 - DNA, 276 bp, Enterobacter aerogenes; identical to SEQ ID NO: 87552

SEQ ID NO: 106024 - DNA, 2121 bp, Enterobacter aerogenes
ttgtatctgtttgaaagcctgaatcagctgattcaaaactacctgccggaagagcaaatcaagcgccttcggcaggcgtatctcgttgcacgtgacgctcacgagggtcagacacgttcaagcggtgaaccctatatcacgcacccggtagcggtggcctgcattctggccgagatgaaactcgactacgaaacgctgatggccgcgctgctgcatgatgtgattgaagatacccctgcaacctaccaggacatggaacagctttttggtaaaagcgtcgccgaactggtagagggggtgtcgaaacttgataagctcaagttccgcgataagaaagaggcgcaggccgaaaactttcgcaaaatgatcatggcgatggtgcaggatatccgcgtcatcctcatcaaacttgccgaccgcacccacaatatgcgcaccctgggctcgctacgcccggataaacgccgccgcatcgcccgcgaaacgctggaaatttatagcccgctggcgcaccgtttaggtatccatcacatcaaaaccgagctcgaagagctgggctttgaagcactgtaccctaaccgctaccgcgtcatcaaagaagtggttaaagcagcgcgcggtaatcgtaaagagatgattcaaaagatcctctctgaaatcgaagggcgtttacaggaagcggggatcccctgccgcgtcagcggtcgcgaaaagcatctgtactccatttactgcaaaatggtgcttaaagagcagcgttttcactcgatcatggatatttacgccttccgcgttattgttcacgatcccgatatctgctatcgcgtgctgggccaaatgcacagcctctacaagccgcgtcccggtcgtttcaaagattacatcgccattccaaaagcgaacggctatcaatctttgcacacctcgatgattggcccccacggcgtcccggtcgaggtacaaatccgtaccgaagatatggaccagatggcggaaatgggggttgcggcgcactgggcttataaagagcacggcggcgaaagcagcacgaccgcgcaaatccgcgctcagcgctggatgcaaagcctgctggaactgcagcagagcgccggtagctcgtttgaatttatcgagagcgttaaatccgatctgttcccggatgagatttacgttttcaccccggaagggcgcattgtcgaactgcctgccggcgccacgccggtggacttcgcctatgcggtgcataccgatatcggccatgcctgcgtcggcgcgcgcgtcgaccgtcagccctatccgctgtcgcaaccactctccagcggccagactgtcgaaatcattaccgcgccgggcgcacgcccgaatgccgcatggctgaactttgtcgtcagctcaaaagcgcgcgccaagatccgccaactgctgaagaaccttaagcgcgacgattccgtcagccttggccgccggctgcttaaccacgcgttaggcggcagccgcaagctggcagagatcccgccagagaacatccagcgcgaacttgaccgcatgaagctggccacgcttgacgatctgctggcggaaatcggtctcggtaacgcaatgagcgtggtggtggcgaaaaacctgcagcagggcgaagcctctgccgcaccggtgccggccaacgcgtcgaatcacggccatctgccgatcaagggcgccgatggcgtgctgattactttcgccaagtgctgtcgtccgattccgggggatccgatcatcgcccacgtcagcccaggcaaagggttggttatccaccatgaatcctgtcgtaacatccgcggctaccagaaagagcctgagaagtttatggcggtcgaatgggataaagaaactgcgcaggaatttatcgccgaaattaaggtggatatgttcaaccaccagggcgcgctggctaacctgacggccgcaatcaacaccgcgtcttccaatattcagagcctgaatacggaagaaaaagatggccgcgtttacagcgcctttatccgcctgaccgcgcgcgatcgcgtgcatctggcgaatatcatgcgcaaaattcgcgtcatgccggacgtgattaaagtcactcgtaaccgaaattag

SEQ ID NO: 106025 - DNA, 690 bp, Enterobacter aerogenes
atgaattcacagcgttatgcgcgtatctgcgagatgctcgccaggcgtcagcctgatctgacggtctgcatggagcaggtccataaaccccataacgtctctgcggtcatccgcaccgcagacgccatcggcgtacacgaagtacacgccatctggcctggcagccgtatgcgcaccatggcctctgccgccgccggcagcaatagttgggtgcaggtgaaaacgcaccgcacgatcggcgatgccgtcagccacttaaaaggccggggcatgcaaatcctcgcgacgcacctttccgacaaagccatcgattttcgcgaaatcgactatacgcgcccgacctgcattctgatgggccaggagaaaaccggcatcacccaggaagcgctggcgctggcagaccaggacatcattatcccaatggtcggtatggtgcagtcgctgaacgtctccgtcgcctccgcgctgatcctttacgaagcgcagcgtcagcggcagaacgctggaatgtaccaacgcgccaatagcatgctgccgcctgaagagcagcagcggctgctatttgaaggcggttacccggtgctggcgcgcgtcgccaaacaaaaagggctgccttatccccacgtcaatgagcagggtgaagtcgaagccgatgcctcgtggtgggcaacgatgcaggcggcgaggtaa

SEQ ID NO: 106026 - DNA, 2082 bp, Enterobacter aerogenes
atgtcaggccgcctgttagatgccgtcccgctcaactcgctgaccggcgttggcgccgcacagagcagcaaactggcgaaaatcggtctgcatacggttcaggacctgctacttcacctgccgctacgctatgaagaccggactcacctgtaccaaatcggcgaactgctgccgggcgtctacgcaaccgtagagggtgaagtgctcaacagcaatatcaccttcggcggccgccggatgatgacctgtcagatcagcgacggctccggcatcctgaccatgcgttttttcaacttcaacgcggcgatgaaaaacagcctggcgaccggtcgtcgcgtgctggcctacggcgaagctaaacgcggcaagtttggcgccgagatgatccacccggaatatcgcgtacagggtgatatgagtaccccggagctacaggaaaccctcactccggtctacccaaccactgaaggcattaagcaggcgacgctgcgcaaactcaccgatcaggcgcttgagctgctggaaacctgcgcgattagtgaactgctgccgccggagctggcgcaggggatgatgagcctaccggaggcgctgcgtacgctgcaccgcccgccgccgtcgctacagctcagcgagctagagagcggtaaacatccggcacagcagcgtcttatcctggaagagttgctggcgcataatctcagcatgctggcgcttcgcgccggcgcccagcgctaccatgcgctgccgctcagcgccaacgacacgctgaaaacccagctcctggcttccctgccctttaaaccaacgggcgcgcaggcgcgcgtcaccgcggagatcgagcgcgatatggcgctggacgtgccgatgatgcgcctggtacagggcgacgtcggatccggtaaaacgctggttgccgcgctggccgccttgcgcgctatcgcccatggtaagcaggtggcgctgatggcgccgaccgaactgctggccgagcagcacgccaataatttccgcagctggttcgcgccgctgggcattgaagtcggctggctggctggcaaacagaaaggcaaagcgcgccaggcgcagcaggaagccatcgccaacggtgaagtgcagatgattgtcggcacccacgccatttttcaggagcaggtgcagtttaacggcctggcgctggtgattatcgacgaacagcaccgctttggcgttcatcaacgcctggcgctgtgggaaaagggccagcagcagggcttccacccgcatcagctgatcatgaccgcaacaccgattccgcgcaccctggcgatgaccgcctatgccgacctcgatacctcggttatcgatgagctgccgccgggccgtaccccggtaacgaccgtcgctatcccggacacgcgccgcagcgacattatcgaccgcgtgcgtaacgcctgcacccaggaaggtcgccaggcctattgggtctgtacgttgattgaagagtccgatctgctggaagcccaggcggcggaagccacctgggaagagctcaaactggcgctgccggaacttaatatcggcctcgtccacgggcggatgaagccagcggagaaacaggccgtaatgcaggccttcaagcagggcgagatgcacctgctggtcgccaccacggtgattgaagtcggcgttgacgtccctaactcaagcctgatgattattgaaaacccggagcgtcttggtctggcgcagctgcaccagctacgcgggcgcgttgggcgcggcgccgtcgcctcccactgcgtgctactctataaatcgccgctttccaaaacggcgcagaagcgcctgcaggtgctgcgcgacagcaacgacggtttcgtcatcgcccagaaagacctggaaatccgcggccccggcgagcttctcggcacccgccagaccggcaacgccgaatttaaagtagcggacttgctgcgcgatcaggccatgatccccgatgttcagcgcattgctcgccatattcacgaacgctatccgctgcaggcacaggcgctgattgagcgctggatgccggaaaccgaacgctattccaacgcgtag

SEQ ID NO: 106027 - DNA, 1011 bp, Enterobacter aerogenes
atgaaacgagaactggccatcgaattttcgcgtgtcaccgaagccgccgcgctggcgggctataaatggctgggccgcggcgataaaaataccgccgacggcgcagcggttaacgccatgcgcattatgcttaacctcgtcaatatcgacggcaccatcgtcatcggcgagggcgaaatcgatgaagcgccgatgctctatatcggcgaaaaagtgggtaccggcaaaggcgacgcggtagatatcgccgtcgacccaattgaaggcacccgcatgacggccatgggccaggccaacgcgctggcagtgatggcggtcggcgataaaggctgcttcctcaacgcgccggatatgtatatggaaaagctgattgtcggccccgacgctaaaggcgctatcgatctcaatctgccgctggaagagaatttgcgcaacatcgcccgcgcgttgaataaaccgctcgctgaactgaccgtcaccgtgctggcgaaaccccgccacgacgcggtcattgcgcaactgcagcagttgggcgtgcgcgtgttcgcgatccccgatggcgacgtggcggcctctatccttacctgcatgccggatagcgaagtcgacgtgctgtacggcatcggcggcgcgccggaaggcgtggtttcggcggcggtgatccgcgcgctggacggcgatatgcagggccgcctgctggctcgtcaccacgtgaagggcgacagcgaagagaaccgccgtatcggtgaaaacgaactggcgcgctgcaaaaccatgggcatcgaagcgggcaaagtgctgcgtcttgatgaaatggcgcgcagcgataacgtcatcttctccgccaccgggattaccaaaggcgatctactggacggcattacccgcaagggcaatatggcgactactgaaacgctgctgatccgcggtaaatcgcggactatccgccgtattcagtcgattcattacctcgaccgaaaagacccggacgtccagcaacacatcctgtaa

SEQ ID NO: 106028 - DNA, 747 bp, Enterobacter aerogenes
atggcaaactgggttacaggtaaagttgtaaaagtgcaaaactggaccgatgcactgtttagcctcaccattcacgcgcccgttgagccgttcaccgcagggcagtttgctaaactgggcctggatgttgacggcgagcgcgtgcagcgcgcctactcctacgtcaacgcccccagcaatcccgatctcgagttctacctggtcaccgttccggagggtaaactcagcccgcgactggccgcgctgaaacccggcgacgacgttcagattgtcagcgaagccgccggtttctttgtgctggaagaggtgccggactgcgacacgttgtggatgctcgccaccggtacggcgatcggcccctatctgtcgattctggaagaagggaaagacctggatcgcttcaagaatctggtgctggtgcatgcggcgcgctatgccgccgacctcagctatttaccgcaaatgcgcgagctggagcagcgctacgccggcaaattacgtatccagaccgtggtcagccgcgagacagcggaaggttcgctgaccggccgggtgccgtttctgattgaaaccggcgcgctggaagaggcggtcggcctggctatgaccgccgataccagtcacgtgatgctgtgcggtaacccgcagatggtgcgtgatacccaacagttgctgaaagagacccggcagatgaccaaacatctgcgtcgccgaccgggccatatgacggcagagcactactggtaa

SEQ ID NO: 106029 - DNA, 429 bp, Enterobacter aerogenes
atgaccctacagcagtggttattctcaattaaaggccgtattggccgccgggatttctggatttggatcgttatctgggtgttgaccatgagcgcgctgtttactctcgcgggcagcaatttgctgagtttgcagaccgcggcgtttattctcgtctgcctgctctggccgacggcggcggtggtggtgaagcgtctgcacgatcgcgggagatccggcctctgggcgctgctgatgattctggcgtggatgctgctggcgggcaactgggcgatactgccgcaggtctggcagtggggcgtcgggcgctttgtaccgacgctgattatcgtcatgatgttgatcgacctgggagcgttcgtcggcacccagggcgaaaataagtttggcaaagagacgcaggatgtccgctggaaagcggacgcctga

SEQ ID NO: 106030 - DNA, 600 bp, Enterobacter aerogenes
atgaagaagtgggcaatcttaagtttgattgggctgacagcgttatctgtcggcccgatggcgttgtccgcagaaacagaatccgccgccaccgctccctatcttttacccagcgcgccgatttttgatgtcagcatcagcgagttccgcgaaaaatttaatgccgataatccgaaactgccgcttaacgagtttcgttctatcgcctccagccgcgataaagctaacctgacccgcgccgccaccaagattaacgagaatctgtatgcctctaccgcgctggagcgcggcacgctaaagattaaatcgatgcagataacctggctgccgattcaggggccggaacaaaaagcggcgaaagcgaaagcgcaggagtatatgagcgctattcttcgcgcttttgtaccgacgctaagtccactgcagagccagcaaaagttgcaaaaactgctgaccgccggcaaaggcaaacgctactacaccgaaaccgaaggcgcggtgcgctatgtagtggcagatcacggggaaaaagggctaactttcgccattgaaccgattaagctggcgctatctgaaacgctggaagacaacaataaatga

SEQ ID NO: 106031 - DNA, 768 bp, Enterobacter aerogenes
atgcgacatcctttagtgatgggtaactggaaactgaacggcagccgccacatggtaaacgaactggttgctaacctgcgtactgaactggccggcgtaagcggctgtgcagtggcaatcgcgccgccggaaatgtatctcgacctggctaagcgtgcggcagaaggcagccacatccacctgggcgcgcagaacgttgacgtgaacctgtccggcgcattcaccggtgaaacctccgccgaaatgctgaaagatatcggcgcgcagtacatcatcatcggccactccgaacgccgtacctaccacaaagaatccgacgagctgatcgcgaagaaattcgctgtactgaaagagcaggggctgacgccggttctgtgcatcggtgaaaccgaagctgaaaacgaagcgggcaaaactgaagaagtgtgcgcacgtcagatcgacgcggtgctgaaaactcagggcgcagccgcttttgaaggcgtggttatcgcgtacgaaccagtatgggctatcggtaccggtaaatccgctaccccagcgcaggctcaggcggtacacaaattcatccgtgaccacattgctaaagctgacgctaaaatcgctgagcaggtcatcatccagtacggcggttccgttaacgccggcaacgccgcagagctgttcacccagccggacatcgacggcgcgctggttggcggcgcttccctgaaagcagacgctttcgcggtgatcgttaaagctgcagaagcggcgaaaaaagcgtaa

SEQ ID NO: 106032 - DNA, 1305 bp, Enterobacter aerogenes
atgtcgctctggctaacccacccgctgttcctcccttcgctgatcgtcggcatcaccattgtgctctgggcgacttcgctgttaccggaatttatcaccgcgctgctgttcttcgcggcggcgatgatgaccaaaatcgctccgccggaggtgatcttcggcggttttgcttcctccgcgttctggctggtgttcagcggctttgtgttggggatcgccatccgtaaaaccggactggcggatagagcggcgcaggcgctatcggcgcggctcaccgactcctggccgcggatggtcggcagcgtggtattactgagttatgcgttggcgttcgtgatgccatcaaatatggggcgcatcgcgctgttgatgccgattgtggcggcgatggcccggcgcgcggggatagccgacggcacgcgcggctggtacggcctggcgctggcggtgggctttggcaccttccagctatctgcgaccattttgcctgctaacgtgccaaatctggtgatgagcggggcggcggaaggctcttacgggatccatttgaattacgttccctatttactgctgcatacgccagtgcttggctggttgaaaggggcggtgctggtggcgctgatctgctggctgtttcccggcaagccgcatccgccgcgcgagctggcgccgctggcgccaatgagccgtgacgaaaagcgtctggcgtggctgctggcggtggtgttgacgttatgggtgacagagagctggcacggcgtcggcccggcgtggaccggcctggcggcagcggtggtcacgctgctgccgcgagtaggatttatcagcggtgaggagttcgccagcggggtgaatatgcgcacctgcatttatgttgccggcattttgggactggcgattaccgtgacccaaaccgggattggcggcgcggtgggtaacgcgttgctgcaggtgatgccgctggataaagataatccgttcaccagcttcctggcgctgaccggaattaccagtgcgctgaactttattatgaccgccaacggcgtcccggcgctgtatacgacttttgcgcagagctttgccgacgcgaccggctttccgctgctgagcgtgattatgattcaggtgctgggttattccacgccgctgctgccataccaggcgtcgccgattgtggtggcgatgggattaggtaaagtcccggcgaaagcggggatgttgctatgcctggcgctggcggcggtgagctatttgattttgctgccgctggattatgcgtggtatcagctattagggaaattgtag

SEQ ID NO: 106033 - DNA, 765 bp, Enterobacter aerogenes
atgagaagagtaagatactttttgtgggcgctgctggtggttgttctggcggcgctggctggcggctactattggctgcattccggtaacccgaacgcgttacgtcatattgtcctgcagcagtgcgtacccaatcagcagcaatatcaaaatccgtcgccgtgcgcggaagtgaacctgaaaggcggctacgtgttgtttaaagatcgcaacggcccgctgcaatatctgctgatgccgacctaccgtattaacggtaccgaaagtccgctgctgttggatccgctgacgccgaatttcttctggcaggcgtggcagggacgcgaaattatgagccagcgccgcggcgcgccaattgatgataatgcggtatcgctggcgattaactcgcgcagcgggcgcacgcaaaaccatttccatattcatatctcctgtctgcgtcccgatgtccgcgcgcagttagataatgatgcggcgacaattagcagccgctggctacccttgccgggcggtctgcagggccatgagtatctggcgcgtcgggtaacggaagccgagctggctcagcgcagcccgttcctgatgctggcggaagaggtaccggaagcgcgcgaacatatggggcgttatgcgttagcgatggcgcggcaaagcgacggctcgctggtgctgttggcgacagagcgtaacctgctgactctcaaccgtgcttcagcggaagaaattcaggatcatagctgcgcaattcttaacgcaaaccactag

SEQ ID NO: 106034 - DNA, 990 bp, Enterobacter aerogenes
atgaataagtggggcgtagggttaactctgttgctggcatccgccagcgtgctggcaaaagattatcagctgttaaacgtatcgtacgatccgacgcgcgagctgtacgaacagtacaataaagcgtttagcgcgcactggaagcaggaaaccggcgataacgtggtgattcgtcagtcgcacggcggctccggcaaacaggcgacgtcggttatcaacgggattgaagcggatgtcgtcaccctggcgctggcctacgacgtagacgccattgctgaacgtggtcgtatcgataaaaactggctgaagcgcctgccggataactccgcgccgtatacctcaaccatcgtgttcctcgtccgtaagggcaacccaaaacagatccatgactggaacgacctgattaaacccggcgtatcggtcatcaccccgaacccgaaaagctccggcggcgcccgctggaactatctggcggcatggggctatgccctgcatcagaatcacggcgatcaggctaaagcgcaggagttcgtgaaagcgctgtataaaaacgttgaagtgctggattccggcgcgcgcggttccaccaacaccttcgtggaacgcgggattggcgacgtgctgattgcctgggagaacgaagcgctgctggcgacgaaagagctgggcaaggacaagtttgaaatcgtgacgccgagcgagtccattctggccgagccgacggtttccgtcgtcgataaagtggtggataagaaaggcactcgccaggtggcggaagcgtacctgaagtatctctactcgccggaaggccaggagattgcggcgaagaacttctatcgtccgcgcgatcctgatgtggcgaagaaatatgccaacgagttcccgaaactgaagctgtttaccatcgatcaggagttcggcggctggacgaaagcgcagaaggagcacttctccaacggcggtaccttcgaccagattagccagcgttaa

SEQ ID NO: 106035 - DNA, 240 bp, Enterobacter aerogenes; identical to SEQ ID NO: 87540

SEQ ID NO: 106036 - DNA, 849 bp, Enterobacter aerogenes; identical to SEQ ID NO: 87539

SEQ ID NO: 106037 - DNA, 1512 bp, Enterobacter aerogenes; identical to SEQ ID NO: 87538

SEQ ID NO: 106038 - DNA, 1203 bp, Enterobacter aerogenes; identical to SEQ ID NO: 87537

SEQ ID NO: 106039 - DNA, 1392 bp, Enterobacter aerogenes; identical to SEQ ID NO: 87536

SEQ ID NO: 106040 - DNA, 1710 bp, Enterobacter aerogenes; identical to SEQ ID NO: 87535

SEQ ID NO: 106041 - DNA, 1560 bp, Enterobacter aerogenes
atgtctgtaatacgtcaacgtattctggagaatatgcaaaaattctccagggccatgatcggcgcagtattgttcttgccggtcattggattaattctggctctcagttccgtcttaactaacccgactcttattgctgaaaccagtttccttcatcaattagggcaactgcttggcgataccttctggccattattcggtaacctcggattattgttttgcgtgggaataagttacggcctggcaaaagataaaaaaacggaggtcgcacttgtctcggtgatgtgttttatcatgtttctcggcgccaaccattcatggctggaacatactcatgcggtggcggaaaaaattaacggcgaatattacggtaccgggcaaacgcagctattaggctttgtggtcgtcgatatgggggtattcctcggaatcattcttggctgcaccattgcctgggtacataataaagtctccaatattgagctgcccggcgcgctatcgatgtacggcggggcgaagctgacgctggtcgccatgacgccagtcattatctgctacgccattgcttttacctggatttggccttttatgacccacggcattagcgccctgaccgggtttatgaagaatgccggcgttgcgggagtgtttgtctacggcttctttgaaaaattccttattcccaccggcttgcaccatttcgtgtggtcgcctttccagctcacgcaaatcggcggcacgctaaatgtcgatggccaggtcgtctccggcacccaggcgattttcctcgcctatatgcgccatcccgatctgacgccggtgatgaacgatgcattacgtttctcgcaacaggggatgaccaccatctttggcctggcgggcgcatcgctggcgttttatcacaccgcgaagccggagaagaaagcgatggcaaaggcgattctgctgccggcgattatcacctcgatgctgaccggcatcaccgaacccattgaattcaccttcttatttgtctcgccgctgctgtgggtgatccatgcgacgttaaccgccgcttcgcaggcaatttgcgacatcttcaccgtgcggccgtggggcgcctccggcctaattgaatttctgatctacaacctgccgctgccggtgtcgttaacccgctggccggggtacgtgctgatcggtattggccaatttatcgtttattacgcgatattccgcacgctggtagtgaagttaaatctgaaaacgccgggccgcgaggatgacgataacgttaagttatacagtaaggcggactaccgtaaaaaagtcagcggcccgcagtcgatgacggatgaaattattaatggcttaggtggtaaagccaatattatctccgttgataactgtttcacgcgcctgcgggtggttgtccataatatgacattagttgatgatgaaatattaaaaagcaccggcgcaaatggcgtagtacgcaatcgtaatgaagttcaggttatttatggcgtcaaagtcgggcaagtccgttcccgggttgatagctggctagcagaaaattaa

SEQ ID NO: 106042 - DNA, 1380 bp, Enterobacter aerogenes
atgaaattaaccgtattaggcgggggcggcgtacgctctgcatttctggcgaagtcgctggcttataacgcgcaccgcattggtttaacggaagtggtatttcaggatagctcagcagataatttatcgctatttggtgaaatcgcccgctatgtatttaataccattcgcccggatattcattttacgaccaccagcgatccggctgccgcgctgcagggtacccattacgtgattaccacgctgcgcgtcggcggcgatgagagccgcatccgcgacgagcgaatcgcgctggagcataacacgctgggccaggagaccactggcgcgggcggttttgccatggcgatgcgttcgatcccggcgatcctgcgctactgtcggctgatcgaagaacatgccgacaaagacgcgatcctgtttaactttaccaatccgtccgggctggtcaccgaagcgattatcaaatccggtttcaaacgccgggtatacgggatttgcgatgcgccgtcggaactcatccgcgagctgccggagatcctcggctgcgacccgcacgacctgagcgtggaatgctacggtttaaaccatttttcctggtttacgcacttcaccgtgcgcggggaagaggttaccgcgcagctggtcgccaacccggatttgtaccgcaaaacggcgatgcagtacttctcgccggagctggtcaaactgtgcgataaccagttgcttaacgaatatctctattactactactatcgcgaagtggcgctacgggcgattcaacaggcgccggagacccgcggcgagcagattgcccgtatcaaccacgatatgcgtcaggagctcagcggcgtggatgttaaagcggatccgcaggcggcctttaccatctggatgaagcactacctacgccgcgaaaacagctatatgcaaaacgagtcgcagcaggaaaaattccatacccgcgagccgttaacgctgcggcagtttattgaagagccggataccggcggctacgccggggtggcgctggatattctggaggcggtcaacagcaccaccaccaaacgcatcgtggtgtcgatacagaataacggcacgctcgattttttacgccccgacgatgtgattgaaatcagctgcgatctgagcaaagagggtcttaagccggtgacgccggttaacgtgccgacggcgcagaaaaatatgattgccagcgtgaaggagtatgaacgattggcggtggcggcaattctgcagcaggacaaatcgctggcgctgcaggcgttgatggctcatccgctggtcggttcatattcgctggcgaagaagctggttgaggcctatctcgacgatgcacagttcgccgggtggcggtaa

SEQ ID NO: 106043 - DNA, 723 bp, Enterobacter aerogenes
atggacttagaaaatatctttcgtgacgtgaagttgagtaaaaccgaaatgaccgtgctgcgttttattcaaaatgacccgcaactgtgtatccgcgaagggatccgcaccgtcgcggagcgctgctacagtaatccttcttcgctggtgcggctggcgaagaagcttaagttcagcggctggctggagctggtctatttcatcaagttcaatatcaccatgccaaagctcgatgtcaccaacgatattgattatatgagcattcagccggcagaagcgctgacgccgctgctggcaggccttgagcagcagcgtattttgatccacggcagcggtttttcgcagctaatcgcccagtatatttataataagtttctcgttaccggcgtgaacgccagcctggcgttgtggcccgattacgaaatccttgagcaaaaaaacgctgcccgctttgattccatctggatcatttctaaatccggacgcagcagttcggcattaaattgggtcaaggcgctggaaggcaaggagataaacctggtttgctttaccggcgattatcaaagcccgctggcgcaggccgcgaatacggcgtttattattcacgacccgcagaagttcgacgatgatatttactggagcaacccgttttttggctactgcatattgggctttgagcggctgttaaaaatgtggtttaccagcgtacctagcaataggtag

SEQ ID NO: 106044 - DNA, 2319 bp, Enterobacter aerogenes
atgaaaatcagtgatggaaactggctcattcaaccagggctcaacctgatccaacccgtacaggtttacgaggtggagcagcaggggaatgaaatggtggtctatgccgcgccacgcgatgtccgcgaacgcgcctggcagctggatacgccattgttcaccctgcgctttttctcgcctcaggaagggataatcggcgtgcgcatggagcacttccagggcgcgctggataacagcccgcactatccgctgaacgtgcagaaagacgtccatgtcgaaatagaaaatacggccgaattcgccgagctgaaaagtggcagcctcagcgtgcgggtgactaaaggtgaattttgggcgctggattttctgcgcgacggcgtgcgtatcaccggtagccaactgaaaaacaacggctacgtgcaggatagtaagacccagcgcaactacatgtttgagcgcctcgacctcggcgtcggcgaaaccgtctacggcctcggcgagcgctttaccgcgctggtgcgcaacggccagacggtagaaacctggaacgaagacggcggcaccagcaccgagcaatcctacaaaaacattccgttctatctgaccaaccgcggctacggcgtgctggtgaatcacccgcagcgcgtctccttcgaggtgggctcggagaaagtctctaaagtccagttcagcgttgaaggcgaatatctcgagtacttcgtgatcgacggctcgacgccgaaagcggtgcttaaccgctatacgcagttcaccggccgcccggcgctgccgccggcatggtcgttcggtctgtggctgacgacctcgttcactaccaactatgacgaagcgacggtaaatagctttatcgacggcatggccgagcgccatctgccgctgcacgtcttccacttcgactgcttctggatgaaggccttccagtggtgcgattttgaatgggatccgctaactttcccggacccggaagggatgatcaagcgcctgaaggcgaaagggctgaaggtctgcgtgtggatcaacccgtacatcggccagcgctcgccggtgttcaaggagctgaaagagaagggctatctgcttaagcgcccggacggttcgctgtggcagtgggataagtggcagccggggctggcgatttatgacttcaccaacccggaagcctgccagtggtacgccagcaagttaaaaggtctggtagcgatgggggtcgattgcttcaagaccgacttcggcgagcgtatcccgaccgacgtgcagtggtttgacggttccgatccgcagaaaatgcacaaccactacgcattcatctataacgagctggtgtggaaggtgctgaaagagaccgtcggcgagcaggaggcggtgctgttcgcccgttccgcctcggtgggcgcgcagcagttcccggtgcactggggcggcgactgctacgccaactacgaatcgatggcggaaagcctgcgcggcgggctgtcgatcggcatgtccggcttcggtttctggagccacgatatcggcggtttcgaaaacaccgcgccggcccacgtttataagcgctggtgtgcctttggcctgctctccagccacagccgcctgcacggcagcaaatcctatcgtgtgccgtgggcctacgacgaagagtcctgtgacgtggtgcgccacttcacgcagctgaaatgccgcatgatgccgtatctctatcgccaggcggcgctggccaacgagttcggcactccgatgttgcgtgcgatgatgctcgaattcccggacgatccggcctgcgactatctcgaccgtcagtatatgctcggcgattcggtcctggtggcgccggtgttctccgaagcgggcgaggtgcagttttatctgccggaggggcgctggacgcacctgtggcataacgatgaattgccgggtagccgctggcataagcagcgtcacgatgcactgagcctgccggtctacgttcgtgacaacaccctgctggcgctgggcaacaacgaccagaaacccgattatgcctggcatgaaggcaccgccttccagctgttccagctcgacgatggccgcgaagctctgtgccaggttccggcggccgatggttccgtgattttcaccctgaaggcgaagcgccagggcaacaccatcaccgtgagcggcgaaggcgaagcccgcggctggacgctgtgtctgcgcaatatcccgcagatagcgggcgtggagggtgggacgcaggcgggcagcgaactgggcgtggtggtgagcgcccagggcaatgcgctgacgatttcgctgtaa

SEQ ID NO: 106045 - DNA, 1395 bp, Enterobacter aerogenes
atgaaagatcatattctgtccgtcaaagagaaaattggctacggtatgggtgacgccgccagccacatcatttttgataacgtcatgttatacatgatgtttttctacaccgatattttcggtatccccgccggctttgtcggcaccatgttcctgctggcgcgggcgctggatgcgatttccgacccgtgcatgggcctgcttgccgaccgtacccgcagccgctggggtaagttccgcccgtggatcctcttcggcgctatcccgttcggcctcgtctgcgtgctggcttacagctcgccggatttaagccacaacggcaagctgatctacgccgccgtgacctacacgctgctgaccctgctctacaccgtagtgaatatcccctactgcgcgctcggtggtgtgatcaccgacaatccgacgcagcgcatctcgctgcagtcctggcgcttcgtgctggcgacagcggggggcatgctctccaccgtgctgatgatgccgctggtcaactttatcggcggcgaagataaagcgctcggcttccagggcggcattgcggtgctctcggtggtcgccttcctgatgctggccttctgttttttcaccaccaaagagcgtgtcgaagcaccgccgagcagtacctcgatgcgtgaagacctgcgcgatatctggcgcaatgaccagtggcgcatcgttggcgtactcaccatcctcaatatcctcgcggtctgcgttcgcggtggcgcgatgatgtactacaccacctggatcatgggctcggcggcgctgttcaccgtcttcctcaccacctactgcgtcggcaacctgattggctcggcgctggcgaagccgctgaccgactggaaatgcaaagtcagcgtcttctggtggaccaacgccctcctggcggcgctcagcgtggcgatgttcttcgtaccgatggacgccgaaatcaccatgttcgtctttatcttcatcattggcgtactgcaccagctggtgacgccaatccagtgggtgatgatgtccgacaccgtcgactacggcgaatggtgcaacggcaaacgcctgaccggcatcagcttcgccggcaccctgtttgtgctcaagttagggctggcgctgggcggcgcgctgatcggctggatgctggccggcggcggctatgacgccgccgctaaaacccagaacagcgccaccctcaccatcattattgccttgttcaccctcgttccggcggtgtgctacctgctgagcgcggtaatcgccaaacgctactacacgctgaaaacgccgttcctgaaaaaaatgatggccgagctggccgagggcgcgcgtcgcaacgaacaagagttcacggcagccccgatcgaaaaagaatggcaaaactaa

SEQ ID NO: 106046 - DNA, 1038 bp, Enterobacter aerogenes
atggcaaaggaaaatataacgtcgtccccagcaggtgagttcattatgtttgccagcggtgatgggaaagtgcgcgttgaatgccgctttgagtcagacacaatctggttatcccaggcgacaatggctgaactgtacgataaagacgttcggactattaatgagcatttaatcaatatcttctctgaaggtgaacttgctcaaaattcaactatccggaaattccggatagttcgccaggaaggaaaacgccaggtttccagagagatagaccattacaaccttgaagccatactcgctgttggctatcgcgttcgctcctctcgcggcacgcagttccgccagtgggcaacccagacgctccaggaatacctgatcaaaggttttgtgatggacgatgagcggctgaagaatccgcctgtgggttcatcggcagtacccgactatttcgatgagatgctggagcgtatccgcgatattcgcgccagcgaacgccgcgtttatttgcgggtgcgagagatttttgaattagcggctgactatcaaccatcgctaaaagaaaccacgcagttttttcaaacaatccagaacaagttacattttgcctgtaccgggcataccgccgctgaactcattcatcaacgtgctgacgccagtcagctgtatatggggctgaccaactataaaggtgaagaggtgcataagggtgatgtgacggtggcaaaaaattatctcactcaggatgaagtcaatgagcttaaccgcgtagttaacatgtggctggattttgccgaggatcaggcccgtcgtcgtcagcaggtctttttacgcgactggcaggataagctggatcagttcctgcaatttaacgaccgtgaggttttgcaaggcgcaggtaaagtcagtaagaaaatggccgatgaaaaagcgcaggcggaatatagtcagtttgctgagcaacagcggcgcttaaaggaagccgaaggtgaaaaggatatcgccggtttgctacagtggaaaacagagcctaaaaagtag

SEQ ID NO: 106047 - DNA, 1197 bp, Enterobacter aerogenes
atgcgtaaaatactcctttcgctgctgctggctgccgtgaccagcgggctggcgctggcggacgacggcaagccgttcccgcatatcggctggcgcagcgcggataatctcgccgggctggatttcggcggcgcgctgcgggcaaattatcgctatgaagactggaaaggcagtaattatcgcaacccgccgcatctgcgttttgataccttccgtatcgacagcagcggcttctatgataattatttctttgatgccgggttctggttccaggatcaccgtaaatacgccatcgaccgcgcttacgtagggtatcgcttcgacaataataataatatccagctggggatccccggcaaaccatttggccttgaaccttatccgcaatttggctggtcctatggtattccgttttatttaggctttggcgtgagcgccggtagcggcgtgaactatcaatatcatgataataactggtcgctggatgtggcctatttcccgtggatggaaccggagaatttgcgctatgcgccggacgttggcgattacgatcggctgaaaaacactatctatccgactcagcatcagcagcataatgaaaagcgggaccaggtgaacgtgcgaattgcgcgtgattttcacggcggcggctggaataacgagctgggcggctcactggcgctggcgcggttgcacaaccgcgagaccgacgacgacggtaccttctgggcggcaggcgtgcacggcatgttgcataacgggccgtggcagctgacttcgcagctgattcgctaccaatacgatccgaagaacccggcgggcgtcagcgacgatacgattctgatgggcggcaacggcctgacgccggcctacctgatcccggcgaaagcgacgaccgcgtcgctgaacgtcgcccgcgatgtcgacgtgaagtggggcggcgtgtcgaagctgcgtttttacaacgactacagcgtgctgtggaaagataaaagcggctggagcgattcgcagatgaacacccttggcgtacaggtctttgcgctgccggtgatgttctgggtcgatctcagctgggcgaagaatgttaatccgtggggcggcgcgctgaacgccaccggctggaccagcacccagtccgagggcagcggcaaatggtacttccgcactaacgtcaatattggctattacttctga

SEQ ID NO: 106048 - DNA, 1008 bp, Enterobacter aerogenes
atgaaagccattgccattacccaggccgccgctgacggcaacaacatcccctttttacgcgatatcgatctgccggatccgcaggcgcaagggcacgatctgctggttgaggtcaaagccatttcagtgaacccggtcgacaccaaagtgcgcgccgggtttaatgccgataccccgcgagtgctgggctgggatgcggttggcgtggtgaaagccgttggcgatgctgtgacgctgttcacgccgggcgatgaagtgtggtacgccggcgcgctgggccgccccggcagcaacagcgaactgcagctggttgatgaacgcatcgtggcgctgaagccgcgctcgctggagaatgccgccgccgccgcgctgcctctgaccgctatcaccgcctgggaattgctgttccaccgccttggcgtgcaggaaggcggtaacgccggcgatacgctgctgattgtcggcgcggcgggcggcgttggctctatcctcacccagttggccagcaaactcaccaacatgacggtgattggtaccgcatcgcgcccggaaagccagaagtgggtacgcgaggccggggcgcatcacgtcattgaccacagcaagccgctcggtgaagaactggcgaaaatcggcattcatgccgtgacccacgtcgccagcctgaccaataccgatcagcattttaacgaactgatcgccgcgctcgccccgcagggtaagctggcgctaattgatgacccggagagcctggacgtggtgccgctgaaagcgaaaagcatttcgctgcactgggaatttatgttcacccgctcaatgtttgagacggatgatatgatcgcccaacatcagctactgacccgcgtcgccgcgttgattgacgataacacgctgcgcactacccttggcgaacactacggcactatcaacgccgccaatctgcaaaaagcccacgttaagctggaaaccgggcgctcggtcggcaaaatcgtgctggagggtttctaa

SEQ ID NO: 106049 - DNA, 303 bp, Enterobacter aerogenes
atgcgcgacgacaccattgcgcttatcgcggttctgaaggcgaaagccgggcaaaccgaggccctgcgcgacgcgctgcaggcgctgctgctgccaacccgcgaggagccaggcaatctcgactacgcgctgtttcagctgcgtgacgtgccggataccttctacatgcgtgagtcctggcgcgaccagcaggcgctggatgagcatatcgcccagccctacttccaggcctttatcggccagatggagagcctgctcgccgagccgctgcgcctggattatctgacgcccatcgcgccttga

SEQ ID NO: 106050 - DNA, 1050 bp, Enterobacter aerogenes
atgcagatcaacgctataggtacgtactccgccagccagccgctcgaatcgatgtctatcacccgccgcgaacccggcccacaggatgtgcagatcgccattgcatactgcggcgtttgccattccgatctccatcaggcgcgagcggaatgggccgggacgctgtatccctgcgtgccgggccatgaaatcgttggccgggtgacggcggtcggcgatgccgtctcaggttacgccgttggcgatctggtgggcgtcggctgtatggtggatagctgtaaacagtgcgaggagtgcgctgaagggctggagaactactgtgaccatatggtgctgacctataacgggccgacccaggacgcgccagggcatacgctgggcggttattcacagcagatcgtggtcaatgaacgctacgtactgcggataaaccatcccgaagcgcagctcgccgccgtcgcgccgctgttgtgcgccgggatcacgacctattcgccgctacgccactggcacgccgggccgggcaaaaaagtcggcatcgtcggcatcggcggtctgggacatatggggatcaagttggcccacgccatgggggcccacgtggtggcctttaccacctccgaatccaagcgcgacgcggccagagcgttgggcgcggatgaggtcgtggtgtcgcgcaacgaagacgaaatggcggcccacgtcaaaagcttcgatttcatcctcaacaccgtggcggcgccgcacaatctcgatgccttcaccacgttgctgaaacgcgatggcaccatgacgttggttggcgccccggccacgccgcatccatcgccggaagtgttcaatctgatcttccgccgccgctcgattgccggctcgatgatcggcggtatcccggaaacccaggagatgctcgacttctgcgccgaacacggcatcgtcgccgatattgagctgattcgcgccgatcagatcaacgaagcctgggaaagaatggtcaagggcgacgtgaaatatcgcttcgtgatcgacagttcgactctcgccggctaa

SEQ ID NO: 106051 - DNA, 957 bp, Enterobacter aerogenes
atgatgacattaaccgacgtggcgattgtcgccgtagagggctttagcccgtttcattattccgtcccctgtatgctgtttggcgatacggtctcggaaaccaaacgttttaatctgcagatttgcgccgaacagccgggattactcagcgcccgcgacggcttcgcgctatacgccagcggtgattttaccgcgatggaacaggcggatatcgtggtggtgccttactggggcgaggtcaaccagcgcccgccgcaggcgttgatcgcgagtttggttcgagcgcgcgataacggcgcggaaatcgtcggcctgtgcctcggcgcgtttgtccttggctacgccgggctgctcgacggtaagcgggcggcgacccactgggagttcgagcaggatttccagcgcctgtttccgcaggtgcggctcgatatcaacgccctgtacgtcgatgaccagaaggtgattacctcggcggggaccgccgcggcgctggattgctgcctgtatatcattcgccagcgttttggcagcctcgccgccaaccagatcgcccggcggatgatcgtaccgccgcaccgcgagggcggccaggcgcagtttatcgcccagccggtgccgcgcaacacccgcgatgcgcggattaattgtctactggattatctgcagcagcacattgccgagccgcataatcttgattcgctggccgaggtggtggcgatgagccgccgtaccctgacccgccacttcgccagggcgaccgggatgagcattgccgattggttgaccgctgaacgtctgcgccgcagccagagcctgctcgaagcgggggatttgccggtcgagcaggtggcggaagcggtgggctatctctccgccgtgacctggcgccagcagtttaaagcgcgttttggcgttagcccgacggagtggcggcggactttccgccgcggcgtttag

SEQ ID NO: 106052 - DNA, 780 bp, Enterobacter aerogenes
atgaacatcacccatatccgcaatgctacacagattattgaatacgctggtaaaaagttcctgatcgaccctatgctggctgacaaaggcgcctggccgggatttccaggaaccgcgcgcagcgagctgcgcaatccgctggtggcgctgccgttttcccgtgaaaaaattatcgacgtcgatgcggttatcgtcacccatacccatgacgatcattgggacgaggcggcgatcgccacgatcccaaaaactctgccggttttcgtccagcatgaggccgacgccgcgctgctgcgcagccagggatttcaggatatccgcctgctgtcggcaaacagtgaatttgccggcgtaaatctgcagaaaaccacttccgggcaacatggcagcgaccgtacctatgcggtaccggcgatggctgaacgtctgggcgaggcttgcggcgtggtgttccgtcatccgcaggaaaagacgctgtggctggttggcgataccatctggcgcgatgagattgaagccgacatgctgaagctgcgcccggatgtggtggtgctgaacgccggctacgctcacgttatcggctttggcccaatcatcatgggcaaagaggacctgctgaaggcgcatttcgccctgccggaagcgaaaatcatggccatccacctggaggcggtcaaccattgtctggtgagccgcgaagagatgcgccagtacgtcgcggataatcagattgccggggtagtgagtattccgcaggatggggaaaccgttgtttattaa

SEQ ID NO: 106053 - DNA, 543 bp, Enterobacter aerogenes
atgaaaaagaaactaaccgccgccgatatgcataatccgctggtcatcgccgagacgccgtggttcagcatgcgcaaggtaggtattgatgtcgcccccggcgagcggcgcgacttttattccattcactacccacgcccggcggtcgggattgtggcgctccaggacgacaaagtgctgctgattcgccactaccgctatctgatcgataaggtggtgtgggccattccctctggcggcgtcgatgaaggggaagagcccgccgtcgccgcgctgcgcgaactacgcgaagagaccggctggcaagcgcaacacgctgaggaaatcatccgctacaacccgtcatacggcagcagcgaccagctgtttatcacctggctcgccaccgatttaagctgggttggcatggacgcagatcaggatgaagtgatggaaaccggctggtttaccttcgaggagataaaccagctgatcgcccgcggcgaaatgccggacgggctgtctctggtgccgctactgcacctgatggcgcagcgtagatga

SEQ ID NO: 106054 - DNA, 813 bp, Enterobacter aerogenes
atgatgaaattgcgtttacgcacggcggcggcagtgatgctggctggcctgctgttagcgggctgtgaccagaagaatgacaatgccaaacacataaaagtcggcgtgattaacggcgcggaacaggatgtggcggaagtggcgaagaaggtggcgaaagaaaaatatggcctcgacgtcgagctggtgggctttagcggctcgctgctgccgaacgatgccaccaacgccggggagctggatgccaacgtcttccagcatcgcccctatctggaacaagacaacaaagcgcacggctaccacctggtggccatcggcaatacttttgtctttcccatggccggctattcgcgcaagattaaatccgttgccgatattaaagatggcgcgactattgccattcccaacgacccgaccaacctcggccgcgcgctattgttattgcaaaaagagcaactgattaccctcaaagcgggcaccggcctgctgccgacggcggtggatatcaccagcaacccgcgcaacctgaaaattatggagctggagggcgcgcagctgccgcgggtgctggacgatccgaaggtcgatgtcgccattatcagcaccacctacctgcagcaaaccgggttatcgccggtgcgcgatggcatctttattgaagacaaaaactcgccatacgtgaacatcattgtggcgcgtgaagacaataaagacgccgaaaacgtgaaagagtttatgcagtcgtaccagtcgccggaagtggcgaaggcggcagaaaccatcttcaacggcggcgcggtaccgggctggtaa

SEQ ID NO: 106055 - DNA, 255 bp, Enterobacter aerogenes
atgtcatcagacgaaaaaatcgccattcttgaagatcgaattaaaaagattgagggtgtaaccacgcatttactcattcgttctgaactaaccatgtgcatagtgtcagcaatgattggtgcaggcgtcataagccgcgaaggtgtgaaggagataatcaataaaattgacttatctgaatttcaagcacctgccatcagcgaggctgaaagaaagattatccttcaacttgttgataggattgaggtagtttaa

SEQ ID NO: 106056 - DNA, 396 bp, Enterobacter aerogenes
atgaaaattgaacaagactgcagcgtgattctaccagtggcaaaggattttaaattctgtctgggtcagctggtaaacctgcgtatcagtgaagaatttggtgagattcaagcgcgttcacaaaatctaaacggtgagaatcagtacttcattcattatcaggccgcagataaatgtgccactgagcgttggtataacgaatcgcagttagtggctgtagaagatgaacgttcaccgggcatgccagtgtttggttgcgtggggttgtcaggaagtgagatcacccggaatgaaatgcctatgggtgtggatagcgacaaaccattattaacgactgccgctattaaaaaatgtggaattaaactacctcaatcctatcaacaagttgaaggataa

SEQ ID NO: 106057 - DNA, 561 bp, Enterobacter aerogenes
atgatccacacggtacattttttgacagatgttacagttgcctctgtaactaatctgatggatgtctgcttaaaagcagtttcaaacactaatcaaccagcaacagaaattaagctttatatttccagcaaaggtggagatacagtttcaggtttcaccgcctacaattttttaaagtcacttggtgtaaaggttacaacccataacctcagcaatgtcgaatcaatcgcaaacgtgatctatatggctggagaagtgcgaactgccaacccactttctcgcttccttcttcaccctctacattggggtttcgccgctccgaacgcagaccacctacgattgagagagtgggcatcatgcctcgatgacgatctaaatcgatttattcaaatcatggagattgaaacaaataattcaaatccaaatgaggttgctaattggaacgatttgatcacttcggcgaccatacttcaccctggaagggccgccgagttgggaattgttcatcagatcgaggctgcaaccatacccgcggaatcgatccgctggtgggttctttaa

SEQ ID NO: 106058 - DNA, 324 bp, Enterobacter aerogenes
atgccaaagagcagatcgcactggacgcatcgggagtcgcggcagatatcaaagtggctattacggatgatgattgtgctaatcggcctgtgcctgctggcgcagttaagcggttgcaacaatacgcgaacagtttacgtcaaagtgccggtagtacctttgccagccagcctgatggttgaaacgccacaaccagaaatccctgacagtatgacgtggggacaaagccttaatttcaacgtcagccttttatcggcgctgggccagtgcaaccgagacaaggctgatatccggcaggcagagaaaaaaagagcgggcctgtaa

SEQ ID NO: 106059 - DNA, 816 bp, Enterobacter aerogenes
atgaaactggaagcatcactcaagcattttagtccgcagggcatgaatatcagcgacgacgtgaaaggaacctctccggaccgcatcaccggaacagatgttatggccgccatcggggccaccagctcccgtgcccgatttggccttgctgctttcttcggtaaggcgggcatcagtaagactgatgagcaattggcggtgcaggcgctggcgcggcatgccatggatacagctcccaagaacgtgcgaaaggccgctggcgctgagctggggcactgctgtctggtgctggcgcagtttgcctttgcggagtattcccgttcagcagcaacaactggagcctgcagagtatgcaatggcaccgggaagatgcagaccaccaccacggagcgcaaggtcacatacccggggggtaaggcgccttactgggcgaaaaggtcccgtgctgttcgtccgtctgactgggaaaaatggactgaagtaaccgccatcaccagcgtcaaatgtgaagcatgcgacggaaaagggaagattaacgcccgctgccgctgcggcggttctggtgaggtgctggaccgaaaggcgacgaaagagcagggagcgccagtattcaaagcttgtgagcgttgctcaggaaatggatttacctcagtgccctccacagctgcacataaagcgattctggcgtttgttcctgaccttcacgtcaggacatggacacggaactggaagcctttcctcgaagcgctggaaggcatctgccggcagggggaggcgcaggccgataaggagtttcagcgggcgacggagtattaa

SEQ ID NO: 106060 - DNA, 420 bp, Enterobacter aerogenes
atgaaaactccattgccaattgaaatgctggaagatgtatcagcagaaattattgagaatacctctctccttgaggtgatttatcgcacagccgatatggagccagaagctgataatgcggttgcctgtttaatcaggtctatgcagaaaacgcttgaaaaagctcacgggtatatcgaaatgctggctgctaaccctgccactcccccagcaggtacagggcgacctgatatatcagatgatgtttttgatgctgttgttgctgctaaaaaactcaaagaacttgcgcatatatatactgaaaattacttcacagatgccgacagtgagaacccggcctttcatatggccgctgttatatatgactactcaatagaggtatgtaaagaaatccagaatatagaatcgaaattagcgtaa

SEQ ID NO: 106061 - DNA, 216 bp, Enterobacter aerogenes
gtgctgacagccatacgcattcctgagcgggtacacctgcaggcgttacaggtcctgcagagatatcgacgaaagcgccttttcgctcgccgcatccatcgaactggatacatgagcctgaaagttaacccccgctggcggctgttatcgaaagacgacggccggaactgggaagttatgagccatgaaacctataaccgggagaaagacaaatga

SEQ ID NO: 106062 - DNA, 576 bp, Enterobacter aerogenes
atgcgcagagaaaaaattattactgaaaaactaaacactgttgaggaatgccttacgcaactctactcagcggaagaaaccattgtagatattgagcgtcagttggaccagccactttataacgttgagtggaagtcgaaagcagagaaagctctcaggactgtaaagcagaaaaaacgaatgattacggctcgcttgtcagtccttcgccaacatgaaaagcaacacaatatcgaacaacataaggcacgaaacgagttactcatccatgaactgaaggaaatcgtcacgccatcagcattccttaattgcgtgcgacgagcagaggagaagttttccaattttagccagtccttaccgaagggattaggaactgactatccagagtcgatgcaccgcatgaacacgtctctggttaacgatgtcaccgctggtaaaccgttgaccatcaccctgccaccgctgccagttttgggttccacggatgagtggtatcagggtttcgcagccggcgcaggaagcatgcgtgaagattgcgcctccgcattgactgctgctggattgaaagtagtgtga

SEQ ID NO: 106063 - DNA, 240 bp, Enterobacter aerogenes
atgagcaatgtgatcttattagccccaaatgagtgggtttgtgaaagcgttcttatcgcggtaaccgggctaaagcccggaaccatcctccgggctcgtaaggaatcgtggatgaccggacgagaatatattcatgtttcgcctgatggaaacccaaagcccaccagtgaatgcatgtacaacagaaaggctgtagatgcctggatcgcttcacaagcaaagaaacaaccaggtgattaa

SEQ ID NO: 106064 - DNA, 126 bp, Enterobacter aerogenes
atgcctggatcgcttcacaagcaaagaaacaaccaggtgattaaccaccatgaaaaaggtaagcttaacccgctcttgggcgtctggaggaatgaatgggtactgaaacatatccaacaggcgtag

SEQ ID NO: 106065 - DNA, 1293 bp, Enterobacter aerogenes
atgggtactgaaacatatccaacaggcgtagaaaatcatggcggaaaactccgcatttcctttgttcataaaggaaagcgtgtcagagaaaaccttggggttcctgataacgccaaaaatcgcaggatagcgagtgaactcagaacatctgtgttgtttgatataaaaatgggttcattcaattatgcgcaacggtttccatcttctccaaacctgaggaggttcggggaggagaagaaggaggtgactgttagtgagctggccgagaaatggctcgacctgaagcagatggagatcagttcgaacacatttggccgataccaatctgcgatcagctgtagcgtgccgattctgggcgggaaaaaactggtttcatctgttctgcaggaggatgtgcttctttttcggaaagaactgcttactggctaccatgtttttcggcagaatcagaaaaaaccaataaaaggccgcagtgttgctactgtaaatacctacatggtaattgttgcagccatgtttgagtttgcagctgcaaatggatacacacacagaaatccatttgttggcatttcagttctgaagaaatccaggcctgaacctgatcctctaagccgtgatgagttcatcaggctaatagaagcctgctataaccagcaaacaaagaatttctggtcattggcagtctatacaggaatgagacacggcgagctatgtggcctggcgtgggaagatatagacctgaaggctggcactttaacagtcagaaggaactatacccagcagaaggaattcacattgccaaaaactgatgcaggaacggatcgcgtgatccacttaattcagccggcaattgatgtgttacgtaaccaggccgaactgacacggctgagtaagcaacagcgggttgaagtgaaactacgggagtacggccggaaaaccattcacgcctgcactttcactttcaaccctcagcttacagataaaaccggaaaagctggtttccattatgccgtaagttcgataaacagaacatgggaatcagcaataaaacgcgctggagtgaggcgccgtaacgcataccagtctcgccacacttatgcatgttggtcgttagccgttggtgcgaatcccaatttcatagctaaccaaatgggacatgccaacgcacagatggtttacaatgtttacggtgcgtggatggctgataacaaccaggttcaggtgaagatactgaaccagtcccttagctcttatgccccaacagcgccccaaagggtggttagtggcttataa

SEQ ID NO: 106066 - DNA, 300 bp, Enterobacter aerogenes
atgagtgagttactgaatcctgggattgtaagtctggcgtctctggcgtctctggcgctttccgttgtactgctgttggtggggctgctgttatggttctttgtgaatcgcgccagttcacgtagcaatgagcaaatcgaactgctgcagtcgctgctggatcaacaaaagcggcaaaatgcgctgctgcgccgtctctgtgaagccaatgcgccgcacaaagaagaggttgctgaaccttcagcggatgagaaggagaaaaacgacgacgatttcattcgtctcgttgccgaacgttaa

SEQ ID NO: 106067 - DNA, 348 bp, Enterobacter aerogenes
gtgatctttagcaccaaaggcggacgaccgcgcataacgcaggtgattgaccgggaagccgttcgccaggctgtgaaagaggcgctgaacatttccgggaagcgtgacgggcatctcgacaaaccggatctgaaatccgcgatggactactggcacaaccatctccgcgatgccgggctgacgggcgaatactctccccactctctgcgctatgcctgggtgcaggaagcgatccagcattaccaagagcagggtctgagccacaaagaggcgctggcggtaacctcaacggatctaggacatggagatggtagaggtaaatatattgagcaagtatataatcgttaa

SEQ ID NO: 106068 - DNA, 2562 bp, Enterobacter aerogenes
atgaagaagcttgattctttcattatagaaaaaatatttaacagcgcatattttaaaaagctttataaaaaaataataaaagcatattctgcgttgactatagaatctgagaaccatttcaatatttccaatacagagttgagagacatatttagatttattgatttgttggtgaactcatctaatcaaaatgctaggatgtgtgcatatcactggattagtttgcttgaaccattttctgataaatgggggaaattctcacttatctcttctttagtctactctaaacttggtttatacgcattagattttaatgatcatgctcttccattttcgcagcgacttgagaatgaagcgaagaaatctgcccaaacatttagtaatgcatatatattcaccgatgcacagtttgatatttatacggatatgctgaaatcaccttactatagtttttcaggtccaacgtcattggggaaatcatttattctaaaacgctatattgaagagattattcaaaattctacatcaaacattgtcatcttagtcccaacaagagcattgataagtcagttttctttggagattaaaaatgaattacatgaacttattgaaaatttcaattataaaatagtgactcacggatcattagcaagtaaatcagatgctgtaatcattaagcatatttttatattgacgccggaacgattgcttaatttgttctcgcaaggcaagattgttagtatagattatttgtttgtagatgaagcacataaattatcaaataatgatgactcagatgtgcggagccttacagagtataatgctatcgatagtgcattattcaacaatccaaatatgaaaattgttttttcttccccaaatattgaaaatcctgaggtttttttaaatctttttgggcgtgaaaaaatttatgcaagtaggattattgaatcaccagtgtcacaaaatctttatcttattgattttcacagaaaagaaattaaatatttttctaattcagaatgcatcgatattgaaagtagttctttatatacactcaataaaaaaagtgatttcatttataacatagggagccgacatggatcaaatatgatatattgttctagtcgggctaaagctgttgattctgcacttgaattttatcaaataaggctctcagaaaatattgtgttatctcctttgttgattgattccataaaaaagataagtaattatattcatcctgagtattatttagctatgtttctaatgaagcgaattgcttatcatcatggacaattaccacaagcaataagaaatatagttgaagaattgtttcgaaatggagatattgattttatcttttgtacacctactttggttgaaggcgttaatatgccaactcggaatatatttatcaattgtgatgataaaattagattaatcgctgatgcgaaaaagaatcctaataaaacacttgccttttggaatctggctggccgggcaggtagatattgcaaggagttatctgggaatattttttgtttacaggatgaatcaaatcgatgggataatactgatatttttttagagaaaacagcgcatttaactacaactatagatgcccggatagaaagtaaatctgggttaagagaaatagagcgctatctttctgatgcggagactgatatttctaaaaggaaccaggcgatagagtatctcgctaatattatggctgtagacactattagatttaaaaataatctaaaagatagctttgtcctgcggaaattttatgatatacatcgagaagaattgttatctcttgctaaactaaaagcaaatgatattttagatattcctatagatattatcaattcctataaatctcttaattttaaaatacaacgaaaagtatttgattacgttagcgtatctcctgtaaacaaaaagctcccatcgctcgactatgcaaatattttgtcggtattggagttgttttatgatctttatagatggggtgaaacagaaactaaatatgtaaagtcaaaaggacaattgacttattttgctactttaatgaatcagtggacaaatgattattcaataaacagaattataaacgaaaatattgatataaaaagaaccattgtcattgaacggggacaacaaccaataccttttgacaggaatgatattaatcatgttaataaagtgatcgatgacattctttataacatagaaagaattttatcgttcttttttgaaaaatacttcaatcattactataaatgtctggctgcaattttaggggaggacaatgcgggacataattgggctacatttcttgagtatggttctaagaatccgttatgtattagcttacaaatattaggtgtttcaaggcatgctgcaaatataatttcctcttccaaagaactcaggaaatatttaaatttcaatgaggactcatatgagataattagtgttaacaagaaagggttgttgaattctttgcaaaaagattctgttgaatatggagaggttaaaatatttctttga

SEQ ID NO: 106069 - DNA, 1587 bp, Enterobacter aerogenes
atgagtattgatatagcagataagctgggagtaaaagtaagctataacaataaaaatagtagtggttttatttgccatggtgatgattattcttacgtattaacagcaaagcattcaatatgtaaattcagtcctaatgattgtaaatttaaacataagaaatgtgatacctgtgtttttagtggtgtggcaaaaactaaagtaagcatttgcaaacctgatactgatacttttcccctatgcaaagtaaaggatgttttactttctccaaagaaagatgttgctattttggtcttaaatgaaaaatcccatcttgatttaaaaacaaaagaattaccaagtacaaaaatcattaatactgctaattataattcatcacataaatttgtttcttgcggttatcctgcaattaatgaacatcaatctgttcaacctttgcactataacaattttagtttatttagaaatgaaaaaatttgccttcaaattattagtgatacattgactgcattagaggatcctaaaaatggtctttcaggaaactctggtgcagggattattttaaattcatctagttgtgtgggattactagggctttataccgatactggtgattatggtatttgttatggtgatatagtcgatttttctataaatgaacttcttacatcttctggatacgtccctttagaaatggaagaagatctctctaataattttaaagcactaattcagtctgattttatggagtgctttgttcgaatggaatgtgacttaaatttagacaaaaatcggattgttaacctttataggctttgtttagatggtaaaaaatataactatgttaagattggtgatcggttaattgattgtattccatcattttctctttcccgtaagcaattaatgaggtgtcgtgagagaaatgcatttggaaaagctacgctatccgcgatacgtaattttttgaaaatagaaaggaagactaaaatatccgaaatgttattacaaggatttcttgaatcgtacctgcatgcgcctaaactttattcatttgatgaaataaataatgcaggttttcatggcgcccatgttaaattcaataagaataggaatgttgagttaatccattcggctgcatttatatctaattcgttatcggatggcgtttcatatgcgatagatgttattcttaaagcatttcctgagttaagatcgttggatggtttgcttggtaatacatttttagaaacaaactttaccgaagatgagtgccaaatcctagccagtcttctcatcccgggagagtcttcgtactcgcagggttatgaagacagattggctatatttattggctataaccataagattgaagagtcactcatatatgagaatgcatctaggtttccgtctttgcttgaacaaaaaattattctcaatgttcagcaggcactagaatatcggaaagaggaaatcaataagttatcaatagttaatgcaactattgattgtttttttgttccattcgatgatgtgaataaatttaatgacgagttcattgagagtctgaaaaatgaagaagcttga

SEQ ID NO: 106070 - DNA, 1077 bp, Enterobacter aerogenes
atgcttgaatgtcatttctatgcgctacctgctggccaaggggattgtttagtaattcaatttcagggagacgatggtggatatcacaatattctcattgatggtgggaatagaaatcaattagaatttaacatacagaaaagaatgttaatttcgataattgataatggtaataaaggaatctttgatcttgtaattgtaacgcatagtgatgacgatcacattttaggtattcttaaaattatgggagacagcgatttagagccactcgtaaaagagttatggtttaattctgaaaaaacaataaattctttttttaatactaaatgtaaaaatacacaaaaatataaccttgaagggaaagtcatcggtagtaataagtcatcaagggcgcaggataacaatttatacactcttttagataaaggtaataagtggaataaaaggattatattgtcagggatgtcagaaaaaatagctaatttgactattaatatattatcacctactaaagataaattatctgctcttaataaatattggcctaaaaaaaagttaggcccagttaaatccagtggagaatatggatatgattataagacttcattgcgagagttttatgagaaaattgataattttacagaggacgatagtgttgtcaatggagctagtatagcattaagtattgaatggaaagaaagacgattcctgcttctttccgatgctcatcctactattgtcgcagcaagtataaaggatttatacggcgtagagaaaacaacatttgatatagtcaaaatgtcccatcatgggagtgcgaaaaatatcaataacgatttgctctctttgatcagttgtcgtgattttgtagtttcagctgacgcaaataaacggcattttcatccgaataaagaagcgttaagtcgggtgttatttagtaatggtatagaaaacactatatttcattttacttacgacaaggaagagttaagaaatatatttttatcggagccagatgttatggtgaggtttccatgcaacaaaaatgatggagttcatctctcttatgagtattga

SEQ ID NO: 106071 - DNA, 438 bp, Enterobacter aerogenes
atgactctgaggtgtctgttaaacccgtggcgattcagtccttacttacttgccgggcgctacagtatcaacaaaccgctgtctaatgcagctctcaacggtgttatcaccacgacagtaaaagttgcacagtcgcaggggaggtcgctggagcattttaccgtccatgacatgcgaggaactgccagcgctttattacatgagggtgggtatccatcagactggatagagaaatgcctcgcgcatgagcaaaatggggtgagggcaatttacaacaaagcgaaatacgcgcagcagcgtgcttacatgttgcagcagtgggcggatatggttgataggtggatcgccgggacgctggtgaggcttataccgttttctccaaccaactacgaaaagtggatgttaggcgaagccagtgatttaaattgcagtaattaa

SEQ ID NO: 106072 - DNA, 702 bp, Enterobacter aerogenes
atgtttacccttggcgcacacctttcatccaaacgtaccggatatactcatcatggtatttacattgggagtggtaaagttatccattattcaggtctggcaagtgggttaagcaaaggtaaaatctgtgagacttcgtttgaagacttcaatcagaaccagagcgaagttgccattatcgaacatctggatgctaaatgtgtttactccaatgtagatattgtgaaaagggctaaatccagactgggtgaggatggatataatatattcaacaacaactgtgagcattttgcgacatggtgtgtgactggcgttagtgaaagcgctcaggtcaaaacagtgaagactatggcagtatctgtagggcaggcgggggtcaatgcttacagctattataaaataactcaaacagcccccacggtattaagaactgcggcgtccatggcaagccgtcaggttgctacgcgagctatagcatcaggggcaatgacatccggtacttcagcattgaccggtatatcgtctgttgctagtggtgcagggttaactacagcagctttctctggtggagcgagtactattgttggcttaactggagcttcagcagctacagtagctgcggcccccgttgtgcttgccgcgggaggcgtagctttagttgggtatggtgtatataaagtatggtcatggcttagcgactaa

SEQ ID NO: 106073 - DNA, 777 bp, Enterobacter aerogenes
atgaggactttttcagaagaactgagaaaagttcgggtttcactgaacaccataacaattaagaagattaactgtctggtaagtgattattttattcataaaaaaacaaatatcatgataattgattttataaaaagcaaggaagccttgctaatattgacaataactgttctgtcttatatgtctgcaatttcatttgaatatggctatgcatatcattttgattatcctatggagtttataacgttagattctaaatttttatttgtgggtatgtcatatttatttttcaatataatttgtgttatgttgatattttttactccatggcctgaaagtaaagtaaaagcagttcaggttactgcagttacagtttttattatggttgtttttattgttcagtcttatagacatgattcagaatacggtggctatttcgttttaagtttatcaatagcaatagttacttatattatatacagaattgttaaaaatcataaacgtaatccaagttatttaatttggtcggcgacccttccccttattgccataatgacatttagcttcttaattggtttacaacaagcatcattaaaaaaagaattcagttactttcatgatcaagttaaagactatgtgattattaggttgtatgacggtaaccttgtcgctaaagaagtgaatataaaagagcgtaagctagggagtgagatattatacatacctagctataacccagcccctataacgttgaataaaattaaaatagaaaaatag

SEQ ID NO: 106074 - DNA, 729 bp, Enterobacter aerogenes
atgagtaacccattcacccttgaaatacttcaggctatcaacgattggcagcgcagtacgactaaaaatcgtggtataaaattagagactctatgtgtaaatcttccggctcaatacaaaactgttgattttccatgctacaggaaaataaatttgcagaaggatggagtatttagcatgttcgcccactatcgtctcccggaaagaatttcctcatggtcttcttcagtcgacgtcgtcaaaaattttaaacacggtgtatcgttaaatatcgtcgaacagtcttttatctatcaaactattccaactccaaatgaaatcattcttaatcttatagcagtctacaattcttctgattttcaaactgctcttagcctacatagaaagggtattgataacattcatctaggtattgataaatatggtaataagcaatttgaagtggtcttaaaaaaggattttgttacacacaatgacatatacatgctgggtggtcgttcaagcgctttctgtgtttctcactctccagtcatccaaaagatgtcattaagttacttggattacgatatcagaaaaaataaagttattgctttcaaatggttaagccatgaaataacacgacgaatcattgataggattctcaggaagtaccctcaacctttcaatgcttatgggaagagctacggatataccatccctaagaaaagaaagaaaaaatctagaaggtga

SEQ ID NO: 106075 - DNA, 732 bp, Enterobacter aerogenes
atgatcataaataaccttaatgaattattgatacctgacgctgatagaaagagtcaacctttagataattttaatactcaatctgatacaacaagtgtttatttccgtgatttggagaagcatttagttaaccatatcaagtcagcagatattgtgcttggtgctgttgcatggttaacaagttactcagtacttgatgccttagctcaggacgataaagaagtggtttttgtgattcaaaaagaggacttcttaaggcctgatattggtgcaaaaaatgattttaaagaaactttaagaaaaaaatatagcaagctaaaaaattctctgacgcgctatgattttgaagggacgattcttccaaatatgtcttatgctggtgatccttcaattgaccctgtgacatgtgtcggaaacatgaataatgctaaggctgcggcattcccacgaatgcataataaatttattatttttgccaaaaaggatattgattatgatgttcctgaagatcctgaaagtggttcaaggatgaaaattagtccttatgctgtttggactggatcattcaacataactaaaaatgccggaatgtcgttcgaaaatgcactttacataactgatatgaccatagttaatgcttattatcaggagtttgctcaaataacagcattgtcagaatcactcaattggtttaaggattgggtagagccgcaatggcgtataggcacttag

SEQ ID NO: 106076 - DNA, 567 bp, Enterobacter aerogenes
  misc_feature (486)..(495): n is a, c, g, or t
atggatgaaaattcaatcaattttgaaaagatatgcagtgttatggaaagcatggatgtagaaaggattatcataaaaaaactggctaataacgataactcaaaacagcaaatatatttaggatcagactattcggtgatccaggatctacctataggcgaaataaaaaactccggtatgtcatctaaaggtgccatattcaaagctccaattgacctattttggattactcttggcggggaaaaagaaaaagcccctggctcacaaataattctatacccaaaatatcctgaaattagactatcaggaattatagccaactgtgaaatatccccctctcatttaatgaagcctcctacaaagaaggaacgagaatcaaggaataacaagcacagatatcttattatcgggataaagagcgatcatattttagcgtatatgacatcttgggatgatgatgcttcaacagaaatatcacgtgagatnnnnnnnnnnaattctctcatgttttttctgttttttatgaaatatctaaattcaaacaagaaagcaaaaatattcttataa

SEQ ID NO: 106077 - DNA, 264 bp, Enterobacter aerogenes
ttgataaaaaggaaaatttttaatatcgaacaagtcaattggggccaaaatgtctatatcataaaaatgttttgtaatcttttgcaactgacaagtgcatatttcatcaaaaaaaattatatccaattgatttacattgaattctccaacgacctttctttacttatcctcgtcagactatctcgcattcgcccgctttccgctatcgaagtcaagtacgccgcttttccattcacggcacaatcacagcttttaaatccataa

SEQ ID NO: 106078 - DNA, 1197 bp, Enterobacter aerogenes
atgtcgatcaagtctcaatcgtatctttaccccaccccagagggggtgtggatgttccagatttttgttcccaaatacatgcgccacatttttggtggaaaaaagctttaccggaagtcaacgggaactaaagacctcgccaccgctaaacacttccgtaatcacatgctcatcgagtggaaagcacttaaggcgcagtattgccccgatacagaagaaaggcggataaacaacgcaatccttgagctacgtgctcaaacagtactgaaatctcccctccaggctatccctacgttgattgaaattcgtgatcgatatgctgatcagtacaaagaccggcgatcattctcaactctggcaaaatcagcgagaagtgttgaggtattcctaaaacatcttgagtgcgcagatatcaaaatcacaaagatcaggcgatcacaggtggctctgtttgctatgcggcatatcgaaaagaaagccgatcaaaccgttcaaaactggctaacttgtctgggaagcctttatgagtttgccaggagggtgcacgacgatattccaccggacaacccttttcacggtcataacctagaggcacggcgcacgatagagagttaccagccattcaccacaaaacagcttgtaacgcttgtagagaatgcagaggatgaattacagggcgtgatcctgattgggctatacagtggaatgaggcttgatgaaatagcctctctcaagcgggatgacattgtagaaatagacgggatcagagtgtttagtgtaacaaaatcaaaaacgaaggctggtatacggtgcgttcccatacattctaaaatacttcccttcgttgacaggtggctctccttaaaatctggtgaatatctcctaccaactgctaacagaattcaacgtgcagacggtaagaaaggcccgtattactcccaggcattcaccagactgagagacaagatgatcccagaggccacaaatcgtcaatgttatcatagccttagaggacattttataacgtgtctggacaggaacggggtagaagaaacgagagtcggcactgtcacaggccaaattgagaagaaggctaaaacagaggcatttaagacgtatagcgcagggccattaatgaaggaattaaaacaaataatagagcttgtgtcatatccagaaatagaaaaggggcattaa

SEQ ID NO: 106079 - DNA, 1803 bp, Enterobacter aerogenes
atgacaactaaggtagaagccgcaacactggttaacaggattgtttataaatctgatttaaatagtttgaaaaaagtcagaaacgacatgaagaagttgcaaaaggatttcagcaaaacagagggaactatagccaaagcaaaaatgcaggctcaaaaacaggcgtacactgcacaaatgcagcagcagaggcaagttcaacaacagcagaaacaagctgcaaaacaacaagcagcagatgctaaagctaaacagatagaagcccgtaaactggcagcagcccagagtagagcggctaaaatccagatgcagcaacagcagaaacaggcctcagtagcagaaaatgcccgattggcagagcggaaagcgctgtttgatattggcagattgcagggtctgaatggtgcggaacgtttccaggccatcaaacatgctcaggggttaattgattcctataaaaatcaaactcttactttgagagacctcaatcaacaactctcacagtacatgactacgcaacgtagtatttccagaaataattcaaaacaagcgaagcagtcaggtaaaaggaaacaatctggatcatctggctggctgagtcgccaggcaagcgcatttatccccagtgagatacttggaccaacagccgccgcttatgctgcccaacaggcctatcagattatggcggggacgctggctggagcgattgaacggaaccaaggaaggaagatgatccaaagttttggcggaaatgatcttgaatatatgagtttgcgccgtgcctctctcgctaccacaggttttgacatttccagggacaagtacgccgacatctcaaaggactggctcgataaacagggggatttatcctttggtaacacggataagaatggaaactttaccggaggtggggaactatcagacttggtaaatgtaatgcgtcaacgtctgggatataccaatcaaggggcagtcgcaaaattaaattcatttaaaacgccagtcgagtttgctgtatttatgcgtagtctcagagatgcaggcaaagtgactcaacaagaatttgttaacttcggtgaacgaattaatgatatgagttatgtattgaactctgtttcaagtggtggtgaaaatcttctcaagattcaaaatgaattggttgattctcatttagccctgaccactgcacagcagaaatctattaataatctgactgagatgtcagcagtatttaaccaagctaaagaatcattaggggatcagtttgccgcatcttttagtaaaggtttagaggatttaggaattaatactcagaatttatcttctgaaatgggttcattggtgcccctggttaaagatttaggaacgggaaccgctcagactgtgaaaggttttaaagatctacttgatgttctgtccattatttccgaatggaaaaatagacttttaggtgagaagccagaagacaggaatatccttcagcaaggggctacgtttgttggtgaatcactgttgccaccgggtgtccttgatatggctggcaaagtgaaggcctggttaacgccagagggaaactctgttgctgcacaggctcagagtggagcgctaatgaatcaaatgatggtgcagaccccagctatgcagtaccaaccagtcatcccggatttaaaagctgattttaaccttaccgtaaatccatctcctgaatttggaatgatggtcgaggctgtagcagataagcgcattgagtgggcatttgatgatcagaacttccaaattaatcaaagtattttaggggaatga

SEQ ID NO: 106080 - DNA, 267 bp, Enterobacter aerogenes
ttggtatatgacgaaaacagcattagagttttaaatcaggatgaactggaacaccattcagcagatagtattttggaaattcttctggatgaatatccgaatacatcacctgaccacctggcgaaaatggccgaatgcctggtcacattaggttatggtgcaaatgaatatcgggactatcgaagcggcaccctggataatattaaactccagacaatgcaggaatggttctctaataaaaataaagaaagaaattttagaaaataa

SEQ ID NO: 106081 - DNA, 1116 bp, Enterobacter aerogenes
ttgcataaccgcgcgcggtacggggtaaaacaatccatgagcgataaaaaatatggtgctgttattacactggctggcaccgccaggctggcgcaggcagcgttaaccggggagccattggcgataaagtttatggctgtcggggatggcggtggtgcgctgccttctccttccccatattctaccgggttggtaaatgaaaaatttcgcggtgagctgaataagctgatcataacggagaatgacgccagcgttattgaggctgagatgatcatgcttccgcaaatcggtgggttctggctgcgtgagttagcattatttgcggatgacggcgtgtgtattgccgttggtaatatgccagaaacttacaaaccgcttctttcggaaggctctggccggttccagtctatccggatgcaattaaagatcagcagcacagaagatgtggaattgattgcagatccgtccgttatccttgcgacagctgatgaggtgagaaaggctaaagatgaggcgaaggactacgccgatcaggtagtcggcgatctcgataccagcattcagcaggttatcgttgacgctatcactgcggcgcgtcgggacttctgggaagaagaaaacccgctaggaacggtgcgcttctttgctcaaaatatcgatccgaacgagaaatggccgtggtcgcaatggacttacactggcgagaataaaacaatccgcgtcggtaaggccgatggctcaaatgtgggcgccactggtggtagcgacaccgtcaccattcagcaagccaatctcccggctgtacagattaatgtaaatggatcaaccgccgaacatccgggaagctatcaggagacaaccgaaaatggcgcgcataatcaccaagggggagatggtgcgccgggcgcttcatggcgagagactactcacggaacagacaatcagaaaagcacaacctataacaatacaagcgatgcaccagcgcataagcatggcttaactattccgcctcatagtcacacagttactgggaaaacggataatcttggtaacggtcaggcaattaacgtcgttgaggcgcacacactgttgatgtgctgggcgcgggttgcatag

SEQ ID NO: 106082 - DNA, 717 bp, Enterobacter aerogenes
atggaagaaataaagaaaattctaaaaagtaatttcccattaatagcgtttttgacatcaatcggctatttgatgtcttactactatcagttgtctatagcaaactactacgggtacccggaagaatacattgcatttgatttagacactttattgcgaacgtttgctcttttttttacccttgcacttattatgttaactccgctgtttttaacgccacaaaaaagtagtagtagcggttggctggctttaatttttttgttgtttttgttttttatatacggccttatattttcttttgctaaccctttcaccttttttgcgaacggaaaagccataagtttaccaactatagttggctattcaataatacccgctgtgactttttatactttgctttcgtattttgataaggttaggcatccaaagttgggaatgtttgcgatagtgcttttagcgttcgcgatttacactatccctaatctaattggtacgttttcttcatatgcgaaagtcaaatattttcatctagaaaaggatacacaatacgtgcttttaagctcgagtggtgggcgtttaatttttggcacatgcaatactaatggtgtcagttttttacttaaggatagttcgtctgtaggagagttaattccagttaaaactaaaactgaaggaattaaaattcgggactgtttcttcaacagggattttaaataa

SEQ ID NO: 106083 - DNA, 204 bp, Enterobacter aerogenes
atggcaacaggcaacgtcgaaaacttcgcgatcattgtgttgatcaatggccgcacatcgcaggtgaaactcaccaagtcccaaaagcagctatttgcaaagctcacactcggcgcgctgtctgagagcgatcaaatccagctgatgcctatcgacgatatggtaaagctggaaccagaccacgaagccttttccactgattga

SEQ ID NO: 106084 - DNA, 201 bp, Enterobacter aerogenes
atgcatacctacgaactcacatcgaaggcccaaccgacttttgaaatcgtggaaaatggtcctgatgcgacagactatgttgtcgatacggtcaaaggtgagaacgctgctcgcctgagggcaagctcatatcaggatcgcaacggatatctcggttacggggataccatccggcccaagattaacacccttcccctctga

SEQ ID NO: 106085 - DNA, 261 bp, Enterobacter aerogenes
atgcaggagtattcacacattaacgagctgctggctgatgctcagtttgccaggaacgaaccaatatggggttatgtcaccgatcagaacgtcgacgttatgcgctttagcaaccaggaatatattcgctgggatttcattctgcgcaacgggaaggatatacactttcaggaaagtgccgaatggctgcgtgacccaagggttttaactcgccacaagcaatatattctggaggttatccagaaagccgaacaacgatga

SEQ ID NO: 106086 - DNA, 540 bp, Enterobacter aerogenes
atgtatcgggctagaggtcggaatcctgactattgcatatgcagcgatgtacgtataaaactagccgacattaatataattattttcactcagaggctacctgtgaaaactttattccccttaatactgtttatcgcaacttctaccgtatgcgccaaagaagttaaatatgactttcctccagatggggaaatggcaaaagcactcaaaccagaaattgttggcgtggctaatacagagatggtcaatagaagcgtacgcttaaaagctttagatgtgggtgaaaaagatgtttctctcttggtagtcataggtgctaccgacaccagaaaacccgctaatcaagctaacatccctgacaaacaatcaatctcattaactaaacagcaaattgtgaacaaatattgtgcaccgtttgggtatggcaattggtactttgatgccttcaaacaacggggtgtaaaactgcactattacttttactcggcagcagacacccagttatttgcattcacagtcaataaatctgattgcgattaa

SEQ ID NO: 106087 - DNA, 720 bp, Enterobacter aerogenes
atgtacaaagctatattaaagcaattccgaacactttacaaaaagaccgatgatataccaggaggaactaaaacaaaaattatccttacttgtttcctagtgataatctttattgccatttcaagctttcatgaaaaatcgttagataactggcttagtgcagttagcgatataataatggcaacttgtgcatttgcagcattattaaaggtcaatagttatttttcgtcctacgcagcgaaggatgcctacgatgcggcaaaaaaaataaaacatgaaatattccccagaattttagcagcaaatagcattaattacatatgtttggagatcagaaggaaacttgacgtaccaagacaatatccagaaaaggtaaaaatagaagatgtaacagaaaaagtaaatgaacttaatgcagcactcactcaagaaaaaaataatttagcgcaaaatgtgtttgaactgcaaaatcaaaataaaataatcaccgactctctcaggcatttagagaatacatcattaaaagaatataaagatattcatcaacaaggaatgttagtctggcgacttgctacagcgcttaacatgcatcttacatacacactaaatgacattccttcgggagacttcgattacactttggtatttaaacaaatcgatgatgtattagacgcctcaagccttctattaaataagatcaacgaagaacttaacgaataa

SEQ ID NO: 106088 - DNA, 225 bp, Enterobacter aerogenes
atgattaatctatcggatgtggcggcaggggcctcgtataccacatccacgttaagtggtggctactggctactgcaacttctcgataaggtaagcccgagccagtgggcggctatcggtgttctggggagccttttctttgggctacttacctacctcacaaatttgtacttcaaaatcaaagaccgacggaaagaggctctgagcgatgaacaccaaagctaa

SEQ ID NO: 106089 - DNA, 717 bp, Enterobacter aerogenes
atgacagaacttcaggatgctcttaaagaacctttaggtaaattctttgcatgtctatttagaatttatactgataaatctcattcaagttataatgaattttgtgaactgtacttagagttaaataatgtcgataggggagatgaacaagagtcaaagcttattaataaaatatccgatctgatctctatttataagttagaaattgacgaagctccgagtgctgattgtatactaagtaaaatcaataagacattaaaatttatagggtggagtaaatttatttctaaatggggccagtataaatcaaaatcattcagagataaactttggagtaaattggagagtcatcttaggtatactattgatattacaaattcattagtagaagcatccaaaatgtttattgcagaaaattgtatacatataatgaatatacacaaatcaaaggggctggaatacaaagttgttatttttcttggggttgaggatcaagctttttggaaatattcttctgaaaatttcgaagataagtgtgccatctatgtggcgttatcaagggctaagcaggaaataataatttccacatctaggcatagaggttttcgatgtaatgcacgcagggatgacagcatttcaaattataaaagggtcaaggaaatatacgattttcttttgaagaattgtctatttactttaactaaatatgaaaagtga

SEQ ID NO: 106090 - DNA, 1263 bp, Enterobacter aerogenes
atggcattaaccgataccgctatccgcaagatcaaacccaccgagaaatccttcaagattaccgacagttcaggactctacctgctgatcaaacccaacggctcaaagctctggtacatgaagtaccgcatcgacggcaaagagaaaaagctggcctttggcccctacccggacgtttctctgtttaaggcgcgtcagctacgcgatgccgcccgctccagagtgcgcgaaggggccgatcctgctgctgataagaaaatcgcacaacagaaaaagaaaaacggacataccttccgccatatcgccatgaactggcacgccgatcaccgacgctggtctgaacattatgcgacaaccatccagcgcaggctggaaatgtacgtgttcccggatatcggggacaaatttatcgatcaaattgccacggaggatttgctgtttagcttgcgtaaggtcgagagcaaaggctttctggagatcaccgcacggctgaaaaactacataacggagatcatgcgctatgcggtgaaaaagcagttaatcaaatcaaacccggcgctggatctggacggtgaatttacgccgccggaaacacagcattacccagccctgccgcttgagaaactaccagaattattatcccgaacggataactactccggcagactgctgacacggtatgcgcttaagctgtcgctgctgtttttcgtgcgatccagcgaactgcgctttgcccgctggagtgaaatcgactggcagcagaaattatgggtgatcccggaagaacgggagcagatcgagaacgtcaaattttctcatcgcggtacaaaaatgaaaacgcagcacatcgttccgctgtccgatcaggctattgctgtcttaaaacaaattgaagcgctttccggtcatctgacgtttatcttccccggcgaatacgatcaggacaagtgcatgagcgacaacactatcaacaaggcgctgcgcgtgatgggatacgatactaaaaaagagatctgcggccacggttttcgggcgatggcgtgcagtgcgctgagtgagtcgggattgtggagtaaagacgctattgaaaaacaaatgagccatcaggagagaaacagcgtgcgtgccgcctatattcataaggctgaatatctggaggagcggatcgcgatgatgcagtggtgggcggattatctggatgcgaatctcgacaggtatatttccccttatcagtatgccgcgcctctgaaaaacgtatcgtaa

SEQ ID NO: 106091 - DNA, 285 bp, Enterobacter aerogenes
atgatccctgaacgactgaaagccgcaaggctacgggccaaccttacccaggagcaactgggcgtccgcgcaggcatagccgaagacactgcttattcaagactctcgcagtatgaaagtggaacgcacaaacccacgtttaaaatggtgtgcgcttttgcccatgtgctaaacattcctgaatgctatttctacacggtggatgatagcttcgccgaagcgctattaaggctgtatgacggtgaagttgttcagtggaatatgaaagcgggggattgttcttaa

SEQ ID NO: 106092 - DNA, 228 bp, Enterobacter aerogenes
atggataaagacgactggcacccagcagacatcatcgccgggttacggaagaaaggaacgtctctggctgcggtatcgcgtagggccggtctggcctcttccacgctgaccaatgcccttaaccgccactggcctaaaggtgaaaggctgatcgccgaagcgttaggcgttgcgcctgaacagatctggccgtcccgctatcgtaagccggaatatcgccagagctaa

SEQ ID NO: 106093 - DNA, 867 bp, Enterobacter aerogenes
atgggtaagttaagcggtgaaatgaaggcgctggcgaaacactgtggcggcagccataaaacggtgaacgatcgcatccatatcgtgcagcgtttcgaccaccacttacgggcgctgaatgtccagatccagcgggtggcgcagattaaggttcgccacattgaaagctatattcatgaaagactggcgcaggggatcggcaaacgaacgctacagaatgaaatggcctcgttacgtgccgtactgcaacattctgggcgtaagcaagtggcagagcatgagcggctaactaataaatcgctgggtttgtctggtgcatcgcgcaacggtacgcgacaggctattacgccggatcattatcgtcatgcactggaaactgcccggatgaaagatccggggctggctgcggcgctggaactctcaaggctgatgggattacgttcgcaggaagcggtacaaagcgcgcagtcgctgaaaacgtggaaacaggccgttgaacgcggcgatacgcgcttaaccgtggttttcggcaccaaaggcggacggccccgtgaaacggtgattctggatgctggcgcagtcaaaaaagcgctggataatgcgttggctattgcagaaagctgtcatgatcggctgatcgacaagccggatctgaaaagtgcaatggactactggcacaaccaagcggcgcgcattggtctgactagcgcatattctccgcattcgctgcgctatgcgtgggcgcaggatgctattcgtcactatctggcgcaagggtttagcaggaaagagacgctggcaatggtggcgatggacctggggcatggtgacgggcgtgggcggtatgtggcgcaggtgtatggataa

SEQ ID NO: 106094 - DNA, 1047 bp, Enterobacter aerogenes
atgaaagataaatacacacttaatttactgattgattgcgaaaaacatgttaacgacatgtctttttggattaatgatataaaaagaaatagtaaattaaatagtataattaaaagcaaggcttttcaaagacttaaatacatttcatttcttggcgcaattgattatagtgaagataataaattatcaaaggaaaatagaagtagagcaacacactcattatatgttgcagccttagctaattatatatcaacacataggggatataatgaggatttaaaaaacaaccttatagctgcggctttaatccatgatattggccatatgccattatcacatagtgccgagccgtatataaaaagcaaacttggatatgggcaccatgaaataggtgaacaaatcatagatggcgaaggtgatactgggttagagcttaatcgaattttaagttctagtttcgactccgtatttataaaatcattactcaataataagataagtgaagatggtggggatttatttagcaatcaaataaatatagatactattgatggcataattagaagccttgagtataaagggaaaaacaaaacaaatagattgaatagatttgagatagcaaagcatgccttcttaattactgagtgtgagaaagaaaaatacaataatctagattatttttggcaatcaaagcactttgtttatcatcactttataaacaaagattatgccttcatatctgacaagcttagtcagttgttttttatggaaaatgaatcgatatgtgaacaagatttatattctacagaaggcgtttgggtaaaaaaatatacaacgttattttcttggctaaacgatctaaagcaaaattcacttcctgaatgtttgaaagaatatgatcttgaaatggtatcgagaacatattacatagaagataatgagttagatataaataaaagatacaagaatactaaaaagaccaaggcagtcgatataagtagatttttagataatgatcatattcagttaaaaatacaggaaatttaa

SEQ ID NO: 106095 - DNA, 399 bp, Enterobacter aerogenes
atggcaagaaaattttatgataaagaaataaaagctattgttaaacttattgaaacttggagtaagcctgattttacttgggattctttatgcatggcttgtaaaaaaattttaggtaaagtaccaacacggcaagcattaagccagcatagtgagattgtcgttgcttacagaaccagaaaaagatctggtatggttaaatgtcaaaatacgaagttacctggtagcctgagccttgcagcgaaaagaatagaacgactagaaaatgataattcggcactaaaatctgaaaataataatttactgcttatgattcaaagaatgcatgaaaatgcttacaggcataatatattggcttctattcttgaagaagaactgccacagcgagcaagaaaataa

SEQ ID NO: 106096 - DNA, 429 bp, Enterobacter aerogenes
atggacaaacacaattttaattcagtaatgacactggaagaacagcttgttgtcatcgtagataaatacatatcgaaacgatatcagtcacacgataaaagtttctctgatcaactctacttggtgttcgttggctatcacttaaagtatttctaccccaggcagttatatacacgttctaatagaaacatagacaacatcatgacgatgtttagttctgtgtataaatgccttacaagtaatctgttgcgacagttatacaataaagaagctgttcttcgtgaactaaactctcttgttaactacatagatggcaatcaagaaagagcggaagagatctacgcaacatttaaagctcaatatgaaatgagagtcatagagaaagaaataattcatgagatcatttgtgttaatcgtgttagattgtag

SEQ ID NO: 106097 - DNA, 318 bp, Enterobacter aerogenes
atgaaagcatatgctatgcttacaatcattctttctactttcctattaaccgcatgtaatagcgaacccagtcaagatgatatctacaatgcatttaagagtgtggtagataaaacaaatgccagtatgaaagcttttgattcaagagtttctgaaaatgatctattaagaatcgattatgttaaaaaagttagctgttccgaagaagccaataatgtttataactgtatagtagatgcttctattagcaatatgaaacaaacaaaaccagttaaattagtgaaatctgatggtgtctggaaagagatacaacaataa

SEQ ID NO: 106098 - DNA, 279 bp, Enterobacter aerogenes
atgaataacgaaacaataaagtgcccgttctgtttcaaagagagtcagttcggagtacgtgtctgcactggctgtcacgcaacaattaactatggtgttgtttcaccgtggcttgctttactaataggaatagtgctgttagcgattgcttacctcatattcgctatcagtcaaagttttatattaactgccgttatctattttgcctcagcaatttttttaagattttatttacgtaagaaatttgcacacagagcagttttcacacacaaacattaa

SEQ ID NO: 106099 - DNA, 1200 bp, Enterobacter aerogenes
atgaagggtatgcagaagatcaaaaggggtaagagcttcgctggtgttgttcgttatgtattgcaaccgggagcacatcataaaagcgatccagtcgtaattggcgggaacatgttaagtggctctgctcttgaactgatttccgaattcaatggcacaaaacagcttcgcccagatgttcagaaggccgtttggcataactcgctacgattgcctggcagtgaatcattagcgaatgaccaatgggtaaccatagctgacgactacatgaagaggatggggttcagtgatactcatctccgttgctatgttctacatgacgattctgccggtcagcacatacatatcattgcaagcaggatagacctcaatggagggaagctctaccttggcaggaatgagaaccttataagtacccgcataatcagtgagcttgaaatcactcataatctaacagtgaccaagacagcaccttccattacaccaaagcaaccgaagcggaaaagaatctctcgcaacgaacagatgctatcagaacgaactggtgttccctgccccaagaaatcccttcaacagatcattgataaaagtttggcagatacgcctgaccttctaaccttcacaaaacgactggaggaagccgaagtatcttggacggctaacattgcttctaccggtaagatgaacggcttctcattctcttaccgcgatatagctttcaaagcttcgcagttaggcaagagttactcctgggcaaatcttagtaaccgtcttaactataaccccggccacttagaagttctgcgaatcgacatacctgcaaaggaagtttctcaagctcccatgccaatatctgctcctgctcctgctcctgctcctgctcctgctcctgctcctgctcctgctcctgcaacaattttggaaaccagggagcaaaaggaaagtatcagtgaaaaaattgctgaactcgaactgcgactcagaaaagacagacgaaacgagatcgttgagaagattctccgaaagaatgcggttaaccagcaaaagcatctcaggcttatcggctggattccatttctcagaaggctcgcagagcttctccgaagctatggtaagagcattctccacaacaaccctgcaagattctcaaaagtctatgcaactcagcatctcagtcggaaaagaaaaattcgtttatag

SEQ ID NO: 106100 - DNA, 420 bp, Enterobacter aerogenes
atgaaaaaaaccaataaaacattaaactcatcggagcttaaacatcaaaacggaacccgtaattctgaagaattaagaactcattgcgtaagtgtcagattaaacaaaaatgaattaatcaaacttaatgccataagaggctcctataacaaaggggagtggcttcgcatgtcattcctgaaaaaactgccaccagtagtaccgacaattaatactgaagcttggagaaaattgtctgacatatcacaaaagttgaatcgtattgctctccatatcgacagtaagagtaaagatagccagcttactcatacagagcttttcgctgtgaaacgacaactgcaagagcttcgccagcacctgctaaatgctgacatatggagcaaaccctatgaagggtatgcagaagatcaaaaggggtaa

SEQ ID NO: 106101 - DNA, 945 bp, Enterobacter aerogenes
atggctttgtcgttgccaagcatgaaacaactacagcaattcaataaatttgtagacgactgtataagtcatctcggtaacatatctgaagaagaggctagggatatttattttgaaaatgaaaacatcaatgttataaatttcagatatgcgactaaagaattattaagaagtgtttttaccgaaacgaaaacaataaaagaaaaaactaacttttacagagtcaggctattggatgatggtttggattactataataggattgaggatgttatttaccctccaattggaagtgcgaagattggtcgattaaactctattggaagtcagctactttatttgtcaagtcatgagttgacggcgatacaagaatcaaggttgttaggtgtttgtcaaaatttaaagaaagatgttcgtttccagttgacacgttttcagataatggaagatattaaagtaatagaagttggaggttttattgagccctacctgtcatttccaagagatggggatgctattagggaatactttcaaaattacatcggattagactatacagattcaagcctcaggattatttccgcttgtgaatacattcttctaaaagtacttaataattgcaaacctaatgcatattatctttcatcaattctttcagaagttatttttgatataaacaatgaatacgaactggggatagaaggtattagatatcaatcaacaatagatgagtctagagttgttacaggagtaaatatagcttttcaaaaagatgcatttaaaaaaatggatattagaatgacctctgttaacaggccgattcaattttattttggtccttttatggattatgaaacagaatattgtaatgaaggtccagaagacaatgatggtatttttaagatgaaaaaaaaagaaggctttttcagagagagaataagatag

SEQ ID NO: 106102 - DNA, 192 bp, Enterobacter aerogenes
atgaaaaaaaacaaaaagcgagacttatcaaggcattctgataactcaggcaaaatgcagatgcgtattggtagtgataatagagttcagtatgtttatgtcattgcttcaccagaagataagaactctactactgagtcatcccaccgaaaaattgatgctgacctttttgccaaagcaatttttgattaa

SEQ ID NO: 106103 - DNA, 642 bp, Enterobacter aerogenes
atgttttacttaccctcgtcatcaacagttaacaaacatttatctgaacactgggacaatataaagccattttatgatgcccataatgctgaagcagcatcaaaacagatatcaggagttttggtatcaatagctgctctaaatgatactttcaaagattactttagcccacaaaaaattcgccgtaagaaaccactacttttacctgtctgcttggatcaagccggtttatcaacacagtctataccaggtgctccggaagcctataaaacgggtgtatatcaatatttgccagatgttttattagacgtctcaaaatggttaaaaatcactcaagccaatcactttactgaagaacaaaaaaacgctatatataatttttatttgaaagacgtcacatttagaagtttaatcagcataccgtgtagagcggctactgatgtaataactataaatgcgcaaaatgaagaaaaactattatttaaagctaatgatattattgcagttctaaatatatacagcaccaacataggtattttgagtaaaaaccataagttattttgcgattttttaacgcctataactaacaacatcgcaaaatgctgtattaatgctgacattacgacaagaaaaccattttag

SEQ ID NO: 106104 - DNA, 165 bp, Enterobacter aerogenes
gtgaatattaatttcaaatctgaagtgtttagcaagctttaccagatggcagagaaacaggataccagcatccctgtactcgttaacaaactaatcgaaaaagtccttagcgaagaggaaaaaaatgaacaaaacggaacaatccttaaaaatacaaatcgttaa

SEQ ID NO: 106105 - DNA, 708 bp, Enterobacter aerogenes
atggtaagtgttaaatctaagattaatccattttcggagcatgtaaggtttcgaaataatctaataattaaaattttgttagagacaggtattaggggaggggaactacttaatattaagttggttgattttgactatgtccacaaaagtctatgcatagtaagaaggccagatgatcaaaacgaaccacgattaaggcaaccattggttaaaactttagaaagaaaaataccattgagtatagaattgactgagttaatacagaattatattagtgatttcagaggtaagcagtgtcatgcaggggagcatgactatctgcttgttactcatagcagtaaaggtcaattaggtcatgcattaactatttcaggttatcagaaaattttcgaacaaattaggaaaaatagtagtgtattgagcgatattgtggggcattcgctaaggcatacctggaatgtgaaattctcagaaatgatgctcatgaattcgaactctcaggatcatattacttatgagaaagtaagaaattatcttatggggtggaaaaagaatagtacaacctcagatatctataaccaagcatttatagcacaagaaagccgaaaaataatggctgttattaacccactcaaaaacatagtagaggataaatccaatgtttcaaactctaagaaagctacaagaaagtcaatattcggtttttga

SEQ ID NO: 106106 - DNA, 816 bp, Enterobacter aerogenes
atgactagtggctgggcattatctgaaggtgttgaacctactgacgaattattagatttgattaaagaggttagttctgtttctatattggctggagctggggcaggtaaaacagagtttcttgctcaaaaagctaattatctgctgcaaactggcatttgtccgtggcctaaaagaatattatgtctttcgacgaaaaaagaagcacaggttaatatcaaagagcgaatcatgaagcgatgtggggctactggtaatcgctttgattcttatactttcgacgcattttgtaaaagtattgtagatagatttaaaaacgttttacctgttaaagatcgacctgataaaggttatgatatagagtttgaacaaaaaaattctaacgggaaagataaaatcagtttcaatgacattagaactcttgcaattagaattattaagacaagacctgatgttgcaaaaattttttcaattagttatagccatgtttttgtcgatgaatttcaagatacaagatttgatcagtacgatttattaaagctcttattccaaaaaaataatactgtagtgaatgccgtaggggatataaatcaaagtataatgctttgggccgatgcctctccaacagtatttaaagattttcggagggatttctctgcaaaagataggtttttgttaaaaaattaccgttcgagtaaagaaattcaagatgttttaacctgttttgtaagttttatacaatcatctaatagttcgatgacagttaacacaaaacctgtctcttatacacatctgacgctgccgacgaaggcttag

SEQ ID NO: 106107 - DNA, 582 bp, Enterobacter aerogenes
atgggaaatttatccattcagaaaaaacttcctgatgaaaaagctatagattttattggtaaaatatttagctctaatccagttaatgaaagggacatatttacatcttctatatttgcattgctcttatgtgctccatctcgaattagtgaaattatgctcttggaagaggactgtgaagttatagttgaagatagtaatggtatatcaagatatggtttgcgatttcattctctgaagggctttggatacaataccaaatggattccagactgtatggttcctgtagcttcaaaggctatcatgcgattgaaaaaacttacaaggaatgcaagggttgtttcacggttgataagagcaggggaaaataatttatacgagtcattaaacagaagtgcatttgattgtttaacaattgaagatctccacaaacttggctttgttataaatcaattaaatatctcccaagaaaatctaaaattcttgtctaagataaaacatggcacagtcagtgtaaaagcattttggatttatatagagcgaaagaatgttaattctgaaaatattaatgctaatttatga

SEQ ID NO: 106108 - DNA, 228 bp, Enterobacter aerogenes
atgcgtatacctctgttggccggcctcactctgctggtttgcggccaggcatcggcaaatgaaaagctgaccctggtactggactggtacatcaacccggatcatgcgcctattatggtggcggaacagattggcgcctttcgggatgccgggctggatgtcaacatcatcccccttccgacccggcgctccctccgcgcctggttgccgctcgccaggcggatttag

SEQ ID NO: 106109 - DNA, 228 bp, Enterobacter aerogenes
atggtggtggtgagtctggcggtggtgagtccggcggtggtgagtccggcggtggtgagtccggcggtggtgagtccggtggtggtgagtccggtggtggtgagtctggcggtggtgagtctggcggtggtgagtccggtggcggtagttctggcggtggctctagtggttccagtctttctaaaggtgatattcagtctgcgatcgaaggtgcttcacccaaaatag

SEQ ID NO: 106110 - DNA, 801 bp, Enterobacter aerogenes
atgaatggtcaagatgctgttcagaaaagaaatgaatatatgcaattgctggatagaaatgaagttgaacaagtttaccaaaattatttagaagaaaacaccatgttcatcccaagagaatttgaacaaaatcatgggattcatttttgtaccgtacttagaaaattaccattatctagtgattacaaaccagatttcgtatatctcgcaaaaagttcagacaattggaatgtggtacttgttgaaatagaaaaaccatcctcaaaatactttaaagataaatccacagactttcatgctgattttaatatggcgttacagcagataaatacatggagagcatggattgatgaggaatcaaatagaaatcactttaaaaacaacacattacaaggttttattgagccagctcatatggcaagaaatccctttaacttcaagtatgtattagttcacggccgcagatcggaatatgaaggcaatgtattaaaaacctcattaattagaggccaacaacgggatgacttttcaataatatcatttgacagcttagctgaaaatatcgaaagaaaatatccattgtatgttgcggtaaaaaagaatagccactatgagctgatatcaaaacagtttgtagatgaaggtatattttcatggatgaatacggacttattagctatatcgaaagaaatacacgatgatgcgattgctcaatcagatagttggcatcattataaaatgaaggatggaggaagagtcaaagtcatgaatgatgtgcttccaaaaataaaaataatataa

SEQ ID NO: 106111 - DNA, 489 bp, Enterobacter aerogenes
atgtctaagaaaattgccgtgattggcgaatgcatgattgaactgtcagagaaaaacgcggcggtgaatcgcggtttcggcggcgataccttaaacacatccgtctacatcgcgcgccagaccagcgcggatgccctaagcgtacactacgtgaccgcgctgggcaccgacaccttcagccagcagatgctggagtcctggcagggcgaacaggtaaaaaccgatctgattcagcgcatggctgaccgactgcctggcctttactacattgaaacggacgagaccggcgagcgaaccttctactattggcgcaacgaagcggcggccaaattctggctcgaaagcgagcgcgcaggcgccatctgcgaagagctggctaccttatctgagcggcatcagcctcgccatcctcagcccggccagccgggaaaagttgctcaccctgctgcgcgaatgccgcgccaacggcgggaaagtgattttcgataa

SEQ ID NO: 106112 - DNA, 486 bp, Enterobacter aerogenes
ttgctcaccctgctgcgcgaatgccgcgccaacggcgggaaagtgattttcgataacaactaccgtccgcgcctgtgggccagccagcaagagactcgccaggtgtaccagcaaatgttggaatgtaccgatatcgcttttctgacgctggatgatgaagatgcgctgtggggagcggtaccggttgccgaagttatcgcccgcacccacgccgctggcgtagaagaggtggtggtgaagcgcggcgccgactcctgcctggtggcgatcgccggccagccgctgctggaggtgcccgcggtgaagctgccgaaagagaaagtagtggataccacggcggcgggcgattcgttcagcgccggctatctggcggtgcgcctgaccggcggcgacgcggaatccgcggcgaaacgcggacatctcaccgccagcacggttatccaatatcgcggggcgattatcccgcgcgaagcgatgccggactaa

SEQ ID NO: 106113 - DNA, 165 bp, Enterobacter aerogenes
atgtccgtcaaacgtatttttacggacaaagaaaagcccaccgaagtgggcatttcgctacaaaaagcaggtctcaaggctccgaatcagtccttgaggcggggcttcctgattgtccactcgtcgatcatgtccgcccaatcctgtagcatcgccctgcgctga

SEQ ID NO: 106114 - DNA, 231 bp, Enterobacter aerogenes
atgcacacaaaattgacgcacaggcccacggttctcatcgacaaaaagaggctattggaaattattccgttttctgagcgaacgattttcgaccttgaaaaaaaaggagccttcccccgtcgcatcgcactcagcagccgaaaagttgtttgggatttggccgagatattggaatggcttgatgcacgtaagaaaggcggcccggctccccggcccggaatgggggcctga

SEQ ID NO: 106115 - DNA, 789 bp, Enterobacter aerogenes
gtggctcccggagccacgggtaagagcttctgggcgctggaagcggcaatggccatcgcgtgcagcgttgccggtggcgatcttttaaggctttccccggccggtactggccgcgtggtctattgcgccggagaagacccggcagtcgcacttgtgcgccgcattcattccattggccaacatctgaacccgcagtcacgcgaagccatcgcgcagaacctcactcttgagccgatcatgggtaggcgcttgaacgtgatggatgagcggcaccttgctcgcgtcattgaattttgcgccggtgcccggttgatcgtactggataccctgagccgcattcatgacagggacgagaacagcaatggtgacatggcaaggcttgtcgccactcttgagcacattgcggccagtaccggggcgtcagttctgtatctgcaccatgtcagcaagggcagtgcccgcgaggggcagacggatcaacagcaagcggcacgaggcgcatccgctctaatcgacaatgcccgctggtgcggcttcgtcgcaaagatgaccgaggacgaggccaagagcctcagcgaccgcgcctatgaccgtcagcccatcggcaacgaccggcgcggcttctttgtccgttttggtgtcagcaaacagaattacgactctaccccgcatgaccaatggtatgaacggcgggatggcggtgtgttgctgccggtggagctgttggacgccaagcaggagggtacggatcggacccgaggcaagggccatgtcgcagccgcatattag

SEQ ID NO: 106116 - DNA, 984 bp, Enterobacter aerogenes
atgtcgcagccgcatattagaccggcttacgctcggctcgatcctgcccatgcgttcgacggactattcgtacccacgaagggcaagccgcgcggacgtttgctcgtggagccgcgccgcttcggcaggctcgaaatcggctttcaaggcttcgagcagcttggagccgatgatcaatcgatcctgctggcattgactgctcagcttggcatagagcgccttgtaatcgaagctaccccagccgggcccgtcagcaaacagttgcgcctcgcgctggacttcaaccgagacgaaggtgcaccgttggcgaccaagcgcaccagtctgcgaagcctcctgatcgacgccggatatcgagaccccgaaagtggagctgcgcttgcaagagcgaaaaagagtctcaaccgactgcgggcaacacaaattcgggaaatcgatagggaaaccgggtgggatagggcctgcaacctgatttcgcttagcttcaaccataagagcggggaaatttatgtcgccgccaaccctcgcctgacgggtgcggtttttcatggacagcatgtccgagtctcgttgttcgagcggaacgcactggaaacggaggtcgccaagctgctgcactgctggctatgctcgaatatccgacttggccgagcgctggggaacggcaatggagcacacctcgacaccctcgcacctcacgtctggggccgagtggcatgggagcgcttctccgcatcggaccgtagtaagaggcgcggccagttgcgagcggcgttggatgaaatcgcagagcgcacatgcggcctgcaagatggaatgggctgggccatcgatcagaccagcagcgggctggtgttggtcggacgccccaaggtgctgccacttcttgaaagcgagcacgaaacgcctcccgctggactgtacgaactcacgagtcagttcgaccgagaaccgtccagcttgtcagattggacgccgaattga

SEQ ID NO: 106117 - DNA, 327 bp, Enterobacter aerogenes
atgatgaacgatatattttttggcctgatgatgctcggcggcttttttgttctcggtattggtatgtgggcgcttggccaatggctgcggcgcaaaggcttcggcccgcagctcgatgaactggataagcagtacacggcactacagcatcgtgtgaaccgattggctctgcctgccgctgcgcatttctacggcggcatgggtatgcttaatcgcatgccacttttcggcagcaagaatcaggtggtactagtagagcgtgtgagaatggccatccttcagatggaagaggaagaacggcagcgaggcagggtcatcaatcgctga

SEQ ID NO: 106118 - DNA, 1632 bp, Enterobacter aerogenes
atgcgacgttcaaccgttttcgcgcttgtcggcgcggtgctcttgctatctgcaactagtgcgatggctgccggggtcgatttggcgcagagcaacacgtctatgaacagccttctgcggctgattcagaacgcttcaaaccaatgggcgccgcgcctgcatgattacgccttgtggctcttgggatgccttgccgtcatccagctagtttggacttttgctcctttggtcatgcgcggagctgaactgggcgacatcctccatgagttggtgaaattcatcctcgtgatagggtttttctatgcgatgctcgagcacgcggccgagtggggcggggccatcgtcaacagcttccggcaggccggggcgcacgcggcagggttgagtagtgcggagctgatgccgggggatatgttctcaactgctgtggacttttcacggcaggtgctgacggccggtgtgtcgatgttcagcccaatcacatcggttgtagtggccgtgtctgcattgatcgtcctgatgtgctttacgttcatagcggctctggtgttcgtgacgctcgtagaggcctacgtcattatcaatgcagccgtcctgtttatgggtttcggcggttctcaatggacacgcgaatttgcactggctcccattcgctatgccgtttccgttggtgccaagctgttcgtcctgactctgattgtggggctgatcatgcaggtttccgcagaatggtcggcggcctacaccaatgacgaagcgtcgttgatgaccttggtcggcctgtctttggtgtgtgcctacctgaccaaaaccatccctgaactgatcggcggcatgattaacggcacgtcgatgggcggcggctctgcaattggcggcatggccgcagccggtgcagccggtgcggcggccgcaatcgctactgttgcaacagcaggggcagcagccccggccgcaggggcgttaggagccgcgggaactggcggaggcgctgccagtgccgcgggtggtgggctggcctccgcgttgaactccagcatggcaggcggtagtgccacagggggcatcggtggtgcgacgggcgtcggcagcgctggaattggcgcaagcacaggagggagcagcggtgcggcagcaaaggccgcaggttctcgcgtcggcgggggtgccgcgtcaggatcggcaaatccagtatcggcggccgcttcgccagctagtcaagaatcaggcagcggcttgaagcaagcctccaaacaggccggaaaagctgcgaagggcggtgacgacgataaggatcagcaagccgtcgcgcagcaacggcagatgacaccaaaagaagggactggcggcaacggcaaggctgttgcgcagggcgccgaggtggccacgcgggcgcttggcgtgctgggcgctatcagcgtacccggcatggaaagctcccacgggctttcgctcggcggcaccgggtctccccctccagtccccggcggtgacagtccagcgcgtgacgacggcgcggagccgactgcacaagcggaatccaacattattcgtccgacatcggacaccactggcaccggagacgtcggcgcgctcaatgtgcccggcatggcttctcaatcggagacgtaa

SEQ ID NO: 106119 - DNA, 183 bp, Enterobacter aerogenes
atgatgatttctaaggcgctgattgccgccctctgcctcgtctcggcccttggtgggtcggcactgacggccgtagttgtcacgaacaccgccgcgccggactgcgcagcggtcggcaatggccatcaggatgaccaattccgcagccgcccaaacactcgcggcccgtctgaggggttctga

SEQ ID NO: 106120 - DNA, 792 bp, Enterobacter aerogenes
atggaactagaatcgcgaaaaatgtcggcttatgccgcccgaaaattcggtcgcggcgcggcgctcgccctggcaatggcaagtgcaggcctcggtgtaagtctctacatggcaccggctccggcctatgccatctactgctcgaactgctcgacgttctatcagcagatgtatgagtacgccgaagcggtcaacacgcaactgaatacggcccagcagttgcagacgcagatccagcagtacgacaacatgattaagcagggcatgtcactgcccagccgcatgttcaacaccatcactggcgaccttcagcgcgtggccagcgtctacaactcggcgcagtcgctcggccgcaacatcagcaatctggacgaacagtttcgccagcagttcaagggctatgacagttatctgaactcgattggccaagggcaaaataacacgccgcagcgctatcgggactgggcacaatccggcttcgataacgcccgcacggccatgcaggccgctggcgtaaatacaagcacattcgaggatgagaacgcgatgctggataagttggtgagccgttcgcagtcggccgttggccgtcagcaggccattcaagccgggaacgagattgcggcgcagaacgtgcagcagctccagaaactgcgcgatctggtggccacgcaaatcaccctgcaaggcaactacatggcgcagcaaaacgaacgacagtccgttagcgatgcctccgaacagcaattccgcagccgtgaaaatacacgcggcccgtctgaggggttctaa

SEQ ID NO: 106121 - DNA, 210 bp, Enterobacter aerogenes
atggcacgaaaaaccctcgcagagcgccgttctgatgccctttcagagcttgaaatggcgaaagccagattggcaaaactcgacaatgaggcagccgaaagaatcggaagaattgcaataaagtcaggattggttaatcttgaactgacggacgatcaagtccgggaagaattcgacagaatcgtggaaaggatcagcaaggggaattga

SEQ ID NO: 106122 - DNA, 1077 bp, Enterobacter aerogenes
atgacggcagtcgagctaccagaggatttttttgcaaatatacaaggggttttccgcaaaacacctgttttacttattgggtcggggttctcatgtggttatggcctgccagggatgggggcgttggctgagcatctggctaataacgtttatggcgcactcgcgacggattcggcacggaatgcttggacccaatcaattaatgcgataaaggagaatttggagacaggcttaaataatattccacttggaatggcggggtgggatgagattttgtcggcaatccgtggggaaacagcgaagctaattcttgataaagcaatagcggcagaggcgcaaattcttgtcgaaaaaatagcggaccaccatgccccctcacgccttctgaagcgtctatttttaggatctcctcagaatgcggaaagcattcatgtcatcacgacaaattacgataccctgctagagctcttttgcgacctggcagagttgccgttagacactggatttatggggtttcgacggcgtaggccgcgacctcatccgctttttcaaactcaatacagccgagtgttagtagccgagaagcgccaacagcaggtcgatcaccgtctatgtaaaacggtgcgattatacaaaccgcacggttctatcagttggttgacaacaaaagatggaccaattgaagtactaaatgacgtatctgttgctgagcgagctattgttgtgccgggcccttcgaagtaccaagacgcattagtcaacaccctatttgacgcaatgcgtactgagatgaatcaggtacttgcggaggctcaagctctcctgtgtataggtttcgggttcaacgatgatcatttacaaggcgttatcaaacaccgtttggcggctggaatgcctgcaatcatagttactcgtgattcaacctccagcattgatcggttgctcggtgaacatcctcacgtgatcgctttgtttaaggatggtgatggagctatttgtcattggaatggtgagcagttcagagtgtccgagcctctttggcaacttgacgatttcctcaaaaaatttctggagtga

SEQ ID NO: 106123 - DNA, 1791 bp, Enterobacter aerogenes
atgagtatttttaatttttcagaagagcaatccttgggcgaagttcgcagtgttgaaacctcaagaataactgtgcgagtgactgacggccagcgtttacagaaagcacgagttggaagattagtagctattcaatctgtaggagatgaatggttaattggaattatcgaaagagtttggcgacatccagtagagttgccttcgtttccagaagtagatgaaacaattgatttgtcagcagtgccgcaagaagaaaatggaatttctataagtttggtaggaacttatcgttctcgtgatggcctgcgaaaggatgtatttacgcgtgcagtatttatattgccagagattaataggtcagtgttccctattgaggaaaagtcactcgaagattttatgggcatattaagcgcgtcatctaaagctgatgcagtcgcgccgctcaaagtgggtacttatactttagatggcaaagctagtgcttatattgacggtgataaactttttcaacgtcatgcggcgttattgggtagcaccggttcagggaaatctttcactgttgcttccatacttgaacagtctgcgcagctagctcacgccaatattgttgttcttgacttacatggcgaatattccagtatgaagttcgcttcccattatcgtatcgcgggcattagcgatattaaggcgaagggggatggtgcaatttttctgccgttctggttgctgacctatgatgagatgcaatcggtatttgttgatcgttcgggagataatgcacctaatcaggctctggcccttatggattccgtggtagagatgaagcgtgctgccatagcggcgcttggcaaacatgaattacttgaaggttttacagtcgatacgccagtaccttacaaattagatgacttggttgaatcccttgataagaaaaatgaagaagttattccaactggggaagaatacgtcactggggcgaagaaggggcagcctaagactgaaaaaggtccattgaacggcaaactctctcgattcctcattcggttgaggacaaaaatgaatgatcgacgttatgccttcatgtatcaatctcccaaggaatacgaaacttatgaagcattgcacgaactagcgagtaagttactcggtacgggaaatgttgcagatggcgtaaacccaggtatcaaaattatcgacttttcagaagttccctcagatattttacctgttgtagtaggtttggttgggaggttgatctatcaaattcagttctggagcgatccgggtaaagatggtgatggacgtcatccagtagtgatcgtttgtgatgaggcacacttgtaccttcccagcagtgcagcctctactggaccattagaaaagcgggctttggagaactacgagcgcatcgcgaaggagggacgtaaatacggtgttggtttaatggtggttagccagaggccttctgatgtgagtacaaccattttgagtcaatgtagcaacattataagtttgcgtctcgctaataagacagaccaatctgtggttaagcaacttttgcccgagagcttggaggggttgatggaggtgctgccgacgctggacgtaggtgaagctgtcgttgtgggagatgcaacattgctacccacacggattaaaatgtctaagcccaagcatgaacctcgtagcgcaactattccgttctggacgcgctgggataagccaaaggccgacgttgatttgattgctgccgtagagaacatgcgtcgacagtcgcggaccaacgattga

SEQ ID NO: 106124 - DNA, 198 bp, Enterobacter aerogenes; identical to SEQ ID NO: 85392

SEQ ID NO: 106125 - DNA, 309 bp, Enterobacter aerogenes
gtgtcggccataaatcatataaaaaacccactaactattattgggatttttgcaggaatagttgaggtttctgcaaaccttgtccttccgttcctggaggaaagccagcaatcaacatacatatggtttctgatgctgttccctgctgcattggttatccttttctttatcacgcttaattttaaccatgtggttctttatgccccgagtgactataaagatgatcagggattcatgagggcaaatggaaaaatgaataacaacgcggtagtggggcaagttccggcgcaggggtttgatttatcatga

SEQ ID NO: 106126 - DNA, 264 bp, Enterobacter aerogenes
atggttctcgccagcgctgatttcaccttcctgacggttatccagcttcgccgcataaagattgagcgcccggccggcgctgataaccccctggttaatcagccccagtccggagagattccactgcaggttgccgttggcgatgaccctcccggcgttatgaaatgcctgacgcaacgtgagcgacatatcaccctgagagagcacctcgccatcgccgctgagggaatcggcatcgaggctaagtttgctcgcggcaagtaa

SEQ ID NO: 106127 - DNA, 483 bp, Enterobacter aerogenes
  misc_feature (468)..(477): n is a, c, g, or t
atgtactcattagccccttactttatccgttgctacaacaagaataatgaatcgaaaaatgttgaagaacgttacgattttttgaacagaataggccagtatgatttattctctttactcgaacaatttatgttgttgcataaagattttgaaaaaattgacgatagcaaagaaacatataagtttcatcatgtcacttcgaaacctaaagaaagattcatttcgggctggatgagtttaggccattatggtattaaaaatgatattattaatactgatgataatcaattagctttctctaaggaagaaaatcatgctgatgtcaaaaactattatttccggttttatattcctttagagtcaagaaagggtatctgtctattatatgcttataagaaggatggtataaaatcgattttccagacagagttctctaagtttttcaatgccatgacaaataaaaacatnnnnnnnnnncaatag

SEQ ID NO: 106128 - DNA, 807 bp, Enterobacter aerogenes
atgaataacgaattcgaattcaaatttggtgactacgccatcatcgagcaaaagcgccatggtgtgcctaacgagatgttcgttcacaaggtgattggtcagcttcgctcaaattcttgggttgatgttcctgtgcagtctcctgcaaccgaaacactccatgacgaaatggaagatgtttgttggtgcatttgctgcggagttgatgagaccgaagtacgcgcatatcgcgttaatgatctgcagcgttccaatctctcaccagatggcggggaggtaactgcactggcgctcactcttgagaagagtcgtgaagcatcaggctgcccggctggcgtagacctgcaggactgggtgaagcagctggcggcggagaatgtggcgctgaaagacatcaacgcatggtgcaaaacggatgcattcaaaaacatgtacctggagtttaaagccgcagaagcgcttgggtgcccagatgcggattgcatgcatgatgcaatgcttgtcgcaattatgcatgcgccggcaacccccgccaccgatcgcatcgtagccgggattaaggctgatggcgcagcagaacgggaaaaaaccatcacattcaccgcagctaaaaagcgcacgcaggatggcgtagcgttaatcgctatcggtaagccttataaaattcacaacgatgatgtgatcggtgagttcttcatcggtgagcgcgggcgctacggcgtaatcaccatggaccgtctcgactacttcacaacgtctgacgaatacgcatgggagttttcgctgcgcgagggggccgacaaatga

SEQ ID NO: 106129 - DNA, 420 bp, Enterobacter aerogenes
atgactgatatcaccgaactggcgcagagcaatgagttgctcatcgcaaacggaaacgaaacagccaatctgttgcgccacctggcaaataacgaaatcgactctgactattttgccgttgtttcggaatgtgaaagctacgggaaagaaactgacgcagagctttcaatcactgagtttgcccaccgtgctgctggctacgttgatgcgctggtagaggctctggagaaggcgcaggggatggagggctactggaaaactcaatgtcgggggattactgaccactgcgagcagctgcaggcgcagattgtcgggctggagtcccgccccgttgcagccgagccgttcacttgcccgcgatgcggaaggacaacaacccatccggaagggtggcactattgccataagcgggagggttag

SEQ ID NO: 106130 - DNA, 747 bp, Enterobacter aerogenes
atggcagagcaaactattctcgatatgtgttgtggctcccgcatgttctggttcgacaaacaggatgagcgcaccatattcagcgatatccgcgcggagcggcataccctttgtgatggccgacagttgattataagccccgatattatcgccgattttcgtaggttaccttttgaggactcatcgttttctgtggtggtttttgatcctcctcatcttgaacgagtcggaccaaacggatggcagggtaaaaaatatggaaagctggatagggacaattggcgagatgatatacgcgctggctttagagaagcatttcgggtactgaggcctcatggcgttttaatttttaagtggaacgaagttcagatccctgtgcgcgaaatcctagctcttaccgatgagaaaccagcaatttctcagcgcactggaaggaatgacaaaacccactggatattgttcgtcaaaagtggacgcgagataagaaaggccgatccacttctggaatatacaaccaggagaattctggagttggaaagtctgctgctggtggacatacctgaaacagtgtggccagcggaagtcagtatggtcttctcacagattgaaaatgccgggacactcccggcgcaccaccagcgccgactgcagcaccatatcaaccgcatgtggctggaaaaaatgccggtaccatcaattatcgccgcggcaggttcgctggcctgcgccatggagaaatacgcgtga

SEQ ID NO: 106131 - DNA, 543 bp, Enterobacter aerogenes
atgacagcagatcagattatcgagggcattctcggtaaagaagggggttacgtaaataaccctaatgataaaggcggcccaacgcgctggggcatcacgcagactaccgcccgcgcatatggttacgcaggcgatatgaaggcgttaccacgggatacagccaaagccatttatctgtcgcaatactggactgaaccgaagttcgaccgcatcgccgagttgtcgccagccattgcgcaggagttatgtgatacaggcgtgaacatggggccacgtgtcgccagtacattcctgcagcgctggttatcggctctgaatatgcagggcaagctatatccggacctgaagccggacggcgcgatcggcaacattaccatcgccgccctgaaaagttatctcgctgttcgtggcaaagacggcgaagtcacgctgctgaaggcgctgaattgcagccagggtgctcgttatcttgagcttgctgaagcgcggccagctaacgaggcgttcctgtacggctgggttaaagagcgggtgagcctatga

SEQ ID NO: 106132 - DNA, 339 bp, Enterobacter aerogenes
atgattattttcgcgctactggcgctggtggccgtgctcgtcctgttgctactgcgcaaatatacccggctggagtttgttggtcatgcccggttgctgcttaaaacatggtccgtccgcctgggcgctgccggtgcgttggtcggtatatgggctcaatcattcccggatgctgctcttcatgcctgggcaatgctgccgccggatatcaaaggtattctgccgcctaacgttgtggcgatgattagcccggctcttgtggtgctcgccatcctctctcaatacgtcagacagccaaagctgaaagaaaaagccgatgagcagcaggaggcgcaatga

SEQ ID NO: 106133 - DNA, 276 bp, Enterobacter aerogenes
atgagccttgaatttatcagcgggctggtagtcgttctgcttggcttaatcgctggcgcgtttgggttaggccattcacgcggaaccagcaaggcagaaaccaaagccgagcagcagcgcaccgaagagaaggccgcggctaacgtcgccgtagcagaacgtaaggcgcaagcaacgaaagaggccagcgatgtacagcagactgttagccatatgcctgatgacgatgttgatcgggagctgcgcgaaaagtttacccgccccggtggtggttga

SEQ ID NO: 106134 - DNA, 513 bp, Enterobacter aerogenes
atgagtattaccctacaagaagttggctcttttttcctaactcttgttgttccgattacaacaggggtggttgcggcaggctttacagcatactttgcgttgaataggttttacaaagagaaatggtgggaaaagaaacactcctcctataaccaacttatcgataatctattcgaagttaaggctatttatgcctatgcttttgacttaggacatgctgaataccaagcagatatgcgtggtgagtctggtcctgacggtgtagtcgattgggaaaaatatcatagacttaaagctcaattgcatcgattttacgtccttgcgccaatatcattaagtaatcacactcgaaatttattggacgaattcttctctaaatcaactgcgtcagactataaagtttatgaagaaggtttccccgattttattgcttacagcgaaatgtctacggctgctcaggaattaatagatgccatagtacttgatgctgaaaaagaattgaggtttaagtaa

SEQ ID NO: 106135 - DNA, 366 bp, Enterobacter aerogenes
atggcactggtagaaatcacagcaggtaacgtcttcgccggtgccaacctccgcaaactggaggttggtgcgatcgtagaagtggacgatgcaacagcagcgcgctggaaagcgtctggcaaagcaaaggacactgacaagaagaaaggcgagaagctttccttcgaagtggcaactccgtccgcgcaggcggcagacctttctggcctgcaaaagcaactcgccgacgcgctggagcagaaccaaaagctaatcgccgatggtgaagcaaaagacaaggctcacgccgacgcgctggcagcagaaacaaaacgtgctgacgaagcagagtccgcactggcagaagctaccaagaaggcaaaataa

SEQ ID NO: 106136 - DNA, 453 bp, Enterobacter aerogenes
atgtcgtctgctgatacacctattaactggaaacgaaatcttaccgtcacctggcttggctgctttttaaccggcgccgcctttagcctcgttatgccttttttgccgctctacgtcgaacagttgggcgtcaccggccatagcgcgctgaatatgtggtcagggctggtctttagcataaccttcctcttttccgccgttgcctcgccgttctggggcggattagccgaccgtaaagggcgtaagattatgttgctgcgttcggcgctggggatggctatcgtcatgatgctgatgggcatggcgcagaacatttggcaattcctgatcctgcgcgcgttgctgggtttactgggcgggtttattcccaatgccaatgcgctgatcgccatccagatcccccgtcagaaaagcggctgggcgctaggaacgctttcaaccggcgcgcggtaa

SEQ ID NO: 106137 - DNA, 729 bp, Enterobacter aerogenes
atgaccgccacggtgctgtttatctgcttcctgttcaccctgtttttaatccgcgaaaactttgttccggtgaacaaaaaagagatgctcaatgccagggacgttttcggttcgcttaagaatcctaaactggtgctgagcttgttcgtcacctcattgattatccaggtcgctaccggctccattgcgccgatcctgacgctctacgtgcgcgacctggcaggtaacgtcagtaatatcgcctttattagcggcatgattgcttccgtacccggcattgccgccctattgagcgcgccacgtttaggcaagctcggcgatcgcattggaccggaaaagattctgatagttgctctggttatctccgtgctattactgatcccgatgtcattcgttcagacgccgctgcagctaggcattctgcgctttttgcttggtgccgccgacggcgcgctgttacccgccgtacaaaccctgctggtgtacaactccaccagccagatttcgggacgtatcttcagctataaccagtcgtttcgcgatatcggcaacgtcaccggcccgttaatcggcgcctcggtctcggccaactacggcttccgcgccgtgttcctcgtcaccgcctgcgtcgtcctgtttaacgctttttactcgaccatcagtctgcgccgcccacggcacgacgcttcagcggatgacgggggctcgggtaaacgttcggtaaattaa

SEQ ID NO: 106138 - DNA, 528 bp, Enterobacter aerogenes
ttgtccgaatccgaatcgctgtccgaatccgagtcgctgtcagaatcggagtcgctgtcggagtccgagtcgctgtcagagtcggagtcactgtcggagtcggaatcgctgtcggaatccgagtcgctgtccgaatccgaatcgctgtcagaatccgagtcactgtcggagtccgaatcgctgtccgaatccgagtcgctgtcggaatccgaatcgctgtcggagtccgagtcgctgtcggagtcggagtcgctgtcagagtccgagtcgctgtcggaatccgagtcactgtcggaatctgaatcgctgtcagagtccgaatcactgtcagaatcggagtcgctgtcggagtccgagtcgctgtcagagtcagagtcactatcggaatccgaatcgctgtcggagtccgaatcgctgtcagagtcggagtcactgtcggagtcggagtcggagtcggaatcactgtcagagtccgagtcactgtcggcatcagagtcagtatcatcgttcgaagaatgcgaggagtga

SEQ ID NO: 106139 - DNA, 1086 bp, Enterobacter aerogenes
atgtccgttagtaagttagcgaatggaaaatggcaagcgcaagttttcccaaatggcagggatgggcggcgtatccgtcgtcagtttgctaccaaaggagaagcgctagcctttgagcgccatgtaaaagagcaagcgcaagataagccgtggctaggtgagaaaactgataaacgccgcgttcgggatttggttacagcctggtacaacgcacatggtgtaacacttgctgacggtgaaaagcgtaaaggtgcaatggagtttgcctgtcttgctatgggtgatccgctcgcaactgaattcaacgcaaaattattctcaacatatagagagcagcggttaagtgggaaaataacccgttctgatcgcgttaagtcagtaactcctcgcacggttaacctcgaactggcttactttcgggctatgttcaatgagctgaaaaggcttgatgactggaccgcaccaaaccctctcgaaaacgtcagagaatttaagatcgcagaggttgaactggcttggcttacagttgaggaggcgacacgcttgcttgaagagtgcgagaaaagcaaagcagtggatttaaccacgattgttaaaatctgccttgcgaccggcgcaagatggggagaggctgaaagcttaactggcaaacagataagtcccggcaagatcacttttatcaaaacgaaaggtaagaagaaccgcacggttccaatcagtgatgagctttacgaactgctaccaaaaagccgaacctctaaaccactcttcaccggatgttattcagcattcaggagcgcgataaagcgtgcggggatagagttgccagacggccagctttcgcatgttcttcgacatacttttgccagccatttcatgatgggcggcggcaatattctggtcttacaacgcatcctcggacatacggatattaaagttacaatgcggtatgctcactttgcccccgaccatctaacagaagcagttcaacttaaccccttaaacctaattggtggcagcaaaatggcagcacagcgaagcactatgcaatacttttcgacaatatacgaaattctatgcgcttga

SEQ ID NO: 106140 - DNA, 867 bp, Enterobacter aerogenes
atgactacttcgcctaaggccacaaaagacaaagcaactgaaaagattgagcgtacttgctttgtaatcatgccaatcgcagacatggcaggttatgattctcgtcacttcgatagagtttataaccatttaataaaaccagcatgtgatgccgctggctttacacctgtaagagctgatgaagttaacaactccaatttaattgtattagatattttaaaaagaattgttgaatctgatattgcgatatgtgatctaagcggccgaaaccctaatgtgatgtacgagctaggactaagacaggcatttaataaaaaaacagtattaataaaagacgatcgaacaataagcccgtttgatgttcaagctttcagatattgcgagtatgacagctcattgcgtattgataatgctttcaacaatattaagtctttagaaaaagccataacaagcacatttgaggcagactcaaacgatgtgaattctattgttcaacttttgagaatcgaacctgctaaagtgggtgaaaaaacgcagctaagcacacaagacactttaatatttgaaactctaaatcagattttaaataaaatagatgcaccaacaaagatattcagcaatagcaaaacaattaaatacacacctcgttctaaacatttaattgaacaactaaaaacaaccagaactgaagatctaattgggaaaagttacttgaatgagcgaacatttgtaatgctcggtaaacttgaatcagttgaaaacattaacggagaacttctatttgtctttagatatggtaaagatgcatattttaaataccctgagagccatcctgaactggaagacattgtggaaaccgacttttag

SEQ ID NO: 106141 - DNA, 567 bp, Enterobacter aerogenes
atgcaaaatactggcggccagccggtcattgagcgaattttgaaagcctacggttttactactcgccagtccctatgtaatcaccttgggatttctcaaagcacgatggcaaacaggtatgcgcggaacacctttccgtctgattggacaatcatctgcagcatcgaaacaggtgcatctttgcagtggttgatttcaggcgaaggggcgatgttcgaggatgaggtcgagcataaagccctagccttaaaaaattacaaaatcacagatggggtcttgacttcacataatgacatttactatgacggcagcctgattcctgctgatttatcgagtccatctttagtggcctttgaaaactctctgtacctcattgatgaacatgaaggagagataaatgatggatggtgggtcatagaaattgatgggttatacagtattagagaaatctttagatttcctggtggccgtatacgtgtggaaaatggcaaggcatcctttgaatgtcaggtacaggatataaaagtatttggtaaagttatcctcaaaacagaacaacttagttaa

SEQ ID NO: 106142 - DNA, 237 bp, Enterobacter aerogenes
atgtatcgtcaactttcaatgcgtcccagcatcaatcttgtggtgtcagagccattcatcactcttgatgagttctgtcgtcgcaccggctacaaactgagttatgcccgccagatgattcgtgagggtcgtttacctatccgcaagaaagagggagtaaacagcctaatagaagtaaacatgttcgctttgacgatggaagcggctcaaggctgtgaaatcgcaatgcaagcctga

SEQ ID NO: 106143 - DNA, 573 bp, Enterobacter aerogenes
atgttaaggatatttgatatttataatggtttttttatggatgatttagaaaaaaaattcagacacacaccgttaggacataaaaaatattataaaagattaagtgactttataaattttttgataagtaaaggtcgggttttagaggctaagtattattttcagatattgattcagtctcgacctgataacttaaaaactaatatgttaggttatgaaatatcaattaaatcctttgatagtgaaggtgttgctagatttgataaatttctatgtgataactctaagaaaattgtggatgtacaaattttacagttagagtattattactcagtaagcaattcaaagggatttttatttgtacttgaacatatcttattaaataaattaaaaccagatattttgaacaaagttattgggctggttgttacttttgagtcctatgcatcaataaagacgttattgtcatatctcaagagaaataaactaatgctaaacacgaaagctgatgcgagaattaaaagagttgttctgcaggaattctcgaatgtgctggtgaggattaaactatga

SEQ ID NO: 106144 - DNA, 981 bp, Enterobacter aerogenes
atgagtgcttttttagttgtccggatattgcaatcccagagtgtttatatgcctcatacgttagtttattctaatgtggaattgagagggccgggtgcagatacaaatgaggaatccagcttttttgagtctgttgcaaagaagagttatctggactataaccactataaattatgcgcaagaattactactattgtaaattcaaacaatattattgatgctttaaatattgcgggcaatagattttctgaagtaatggatgtcatctcaataaatttcccgatatctaactttaacctctcacctataggattggttaaagacttggatagtgggactattcatcatttgaatgatgatagctttaaaccatccacaacttttatgttgcaacaaggaataattcaaaaatatgataatgatcactatttattatcaagggataatgaattgagtaaaagatatttacgatcgctccactggtttagaaatgcaaagcatgaaaataataagcagataaaaatacttttttattggtttgcacttgaagctcttcttaaggaaaatgagtccgataatatcagtggtattattcgttggtttctagggtttcctaacgggaaaaattgtcaggatgtttcccagcatctaataaaagaattggaatcacatgatagatatcatttttggaaaaagaaattaccaggtattttagatcaaattagagaatttaggaataactcagttcatcatgggtttagaaatattgagtttaccttgtctgagcttgatctattttgccaggtgatggttctgagtatttcaagatgccaagaggctgtgagaaaagcaattaacaataatataacaaatatctctgaatttaaagagtatatacctgagatttttgaactcaacatacatgtaaaaaatgatacccatggaactataatttatagtcttgaagagaaagttaagtag

SEQ ID NO: 106145 - DNA, 1104 bp, Enterobacter aerogenes
gtgtcatacgatgctatagttttagatacacaaactattgataattatcactggcgttttaacgaaggtatgctttcacgaatgaagcagttttgtcatagtcaagtagactttcttatgcctgacatcgtgaaaaatgaagtgcaaagtcatctatcaaaaaaaattaaagaatcacaagacgcattggataaatctcttaaagatgcacttgcacattttttgctaacagaaaaagaaacagaacctgtttacgatagtgctattaaaatggtcagtgctgatgcgttggcatcttcgattatagatgagtatttgacaaattgcggtgcggtcgaatttaagtgtagtgacctaacaacacttgatgaagtatttgaggcgtattttaatttaactccgcccttcgctgatagaaagaaaaggaaggaggaatttccagacgctacagttttatttgcaattgaggcttatgctaaaaaatttgataaaaaaattatagcaatttcaagagatcaaggatggattgaatactgtggtggctcagattatgtaacctgcatacaggatttaggcgaagcattaacgcaatttcaacctaaaacagccccatatgagtttgctcagcgtttaatgttcgatatagaggcaggaaaatccaataccctattggattctattaaaagtgcagttattagccgttatgatgatgtgagttttatggcagaggctgattcctaccttagttttgagccggaggccaactattgtcatgtatcagacgttgaatttgaaccttttattaatgttatagatgttagtcaagactatgcgacttttgagattaaagccacagtaacatatgatgccgagtgtgattttaatttttatcactacgattccatagataaagataatgtttacttggctgctacaacggagtctacagaagttaatgatactaccagtgtgatatttaccatatttaatgatttcgagagggattatgatagtatggacgctgaggatgtagaattaacgtcggttatcaagtatgttgattttggcagtattgaaccacattatgagcctgaacaagattaa

SEQ ID NO: 106146 - DNA, 342 bp, Enterobacter aerogenes
atgggcggtggtgccgagcgcatcctcatagccgggtttgctcttttcgggcaggagcttaccgagcgtcagcgcgccggggctgctcataaagaaccagccgagcaccggcagcacgccgtaggtgaggatgcgcgagcggccgagcagggcggcaaccttctccattctgacggtgccgaccagcttcatcaggaaattgatggccagcagcagagtgatgagcatcgggataagtcccgtcatcatgtcgaggaagattttgcctgcggcctggaacaggtggataaagccttcagccagggagaccagaaacatggcggtctcctgtactcagtgtga

SEQ ID NO: 106147 - DNA, 222 bp, Enterobacter aerogenes
atgatactccctggcgaccgcctgttgctggcagggcatgattatctggtgactgccgtcggcaagggggcacaacaggcgctgtttgaactcggccacctgacgctggtgttcaacggcgacctgaatccctgccacgtcggtgcggtccatctctccggcccggtgccgaacctgcgtgacctgcacggtaacctggtgatagaggaggggcggccatga

SEQ ID NO: 106148 - DNA, 390 bp, Enterobacter aerogenes; identical to SEQ ID NO: 93007

SEQ ID NO: 106149 - DNA, 474 bp, Enterobacter aerogenes
atgacaccgcgccggtcggttccttctccccactcctctcccaaagggagagggggaaagatgacaccgcgccggtcggttccctcaccccgaccctctcccaaagggagagggagtaagatgacaccgcgccggtcggttccttctccccactcctctcccaaagagagagggaaaaagttgacaccgcgccggtcggttccctcaccccgaccctctcccaaagggagagggagtaagatgacaccgcgccggtcggttccttctccccactcctctcccaaagagagagggaaaaagttgacaccgcgccagtcggttccctcaccccgaccctctcccaaagggagagggagaaagttgacaccgcgagggtcggttccctcgccccgaccctctcccaaagggagtgggataaaggcgacaccgcgctcggtcggttccctctgcccgctggggagagggttagggtga

SEQ ID NO: 106150 - DNA, 513 bp, Enterobacter aerogenes
gtggcgctgcgcttaccgtggcgacgatattctgcggcctggaaattccacggtggcgctgcgcttgccgtggctacgatactctacggtctggaaattccacggtggcgctgcgcttaccgtggctacgatattctgcggcctggaaattccacggtggcgctgcgcttgccgtggctacgatactctacggtctggaaattccacggtggcgctgcgcttaccgtggctacgatattctgcggcctggaaattccacggtggcgctgcgcttgccgtggctacgatactctacggtctggaaattccacggtggcgctgcgcttaccgtggctacgatattctgcggcctggaaattccacggtggcgctgcgcttgccgtggctacgatactctacggtctggaaattccacggtggcgctgcgcttaccgtggctacgatattctgcggcctggaaattccacggtggcgctgcgcttaccgtggctacgatattctgcaggctggtag

SEQ ID NO: 106151 - DNA, 399 bp, Enterobacter aerogenes
atgagtctgtggtcagggttcataaaatcattatcaaaactgtcgatgatcggccgcgccttgatgctgccgatttcgctcctcccggccgccggcctgttgttggccttcggggataaattccatttaccgctgatgatgaatgccggcggtattattttcgataacctgccgatgctcttcgctatcggctccgcagtcggcctcgcgtcggaatccggcatcgccgcgctatcggcagcggtctcggtcttcgtcaccaacatcaccatcggtaccgtactcggcattacgccggaaatggccgcacagggcggcaaatacgcgatggtggtcggcatcccgacgttacagatgggggttttcggcgggcttatctgcgggatactcgccgcctag

SEQ ID NO: 106152 - DNA, 219 bp, Enterobacter aerogenes
atgcctgttactgaaataatctggagatccggccactgtcatccgcatatctggcgcaatacgaacggcaatcatgtctttggcaatagtttctccgggacgtacaccggcatcaaaacgatctcttacgatgtcagtcagcccataatctgtaagaatttcgactttaatatcggggtattttttaacgagacgcgacactgctggccagagtattga

SEQ ID NO: 106153 - DNA, 1152 bp, Enterobacter aerogenes; identical to SEQ ID NO: 93504

SEQ ID NO: 106154 - DNA, 1755 bp, Enterobacter aerogenes
atgaataataatattgcattacagtcatcagtattccctgatatacaccaccgtgaaattagctctctgtattttttatctgataatgtatctacatgctatagtgatgcagggtacgtcagagtatcgaggaatcatgacatttgctttgatactttttataattcatttgatctccataagtggtcgaaatactcaacagttaaacagattgggttcaaagttgatgttgttggcagaggtatcgccacaattttcttaaaaacgaaagatatattaaagaaagtatttcaacgcgaaattgaaggggcattcacactagataatttagaattaaatgaatgtcgtgacggtaggctttatttttactggtcgtcaattgatgatagtgaaatcaggagtttttcttttactacatatggggcagtagaggattttggtaagttagcgattgtcatcacgacttataatcgacaggcagcattattatcgacaatgtcgagatttgaggaaaacttattttccgatagtgtcggtcagtcaaaatttcatgtatatgttattgataatggatgcaatttagatttagagccaagacctaatgttacttatataaaaaataaaaacatggggggggccggtggtttcactcgtggtttatttgaggtgaaaaagaacaataaagaaacttattgtatctttatggatgatgacgcatcctgtgaaatcgaaagtattaatagagcatattggttcatgtgtttttcaaaaaaagatgaacagatgatagcaggcagtatgctatatgaggataaacctcaaacggtttacgaggctggtgctatttatccttataaacagatacgaatgcggcctttaaaaaatggtgttgatgtctcaacaccaagtggcctggatgtgtttaataaagaggacggacaagccaattacgcagcatggtggttctgcgcttttaaagtatcagcgataaaatactatgcttttcctttcttcgtccgcggcgatgacattttattcgggataatgcatgcttacccgatcgttactctcaatggcattgcgtcgtggcagatgaattttaatcaaaaatatagcgcattagttgaatatttgagcgttagaggtctgttggttcctgcatttgtatacccgtcatcacagaaaagaagacagatagctttttggatattagcaaaagtacttttgctatgcttttcataccgttattcttcggctgaggctatcattgaagcttattcagatgttatgcaaggccctgatttctggattgacgatgcggatgcgcaaaaagcgcgtagacggattagtgagctgtcgaaagatgaattgccatgtgaagtcgagcagggtaacgacgtgaaaaaaactgaccgtgatagtcctgagtccaaatgggcgaagataatcaggctgtttcttctcaatggtcatctggttcctgggtttattacggctggaaatagggtacgaatccctaacacagaaattcatccgacaaaacaggtttttttgaatgctgaagtttactatgaaactactgagggtagttttatcgtactgaagcaggataaattacgctgtgctaagttgatcatcaaaacattgtgggccattagcaaagggttctttacctataatgctgttgcagaagtgtatggaaagaagatctcgtacttaacgtctgagaatttttggaagaaatattttatttaa

SEQ ID NO: 106155 - DNA, 192 bp, Enterobacter aerogenes
atgaataatacgagaaccaggattcttttcaagaaatgcgtcagccaaaagaccaacaatatagtagccttcgataaagttacccatattatcgaacagaaagcatcgatcgaaatcaccatcgaatgcaatacccatatcagcattattttttatgacagcgtcagtggtatcttttctacactctggtaa

SEQ ID NO: 106156 - DNA, 531 bp, Enterobacter aerogenes
atgaaaattcgctcaacccttcttgccttcgggatcgcagcaacgttaaccggatgtcagaacatggactccaacgccctgctgagctcgggcgcggaagcattccaggcctactctcttagcgacgaacaggtaaaaaccttaagtgaccaggcgtgtaaagagatggacgccaaagccactatttctccggccagcagcgagtacagcaaacgcctgagcaagattgccgcggcgctgggcgataacatcaacggtcagccggtcaactacaaggtttatgaaacaaaagacgtcaacgccttcgcgatggccaacggctgcatccgcgtttacagcggcctgatgaacctgatgaacgataacgaagtagaagcggttatcggccacgaaatgggccacgttgcgttgggccacgtgaagaaagggatgcaggtcgcgctgggcaccaacgccgtgcgcgcggcggcggcctccgctggtggtatcgtcggtagcctgtcgcagtcgcagctgggcgatctcggctaa

SEQ ID NO: 106157 - DNA, 222 bp, Enterobacter aerogenes
gtgaactcgcagttctcccaacgccaggagtcggaagcggacgactactcttacgacctgctgcgtaaacgcggcatcaatccatcgggactggccaccagcttcgaaaaactggccaagttggaagccggccgtcagagctccatgtttgacgatcacccggcatcggaagcccgcgcgcagcatattcgcgatcgcatgaaggccgacggtattaaataa

SEQ ID NO: 106158 - DNA, 966 bp, Enterobacter aerogenes
gtgacgattgctattgtaataggcacacatggttgggctgcagaacaactgctgaaaaccgcagaaatgctgttgggcgagcaggaaaacgttggctggatcgatttcgttcctggcgaaaatgccgaaacgctgatcgaaaagtacaatgcacagctggcaaaactggataccacaaaaggcgtgctgttcctcgttgatacgtggggcggtagtccatttaacgcggcaagccgcattgttgttgataaagaaaactatgaagtgatcgctggcgtcaacgtcccgatgctggttgaaaccttcatggcccgcgatgacgatccgtcgtttgatgagctggtggcgctggcggtggaaaccggtagcgaaggcgtgaaagcgctgaaagccaaaccggttgaaaaagcggcgccggttcaggctgccgcgccgaaagcggcaacgcccgctaaaccgatgggtccaaatgattacatggtgattggcctggcgcgtatcgatgaccgtcttatccacggccaggttgcgacccgctggaccaaagagaccaacgtcacccgcattatcgtggtcagcgatgaagttgccgccgacacggtgcgcaagacgctgctgacccaggtggctcctccgggcgtgaccgctcacgttgttgatgtcgcgaagatgattcgcgtctataacaacccgaaatacgccggcgagcgcgtcatgctgctgttcactaacccaacagacgttgaacgtattgttgaaggcggcgtgaaaattaccagcgtcaacatcggcggtatggctttccgccagggtaaaacgcaggtcaataacgcgatttcggtcgatgcgacagatatcgaagcattcaagaagttgaatgcccgcggtattgaactggaagcgcgtaaagtttccaccgaccagaaactgaaaatgatggatttgatcgccaaggtgggtaattaa

SEQ ID NO: 106159 - DNA, 708 bp, Enterobacter aerogenes
atgcaaaatgcacagaaggtcatttcgacataccgccgcaagcgcattctggtgtgcctggccgttgcatttctgacacttgccgtcaccctgacaatccgatttatttcacagcgtagccaaaatcaacagcgcatccagacggtgacccgcaatatggtgatcgcgatggacaatatcctgcagccgctggcggcaaaacacgctaccctgctgagtatggtgggcaaaccctgtcaggatgtgcatcttgagctgcgtaaaaccgcggccacactgcagaccgtacgctcaatcatccttgttcaatccgggatggcctactgctccagcatttttggcccgcgccatgtggccattcatcaactgcagccaacgttgccggcaatcaacccgctgttggccttttcaaccgataactcgctgctcaaaggcacaccggtactgattcagtggtatccctcctccgtaagcggtgccgacggcgcgttgttaattatcaatattgagctgcttggcgaattgattctaaaagaaaaatcatcgttgataagcgacatcagcctcacggtaggcaacaagagttttctcagcgatgttggcgttgttgcaagcgatcggttgccgggtctgccgataatttaccggcaaagttccagccagtttccctttaccatcaacatcagcgcccgggagcctccgcggtag

SEQ ID NO: 106160 - DNA, 438 bp, Enterobacter aerogenes
atggctattagcgaatcatctctaggcaagcagatacttgaaaagataaatgatcatgatcgtttaaattctaaattgcttttaaaaattaaaattttaaacgtgcttgtgttcgttattctttttgcaataggagataagtttaacgaactagttatatgtgcgattgctttcgttgttttctttgtgctaaccggtgtgtatttgaagtgcaagatggttatttcatcgtcgttaatatttgattatttcgaacgtagtgctattgacgaggagtttagaaacttttttatggggttatttaacagcaaaaggtttcttacgatccgggatgatagaaagaaaattcatgattatatttatgagcaagataagaagtttgaagaattgaagaaaatagaaactattaatcatggtatgaatggacgtagtgagtaa

SEQ ID NO: 106161 - DNA, 327 bp, Enterobacter aerogenes
atgaagcgtgattatattcctgatgccggggatattgtatggatggattttaatccgcaagccgggcatgaacaagcgggccatagaccagctttagtgttaagtcctgcggtatataacggcagaatagggctgttgttgtgctgccctatgacaacgaaaataaaaggttatccattcgaggtgcggaacggagaggggagtgctgtactcgctgaccaggtgaaaagtcttgattggcgtgaacggggggccgtaaagaaaggtaaagtgtctgcggctgtgttagctgaagtcaggtctaaattaaaagtattgattggatag

SEQ ID NO: 106162 - DNA, 273 bp, Enterobacter aerogenes
atggcgttccctccggggcgggctttcgtgctgcgcatcgagccaggcaagctgtctcgcccctccgggcttcaatccctaacgcaatcaacttcgctcatcctgatcttgccggttttctccggtgccatcgtgcctgtaggggtgctggccgctgcgcggccaaccccccaacacccggataaatcgcgcccggcccgtcgctacgcgccagcccgcccgctcaaccgggccgttgtgacgggccactgttccggcggcggtatcgtctga

SEQ ID NO: 106163 - DNA, 420 bp, Enterobacter aerogenes; identical to SEQ ID NO: 92004

SEQ ID NO: 106164 - DNA, 228 bp, Enterobacter aerogenes
gtggccccggcgccggattttgtgccgggtggcggctacgccttaccgggcctacggtccgtgcgacctgcctttaatgtcttcaccacgctggctgaaactgccggtgctggtggcctcaaaatccccccggtggcgctgccgcttaccggggctacagcgctttgcgatttggtagcccggcttagcgaagcgccagccgggttagataacgtttatttaatatag

SEQ ID NO: 106165 - DNA, 1953 bp, Enterobacter aerogenes
atggcgcagcgtgataatctctatcgacgtccaagcggtatctatgttctgcggatcaccgttccggttcgttatcgcgccctgatagggcagcgtgaaattcatgcatctacccgcacaacccaccttgcaaatgccagagctattgccgcgcgtttgttggagaagtggtatgcgtctctggaagagttcaggcaagtggataaagagaagatcaggggcaatgccccattgttgattggagcaggcaaaatcagcctggcgttgttttgcgattcatttggggttggggctgagactgtcgtccagcatcttctggcagccaatgtgccgctgtatgcccttgtatctaaccagcgtggctttctgattgatgatttcagcacgcttgagcgtgatcctgatacgcatgggttcgttttgaataacattgcgtatgacggtgctgaggctgcggtaaacggctatatgcagctttaccagccgcagtttgcccttgttgaattgctgaacgggcgagaggttgaggttacggcattcagggctaacaacggcaatcctctttccctctggttgttggatttacccggggtgacgctgaatgcaagttctttgttcatcaacaacgtgcaagctgaaaaactgcgtagcgcttgggataaggcgcttgcgaaatcggagccaacattaagtgctatgccatgcgctccggtaggtgtaacaccaacgattcctgtggccgctaccatcaacccgtattgcaacccgacatatgcgagcatgacggtttcagcattgctgaaagcgtttttggtctataaaaatacgggcgatattaagctagccagcgaggggaaaattcgttccagaattgaacacttcgtggagataatgggcgatttaactctaggcgaactgaatcgtgacgttgtgaaagattacgtcaccaaaatgcagaatatgcccggtaatctgtatttgatgcggcgaaaatacaagatttcagatacgcaaaagctaattgaaatagcgctagctgatggtcagccagttatgagccgagatgctattggcaggcatattgagtcactgggttctatgctcaaatgggctaagagtgaacgttacctttttgataaccctgctgagaatgtgttggctcagcgtcgtgtgatggtgcgtgagcaggatcgccgcgacctcttcaccgacgatgaactagagcaaattttctcggctgactggtttaagaaaggcgcgggaaggcccaatcaatacggacgttatacgagcttccgcccgtttcactactggttgcctctgttggcattatatgtgggcgggcgcatcaatgagctttgccagctttatctgacggatattcgcgaagataaaaacggggttgcctatattgattttaaccttgatgcgccggataaggtgatggatgaagaagcgcaggctggtggcgttaaatcattaaagacggtgaatgcgatccgtcaggttccaattcatccgcgacttatcgaactagggctgctggagtatgtagatgcattgaaagctgccgggtatgatcgtcttttccctgagttgaagcacaacaaaatcaaaggatatcgtgccgccgcctcaaaatggtttaacgaaaactactttggcaaagtcctcggttttacccgtgacggtaagaaaacgttccattcgttgcggcacactttcatcaacgccgtagacaagtttgagatcaacgaacgcacgattgcgcagcttgttggacatgttcggggcagcaccaccgcgatgacaacctatcgtaaggatgctgatgtgggagagcaattgggcgtgatttcgcagcttcactacagtttacctgatattgcgcagtttgattcgcaagcgggtatcaaggcggtcatcgacgcgcggcgcagacataaatcgtaa

SEQ ID NO: 106166 - DNA, 246 bp, Enterobacter aerogenes
gtgcccctacaccaacgccacgggatcgatgtagtatcgtttggtaactcactgcatgacacggattgctattacctgatccgcgcctttgacagcgctgaaagcatggctgcggttctcgatgctttttacgcaaacgcagactggcacaacggcccgcgccaagacgtcattggcagaatagagaccagcattaaaacagttattagcctaccttcagaaagcgtggaagggctgcgggggtaa

SEQ ID NO: 106167 - DNA, 483 bp, Enterobacter aerogenes
atgaaaaagaccttcaaaacacgcaatgcagaacttgccggaattgggcgcacgtcattccggttagaagacaccacatggacggcgctcgatatgcttgcggcaaagcgcgggatccgttggcagaattgggcgagtgaagttttggcgacacaacctgatgcaccaaacaggacagctctgatacgtgctgcattggctgatgaattgatggccgagcagattcataccatcgctgagtctgggtcagttgaagcagactcccatcatgaaattatcggaaatggctattggcggttaaatgacgagcaactacagagcgagctagacggcgcaaccatcgtcacacgtgatagctcatttgcggcgtttaccttactgactggttacaaagacaaaagctacggcggatcaccattcgtgatcattcagaacgagttacgcggtcagctacatctcatgatcgctccagacgttgattaa

SEQ ID NO: 106168 - DNA, 642 bp, Enterobacter aerogenes
atgaacagcaaccgcatctacgcctatcttcgcgcctccaccaaagaccaaaacgctgagcgtgcgcgtcaggatttgcaggagttcgccaccagcaatggcgttgctatctctgcgtggttcattgagaacgagtctggtgcatcactggctcgtcctgagttgatgaagttgcttgatatagcgcaaagcggtgatgttctgctagttgaacaagtagatcgcctatcacgccttaatgcggaagattgggaaaagctgactgggatgattaaggggaaaggagtgcgtgttgtcgctctcgatctgccaacgtctcacatgatggtgaactccggtgacgagttcaccacccgcatgatgcaggcgctaaacagtatgatgctcgatatgttggctgctattgcccgaaaggatcaccaagaccgcaaacgccgtcaggcacagggtattaaacttgcgaaggccgaaggaaaatttaaaggccgtcagattgataccggcttgcatgagcgcgtgctgaagttacgtgatgctggctggtcatacacagaaatccagaaagcaacaaatgtagcgagaacaactattagccgaattataaaaacaaacctcaaaaatattcatgataatatcatttaa

SEQ ID NO: 106169 - DNA, 378 bp, Enterobacter aerogenes
atgagtttttttggttcaaatcaaggtgctaaagatgagcaaataaaagtaacattctcctccagcagtagtgttactgccgcaccatctccgagcgataccaaccctaatacatatgtaatgtttagggctgaattagaagatatgattaagcaacatcggcctaaaaccgaaaaagagattaaggctgaaagtgattcatcgctaagaaaaattgcattgtatggtttattcctttgtatttttatattactttgcatagtaatctacttcggcgctacaaaagatgaactccctggttttgcacaagggttcgcttcattaattacaacgctggtcggtggaattggcggttttatttacggctctaaaaaataa

SEQ ID NO: 106170 - DNA, 678 bp, Enterobacter aerogenes
atgaaaagcgaaccacaaatcatctcaacacaacttgctatttttctcgattcttttattaagagaccggatctattctttaataaattaaattctgacttagggggcctaatagatgccatgccacaggttctgcctcttccaccagaagcaccagcagaaatccctcgggttatggctgcatcttcatataataaaaacactataaacatttctctcaatcgtgtggacttcattaggcaatacaatcctgttgaggacatagagcaatcaatcaaagagttcaaggcattatgtaaaaactttatattgtctatcataagtgagtataaaatatccagatttggtaatgttggttcattttatgttaaatccaacaatccagagaaagaaataagcgatctatttattaataaagacgcaggttcttttgatgagatctcgctgagattaaataaaacaaccatcgataaaggtattactttcaataatgtcattagtataaaccaagggcatattgaagctcctaattacaacggcaatggaattgtaattcaattagataacaacagcattgcaagagctgaggcattaaaagaagaagaactactatcattatttgaaattaaaagtaatgcatttaacccaacctatgcaaaagaggtgggcaaaaaatga

SEQ ID NO: 106171 - DNA, 498 bp, Enterobacter aerogenes
atggcaggagcagactttttattatcgatgtcagtgggagccgcgcttagctgggccagttatagtatagtcgcccatgttgtatcaaagcagcacgtcagcacgctacgcgcaattgtatggggggctctgggcactctctcattggtgctgggcatatgcgccttttctgctgtaggtgctgagcatcaggcagcacgaaaagatatcgtatgtgcagatgacaacccggaatgctatgcgagaacgcaccataacccggtcagggagtgcaagcagctaatggatgagaaagcgaagtttcaccatgtgtggctggatagcgaagcgcaaccggttttcagcacctacctctggcacaacgaaaacaaacgaactatacaaatgttcggacaacaggctaaagcgattaatagcttggggatgcatacccctctgcaatatttttgtgtttttaacgccaacaccgggaaggtcatcgcggcttcatttgaataa

SEQ ID NO: 106172 - DNA, 348 bp, Enterobacter aerogenes
atgtgcgttaacgtgatcactatgccgagcgtaatctcgtattacttcatgtgggattttgtaggcatcaagaatgttgtaagttttatcgaaaataacggctatcaaataatcaaaatcggcagcttcatagttacgcaatgcactgagttgccgggaaggattatccgatgtgactctcctcgctttgatctgcactttcaggccatcagcatcaatggcatcagcacccgccgacgaattactgagaagagtcatacccagtgcattagaaaccagccattcagcatagtcaccaacaggattattcttggtgcgaattacacctctagaacgcaactgcgttaa

SEQ ID NO: 106173 - DNA, 705 bp, Enterobacter aerogenes
atggatagcattactactcttatcgttgaagacgaacctatgctggcggaaatcctggtggataccatcaaacagttcccccagttcaacgttatcggcattgcggataaactggaaagcgcaaaaaaaatgctgcgtctctaccagccgcagctgatcctgttagataactttctccctgatggcaagggattggatctgattcgccacgccgtcagcaccaactacaaagggcgaatcatttttattaccgctgataatcatatggataccatcagtgaagccctgcgtctgggggtatttgattacctgattaagccagtgcactatcaacgtttacaacacaccctggagcgcttcgcccgctaccgcagttcgctgcgttcaagcgaacaggccagccagacccacgtcgacgccctgtttaatattcaggctcgcgagcaaacagaacctgccggcgcgccgctgcgcgggatcgatgaaagtacctttcatcgcgtgctgcagctgttctccgccccggaagtggtgcataccgctgactctctggctcgcatccttggcagcagtaaaaccaccgcccgccgctatctggaacaaggcgttaaaaacgattttctggaagcggaaattagttatggcaaagtcggccgaccggagcgtatttatcgcggcaaacatccctatccggagcatgcctga

SEQ ID NO: 106174 - DNA, 1173 bp, Enterobacter aerogenes
atggggcccgcgttcattgctgccatcggctacatcgatccgggtaacttcgccacgaatatccaggcaggcgccagctttggctatcaattattatgggtagtggtctgggcgaacctgatggcgatgctgattcaggtgttatcggccaagctcggtatcgccaccggtaaaaacctcgcggaacagatccgcgatcactacccgcgcccggtggtatggttttattgggtacaggcggaaattatcgccatggcgaccgatctggctgaatttatcggtgcagccatcggctttaagctgctgctcggcatttccttattgcagggggcggtgctgaccggtgtcgcgactttcctgatcctgatgttgcagcgtcgcgggcagaaaccgttggaaaaagtcattggcgggctactgctgtttgtggcagcggcctatgtggttgagcttatcttctcgcagccggcgttagcgccgctgaccaaaggcatgatcattccgagtctgcctaatggtgaggcggtattccttgccgccggggtactcggcgcgacgattatgccgcatgttatttatctgcactcgtcgctgacgcagaacctgcacgatgggtcgcgcaaagaacgctataacgccacgcgttgggatgtggcgattgcgatgaccatcgctggtttcgttaacctggcgatgatggcgaccgccgccgctgcgtttcacttcaacggccacaccggcgtggccgatctcgaccaggcttatttaactctcgaaccgctgctcagccatgccgccgcgacggtttttggtctcagtctggttgccgccggtctctcgtcgacggtagtcggaacgcttgccgggcaggtcgtgatgcaggggtttatccgcttccatattccgctgtggtttcgccggacaatcaccatgctgccgtcatttatcgtgattatgatggggctggacccgacgcgtatcctggtgatgagtcaggtgttgctgagcttcgggattgcgctggcgctggtgccgctgctcatttttaccagcgatgcgcggttaatgggcgatctggttaatagtcggtgggtaaaacgcatcggttggctgattgtggcgattgtggtggcgctgaacggctggctgattattggttcagcattagattaa

SEQ ID NO: 106175 - DNA, 2184 bp, Enterobacter aerogenes
atgactgacatatttaacatcaaagttaaaaaaactctgctggcgttaattgtttgtttgatttttattccgctatctcgattaatttctccgcaaacccttatcgacggaaaacaaatttatctggcatggctgccattaagcgtaatgtacgcaaccatttgtatttttggccgttacgccgttgcccccttgattgttgcgtttgcaattactaatacatttgtaatagatctaacttatacacaggccgctatcctgttattttgtcagttattttccgtctttttcaccttcgctatcatgcgctcgttgtcggggaaaaaatggcgtagcggaaggcctgccaagcgccatatcggtcgccgtatcttctggggcggcttctttgcccccattctgcttaagctgacgatgtatctggcggggcgcttcttcgccttcccgcttgccgtctccagctacttcagtaccgcgtcgatcatctattccgttattgatatccaggcgttgatatgcgccgccttaatctttactaccgctttctattacccgatgagaatgatggtttgcccacgttaccggcgggtgttttggttgcgtcattgccaaccgtggctggtgaaaaaaagaagagcctttaccatatattggtttatggcattaatcacaatcatgctggtgctttgcgcgccttttgattcagatttaattgctggatatctggtgccgattatttttattctctacttcatcggtatcggccggctggggcatgaattaattcgcattacctgggctatttcggcattctttttagtggcctataacaaaaattttctccagggcgttcaatcggggtactccttgtcatttgtcctgtcggtgttaatttcattcacgatttgtttgttttacatgacagatatttattcgcgtagtgacagaattaaacaacgctggcgcgatcgggctgaagaagatccgttaaccgggttacccaatctgcgggcgctggaagggcatttgcgccaatcgccgcgggttgttattagcagcctgcgtatcgaaaacctggacttccttagccgtcactacggcatgatgatgcgtgtagagtgcaaacggcaaatagcccgccgtctgcagccgctcctggatcaccacgataaaatttatcagctcccgggtagcgagttattgctggtgattgaagggccggaaccggctgcgcggctaaatcacatcgtcgcgatgcttaaccacgctaaatttaactggcataaccaggttctggatttagagtttggcgcggcgtgggggagttacagcggtattgagaccgaattacaccctatgctcggccagcttagttggttatcggagcaggctggcgccgtgcagcggttgctggcgttagatactgcgcaggaggaggtttccgaccaaacaaccgaacaggtgcggatgctgacgaaaataaaacaagcgctaaacgagcgtaatctcctgctgtacgcgcagccgattcaaaatgcggagggggagggctattacgaaatcctcacccgtatgcgctgcggcgagacgattatcacgcctgatcggtttattccacttattgcacagtttaacctcagccagcgcttcgatatgctggtgctggaaacgctgttcagccagcttgatcaacatcccggccgacgcttctccgtcaatttgctgccgtatacgctgatgcaaaaggatagcgccgctcagattatcgcattgtttaagcgttatagcgtatcgcctgcgtatattacgattgagataaccgaggagcaggcgttctcgaatgcggataccagcatgcataatattcagctgctgagtgagttcggttgcgctatcgccattgatgacttcggtaccggttacgcgaactatgagcgtctgaagagcctgcaggcggatatcgtaaaaattgacggctgcttcgtgcacgaaatcgagagcgaccagcttgatgcgattatcgtcaaatccataatcgaaatcgcgcgggcgaaacagcttacggtagtcgcagagtacgtcgagacagaggcgcaaaaggcgatgctgttggcgctgggcgtcgattatttacagggttacctgattggcaaaccgcagccgttaagcgaattaaaggcgtaa

SEQ ID NO: 106176 - DNA, 951 bp, Enterobacter aerogenes
atggccaaccgcgccggggcgcaggagctccgggtcgtcgtcgagcatgacccgcttttcggcccgctgattatgcttggcgagggcggcgtcgaatggcgagcggaaaatcaggccgcggtcgccctgccgccgctgaatatgaacctggcgcgttatctggtgatccaggccatcaagagtaaaaagatccgcggacgcagcgcgctacgtccgttggatattcccggcctcagccaactgctggtgcaggtctctaacctgattgtcgattgccccgagatccagcggctggatattcaccccttgcttgcttccggcaacgagtttaccgccctcgacgttactctcagcctggcgccatttagcggcgacagcgaaagtcggctggcagtcagaccctatccgcagcaacttgaggaatgggtggcaatgaaaaacggcgagcgctgcctgttccggccgatcctgcctgaggatgaaccactattattggcctttattgagcgggtcaccaaagaagatctctattaccgctacttcagcgagatcaacgaattcacccatgacgacttagccaatatgacgcagatcgactacgatcgtgaaatggcctttgttgcggttcgcgccacggagcaaggaagcgagatcctcggcgtgaccagagcaatttccgatcctgataatattgatgccgagtttgccgtgctggtgcgttctgacctgaaaggtttaggccttggtcgacagcttcttgaaaaactgatcgcctatacgcagagccatggattacagcgcttaaatggcatcaccatgccaaataaccgcggcatgataggccttgccagaaagcttggttttgcagtggatatccagttagaagacggaatagtgagcctgtctcttgcgctgaatacgttacattcggtgacaagcgacagcaattaa

SEQ ID NO: 106177 - DNA, 561 bp, Enterobacter aerogenes
atggctacaaccaaaatcatcacccaggctgaggcgtttaagcttatcagctggcttgaaagccataacaaacagctatttgcagacgtagctatagttatggcttctttatgcttgcgtgtaggggatgcgctctccttaaaattctcagattttgtagagggagacacattaaaaatcacagagagtaagacaggtaaggagaaggagatcgtcgtccctgcaaaggtatgggagatagtgcagaggaggaaagccacttttccacgtgacacctatctattcacctctcattcaaaccgtgcaagtgggctgaagcccgtgagccgtgagcaagtgaaccgggagctaaaacaagcggctgagaatgtagggattagaggaacggtagggtgtcactcgtttagaaagtttgccgctacgcaggtatttgaacagagcaacggcaacctagctttagctatgcgtaccctcaaccattcagatccaaaagtcacaatgaattatttgaaaatcgacgttaagagcgtaggcgctgccctcgcaaacatttgggagtga

SEQ ID NO: 106178 - DNA, 207 bp, Enterobacter aerogenes
atgaaacctttgattgtgctaatgctggcgctcataagcgtacaggcgaatgccggacagattaccctaactgacccacaagaggagcagacagagaacggaaaaacgctatgcatctatgagaacagcaattacacattcacctacgttactaaggggaaatgcccgtatgctcgaacctttaatacagaggattcaggaaagtaa

SEQ ID NO: 106179 - DNA, 846 bp, Enterobacter aerogenes
atgattaagccaaagatttttatcgcctcatccagtgaaagtttgtcaattactagggctattagcacaaacttagagcatgaatatgaagtaactccttggagcagcggaagtttcactttatcaagtacaacaataaatgaccttgtcacgaaatcatcaacgactgattttgccgtttttgtgtttcaacctgatgatttaactgaatccagaggcaaacaagagcatgtagtccgggataatgtcttgtttgagcttgggctgtttatcggtgcgattggcgttaagcgctgcttcattgtaaaacctcgtggacaagagctaaaactgcctagcgacttattaggtattacattggctgaatacgattcgcagagatctgatcacaatgttgatgcagctttggtacctgcatgccataagatggatactgcgatgaaatcgcaggggtgcttgaatcgcattgctttaggcatgaatgagaaagtaattgtaaatccttacgattatgatctcaatattgaggcttttgaagtgctcgcagcctgcttggaaacacatacccagtatccagatggtctatcatcggcatctattgtatggtctctgaaagagattgaagagcggcttgtgacaatccaattggtcaaattggaacgtatgtccttcatagaacgttcgctgcaaattgacaacaactctggcgatgagttttacgcttacacaattactgaagctggtatagataagttacttgaacgcgaagatgcgctaataaagcggcgaataaaaaataacaataaagatgtgcctcttgatttctccgacgatatccctttttag

SEQ ID NO: 106180 - DNA, 219 bp, Enterobacter aerogenes
atgaagcactgcccgttatgtcagggtgccgcccatgcaccttcaagccataacctgagcagtgaaacgaaagagcgcaaccaccagtgtcagaacattaactgcggctgcacttttgtcactcatgaaagcctggcccgtttcaccgtgaagcccagcgagattgaacctgcaccgccccatccttccaagtatcagcagcaacaactctggttgtaa

SEQ ID NO: 106181 - DNA, 300 bp, Enterobacter aerogenes
atgtcttttaatcaaaatgaatcggcgattttggatcttattgacgcatttacgtgcggtaacattgctgcatcggattttgaacaagaatactccgccgcatggcgaacttacagggattcaactgatacaaaaaaagccgatatagccacccagaagttttttgactcagttttctcattagtcgattcttactgttcagatcccgagttaatcgacgaagatgatttaaacgaggatgaattgctaagtgaggtatcacgtcttaaagccacttgggaaaacgccatactagcttga

SEQ ID NO: 106182 - DNA, 1038 bp, Enterobacter aerogenes
atgaagctcaacgccagacaggtcgagaccgcaaagtcaaaagacaaaacctacaaaatggccgatggtggcggtttgtatcttcaggtttcggccaaaggttccaaatactggcgcatgaaatacagacgtccctctgacaaaaaagaggatcgcttcgcttttggtgtttggcctacggtgacactagctcaggcaagagcaaagcgtgacgaagctaaaaagctgttagtgcagggcattgacccaaaagccgaacagaaagaatctcaggccgagaattcgggggcatatactttcgaaaccattgctcgtgaatggcatgccagtaacaagcgatggagtgaagaccatcgatcgcgcgttcttcgctatcttgagctttatatcttccctcatatcgggtcgtccgacattcgtcagctcaaaaccagccacctgttagccccgattaaaaaagttgatgccagtggtaaacatgacgttgctcagcgcctacaacagcgcgtcacggccataatgcgttacgccgtacagaacgattacatcgactctaatccagccagtgatatggcaggggcgttatcgacaaccaaagcacgacactatccagctttaccttctagccgcttccctgagtttcttgctcgtcttgctgcatatcgcggccgtgtaatgacacggatcgcggtcgagctttccttactgacttttgtgcgttctagtgagttacgtttcgcgcgttgggatgagttcgacttcgataaagccctttggcgcgtacctgcaaaacgagaggaaattaagggtgtgcgttactcgtatcgtggcatgaagatgaaagaggagcatatcgttccgcttagtcggcaggcgatggcattgctagaacagctcaaacagatcagtggtgataaagaactcctattcccgggggatcatgattcaacaaaggttatgagtgaaaataccgtaaacagcgcattgcgtgcgatgggctatgacacgaaacccgaagtttacgggcatggattttga

SEQ ID NO: 106183 - DNA, 255 bp, Enterobacter aerogenes
atgggtgttatgcctgtgtttggtgctagaagtggcgaaattaagcaggttttcaagtgcttaaatggcttgccatcacttgaacccaccgtagaaatacgtgccggttcgagtccggccttcggcaccattagtacttctaaaaccatccgagaaagtccaaatatccatttaaaatcaatgcttgcagagattttttacgtcctgcatcgtctaaggttgtccgttgaaatccggatgtcattgggggcataa

SEQ ID NO: 106184 - DNA, 1860 bp, Enterobacter aerogenes
atgtcgttagaccttaatgttagtactctcaaaaataccgtaacattcgtagtcgataaaaacagcatagctcaggcaaaaaaagctgctgatgacctgcataaatattttcagaagatacaagaccctaaaatccgcttccagcagcagaaacaacgccgccagaaggctcgccaaatagctgatgatgctcgttttaatagtggccctcgtaatgctgctgaaatgaaagcgcaacgagcagaagagaaaaaaaaactcagggaggaaaaagccaatcttagagcgcagcagcagctacagcgccgccaggaaacagcagaattaaaacaacgccatgccaatctccaaatttccgggattaaaggtaagtacgggttagaccctaaacagcaatttgaagcgcttaaatttgtacaaaaacaaacagaggcttttgctcagggaaatattaccagtcagcgaatgaacgcttccattcgtgaacgtataacccttcttcgcagggaggcagcagccgcacagaaagccactcaggcacaggggggcgcgtatgtgcaggcggctaaaaagagtaaatctccgcatggtgaaaaagaatacggcattgccagattgcagggtgctgcaatgggatttgggagcatgtttgcagcaggaaaccttgcggcacgtatccagcaaacagggaatgaaaaccttgaattgatccggatgagcgagcgagttaaaactaatcccaacgcgataaaaacgatggtggcctggggacagcaacacggggttgactccgctaatatcgataaagcaaccgataatatgaaagacgttcgtgaacgtctcgctatgactgttaacgatgctcagatgaaaaatggtgaatggaagggcggagatggtggtattacagccattatgaacaaatttggatggagtaaggagcagatttccaagttccaggattccccactcaattttatccaggcaaccgtaaatgaaggtcaacgtcgagggatgaaacaggctcagattggtacgcttatagagagtttaggtgatgatctgatgcattacaccgatatgttcctgaataatggtgcagagtatagtaaaaccctgcaacagcttgttgatagtggtcagacactcaatgatgcacagattaaacaggtgatggaatatggtgctctctcaaccaaaatggcagctctgacaaacggcctcgacctcaatctatttaccgggtttatggctggttttggggcttctggtgatgagttaacagagaatacaaaaaacctcaatgaaagtgctcatctccttggagagggattaggaaatctggctacacaggtgacaggtgcaacagtgcaaatcagtcagagtgtgcaggctattaacgattacctaaaatctaaattcccttcatggtttagtgataacaaccagcctgcggctcagcagttgtataacggggctgtaggtggctcagccgatactgttgcagcatggctcaaatcaaacactggaattgatactcagagtgttggccctgctgttatggactggttaggagtgggacgtggggatgcatccgcaggtacggctgcaaacaactacggcctatcagggcaatctctccgtgatggagctatggctcttccatcaactccggcaatgagctatcaggtgaatccagtatttaatttaacagtagctccggaagtgcctctgaccctggttagtgacgcctctagactcagtgattatattgattttcaggcgagggcatctgcccgtagttttgaacaatcattaacattgcaaatcaatagtgggcagagcacaactggtggatga

SEQ ID NO: 106185 - DNA, 189 bp, Enterobacter aerogenes
atgcaattaatactcaaatcacatggtgtccacattgctctggatgccagcaatgctaccgacctgctgaaactgaaagctctggcagagttgcttgagatcagctatccagccttaaagcagcgtattttcagagggcaaaacgtagacacagctattaaagaattattagctaaaggaggcgaataa

SEQ ID NO: 106186 - DNA, 1032 bp, Enterobacter aerogenes
atgacgaaattagcaattgggagcgaagtagttgatctggctcctattttccaggcattgccagaacgcaactacctatttaatgctctcgacctttttgatggcgtcggaattacctctccaaaagttatcgtttcgcagcttgtagaagacaactattcgctgttcaacgagcccacctcacgcggatcgagcgagcacaacgttacggcacgccagaacgggcaggaatggctgattgaggcgccgtatttccttcgggaagacgtgttcaccccagccgatgtacagggcaaacgtaaacaaggcacagcattcgaagaaactgtagctgatctctatgcagagtataccgctaaacataaagttgcgtacatgcgtactcgtgagagttacctcgcgcgtgcactgttcaaagggcaagtatacacccctaaaaccaacgacctgctaatcgattatgcaacgttatttggtgtctccccaatgacgcacactgtgagtgcagctaccccagcgaaagatctggatgatgtgctggataaaatccaacaggcagcaggcggattagccggaatgattgagagggtggtcatattcgctaaaccagcggcctttagctctctgcgcttttctgatgcaatggccaccgcattccaatacgtagcgccttacgatagccgtaacatcgtattccagcgtaatgagctactaccgggcgtgagcaccttctccatgccgggcagccctatcgatgttatcaaggtgacagacccgctgatccttgcacaaatgccagatgatgcagacatgatcgctatcccggtatttagcaagggcactggtgtctaccaggtgatgtatggcgcagcttcctctacattcgcccttctggatgcagctccggctgagttctatagctggggataccagaatgagcgcggcagtgaatggaacgttatcactgaacatacggcgttatgtgccaataacgggttaggcatgcaagtgaagatcacgctcggcgcgtaa

SEQ ID NO: 106187 - DNA, 360 bp, Enterobacter aerogenes
atgatcaatctgacagacctatttccctaccgaaaatcattcacagacattgtgagcttcgcaacagactcatttgcagcagtagacagcaaaacatttgcgtctctccctgctgatgtagaatgcggagacgccatcacctctacaggcgctgcgtataccagcggagatgacattctcatcgtagtttctgattttgttagcgcggggactaataaaaacgtaaacgttttacgtgcgcctaacgtcggttcatacgtaggattaaaaatcgataacattaatgtagctgataaagcagccgctgtagcagcccttgaagccaaaggcttcgtttgccgtgtgttctacacatcgtaa

SEQ ID NO: 106188 - DNA, 201 bp, Enterobacter aerogenes
gtgcttctaatgaacgaaccacaaaaacataaaatccagaaaatgcaagatgattttaaaaatctcagcgaggcgcagaaaacatttattgctaaatcgctagatgtttctatagatgaggtggacgctctcattactaaactgttagagcctcagaaaatctctatgcaacaacggattaatcaacgaattaataaataa

SEQ ID NO: 106189 - DNA, 360 bp, Enterobacter aerogenes
atgaacaattctacctcctataacaccctacaatctgtattacaaacataccacgataattacgccgtccctatgctgacgctacagactcatttgcagcgtgatagaacgcatgagagcctcctggaggcgattaaagcgcaagacctagcacaagcaatgctccaacatattagcgacgtggtgagccgtatagccagcctggaacactcaacgctaacacaggatgaggctgatagtatttctggggaaatctctgatgcactgctgctgctattccagtgtattgaggaaacgcgcgaggtagcattggaactggtgccgaacaccaacacgcgagaggggttatataactactag

SEQ ID NO: 106190 - DNA, 537 bp, Enterobacter aerogenes
atgaaaaccagtattatcaacggctcggaagtgtctagattatccgtggcgattcatcgcatgggaggggaagcagtctcgatgtcgagctacggaatgaacaactaccagggcattcacagtgctgtgttcctcggatgtgcaaatctgggcgataaagatcgtaagagatgggaagactattgtgaacgtattggttgggattttgaaacggtgatggagaagaagcgtcaggcaatgtattttgaacggtgctaccagtttcttagtcgaacatccattcgcaacaccgataccgatcaccctctggtgttcgtcgttcctgacatggcggcggcgaaatatctcaaagcccattacttcccagattcaatcatcgaatgccttggaatcaagaaagctggaaaacagcaggaaacgcgtttgaaggtgctggaatacaaggcgcaagggttaactcagaaaaaggctgcggaagaaatggcggtgtctctgaggacggtagcaacctactggaaccaggacactcgcgtatga

SEQ ID NO: 106191 - DNA, 231 bp, Enterobacter aerogenes
atgagccgtcgcggtaactgtcacgataatgcggttgcagaaagctttttccagttgctgaaacgcgaacggataaagaaaaagatctacggaacgcgggaagaagcccgcagcgatatttttgattacatcgaaatgttttataacagtaagcgtcggcatggttcaagcaatcagatgtcaccgacagaatatgaaaaccagtattatcaacggctcggaagtgtctag

SEQ ID NO: 106192 - DNA, 279 bp, Enterobacter aerogenes
atgagcggtaagcgttatcccgaagagtttaaaattgaagcagtcaaacaggttgttgatcgtggttattctgtttccagcgttgcaacacgtttcgatatcaccacccacagcctttacgcctggataaagaaatacggtccggattcttccactaataaagaacagtcagatgctcaggccgagatccgccgtctccagaaagagctgaagcgggttactgacgaacgggatatattaaaaaaagccgcggcgtacttcgcaaagctgtccgactga

SEQ ID NO: 106193 - DNA, 132 bp, Enterobacter aerogenes
atggcgcaggaagccagacgtgaagagtatcagattgaattgcgtaatgctgaccattcagctaaattagccttagatgctcaggaaataattgtctctgacgtgactaagttgtattcaacttttcaatga

SEQ ID NO: 106194 - DNA, 555 bp, Enterobacter aerogenes
atgaaaaccgtttttgtagctggatcgataaccattaaaaaattggcccctcaaatcgttgagaggttgaagaaaatcgtcgataagaatttcaacgttgtggtcggtgacgcaacaggcgttgactcatccgtgcagcaggagttgttacagttgggatgtcgtgctgctacggtattcagtagttctataagaccacgcaataacctcggctcgtggcccgtcaacgttgttcatacagatcatacacctggcacgcgcgcatttttcaccgcaaaagatattaaaatggcggaagccgctgattatggtctcatggtgtgggataccaaaagccctggcacattaagtaatgttattgaacttttatcccgtaaaaagtattcagtagtatttattaataaatctaaggagtttattgttatcaaagaaccaaaagatgtagacaagttgataagctgtatgtctgcttccgcgctcgaaaaagttgaagaaaaaataaaactttccgaaagattggcgcgactaaaaaatgagcagatagcacttatttaa

SEQ ID NO: 106195 - DNA, 594 bp, Enterobacter aerogenes
atgaacgtgaatatcaagccaatttttggcaattgggatttaggatatgcaatggataagcatatgattaaaagtacctatttgggtgataatgaatatggacggcctcagtttcataacgaacgtactgaagttggtgaggcactttatcagctgaaatatcagcatgactggaaccaagttgaaccactcgcgcagtgtctttttgaaaaagcactccctctttttaagggtattcagttaatcattccgatggctgcctctaatccaagagccagacagccagttacagcaattgctgaagttcttgcaagtaaaatgggatttgggatgaattgttttgacgggttaatcctgaaaaaagccggtggtccctctctcaaaaatctgagcaccagagcagaaaaacttgaagctgtagcgaatatgttttcatatcaagatcttatatcttctgaaggaacttacaacgcacttatcattgatgacctctatcacactggtgtatcgatggaggcggcggttgcggcgcttcgtggatatagtaaaatagataaaatctatgtcgcggccctgacttggaaaccagaatga

SEQ ID NO: 106196 - DNA, 450 bp, Enterobacter aerogenes
atgcgcgagtacgtgtactatccgggaagttttcagccgctggcgctgctgacgcaggaagcgggcaggaaggagagctggcactatcattgtgacccgaacggcgtgccggtccgcctgacgccattgcagggcgagatagtgtggtcagagaagacgggcgtatggggagaaaaaggggaggtctacgccgatcgtatcagcaacccgctgcgttttcagggccagtattttgacgctgaaacggggctgcactataatcgacatcgttactatgatcctgaaattgcgggatttattagccaggatccgattggattagccggcgggctgaatgtttaccagtatgcgccgaacccgctgggatggggggatccgtgggggctgagcgctgatgatttaatcagatacaagccatatgattctttaaatgagtactgcaatatctag

SEQ ID NO: 106197 - DNA, 168 bp, Enterobacter aerogenes
atgatctctttcgcgctgtatgtacaggaacaaacaaattcacaggggctaagtggtctggcgatttgtatccacagcttgatgttagcctcgtgctacagattaacgatgctgcacagagagcatcaaggaaataactatggaatcacacagcctcactctcgatga

SEQ ID NO: 106198 - DNA, 357 bp, Enterobacter aerogenes
atggattacagcaagctatcagattttgaaatagataaggcggtagcagatgtattgggtttcgattacgacatcgcaataatgtttgtaagtccggtggataaaataaatgggaatcatgttgaggagtacgttaggaaaaagataaccagtaatgaaaagcactggaagcgattttctccatcgcgaatgcctaatgattcatggtctattattgaatccaatggtattggaatgagaaaacaatcaaatggattatggtgcgccactagaatgggtggagcttatcctatttacgatggcaatcctcttcgtgctgcaatgctggtatttttgatgatgcaggaggccaaatga

SEQ ID NO: 106199 - DNA, 549 bp, Enterobacter aerogenes
atgaaccacttaatgattgacctagaaacgatgggtaatggtccgtacgcgccgatcgtctccattggtgctgtatttttcgaccctagcactggtgcaacaggcgaagacttccaggtgaatgtatcgcttgaatcatcaatgcggttccgcgcacggcctgacgcctcaacggtcctatggtggatggagcaaggagaggatgcacgtaaggcattaactactgacacgcaggagctttctaccgcccttgactggctgtctgatttcatctccaagaacgccaatacgcgattcgttcaggtatggggtaacggtgcatcgttcgactgcgtcattctccgaaacagctactcactgaccggacaggaagcgccatggaaatggtggaacgaccgtgatgtgcgcaccgtcgtcgagatgggtaaagcgatcgggtttgacccaaaacgagatatgccatttgaaggaactcgccacaacgcattagccgacgcaattcaccagtctaaatacgtttctgcaatctggcagaagctaatcaaataa

SEQ ID NO: 106200 - DNA, 213 bp, Enterobacter aerogenes
atggatcaattaataaaagaaattcgagaattacatagagcagccgataacgcgttttcttattgcgctatgaatttcgatactcgaatggataccatcaatgagtggaatcgtcttctatgtcctgaaaacgtcaagcttcttctcaatttaattgatgagcaaaaggaagcgatagagcatcttgaattggagctaagtgaaaaattatga

SEQ ID NO: 106201 - DNA, 189 bp, Enterobacter aerogenes
atggttgagactattgcagttataacctctgaggggttgtttaccggtcggcctacgatgtcaggggtagatgacatcattggctatctaatgcttcgtgatgcatacgcaaaaccagaagatgctgacggagacccagttaaacgctacgccatcgtctgcaagataacggttgaagaaattgactag

SEQ ID NO: 106202 - DNA, 276 bp, Enterobacter aerogenes
atgaactcaagacagcgttacaaagctaaacgcgcagcagaacaccgtgagcgcaaagagtattgtaagaagattgaccgcgctttctcgcgcatctcagaagactgcagcaatcgcgtagtgctggctacgtcattgggtagcctccgcgacaatccagctcaggaagagattacagagcgtagaaaccgcatatggtacaaacagcctggcgagcgcggcattacttgctcaggccggcagaagatgaagggtaagtcgataccgttaatttga

SEQ ID NO: 106203 - DNA, 147 bp, Enterobacter aerogenes
atgagcagcctgacttactgtctggcgcggcgggtaactccttttgccgcatcgatgtttcgtttcgatggggtaattaaacatcatgtggatttgctagtcaacaccgtgttgattatttctgtgtgttttattcctttttgttga

SEQ ID NO: 106204 - DNA, 261 bp, Enterobacter aerogenes
atgcggccttttttattggatgaaattacaggtgtgaaaaaatacagccataagccgatcattttattgaattttatttttagcctgggtaggatcccgctgttgtgtgatcgttttgtgatcaccaacaaaaggaaaagcccagaaggcggcaaccttctgggcccacaaaaacatcggctagaatgttttcttgagatctcggttgtggagattatctcaagcgattcctcatgtaaagcattcgatgcctacttttaa

SEQ ID NO: 106205 - DNA, 711 bp, Enterobacter aerogenes
atgagtggcatagcagaaagaatcaggcatttacttgccagagaaggaatgaaacaaaaggatttggctgagcagctttctgcgagtgcgcagactgttaacaactggattaagcgcgactcaattagccgtgaggctgctcagcaaatttcagaaaaatatgggtattctttagattggcttctaaatggcaaaggggttccaaaaatatctgatgattccgggatcccgcccgagtctgagtggggaaccgtggatgcatgggacaagaacacgccactaccagatgatgaggtcgaagtgccgttccttaaggatatcgagtttgcatgtggagatgggcgcgtacatagcgaagatcacaacggttttaagctgagattctcaaaggcaacattgcgtcgcgttggagctaatagcgatggatcaggagttttatgtttccccgccaccggtgacagcatggaaccagtcatacctgatgggacaactgttgcagtagacactaataataagcgcatagttgatggaaagctttatgcgattgcccagcccggagggggagacgataagctgaagcgcataaaacaactatatcgtaatccaggtggcatgttaactatacgtagctttaaccgcgaagatgagattgcaaatgaggccgatgtggaaatcattggtcgcgtcttttggtactcggtgttgctgtag

SEQ ID NO: 106206 - DNA, 219 bp, Enterobacter aerogenes
atgatcaacaaatcgaagactgttactcctcttgacatggctatcaatgctgtcggtggttcccagaaaatcctcgccgaaaaggtgggagtaactcctcaggccatcaacatgcttaaaaagcgaggcgggagcctcccggttaacaagatgcgtaagtacgaagaagtaaccggtctgtcaaaggaagtgctgtacccgggcatttttacagcctaa

SEQ ID NO: 106207 - DNA, 606 bp, Enterobacter aerogenes
atgacactgatagaagagtggttgcaagacccacctattagcgaaaacctggagttcccagaagggtactcaccgggtggctgggtttatgtgcttgagaatgaggctatgcccggtctttataaagttggaatgaccacttctagcccagaaaaaagggctgctgagctttcaggcggaacgggtgttcccaaaaagttccatgtcgtaaaagcatttagaacgaaacacccagccctccatgaggctgaaattcaccgccttcttgccagatatagagtcaatgatggtagggagttttttaaatgtaaggcagaaaaaataatctctatttgcaagtcgattattccagatggagatgcggagaccgtaagtgacctcgtcgataaatacaatctcataacattcgagaaattcaccgacttagaaatgtcagatgtcttaagtcagatgggcataactcattttggggatagcgaggcggcgattattcgtcttgccatgttcggatcagaggtggtgcggcatttgactcgtaatgggggagcagtggtctttttcgatgcacagttcactcttttaactcccggagataacgatggctag

SEQ ID NO: 106208 - DNA, 873 bp, Enterobacter aerogenes
atggctagatccagaaacatcaaacccggctttttcaccaatgatgaactggccgaatgctcaccatatgcccgacttctctttgccggactatggactattgccgacaaagaagggcgactggacgatcgcccaaaaaaggttaaagcaatggtgcttcctttcgatgatgttgattgcaatgatctgcttcagcagcttcatagccacaaattcatcaaccgttatcaggtaaatggcgaatcatttatccaaatcaataactggaagaaacaccaaaaccctcactgcaaagaagctgctagcgagataccagaaccagtagagaacaatgacagcaccggacaagaacagtgcaaggatgataaagaggaagacaaaaaggatacagaatcaattcaagtcattgaaaacaatgaagcacaagaaaagaactgtgcaagcacggtgcaagaacaagtagagaacaatttaaatcctgctgattcctttaacctgattcctgattccctcatcctgattcctgattccgtagttaacacccaagccgctgacgcgacttgttccgatgaagataacgttcaccagatggctagtcgttacgctttcgaggggaatgttgttcgactgaaccagaaggacttcgattcctggaaggctcttttcacaaatatcgacctggtatcagagcttactcgtctggacattgaattcacgcatgataaaccgaagaactggtttagcactgccagcgctaagttgaattaccagaacaagaatgcctatcgacaacctgttaagcgagccgttaacgaaagctttgccaccaaagactacggacaaactgatatcccatcatgggctcaggagtga

SEQ ID NO: 106209 - DNA, 498 bp, Enterobacter aerogenes
atgactgatatcgcccgactgttagccagcctcaaacgccgctcagcccatgcaaaagcgttcggcggcgacattacgtttgtaaagctgaaagacatcgacgcgctggtagaggcgctggagaaggcgcagcagaaaaatataagcgactttgaaatcaaagcccgtctctgcaaagagagtaatagcctccacgacaggttgagagaagcagagaagcgcatcgccgagctggagtcccgcaccgtcaccgtgaagctgccagagcttaatgataacctaatagccatccttggcctgcctaatttcacgtgcgcgcatttggctgagctcctgcgtaaatccggagaggatattaaacggaaatcagagcacgaacaggcggcgattattcactggttcctcggcatttaccttgagcacggtgataaatgggaaggcattgcgaaatctgacatccaagctcgcgccgctggcatcaagtgggaggctgagtga

SEQ ID NO: 106210 - DNA, 315 bp, Enterobacter aerogenes
atgaaacctgcgaatcttgcaccagtatattgcgcactttatccggagcttgcagagatagcacgcaaacacggttacgcaatggctatccacggcacgatggcgagagacttcgacctgatttgtattcccttggtcgataagccatccacgccagaggaagttgttgaagaaatcaccgcgacattcgcaactacggatatcaccaaccctggctacaaacctcacgggcggctggcttattccgtctgctttgggtttggtgagttctttgctgacctctcgtttatgcctgctattggggaggctgagtga

SEQ ID NO: 106211 - DNA, 291 bp, Enterobacter aerogenes
atggcaaaccttcagcttgcagtaaacggtgagtatttcgacgcaatgaagcgaggagagaaaacagaagagtatcgcttggttaattcgtactggtgccgtcgcattctagcgcggaaatatgaccgcctgatcatcacgcggggctacccgcgagcagacgaccacgaccgccgtattgatatccagtatgacggattcgaaatcaaaaccattactcacaaacatttcggcgaccagcctgtgaaggtattcgccatcaaggtgaatattgaggggaccaaccaatga

SEQ ID NO: 106212 - DNA, 1131 bp, Enterobacter aerogenes
atgaccaataaccagttaacaccggaaaacgtcacccgttatgccaagtacggcgtagacatgattgaatggcccgatggtggctatgtgaggtatgaagattatgccgcgctggcagtagagctacaggaacgccgcaaggccgacagtgagccggcgatgtacgtaatggggatggggcgggcgcttgacgcagagacagcgtcaacttgcaagagtgccgtagactcttgggtaggtgagtggaaccaaagtcgcccaccgggacaggcggattataaaactgttccactctatcgccacgcgcagtcagcgccggaacgtgaccaggtgcgcagcgagcacgccgagtggtcacaggctacattcggcaatgttggcccggttggcccactgaatcacctcagcaaagaagcacttgaagctgctgccgagcctagcgacctgtcggagtgggccgatatgcaattcctgttgtgggatgcgcagcgtcgtgcaggtatcactgatgaacagattactcaggcaatgattgaaaagttggctgtgaataaacaacgcgaatggcccgaaccgaaagacggagagccgcgcttgcatatcaaagcgcagccagcgccggtagtgccggaagatgtgctggacgcattgcagaaggttgctcgaatacgcctcgacctgaatggcttcgatggtgatcgccgtgggattgccgattgcctgggaaatgccgaagaggcgttaatcgaggtagtaaatcgccgcgccgccatgctccaggctgaacctgtaacgacggctaacaagttgggcaactctccggcgcaaatcccaattgaccatggatatcggaaaggttgcgaatgttcaggctgtaaaaccacagtcagaatttgcgctgaactggctggcaactctccggtaattccggatacatggattccggtgcgagagcgcaacccaaatgatattgggcgttactggtgctatgtggaagacaaaaagagccatggaaaatatagctaccagtggaattgttcatggaatggaagctattggagtggcgctatgatgcacggccgcgttacccactggatgccgctgccaaatccgcctaaggaggagaagtga

SEQ ID NO: 106213 - DNA, 243 bp, Enterobacter aerogenes
atgcctttttgtaattgcgaattctgtggaaagagaaggatgaagatatttagtaagtcttatccgtcaatctggagttggtggaggcgatactacttttgctccgtggagtgtgcaaacaatcttgtaaaagcagatcgtgatgaagccggcaagcactggcaggaaatgctagaagcatttgttttgtgtgaaagaatgaagccaaagcaggagagcgagcgtgaggaagctaacgtttga

SEQ ID NO: 106214 - DNA, 186 bp, Enterobacter aerogenes
atgattagttctcagcaagctcaatcctacgagcagcagagcgtgcgtcgaacactgtgcgcaggatgcatgaaggaacttacgccagaggaaacctacgcgtgttctgaatgcgtggatgaatggctgatttatcgtgatccgaataactcaatgacggaggaggaagatggcaaaccttcgtaa

SEQ ID NO: 106215 - DNA, 291 bp, Enterobacter aerogenes
atggcaaaccttcgtaaagaagcgcgtggcagggaatgtcaggtgcgtatctacggtatatgtaatcacaatcctgagaccactgttcttgctcattatcgaatggcaggtttatgcggtactggcatgaagccagacgacctcctcgcagcatgggcgtgtagcagttgccatgacgagatagaccgcagaacgcataacatcgaccacgagtttgcaaagatttgccaccttgaaggtgtaatgcgaactcaggacattctgcgcaaggaggggaagattaagacatga

SEQ ID NO: 106216 - DNA, 366 bp, Enterobacter aerogenes
atgaatgaatataactttatccttccatggcctcccagtgtaaacacttactggcgacggcaaggaggaaggtattacatcagtaagaaaggtctgcagtaccgcaaagaagttatccagattatcaaaagcctcaatcttgacatcctcaccaaatcacgactccgcatcaaaatcatcgccgcagtgccagactcccggcgcagggatatcgacaacattttgaaatgcctactcgactcacttgtccacgcctcattcgctgaggatgacgagcagtttgatgatattcgcgtgatacgtgcagcaaaagtgaatggcggtcaggttgaaatcaaggttacagagctatcggaggcagcatga

SEQ ID NO: 106217 - DNA, 237 bp, Enterobacter aerogenes
atgaaaaacatggcagacaaagtaaccactgcagctgcttacaccacatctggggcaacctttcttgccgggagtatgtcattgaatgaatggctagcttttggcggtttcgtgctggcagtctttacgtttgtcatcaatctgcattaccagcgtaaacgagatcgccgagaagaaagggctctgaagatgcagtttggagatcggcgcaatgagtcaaataattcctctgcttaa

SEQ ID NO: 106218 - DNA, 471 bp, Enterobacter aerogenes
atgagtcaaataattcctctgcttaactatgaggagggttatcgtgaaaaaccttacatcgatagcgaaggctatccaacggttgcttgcggtatcaagattggccctaagggcgctcagttaagcaattacactttcggcgttccgcgcgatgttggtgatatgtggcttcagtcattcgtcgatacaacaatcggtaagatgaatgcaaacccatcaatagtttctgcgctaaaagcatgtaatccggctcgccgtgacatcctgataagcatggcgtaccagatgggtgtaaatggtctggcaggattcaagaacactctctccatggtggctgctggtaacttctccggtgctgcaaacggaatgatgtccagcctgtgggcaaagcaaactcccaatagagcaaagcgccacgctgaagtaatgcgtaccggtgagatgacagtttatgcagggttgctgaaatga

SEQ ID NO: 106219 - DNA, 240 bp, Enterobacter aerogenes
atgccgagcaaactaaccagtctctttctgatgacgcttctcgtgaccgcatgcggaaatcgaaataccacaccgacgattaagtatgtctacatcgacaactcctgcactgcatttgtccccatcatcacacatgggaaagaccctgatttgatggatgccaggacagtgaaggctatcaatacccacaacgataagtgggatgcgttatgcggaaaaacaaacgagagcgagaaataa

SEQ ID NO: 106220 - DNA, 516 bp, Enterobacter aerogenes
atggcactcacagacaaacaggagatgttctgtcgtgagtacctcgttgatttgaacgccacgcaagcggctattcgggcggggtacagcgacaagaccgcccaggagcaatcaagtcgactgttatcgaatgttatggttcagaatcgcatttctgtcctcaagtcggagagaaatgagcgggttggtgtagatgctgcatacgtactacgccgactaactgaaatcgaccagatggatgtccttgatgtactactggcaaacggtgagcttaagccagtcaaagattggcctaaggtgtggcgaacaaccctatctggcatggatgtaaccgagttggctggcgattcagccggcctcctgaagaaaatcaaatggcctgacaaggtgaagaacctagagcttctaggaaagcatatcgatgttcaggcattcaaagagaaagtagagcactcaggtgaaatcagccttatcgatcgcatccaggaggcccgcaaaagagcgagaggtaagtaa

SEQ ID NO: 106221 - DNA, 1458 bp, Enterobacter aerogenes
atgtcagactttgaggcaatgcttgccgaggatatgggtgaattcttctatgacccgctcggatgggttatgtatgcgtttgactggggtaaaggtgagctaactggttatgacggccctgatgagtggcagagagagtttctttctgattggggcaatgctatcagcgaaaatgatttcgacggtgtgcttcctgttgaagcttatcgatgcgctacaagctcaggccacggtatcgggaagtcggcgttaacggcttggatcatcctctacatcatgagtacccgcccgcaatgcaagggcgtggttacagcaaatacctcagagcagctacgcactaaaacttggggcgagcttggaaaatggaagaagcgttgcattaccggacattggttcgagtacaacaacggtaagggcaacatgaacatctaccatgtggatcacatggagtcgtggcgctgtgatgggcagacctgccgagaggaaaacagcgagtcttttgctggccttcatgcggcgacgtcaagcccgttttatatcttcgatgaagcttcagcagtaccagacaagatttgggaagttgctgaaggtggtttgactgatggagagccgttctggtttgcattcggaaacccgactcgcaacacaggacgattcagggaatgcttccgtaagttcaagcatcgctggcgccggcgccaaatagacagccgacttgccaagatgactaataaatcactaatcgaagagtgggcgagcgactacggagaagatagcgacttcttcaaagtgcgtgttcgtggccttttcccttcatcatctgaaatccagttcatccctcagcattacgctgatgccgcaatgaatcgccagcttgagcacagccagtattcatttgctccgaaaataatcggcgttgaccctgcatacaccggcagtgacgaggcatccatatacatgagacagggattgcattccagattgttggggacctaccagaaaactgatgatgacgttaagttcgcgcagatagttgccgggtttgaagatgagcataaggcagatgcagtgttcatcgactttggttacggcactggcatccactccatcggtaagtcatggggaaggggctggcgtctggttaactttgccggagagtctaaagaccctcagatgcttaataagcgtggtgaaatgtggaacgcgctgaagagttggctgaatgatggcggaagcatagatgaccagcaaacctctgatgagattgtcgctcctgagtacaaggtgaagctcgatggcaagatcgtacttgaatccaaagacgagatgaagcgccgagggataccatcaccaaacagggccgatgcgcttgcccttactttcgcgttccctgtcgttaaaaacaaaccaaaacctacagcacctgcaccgattaaacctgtcgcacggagaagatga

SEQ ID NO: 106222 - DNA, 2175 bp, Enterobacter aerogenes
atggcagataacgaacgactcaacgccattctgtgccagttcgacatagactgggcgtcgggcgatgaagccagaactgaagcgacaaacgatttatattttagtcgggtgtcacagtgggatgactggctaagcgaatacacaactttgcagtatcgcggccaattcgatgtggtccgcccggtagtgcgtaaacttgtcgcagagatgcgtcgcaatccgattgatgttttgtaccggccaaaagacggagcaagtcctgacgctgctgatacgttgatgggtatgtatcgcacagacatgcggcacaatgctgcacgatctgctgttaacgtcgctgtgcgtgaacagattgagtgcggagttggtcactggcgactggtcacagagtacgaggataacaacctcacaagccgcaaccaggtgatccgccgccgaccactgcatgagtcatgctctcacgttgtctgggactgcaacagcaaagagcaggacaagagtgacgctaaacactgtaccgttattcagccattcagcacagaaggctggaaagtttttgcggaagaaaacggcatcgacccgaaagttattccatcattccagagtccagatatgggatggatgttcccatggatttcgaaagatgtcgtctacgtcggtgagtattacgaagtcgaagagaagagtgaaaaggtattcatctacctcgacccgctgacacgtgagccggttagctactatcagcgcgatattaaagatgttatcgatgaccttgcagataaaggcttcgttaaagttgcagagaaaaaggttaagcgccgccgtgtctacaagtcgttaatcacctgctcagaaatcctgaaagaccgcgagttaatcgcgggcgagcatatcccaattgtgccggcttatggcgaatggggatttgctggcgataaagaagtttacgaaggtgttgtgcgcctgactaaagacgggcagcgtctgcgtaacatgatcatgtcgtttaacgccgacatcgttgcccgtaacccacgtaaaaagccaatcttcgctcctgagcagattgaaggttacgagtacatgtacggcggtaatgatgattatccatactaccttcagaaccgcactgatgagaatggcaacgagctgcaaatcggccccatggcatacatggagaacccagaggttcctcaggctaacgcttacatgcttgaggcggctaccgctgcggtgaaagaagtcgccagccttggtgtggatactgaggctgcaaacgggcaggttgctttcgataccgtcaatcagttgaacatgcgatctgatcttgagacgtatgtgtttcaggacaacctggctactgcgttccgtcgagatggtgaaatttaccagtcgatggttaacgacatctacgacgtgccgcgcaatgtcactgtgacgcttgaagatggatccgagaaagatgttcaggttctttcacaggttgttgacctgcagtctggcgatgtagtcacccttaacgacattcgaggtcgctatgagtgctacacagacaccggtccatccttccagtccatgaaacagcagaatcgcgctgagatactggaattgcttggtaaaacgccacagggaacaccggaatatcaactccttctgctccagtacttcactctcctggatggcaaaggcgttgagatgatgcgtgattatgccaacaagcaactcgttcagatgggcgttaaaaagccagaaacacctgaagagcagcagtggtttatcgaggcgcaacaggcaaaacaaggccagcaagatccggcaatggttcaggctcagggggttctcctgcagggacaggctgaactggctaaagccaataaccagacgctaactctgcagatcgacgcggctaaggtcgaagcacagaaccagcttaacgccgccaaaatcgcagaaatattcaacaacatggacctcaataaacagtccgagtttagagagttcctaaaaaccgttgcttcattccagcagaaccgcagcgaagatgctcgcgccaatgctgagttactccttaaaggcgatgagcagacgcataagcagcgcatggacatcgccaacatcctgcaaacgcagagacaaaataccccttccggacaaagcgccgagatacctcaataa

SEQ ID NO: 106223 - DNA, 915 bp, Enterobacter aerogenes
atgcaagacaccaccgaaattcaggcaactgaaggccaaaacctgcccgtcgataacgcggcggcatccgcagtcgatccggcatcaaatgccaatgatgctacaggacaggaagaaggctttgagattgtactgaacgacgatgagaacaagccaaaacaggacccggtaaccaacgctaaatttgcacagcgtcgtattgagcgcaagcgccagcgtgagctcgaacagcaggcagaagcagttaagcgcggtgagttaccggagaatctacgggttgctcctgagctaccatcccaacctaacgctaatgacttcttctctgatgaagcattggctaagtatgactacgaccagactcgtgctcttgcagcatttcagcaggccaacaacgaatggcttgtgaaggctcaggatgcacgtagcaatgccgtagcagagcaaggaaggaagactcaggagtacaccctgcaatcagcgcaatacgtcgatgctgctcgtaagcactatgacgcggcggaaaagctaaacattcaagactaccaggagaaagaggacgcgtttgctcagttagttcctgcgcaaatcgtctccgacctgatggtgcttttccctgagaaatccgcagcgatgatgtaccacctcggtgctaatcctgaaaagacgcgtcaaattctgcagatgaaccagcagcaagcactgattgaactaacacgactatctgaacgtttaactctcaagcctcgcagcaagccagtttcagaagcccctaatcctgatgagccaatccagggtcaggctgttgctgctcatctctcggctattgagaagcagatgaaggcagctgcagataaaggcgacgtagagacctatcgcatgctcaaggcacaattgaataaaggatctcgtaaatga

SEQ ID NO: 106224 - DNA, 954 bp, Enterobacter aerogenes
atggctgatgatggattaaaagaaccagtcatcattcaggctactcgccttgatgcctcaatccttcccaggaacgtattcagccagtcatatcttctgtatgtaattgctcagggtacagacattggaaacgttgctggtaaggctaacgaagctgggcagggtgcttatgatgcgcaggtaaaaaacgaggagcaggaccttactcttgcggaccatgaggacaggattgacgcagcagaagcaacgctcattgatcacgagcagcgcatatctgctgccgaaacgactctagcagaccacgaagcaagaatcaccgatgctgaaactgagttggccgaccatgaatccaggatttcagccaatgaatctgaacttgctgaccatgagttacgcataactcagaacacgaacgatatttccggtcttgataccaggattacagcagcggaaggtgccatatcatcactagaaacaaccgttgctgatcacggaaccagaatctctgcgcttgagtacgccactacgcgcaagaaatctgaagtggtttacagtggcatatctcttgtcatcccaactactggagcaaaccttgtcactctgcttaaggcgctcacgcctaccagcggtacgttatcaccatttttcgatgctacaaacgataagcttgttgtttacaacgagaataagaccgtcaatttcaaactctcattgattggttcatggcctggaggaacgactaaccgctctatccagttaacgttctcaggagcggtacctgatacgttggttaacagtcgaaacgttgctacgactacagataacgtattactggcgacgttctttagtgttgatgtcggaggataccttgccactaacggcagcactatgacgattcagtctaacggtgccgctttcacggccacaaccatcaaaatcattgcggaacagtaa

SEQ ID NO: 106225 - DNA, 1845 bp, Enterobacter aerogenes
atggctaaggcatggaaagatgttatttcctctcagcaataccaggcattagcgccagaacagaaagctcaggcccaagagcaatacttcaatgaagttgtagccccgcaggctggagagcaagcagaagaggcaagaaaggcattttatcaagcttatccaattccaggacaggatgggcggcagccagttccgcaagggcaatctctcatccagagtgcagagcaggcgggtagaggtcttgttaacattccatttgatgtattgcaaggtggggcaagcctgattaatgccatcagtcagggtttgggtggtccacgtgtattggatgatgtgtatcgacctatagatcgccctacagacccatatgctcaggctggagagtctatcggtggatatctcattccaggggctggagttgctggaaatatggcgattgggtcagtcgctgaagctgccaatcaggatggtgactttgcaggtaatgtggctaagaacgctgcagtaaacctaggtgcgcatggtttacttactggtgctgcaaaggcaattggtcgcggcgttacagcagttagaggacaagttgcaccagaagctcagaagttaattgatacagccgagagcatgggtgtaactcctatgacatctgatatagccaagccagttggcgagatgggggctcttggtaaggggctagttcagggaggtgaaggagctttactaggaacgggaggtcaaagggcagagcaatatgctacgcgcagtaaattggtaaagaactacctagatcgcttcggtgaatataacccagatgatgttgtcaactcactaacgtctacgctgcgaggtagaaaggatgcggccgggagtgttattgaaaacgtaacaaagagaatgggaacaagccctgtagatacaaccaacacagtatccgcgcttgatactgcaattgcccgtcaagaaaggcttgggacttcagcaaatcaaggtcttcttaactcattaagaaatcttaaaggagaagttgagtctggaaatattgactttgaccttctcaggcaacatcgaacagcctttcgctcaaatgtacagggagatgccatggtatttcccaaccaagcaaaggccactaccaatatggtagaaaatgcgatgagtcgtgatttgcgtaatgcagttggtaaatcacttggtgcgcaagatgcttcagcataccttaaggctaattctgattatgccaatgtatttaataaggttctaaacaagagaattgcaaataccctaaaccgggctagcaatgaggaaactcctgagctgataaactctgtggtgtatagccgaaaaccttccgatatccaaaggatttggggagcactcgattcgaaaggtaaggatgcaatgcgtgcagcatatatcagcaaaatatctgagaaggttggtgattctcccgcaaagttcataagcgaaatcaacaaactcaaatctcaatcgggaggagagatatacggcacgatattcagcgggaagcatatgaaggagttggaagctttgcatgatgttttaggtgcaacatcacgatctgattctgccaatgtagtcacccaaacaggacaagcgctagccaatccaatgaggattggagctggagccgctactcttgggcaatcattagctgcagaagctggttacggactaatgatgagggtatacgaaagtagacctgtcagaaatgcgttattgaggctttcagccacaaaagcaggcactcctgcgtatgaaagagcgctaactgaggctgcaaatgctgttcgcccattagtgtctcagcaagtaacatctgattag

SEQ ID NO: 106226 - DNA, 195 bp, Enterobacter aerogenes
atgattagcatggtttatatcggattcattatcatgatgattgcggtaatcatcatgactaatacgatcgcatcaaaaagcgataacgcaaagaagaaatgcgaagagttatacgacgatatatccgaccttaaggatgaagttttctatctgaagatggaaatcgaaaaacttaaggtcggtgtggataaataa

SEQ ID NO: 106227 - DNA, 3846 bp, Enterobacter aerogenes
atgtcagatatcatagccaatgcagtagtgtctatgccaagccagttgtttacgctggcgcgtcagtttaaagctaatgcctatggaaaaatctatatcgggcttgttgatacagaccctgtagacccatcgaacaggattcaggtatatcttgaaaatgaagacggatcgcttgttccagtttcacagccgatcgcgataaatgctgcaggttttcccgttattaacggccaggtatcaaagtttgtcaccacacaaaaccactcaatggctgtctatgacgccaatgatgtacagcagttcttcttccctgatattctgaagtacgagccagaccaactttatgcaaaacttgccgcccctggcggagcaagtctcattaatacgcttcagaataaatcggtgcagcaatctcttgatgatctgaaggttgacgtagacggagcaaacaatgctgcagctgatgccaggaagtcggcacaggatgcatctgcatcagcatctgctgcaaaatcatcagaactactcgctaagggatatgctgataacgcatctgcatcagcaacaaaggccgcagagtcagcagagtcagcagaggccattgtagatactgataagactttcccaaccgtttctgctggacttagcgcagttgcagaaggtgaatatttccgtgtccctcagggcactggaatgagagtttcttttatctggtatcgtaaagttagtggtgcagccgtagctgttgctgatgccccaggaagcgcggcacttaatggcactttacggttgtacatgacgcttaccgatgcacaaaacgacatcgccaatattgcgacagggtctgttgtttatgtcagaaatacctccggcagcaccattgcagatgaatacatcaacaatgccggaacgcttacagcaacgggtagattgctaccttctcagtatgcaatgtatgccccaaacctgatcacaaattccagagcatcaaacgcagaaaaattaccgtctttgcttactggtgcaagcgcagcaggaacgtggggtacggcaagctctgaaatggttgctcatggcgctgtacagtctgttgcttgccctccgcgcgcctctacctcagacccggcagtgaactatgttttccagcaagatttaagctatgtaactggtggcaattatgtggcggtatcattcctgttccggggcgttacagacttggcattctggaatattcagccatcaacagccggtactttagttacatccagaaaagaggacttaggcagcggtaccaccctggttactgcggtttatcagattaccggctcaactcctggtgtcgctcagtatatttatttcggatgccagcagcgcggattgagcactactgcatgtgagattgcttaccctcagatggctgtatctggcaggccaatctttggtgtaggcggtgatatgtctcttgcagatcgcctgaatgttgcaggagtagttgcgccaaaccttataaccaacagttacgctgacccggcatatcaaatgccacgcctgcgtgttggctctattggttggagtgctgttagttcaatttcagacactacaattaaaaacgcgattacaaatgctggcgcggtgtcatgcttgattgctaacccagttaccgctggaaccaccacagaagcgctggttgagccatttgtctacgatactattgctcgcggacagtatgctgctgcgcaattctatgtatacgttgttcctggttctggtttgagcgcatgggatgaggttaaaaaagtcagtgtattctttgctgaccaggatatgtctgtagcagaaatcacacccgatgtgattagcgctattacgccaaacctgtttaaagtacgtgccacttatcagtttactgctcagaagcctcgccgtgtagcaatgggtatccaacagacaagtactgtcagtaccttctacacatttggattcttcttcgcgtgttctggacagccgatacgtgaaattctggaatcaccgtcacgtgatacagggtttaatgagcgcgtagacggaaatgcgcgcaacatcgcctttaacccgtatggtgatacttcacagcaattactcccgctgttcggtaccgatggtgtatggaagaccattgcacaacttcctactgcggttcagtcaattgctcagtttggtgcgaagggtgctgttccggcgatgcgtgtcacagccactccgccagggcaattccatgatgcgctggtcaacgttggtctcgatagcgttaaggctggtgagtatgtcgcagttgaattctgcgtttacgtcgctgctgatgccggcgctaatgttgaagcgctgctggcgaatgctgcacgtgctttcttctggtacagttcaaccggatttgtgcaggtatttgcttcaatcagggaaaaacttgctgctaacacctacaaaatgtttgcggtttaccagtacacccagaatgcgacaaaggtctatttcggtgcccgaaaccaggtaacgaatgctgatttctacgcctttaacttcttcgctgcatcatcttcaacaaccatcctcaacattaccaaggggttggtgcgagacccacaactggagccatgggttactggattaatcaatgcatcagctaacccgtatcctccagtgttgccggttaacacgccaattactggcgctgaagacctgatactgttgccggatcagatgttcgtccatccgacatctccattgcagatacagtgtcctcagctgatgatgaactggactggagatatgattaaattcctcgactggtctcttcgcggaacatctccatcaggccagccatatagcctggaaaccagtcgcactctggagattgaccctacgaaaaccagtacgtcagtgagttttggtttccacaacaggcagaaaccgaatcaatggtcacgccgtgatgtcactcttgttcggggccctgcagcagttacggccagtaagaagattgctctgataggtgattctcttaccaatcgtgggcaggtaagccggttgacgcaactgctcaccactgcaggcgtaacagtgactcagactggcacaatgagtcaggatgaaggcggaaagggagaggggagagagagttgggcggccgcgcactttgttggcaaacggacattgcttggtagtacacggatcaacattagctcggataacccgtcaagtacgacgaaaaacccgttccttttcgaagcaacgacggcacagaaaaccgcaaacccgaccatgtgtttcctcaatactggcgcggttagtgagctttcctacgctgatactcaaacaggcaccttctacacgtttgattatcgccgctatctggatgcgcagggattttctgaccctgatgttgtgtcaattgcactggcatggaacgaccaggctattggcacgacgccagaccagtacatcgcccagataaactacatggtgtcgcagattaaggttgcatgccctaatgcgaggatcgctgttgcaccttacccaatggctttttccagccgttcggtatggaatgcaactgtttctcagtacgttcgtaacgttcttggctcattcaaaggacgccagagcgagaaactccatatcatcccttcatggggcatcatgccttccgataccgcatggagtagtgatggaagcagcattaacagggacctgctaaccggtagttatgtcgacacgcgaggagataacatccactgggatatgtttggacgtcagtacatggcgtacaactgcctgtacccgttctacatctgggcttgcgctcaatag

SEQ ID NO: 106228 - DNA, 753 bp, Enterobacter aerogenes
atgcagagcagaactgtctaccactggcagagccggcgtgacgatcgggcgataaccctgcgtatccgggaaatagcggaaacccggatacggtacggttgcccgcgtattcatatccagttgcggcgggaaggctggcagattaaccacaagaaaacacaccggatttattgtctggaaggcctgaatttgcgcagaaagcgcccccgcaggcatgtcagtgccgcacgccgccagcagcgcccggccctgacgcatatcgatcagtgctggagtatggatttcgtgtcggatagtctgtttaacgggcggcgttttcgggcgctgactgtagtggataattttagtcgggagtgtctggcgatccatgccggaaaatcgctgaaaggcgaggatgtggtcagcatagtggaagcattacgggtgctggataaacacctgccggtacgtatccagatggataacggcagcgagttcatctcgaaaagtctggataaatgggcgtatgagcacggtgtcacgatggacttctcccgtcccgggaaaccgaccgataacccgtttattgagtcatttaacggcagcctgcgggacgaatgtctgaacattcactggttcctgtcactggaagatgcgcaggacaaactcgacaagtggcgcagggaatataatcatgagaggacgcattcatcactaaatgacatgactccggctgaatttatccgaagtctccagaaagacgaagatctctga

SEQ ID NO: 106229 - DNA, 267 bp, Enterobacter aerogenes
atgaaaaagacccgttataccgaagaacagatcgcgtttgcgctgaaacaggccgaaaccggcacccacgtcggggaagtctgcagaaagatgggcatttctgaggccacgttttacaactggaagaagaaattcgccggtctgggcgtaacggaactgcgccgtctgtggcaactggaggatgaaaatcagcggctgaagaaactggtggcagacctgagtctggacaaggagatgctgcaggaggtactgaaacaaaagttctga

SEQ ID NO: 106230 - DNA, 159 bp, Enterobacter aerogenes; identical to SEQ ID NO: 98857

SEQ ID NO: 106231 - DNA, 228 bp, Enterobacter aerogenes
atgcaagtcacaattagtgctttaaagaagattgttgtcacgcagtacctgctgcagctccgtacggcgataaaccgcctgcgccacggcggcaaactttggcgtatgcgccgtgaaccactctcggcgcggcccccaactgtacatcgcggcaatatagcaatccaacagcgtgatatccccgcccaaggcgtaaggcgcggctgccagctgttgttccagccatag

SEQ ID NO: 106232 - DNA, 888 bp, Enterobacter aerogenes
atggctatgaaaattaaacagatacaagcctttcttaccgtcgccagcgaaggaaatttaaccctggctgcggagaaaatggggattacgcaatccgggctcagccgattattgctgaccctggaggaggatctgaatgccaccttatttgaacgacataagcatggaatggcgttaagcgagtatggcagcgcgtttttaccctatgccatgacaatgttgaacacggagaacaaggccagagaggaaatggcgctgatccgcggggcgggcaaggggattttgagaatcggctgcgtatccagtctgttaaccagccattttattgataaattagccgcctttcataaacgccatccccagatacacatcaaaatattcgaccgcattgactcagagttgtttaagttgctgctgatgcatgaaattgatatcgccctctgcgggcctttaccgcacgacgataaaatcgtggttcgtggaaaaattaactggcaggaccgtatttgtatcatttcaaggccaggccatccgctgcaaaaagaaaaacgtctgtcgcttgcagcgatgctggattatccgtggatcatgccgccgccattaagcacgccgatgcttatccttgaagatatttttcgctcgcatcagttaccctgtccggttcctattatcgagtgcgcttcatccgcggcgataaaatcatttatcgctgagagcgatcttttaacgtcaatgcctgcccccgtctatcgactggaagagaagcttggattgttgcgcccgctggaggcggagggcagcgtgtttgtcagagatttctatgcctggagccattttggtgtgttatccggagccgcgctgcagttaatccagcatctgaagcagtga

SEQ ID NO: 106233 - DNA, 165 bp, Enterobacter aerogenes
atgacacagaacaacattctattaatcctcggcgctattttacccgttatcattaccgttctcattggctatatcagcggtaaacgcaaagacttcaactggcagcaggctggtgatattaataaaattgtgatgctgtatgctttaccgggctttgttgaataa

SEQ ID NO: 106234 - DNA, 378 bp, Enterobacter aerogenes
atgagccgattaacagcaatcttctgtgctgtcgttatctgcctcctggtttccatagcttgggcgattaaccactatcgcgacaacgccatcaccttcaaagagcagcgtgataaagcaacggtcagggcggaaaccgccgagaccgttagcaatagcgtagttatagcaatgaacctcatcaatgacatatcccgggcaaccaagcatgcaaagaccgaactttcccaagatggtgagaagcgcgttatctacatcaggcaggcgcttgaaggcgatcagtgtgctaagcagtttgttcctgctgccgctactgatagcttgcgggaatacgcggacggtttacgttccagcgccagtggtgccgataagcgctga

SEQ ID NO: 106235 - DNA, 213 bp, Enterobacter aerogenes
atgctcgaaggttataatatctatgacaatgatgaggcaacggtcaagatgaatcgcttaatagcggtcaaggcagctttggagattgcaaaggcatccgtagttgcgccaaccgcctctgtatattgccgcacaggagagcatctcgaggccgtctcgggacaaatagaaagtcttgcgtcagcaatccaaaaagccgtagaaaataaataa

SEQ ID NO: 106236 - DNA, 303 bp, Enterobacter aerogenes
atgtcagacaaaccagtccgcgaatacgataaattcatgctccgctttccagatggtatgcgtgatgccatagccgagagggcaaagcgtaacggtagatccatgaactcggagataattcaaattattgaggatgtgcttgaaaccgataagaacaatgaaattgttattactgaatcagatatcagcgaactttcacgtgtaaagccagaaacaatggaggcactggtcgatgctatcgagaaaaatgaacaattgataaaacagatgaaagcagtgctgaaaaaggcattccatggctga

SEQ ID NO: 106237 - DNA, 171 bp, Enterobacter aerogenes
atggatactttatatacagaaagaaaaagctctagcttccaattgcgtttgccagaaggaatgaaggaagagatccgccgcatggctgaaatggatgggatatcgattaactcagcaattgtgcagcgtttggcaaaaagcctgcgtgaggaacgcgtgaatggccagtaa

SEQ ID NO: 106238 - DNA, 753 bp, Enterobacter aerogenes
atgacttcattaaatctagcaccaaaaagcagtgttgtcaccgataaaaccattgacagccagtctttgctgatgatggttaatcaggctcgcaagcagtgcggggagccagaggtacgcaacaataagttcattgaaaaagtagtcgacgaacttgatggggagttttacacaaaaagtgtaaaaccctccggcgccaatggcggccgtcctgttgaggtaattgacatgacgatcaagcaggcccttcgcgtggcggcccgtgagtctaaagctgttcgccgctctttggttgataagctggaagacatgcaggctatccaggtgccgaccaaaagcacctcagggcttactgaatatcggcttgccaaagctgaacaactcaaagctcaggcgctggagaaaaacatcgcatcggcccgcgagctgatgtcaatgttcccgcggcttggtgaatcggctaaccaggtgatcgtagctacccttgttaacccacttctcggtcacgaagttgtgccactgccagcgattgaagagcattactcaacggcgggtgaagtagcggcgcagctcggttgtactgcgaacaagatcggtcgcgtggctaataagcacaacctcaaaactgagcagtacggcaagttctttctggataagtcgagacactcagataagcaggttgaagcgttccgctacaatgcagaaggcgtgaaagcgctacgccacctgattcacggcgctgatgtggcataa

SEQ ID NO: 106239 - DNA, 144 bp, Enterobacter aerogenes
atgagtatcactaactcagtaaacgaagagtacatcactatctatcgccctttcatcactgttaagggtaaaagaatctttgctcatcagaaaggcctagcagcctttccgatcaagattcctgtttccaagtatcgtggctaa

SEQ ID NO: 106240 - DNA, 135 bp, Enterobacter aerogenes
atgttaagagataacgaaaaagccagcgaactgctgtcgctggcttctcctatcgtaagcgaatacgaaaaacttggcggttgtgagtatacgcttaccttaggttttgtcaacagcaaaactattaaggtatag

SEQ ID NO: 106241 - DNA, 537 bp, Enterobacter aerogenes
atgactattgcgaaacgagaacttggccatcgcgtttcacctctcagcaatgacatgattaaatcttatgcacaccggttgagagatgttcttcagatatctaatcatacatatttacgactggatgttctgcttgaaggcctcatggcatcagaaagcatagatcttgaaattgtagaagatcatgaattgcctaagcgctacgcggtaacctacccagacaagaacaagattgttttacagcagtctgtttatgatgcgttgtgttgcggcgaaaaccatgcccgatttaccgtggcacatgaaatcgggcatctaatcatgcaccgtaatcaagttgcatatgcacgaaccaaagtaaatggtgggcataaaatctatgaagatagtgaatggcaggcggatgtttttgcgagtcattttctgatagattcaaggctcgtttctcctgcaatgtctgcagaagatataagcaaaactttcggcgtaagcttaccagccgctgaaacgtggatgcgaaaaaatgttaagagataa

SEQ ID NO: 106242 - DNA, 351 bp, Enterobacter aerogenes
atggtaactagctttggtaagactctcagaaagctgagaatagaccgaggtatggttctcaagaatatggcagacatattgggcgtaagctcagcttatttgtcagccattgaattaggtaaacgagccatacctgactcattagtaaatacagtagctacagccttcggactgagtggccaagagatcaatgatctaaagagacaggctgaaatttctcaaccgtctttgaaagtcgatctctcagatgccgaggatcagaataaagaattgatgctagtttttgctcgtaaattcaaagatctgagtcctgaacagcttgataaacttaacaaaatgttaaaggactaa

SEQ ID NO: 106243 - DNA, 1308 bp, Enterobacter aerogenes
atgtttaagaacataacttccgcgttaatagcgtgcgggctggttacgcctgtatgggccgctacagacgctatttttgatgatcctttttttactgactcacagctcactgtctctgcaaagaattactggaaatatcttaaggaggaaaatgccaatcctaaacatgtacacaacgcttgggggcagggattttcagcagaataccagtctggttattttgcagatattatcggcttcgatgtgtcgtattatagtgcgataaagatgggcgccagcgactatttcaactcccgcggcgtgctttataataatggtacaggtaacaaaaaaagcaacgccgaagggtattccaagttcggccaacgtaacgtgaagcttaactatacgctttctggggctcagttaaacgcgcgctggggatggcagatgctgaaaaattatggcgttatttcaacgtcaaaccggctttctccaacaacatattccggcgtaagcagtgctgtaagctacggcccatttaccataagaggggtgtggcttgaaaattccatggacagaaactcaccagataaaaagcaatttcaaaccaataccggtaaatatattagccacctggcaagcggagaagttctctggcggggagagaaatttgatgcacagtatgcttatggtgagagtaaaaactacctgcaacggcacctgctgtttactcagtttcgggcggattcgcagataacgattggaacgcaagtctacggcacccacgcgatggaaagttaccgcgcaatgcctgcgagcaaacgggattttgacaataacgcctggcattttgcgctggacgcgacctggaaaggtgaacgctggaatagcaaaatgggcattggctacaccaatgctaaaaaagccggtgaagtcgggttttatccacgccacatgagtaaaaattcccggggaacatttatatccatggcctacgcaggcgacgattacatgcgtgatggggaactggtgctggcgaacatcaccgaatatcgattaacgccagaattagccataggcctggcgggaaacatcgggcaatttaactataaaggaaatcacgtgcgcaccggggaaatcaacgcctttagccgttgggttccaacgcagtccatgtttaaaaacttcaccttttgggcgatgttcgggccgggatggtcatataagacgcaaggtaaaacgccagtccttacggacggtcattatacacgtacaaacacgctgtcgtcggaagtgatcatggaatatcgatttaaggtgttctga

SEQ ID NO: 106244 - DNA, 564 bp, Enterobacter aerogenes
atgattatccagtctaaacagcttcgcgccgctctggtatgcgctgctaaaaacgatgcccgctactatctctgcggagtacacatcacgccaaagcatcttgaagcgaccaatggccacgtagcattgcgtatggagcatgggatccggacgaagaaaaatatcatcgtccagttcgagggtaaggtgccagtaagagcagaaaccaccgagttagtttttggtaaggaaccgctggccattcaccgcgatcttttccagaaccgcatttcaatcaccggcattaagttgctcgaaggacggttccccgacatggagcgtgttatgccaaaaactgtggacttcagcatcagaccaataatccaggcggaatatctttcttacccggccaggctctttggtggagagaaaggcattgtaccggttcaacttcttccatcaggtgagttcgccgcggtacgtattcagttcaatgagcgtatcaacagcacctacggcaatccggaattcgttgttatgccctgccgtgatgaatccatcaaggccaaggagtgtcagcaatga

SEQ ID NO: 106245 - DNA, 579 bp, Enterobacter aerogenes
atggatcacaataattttccccctgagccaacatcaactggcatccggtttggtcgccgggttattggttacaccacggccattcgctcgcttgatagtggtcgctatgacaggaatttgtcaaaaggtctgaatgttctggcttgcatcatggaagcggtagaaagcaactggatcacgctcaacatcgatgagcaaatcatcgtctggcgctggttgctcgctgcggtattcattaccgaggagcaggagaagaacgggactgttgacgttccaaacgacgagggcggtgttgatacagcagttatctattcaggcaaacatggtgcgattagtgtctacccaggaccagagcggtttgctctcgctaaccatatcgagactggagcaatcgagaaatacggtcaggacgttggccagcaactggcgctgcggatgtaccaggacatggttgttattgacgatgaatgtggtttcaggttgtccgccatgggacgggaaggtttcaaccttctgcatgacggttttatcgagcaaatcaataccgaaggcgtgccagacatgccggtaatgcactga

SEQ ID NO: 106246 - DNA, 153 bp, Enterobacter aerogenes
atgaaactggactcattatggtatcaactgaccgacatgatctctttatcaatcagttctgattcgggaagcactgaaatgcttaacctgtctctatgctcgcgcgcgcgcgcgttttacgaggtgacttatgccagtcgtcgccacgtttaa

SEQ ID NO: 106247 - DNA, 165 bp, Enterobacter aerogenes
gtgagcgatcagaaacaacctttgagcatggaacaacaggaattcattttcaaaactaaagcggaattattggccgagcttattcagatcacaattcctggcaaatccgaagaggaagaactggccgaagtggtcaatgccgcattcgacaaactaaccgcttaa

SEQ ID NO: 106248 - DNA, 285 bp, Enterobacter aerogenes
atgagtgaagcaaaaccgcaggacggcagcaccgtaaaaggctatcgaacccttaccgctgacgatatcgcgcaaatgaatgagctaaaagaaattagccgtgatttttgcgagaagcttgatatagaacgcacccacctctctctggaggttgtagaggtcaactcagaagaggctatcgagcgcgctgctgcgctgcgttgtctcgccattgcgcgcaccaaaatgcaggaagcctgcatgtgggcatgtcgagcagtagcccgtccggatggtgactgctaa

SEQ ID NO: 106249 - DNA, 564 bp, Enterobacter aerogenes
atggcttccagtgtatcaatctgctcaaacgcattgctggcgctcggcgcccatcccataaacagttttgacgaagcgagcgaacacgcccggctctgctcaaacatctatcccacagtgcgcaacgatctgctgcgtaaacacccatggaattgcgccgttaagcgcgtggttttgtcccccgatgtgacaccgccagcctttggtttcagttaccagtttccccttcccggtgacgtacttcgcatcctgtccgttggcgacattcacgacgatgtgccgtaccgggttgaaaatggtcgtctgatggcgaatcaacaggtgatttatctgcgttatatcttccgtaatgaagatgaatcgacatgggatcccgcgctgataaatctggctgaagcatttatgtccgcaaagctggcctatgcggttaccggttctgccagtctccgcgacagtctgacacaggaggcggcatttttacttcgtcaggccaaagcaattgacgggcaggaagacccgccggaagagctcggcggctatccaacgtatgagtcgaggttctga

SEQ ID NO: 106250 - DNA, 249 bp, Enterobacter aerogenes
atggtgccgttcaatctattctgtgcccggcacgcgggtcatcgtcagaccctgcagttaactatgtattccagcaggatattagttttgccaccggcggtgattatattgcggtttctttcttatttcgtggcgttctcgatctggcgttctggaatattcaacctgcatcatccgggaatttggttggaacgagaactgatgacctcggcaatgggacttaccgtgtcaccgtcgtttatcagttga

SEQ ID NO: 106251 - DNA, 267 bp, Enterobacter aerogenes
atgcatgtaaccattaaaccaaaaatctttcactatggcgcacggctcatcgcagtcaacaaaacaactcaaaaatcctccaatatggtctgcgtcgatatgtgtaactacaactgcttcaaaggtccgctgcgtatcgggcaggccgctaattttatcattaaactctttccctgtttcctcgacccccatatcgacaagcatttgataaggagagtgttcctctccccagcgcaccaaaattgcatcgccttcacgtgcaggtag

SEQ ID NO: 106252 - DNA, 423 bp, Enterobacter aerogenes; identical to SEQ ID NO: 74986

SEQ ID NO: 106253 - DNA, 1245 bp, Enterobacter aerogenes; identical to SEQ ID NO: 71837

SEQ ID NO: 106254 - DNA, 573 bp, Enterobacter aerogenes
atgataaagcatatccgtattttgcccggcgggctggcggtgctggccgccgtttttctctgcctgctgacggcctgtcgcgatcacagtcgcgacgggatgagcggcgctgatataaatgtctataaccacggtccagacgccattgtttctatgcaggttgacggctacggcgggccaagggcgaatccctacggcggcggcggcggcttctgctgcgtgatggtgcccaacgactggcgaccgggcctgacggcaaaaatcacctggacttccgaccctaactcctggatgaaatcgagtgagatgccggacgattatgaaactcactatcagaaacatgggccgattactgtccctatcgaacgttgggagaaggggcaggcctgtggctttgatgtgcatattttcccctgcgataaagtgcggatagtgcgttcctgcatcccgcctgggcagccgggctacccggtaccccagtctccccctgactgggagcaacgagcggataagatcattttcaaacatatcaaggaggagatcgtatgtccgacaccgcagagtccacgctga

SEQ ID NO: 106255 - DNA, 351 bp, Enterobacter aerogenes
atgtccgacaccgcagagtccacgctgaatgccctgaaggcgcttattgccgcctttcagaccggcgcgaccccggtcgcggtcaaaacctccaccgcggaagcggccagcttaccgccgaagtttcccgggccggatgataaaaacggagaaaagtctgccgataactctgtgcagcagaaagccgaatacaacgagcgcggccgcctgccggcgagcagaacgcagaccgaaggcaacttcgccaggcagtatctggaaggatatgtcggggagtctgaacatcaatcggacaaaaaaacggagccgggctgttccgccagcctgcatacacaattcgctgctgactaa

SEQ ID NO: 106256 - DNA, 354 bp, Enterobacter aerogenes
atgaccgtttctcagactagaaaaaatagtacaccaattaaagtttattgtttgccagatgaaaaagcgcaaatccaggaaaatgcagaagcatctggcttaagtgtagcgagtttcattcgtaaagtagcaatgggttatcaggttgagtctatggtagatattgaacaggttgtagagcttagccgagtaaatgctgatcttggtcgacttggtgggttacttaaactgtggttagctaacgatccacgcacagttgatttttcaccctcattgataaaaacgttgcttgctaaaatagaatcaaccagacaagaactaagaaatattatggatagaatcttggataaataa

SEQ ID NO: 106257 - DNA, 1443 bp, Enterobacter aerogenes
atgatgaaaattgctcgtatcgcacttgctttgggtctggtcgcatcagttagctcacaggtatatgcagctggactagtgcaaaatgataatgaacttcgtaacgatctggcttggctttccgatcgtggggtcattcatctcagtctttccacctggccgctcagtcaggaagaaatcacccgagcgttgaaaaaagcaaaaccttcatattcttccgaacaagttgtgctggcgcgtatcaatcaacggctttctaatttgaaggcggattttcgcgttagcggttatacgtcgactgaccaaccaggcacgccacagggctttggccaaagccagccggctgataactcgctctctcttgcttttaataacagcggtgagtggtgggatgtgcatttgcagggcaatgttgaaggcggcgaacgtattagcaacggttcacgttttaatgccaatggcgcatatggtgccatcaaattctggaaccagtggttatcatttggtcaggtgccgcaatggtgggggccgggttatgaaggcagcctgattcgcggcgatgcggccagaccgatgaccggttttttaatgcagcgcgctgaacaaactgctccggagacatggtggctgcgctggattggtccatggcagtaccaaatttccgccagccagatgaaccagtatacggccgtaccgcatgccaagatccttggtggacgtcttactttcacacctttccagtcacttgagcttggcgcttcacgtattatgcagtggggcggggaagggcggccagaatcatttagcagcttctgggatgggtttacgggtaaagataactcctcagccaatgatccgaatgaaccaggtaaccaactcgccggatttgactttaagtttaagcttgaacccactttgggctggccggttagcttctacggccaaatgattggcgaagatgaatccggtttcttgccctcagctaatatgtatcttggtggtattgaaggtcaccatggctggggtaaagatgcgattaactggtatgtggaagcgcatgatacccgtacgaacatggggagccgttataactacagttataaccacagaatttacaaagatggatactatcagcaaggctatccgctgggagatgcaatgggtggagatggtcaattgctggcaggcaaggttgaacttgttacggacgagaaccaacgctggagcactcgacttgtttacgcgaaggtcaatccaaaggatcagtcaattaataaagcgttcccgcattcagacacattaaaaggaattcagttaggctggagtggtgatgtgtatagatctgtacggttaagtactaatctttggtacaccaatgccgataatagtgatagcgacgatgtaggcgctagtgcggggatagagatcccatttagtttatag

SEQ ID NO: 106258 - DNA, 1740 bp, Enterobacter aerogenes
atgggatcacatcttatgcaaaggctgaatgcttttgctgacgccttttcctttttcctgttatggctgcaaaacagccctgtcatattatccctgttcgcaggtcttacattaccgtttatagtcaaccttccccgagaggaaagaaagaacgctccgttctggttaaaatcggtggcgtgtgtgtctattttcttttttatattcggtaccatatcaccgctaactattcaggggctgagctacttttttaaattactcgacaacaacatactgttcagaattccactatggatcatgacagtcacatttacgacagcaggattattctttcatattgcagcccgacgacttctggcgggagaaattgacaacctgaaacatcgaatgattaagaaaaccaagctggagagaaataccagaacggatgtacgtaaagtaaaagagctgttgcccgagagcatagaatacaacccactcgattacattgatttaaagaaaggtgctttcattggcttaaacaaaaatgaccagccgcaatacataaccataaaagaattcaagacccaacacgcagcaattatcggcacaactggttcagggaaaagtgtcactgcagccattctactttatcaggcaattcttgcaggcgaggctgtttttgtagaagatccaaaagatgatgaatgggcaccacatgtactcagggaagcatgtaaaaaagcgggcaagaaatttacacttataaatttgaacaagccaaattttcagcttgatttactggctgatatctctcatgaacaactggaggaactatttaacgctggctttagtctggctaaaaaaggggaagcttcagatttttatcgaatctctgaccgccgcgcagccagaaatacatcagcaatttatgaaaaaggaatgacactttatgatttatttaacactgattttgttcagtcattacgtcaagctgctcccgcatttttgggtgagctggaagaagttgctttagttaactcaattaatgccacaaatggattttcattaaaggaggtttttgatgaaggtggttgttgctacattattggttcaacacgaaatcaaaaaataatatccgcacaaaggatgattctgacccgcctgatacaaatagcagagaccagggacagaataaacagcaccccgcgtactgttgctatttttctcgacgaattgaaatatcatctatcccgccccgcccttgaggggcttggaacggcacgagataaaggcgtgcatatattcatggcttttcaggcgatagacgatctgcgtgactgtccgtctgatttaaatggtgatgcagttattggagccatcattgaaaacgccaaattcaaattgatttataaaattcaaaatccagaaacagcagaatgggcggcaaaaatgacaggttcaatcctggtcgatgatgaaatgaggaaagtaaggactgatttatcattaacggaaaaaatggatacagaccgtatgataagacaggcagaaagttactacgttgacagtaatatgtttttaaatctccctgaaaaggtcggctttgtatttacaacaaaagaactggcgaaggcaacaaagatgtcccctattctggttaaaaagaaacatattgaattgctgtcatttgaaaatcctcaatctgaacaaccacaaaccgaaatcaatgaacaaaataagccatctattaatttgtaa

SEQ ID NO: 106259 - DNA, 1953 bp, Enterobacter aerogenes
atggcagcagaaaatcgttcaaaattgcttcgtatgaccattcgtaacattggatgtatagggaatgaaggcatcgatattgcacttgataacattgtttgccttgtaggtaaaaacaacgctggtaaatctacagttttacgagcatatgagttagctaaggggccaacagcatttgatgccagcagcgatcgacatcagcatgcctcagaggatgaacattcagagattttgctcgaagttcatatccctgacggtattggtaatgtagatgcaaaatggaaacaagaaagagacggttttctcgtcgttaaaagccgttggcaatggaaagcacctgattttttgaaagtccgcacaacttgggatcctaccgctggagaacatggcgaaggggactgggcagaggatactaaagcaggcggcgctgattcagttttcaactcacgtctgccaagacctttgcgtataggatctctggatgacgcaggtaaaacagaagatgtgcttttaagttttgctctcgcccctttacaaaaagagcttgagaacgcgcggcttaatcccgaatcgccattagcaaaagcgattgaaagtgtttccggaagtatcaacttgcttagtgaacagcatcaagaacattttaatggtattgcgggccgagtttccgaaggatttaaaggtatttttccggggctggatgtttgtctgagcatcggtgccgctcctctggctcctaaagttgcggatctcatcaagaatggctccagtttaaaaatcactgacgggaaggctaatacctctcttagccagcagggcacaggcgctcgccgcgcactattctggtcaatgttgcaagttcacaatgaacttaatcgcgacaaagaagtacgtgctgaattccgcaagcggcttgagaaagaagttactgaacttgagaaaaaactaaaaaagccgcctaaaaacgctgatttgaattccctccatgatgagcttgctcaggttagagctcaactggatgctcatgatagtggtgctccgatccctgatagtcctgatgatccagcttttccaggctatttactgttaattgatgaacccgaaaatgcccttcatccgatggctgctcgtgcagcacagagacacctgtatcagttggctaagaacccagactggcaggtgattatgactactcactctccgtgctttatcaatccatttgaagatcatacaaccattgtaaggcttgaacgcgataatccggaagaaaattcagcagttacaccaagaacttaccgctctgaccatatagcttttgagggggatgaaaagcagcgcttgcaggcattgcaacatatcgaccctagcttttcagaggtattcttcggttctcatcccattctcgttgaaggcgataccgaacatgctgcatttatggcctcgatcatcgagcgtgataacgcattgatggatcagattgcggtcatacgagccagaggaaaggccatattggtaccgctaatcaaagtactgactcacttcaaaatccacttcagtcttgtccatgattcggattcacctaaccgctccgatggagttaaaaatggaatgtggactgaaaaccgaaaaatccatgaagcattgtgtcaagccagaaacgcgggactaacagtccgccatcgagtcagtgtgcctgatttcgaacgcttccttggtcaccgagaagcatacaaagataagccattgaatgcttacctgcagatcaagttggatgatgagttagcggaacgggttcagtggctcatggattcccttctgaactctgatgagcattgctcgtttgggaatgaaatcgatcacgatcgttatatggaaaagctactgggagttgtttctaggtgggctgaggataatggatatgcggaggatctgcgctttaagagccaaagataa

SEQ ID NO: 106260 - DNA, 1455 bp, Enterobacter aerogenes
atgggtaaaaaaataatgcaaagtcgcaatgatgaatatcataagttaactcgtggggaacgtattggctacgggatgggcgattttgcgcaaaacctggttttcggcacaataggcggctttcttgctctacatatgttgacggtgaatacgatcagtacggccactgcggggttcatttttcttttcgtacgaataatcaatgtgttttgggatccgatggttggaacctatgtagacaaaaggacgtcagtcgcgggcaaataccgtccctggctgttaagagccggcgtgccgctggtgatcctttccgctttgctttttgctcccattcctggcgtgagaggttccgtaccgttcgcctttatcatttatttagcgctggatttagtctactccctggtgaatatcccttatggttctcttaatgcctcactgacaagagatccggaatctattgataaattaaccagtacgcgaatgatgctggctaatagcgccaatcttctggtgtatacccttttcccgatgttcgtgcaaatggcctcaccaaaagaccgtagcctgaaggatactggtttttttggcatagaactcaatctgggaaactataccgatccatcagcgaattacgcctggttcggcgtctactccgtgtatatgttgttaggtgcggtggcacttttcatttgctataaattcactaaagaacgcgttgttgcgaccgcggaacagaccgccaacgttaaaacaaccgatctgttccttgaacttaaaaataatcgtccactcgtcattcttggattgtttttcatgctggcctttaccttcatgttctttatgaacacggttaacggctttttcaatcagtatgttgttggtcactccgaatggatgggcgccgttgggctggtcgcctccatacccggtattgcgttccccatgttttggccaaaactaaaaaagatttttggtaaaaaaggcttcttccacattttcctgggaatgtttattgccggtgaattattaacttacgtctggtcgcgtgaaggcatgcacgatgcgctgtggcttgcttacatcgccacattcattaaacagtggggcttaacctcagccaccggatttatgtgggcgctggttcctgaagttattgcttatggtgaattaaagtctggtaagcgaaatgcagcaattattaatgccattatgggactgtttttcaagattggctttaccattggcggcgccattcctctgtggctgctggccgtctatggatttaatgaaaccggcgcgcagcaaagcgcgagcgctatcgatgggattatgatgacagcggtctggatccccatcgccttagcgattgtatcaatgatcgtcatgcaaatttatcccatctcagacaaacacgtcagcgacattaaccgccagcttgatgagattcgggtgtaa

SEQ ID NO: 106261 - DNA, 615 bp, Enterobacter aerogenes
atgtgtataagagacaggtctggaactggtcttggcgatggcacaagtaatagttttactacccaatgtaaacacacgagcaaacaaggtatgaagctttcaaagggagttgttagtgatgaacttcctaagattgagcggcttgtgagtaaagggctagccgatgtataccttctattcactaattgttcagtatccgcagaaacagctgccataatggaagaggatatgcggaaggctggtgcaaagttcgcaaagatttacggggctgaatggataaaccacagcatatccttacacccaagtcttaggcgtatggttccccgaatatacggccttggtgacctttcccagataattactaatcaggcatttcggcaagcgaaaagtgttctcgattcaattgctcccgatcttgcatgcttcgttccaactgaggcataccgccgttgcgcacatgctctcaaggatcacggatttgtgatgctaataggtgaacctgcaagcggtaagacaatgatagctaatttgttagcgctctctgcggctgatgagtggggactgcaaacgttgattttaagttcaccggaagatttggataggcaatgcaactaa

SEQ ID NO: 106262 - DNA, 273 bp, Enterobacter aerogenes
atggctgtggaaatctcatttaccatgttttttaaatttagctcaggtttccccttaatgttttttttagataaaacattagtaggtattttaaagctggttatacggctgcttattgaatcaattatgtcttgtaattgttcagggatgaaatccccttcgtatgtctctgagattacttgccttatttcattttcacttatatcaccatcaattacccctattgcctctaatactttagagttgccagattttattaattcctctgagtag

SEQ ID NO: 106263 - DNA, 495 bp, Enterobacter aerogenes
atggctgtacggtgcgatagctacaatgcagttcggacaggccagcttaatctggctaaccatgtactggatctgcgcgatgtactgcgccggggtttgcccataggtcccgtcattccatgccagcgcgatagaccagatatcgggatcggcaaacccctgctggtcgagataacgacggaaatcgaaagtataaaatgcccccgtctgcgtctccgcataggacttctcagccgctgcgccggtattcagaaaacacatggccgggtttgccgctttttgtgcatcggtagccgggaacaggaacgggtttttgttcacgttcgacggattatccgcacttatcacaatcggggaaccgttcatcacattgcggtagccaacaaaatttgcagccgcccacgattcgcgcccttcgcctttaccgcccccgccctgcgacatagtcccgatctggttgattgtcgccccagcggcctgcagcatctgggttaa

SEQ ID NO: 106264 - DNA, 150 bp, Enterobacter aerogenes
atgaatactattccgctccctaaaactcagcacctggttgtattccaggaggtgatcagaagtggttcgattggttcggcagcgaaagagttaggattaactcaacctgcagtcagtaaaacgattaatgatattgaagggctttgttga

SEQ ID NO: 106265 - DNA, 192 bp, Enterobacter aerogenes
atggcgatgctacaaaattatctcgatcgtgctgaaaaagagactaacattacctttgtcggccggttgggaacataccgctatcttgatatggacgtaacaattgccgaagctcttgaaactggccgcatctaccttaagtcgctagagcagaacacagtgatgcctgtatttacggttaaagtcagatga

SEQ ID NO: 106266 - DNA, 249 bp, Enterobacter aerogenes
atgaaaaaagcttttggtaggaaagagttgttgctagtggttcccttatctatgagtacaatcgatcgccttgaacacaaaggacaatttccaaaacgcttttatattaccgatggacgctgtgcctgggatggtgatgagatcgcgcagtggctagacgaaagaaaagcagccagcccgaaagaattctccgggaaaaaaccgcctattgacaagagagcatttcgcccagtgggtaaggaaacgtga

SEQ ID NO: 106267 - DNA, 837 bp, Enterobacter aerogenes
atggaaacggcaggtgatttcagtgatgttactgaacttcaaaagtatatgaacttttcaaagttcatggacctgattgaaacaaataaaatatttctttcaaaagcatctggttttgaagataagaatgaaggtggtttaagtttagaattcaggtttttgaatgatggtagtgcaatgatgttagatgttgcaatgaatcatatatttccgagtgttagggcattatctccagaagaaagggttgaacatgacaagaaaacagaacaattatttgaagtaatagaaaaaagaattaatagtactgtctttggcgactttccgaataacgagtttagctatgatgatattaacaagcaatataaagaatggattgatgtgagttgctggcatgcaaacatgcatgagagcatggcaatgtggaaaatttatggtgaatcggaaagttcggtatgcatagttaccaatcttgaaaaaataaaatcaagttttacccctcccaacggctataagatgatcatcgctaaagtcgaatacatatctcacgatactgagtcgtttaaaattgaacacgatctagcccctttcatgcacaaatctaacttttatacatacgaacaagaagtcagacttattggttataaccctctctgtaagtttaaagaacagagacatgattttggtacaaaggtaaatctggatatcacaaacttaatacaggagataagagtgtcaccttatgcacctaactggttttttgagttagtgaaattagtatgtaaaaaatatgacttagatataccagttaaccgttccaaaatatatgggagtttgtaa

SEQ ID NO: 106268 - DNA, 312 bp, Enterobacter aerogenes
atgcgcaatttcattattttgttttgtttggtcttacctttttcagcatcggcgatcgtcatggggggcagcaatctcgggtttggtgggtatcctgccttctctgagatggagccatccccgccatacactgacgatcagtatgcttgggaaaactatcgccgccaggttgccgattatactgagaaggcaaagcagtatctcgaagactccaactctgatatgaaaaggattcaagagtcacagcaggaagcgatagacaaggcaaacagagttgtcgaagaatataaccgcaaggctaaaggttactaa

SEQ ID NO: 106269 - DNA, 273 bp, Enterobacter aerogenes
atgccaaatatattgcttgcgctcttttttgctcatttttgttaccagcagaagcaaagttctacaatggtcaacagctataccaatatgccctggagtataaaaaagctgagcaaggggttcgcagcacacctgataaccagcttcaggctggcgtattcatggggtatgtggcgtcaatcattgatgcatacggggctgaaggcgctcaggttttttgtcagcctaatgggcggttacagacatatgccgatgtcgtttataaatacttaa

SEQ ID NO: 106270 - DNA, 2697 bp, Enterobacter aerogenes
atgccaacagtgccaactgtacaaggccgacaggttgaaagccgcggcgtttcatcttcgggattccagaccttcgagcagccaaatatcggcgatgcgctggtgaacgtcggtagccaggctttggatgtgttcgggcaggccaaacagcaagcggaccttgcactaacccaagatgcgactcaaaggctttatgctgttgggagtggattgatggatgatcccaaggaaggtctgatgactctccaggggaaaaatgcaattggtcaggctcctgggtatatccagaaatttgataacgagatgcaaactattgctggcacgctgcctgagtccgcacgaaatgtgttcttaaagcatgctcaacagcagcgaatgcaatttgccactcaagcagagcggcatgaattagggcaacgtaggcagtatgagtccggtcagcaagacggttatttatccttgcaagctcagcaagctatatctaatccacagttgttcaatcaatcagctttgaatgccagagcctcaattatggcttatggccaagcgcatggacaaagccccgaagagatcgaatcaaactgggttcaatggcgtgagcaagcagcgaaccgggcgagcgaatcttggtatacaccaatgtatcagcaactacttgggccgaatgggagaatcgaggtttccgatacgccaagtgaatcgcagcttttctccgctatgatctggcaggagtccggcgggaaccagtacggtaaagacggcgctccactagtatcgccgaaaggcgcggttggcgtggctcaggtcatggaagataccggcccggaagctgctcgacttgctggagtgccgtgggaccgtgataagtggctgaatgatccgcgctataacgcgaagcttgggcaggcgtacttcggagcacagatgaagaggtacgacaacaacccagttctggcggtggcggcatacaacgccgggccaggttcagtagatagttggatcaaacagtttggcgacccgcgcactggagctgtcagtaatgaacagttcgctgcggcgatcccttacgatgaaacccgcaattatgtggctaaagtaaccggcagcgccccggccatccccggagcggctacaatggaaaatctcatcaatcagccgttttgggatgcaatgagtccacagaacaaatcagcgatgatgagtaaggttgctggaatgtacgacatgcaggcagcggcaggtcgcgtatcattgcagagtcgcatgcaggatgacatggcgaagctggaggccgggcagtcggtaaatccgatctccgagcgggaatggctggcggtgatgcctttgcaggcttcacccgctgaacgtatgcaactggagaaaacctatcagcagtatcaacaggctatgagtctgcaacccgtctaccagaccatcgtgaaaggtaattatcagcaaggtctcgcggccgttcagtccatacaacccaagcaggatgagacagattccaaatataagagtgagctttatgcttctgctgtgtcaaaacttcagcaggttcatgatgcccgcgaagctgatcttggtacttggttacagcaatattcaccggtagttcaatcagccttccagcagtatcaaaatagtcaggttaccggtgaatatctggcctcacgcattcaggcagaaaaagagcgacttgggatccgaagcaaaagtgtattaccagcgagcatagttgacggaatatcggcaaaagttgatagcggcaatatgaacttttctgacctgaaaggaattatctctggctttggccgttacggtgactctgtcgtagcacagttgcagccaaaaaccaaagcggcagtaagggttgctacagcgataaacgaccctaatgctgctgacacgatgtttaccatccgcaatgtgaagactgaagagctgaagaagaacgctggagaacaagccaaaggtgtagacgcggcctggaactctctaatttctgcagcatcgccgacattcagcctgcagcgacaaggtggagcggaaacgcttgctgatatcaatgagcaggggaagcgcctggcttattactacatggcatcgggggaagatgctcaggctgcaacagaaaaagcctataaaaaaatgatcggcgatcattatacggtcactgatacatggcgaatgcctaacaacctgggactgaaagagaataatgttaccgatggtctgagtaatatcgtcaacagccttaagatagatgatattggcagccggagtatgttttatatcccaacaatgacgccagagcagaatgccgcgaataaccttgcgcagatacagaatagcgctgaatgggtgacagacgaaaatgagcagggtgtttatctgacagttaacggcactcctattctggatcagcacggtgctcctatccatgtgagctttgctgatgccagtaaatctggaattgcaaaaccgagcacaaccggcgcagttcttaactggatgggcgaaaaacgcaaagttactcctccatcggagttctatacaccgaatgttaatgccactatgtccgatgccttcagggtgctccggggccaggatgcgacaagtccgctacctcaaaaagagactgacaacccgtcaaatacattgcgcgatgctctgaatacgagaggaggccaataa

SEQ ID NO: 106271 - DNA, 186 bp, Enterobacter aerogenes
atgataaaagactatctgattgtggcctaccttacagctattgccgtcaggccagccacgctgacgttaattggtctttctgcaggagtggcattctttacgaggtgcagggggctgggcatagtcttcgtcgttctgttcatgctggtggccatcgctgcgtggcagtttgaatgtgacatgtga

SEQ ID NO: 106272 - DNA, 810 bp, Enterobacter aerogenes
atgagtactaacagcgaacgtatgtccaatgcgcccgtttactacgcattggtgcaagtaaagtttactccagtagctgcaatgagtaagtatgttccagacatacaagatgcgctaagagttgaaggatttcctttatttgaagtttccaatacaactcagctgaaatttgaaatgaaaaaccccaatgagccaccggtacattcatttgagcctgtgacaagttggttgatgattgatgcagatagaaggtctggttttgttttaggcaacgatttcattacgttccatacaacagattatgataatcatgtacctttcatctcgtcattaatacttggtctgagcaaagttcttgaatttgctaagccatcgttggtaagcaggattgggcttcgatatttggatgctgtgtttcctgagaaaagcgaaacaattgagcagtatcttgtaaaggaacttcatggtgttgattttggatggacgccaatacagtccatacaagagtctgtatatcagacatgtgttgagccactgatctctaatggatttttggtttcacgcatacataagatgaatggtcagctaggttttccgccagatatgattcctaatggtttactgccgctgccgagatttagtaacacagagcatcgtatgcacgcaataattgatacagatcattatgttgaaggcaacatgtcaactgatttgcagttaattgaaaaacagattctttcgttgcatagtaaagttaaagaagcatttgaaggcatggtttcagattttgcccgtgctaaatggcactga

SEQ ID NO: 106273 - DNA, 663 bp, Enterobacter aerogenes
atgtatgcaattcctactggaagcataggctctgtagatcggtatactccagattcgcagtcaagctcatgtgtatcaggtgttgttgctgtcgccgcatctttactattagttggtacgggggcttcataccctgtaaatgcttataagcaatggcgtcagtatgttcagccaagggttcagtttgcatttgattccatagagtcaacgtacacgcctgcaatttctcctgaggttgatgtcaggaatgttgcccaacatttggctaatattcgagaagtgctgtctccatcaatgtcagaactggctaaggatttggggataactcggcaggctctctataaatggttgtcaggggagaaccagcctgatgatgcttcaaaagtccaattcattaccaacctcagtaatgttgctgactctttttccaaagctggactcaatgatgcgaagctattggtgaaaatgaaagcattcaatggtaggtcattgatggacttaataaaagaaggtgaggattggaacaagccagttcaggtactgattgatgaagctaaagcgatgaatgcagctgctgaatcgaccaattacttagcaagcaaggcgaaaccgacagatgattggaagtcatctatttcaattcctggaacagtagaggaataa

SEQ ID NO: 106274 - DNA, 849 bp, Enterobacter aerogenes
atgttggtacgaggaacatcatggcgtcaggggcatgttcttaaacatgatgatgccgtttcacttggacttctgaagcctgatgaaacgaaccataaagttgtagttataacgcatgattgtgatttacagagtaattctgaaaaaaacgtggaactgatgtttggccccttgaaaaaggggtcaagcaagatgaaaagagctaagcatccgagaatcctcgatctatgctttgaaaacccagaaagtgctaagaagaacgcagtagagcttcggcatgaaagaaaagtcatcatttctaaagaagctttccgttgtgaggaaaacgatccggcattctccattagcacagaagagaaacaagctcttaagcaatggttagcagctaagtatggtcgtccagcgtttcctaactcgtttgaagagcgcttgcgggcttacgacgaggataaaaagtttattttcgaaaaagaagttgctgacattatcgccacaaacgcagagcatttgatcggggtttttttcgatttgggcgaagaaagatttaacgatcttgaggaaggcataccatatgagctttctatcaatgttgtttatgatgcaactgaaggtggccccgatgccagaggggcggctgaacaaacctgttctgatctaaaggcattgttttataagttttatggtgatccaatcttgggacattcagagcttatagaattgaatacgtgcattgctgttgccgatactcatttctccctgtatgcattgaggcggatggatcaatggagggtggaatacatcagccttgaagaagattcatatggcgatttcattggtgccggtgtttaa

SEQ ID NO: 106275 - DNA, 198 bp, Enterobacter aerogenes
atggcagcgcatagagtcccacctcagatgatgggggttatgccgagcaacgttggtgggtttggagacgtggaaaaagctagtcgagtattcgttcgtaatgaattgattccacttcaaaaaagattaatggaattaaatgaatggcttaatgacgaaattattcgttttgacgaatataaattaggcgatgcttga

SEQ ID NO: 106276 - DNA, 222 bp, Enterobacter aerogenes
atgcgtaataattcctttcccacagtcatcaccgagaatccttatctgctcgatgaactgacctacgaaacagaatgcgtgctggcgattctgcgaacaattaacgatgtcagtgatccacacaccaaaagttatctcgtagatgccgcggaacttattggtactcagttgctgaaaaagctagagcacaacgcacgtctggaagatggtgattgcgaatga

SEQ ID NO: 106277 - DNA, 732 bp, Enterobacter aerogenes
atgattaccagtatccagggtaatagtctctctatggctggcctgttagcaaatgttagcactttgcgagtgctgcgcagccgcgggaacctgtcgaaacctgtcgctttgcgggtcactgaaggtggcgcgcaaaatgtcgggtggaatttctggaataggaatagcgattcctttaacacctgcagtaaaaatttttgcgagtccataaaaaatggcttgatgttctacgtcatccaggtctatggttattgtgcaccagcaaaatctggtgccgggattggcgtcccggagagtttacaggcgacctatgacgcgccacgcgtctttttttgtgtcgttaattcagtacacccttttttctgcgttgcgggtataatccgcgtcgctcacaaaataatggtgggctggatgggggcggagaaatccgcgccggtttcctgtaacgccggttacgccaaccctgttcagtccaccaccagcgaaattggcgtttccggtggtgggtttcagacccagttacaggaggctgccaccatggctactatccctacccaaaatccacaatttatctggatcatcgctgctatacgacgtgatagccaatccgtcactgtaaaaatcttccacgttaccgcagtatctgaacgcgaagcccgtcgcactttagtgcgtgatcacgtttgttttttcgctggccgcatccgtctgacggaggtggatcatgcgtaa

SEQ ID NO: 106278 - DNA, 180 bp, Enterobacter aerogenes
atggctgaccctaccagcacaccgctgccaaatcacgtatatcgcgacgcgcagggccagacggtgagcgtcgtctatgtagcgcacaaccgcgtgacgttctatcgcgagggctaccagttcccttgcgtacagcccattgaccgattcatgaaggagtacgcggaggtgaaacaatga

SEQ ID NO: 106279 - DNA, 603 bp, Enterobacter aerogenes
atgaaaactgaaaaattcagattcaattctgagggcgcctctcagcctgtgtctagccagaaaaatatattcaaggctgaagtgaatgatatttcagtcattaaattcgagaggcattccgtgcgcattgtgaatgtcgatggtgaaccgtggtttgtcgtttctgacgtttgccaagccctagaaattagcaacccaaccagtgctgttacttctttggatttcgatgaggtaatgaccctaactttaaatgaggggcattcaggtaagcgtggcggagcacgtagttggaatatggccgctgagtcaggtttctacaaactgatcgctcgcagtcgcaaggccaccactcccggcacgttcgcccaccgcttcagcaactgggtattccgcgaggttgtgccttctattcgtaaaactggctcctacggtgtgccgttcgcgctccttaatgaccatacccgccgcaaagagctttatacgaagagggccagccggtgcggtaaagaccttcagtcatgcaaaggtgagaaagctcgcctagccgccgaagaaatcgagctgtggcgtaagtatcaacctgacttgctggaggttcattaa

SEQ ID NO: 106280 - DNA, 759 bp, Enterobacter aerogenes
atggtcgtgtctgtcgcgcagttattggcagagaaaaatagtgttatttctttctcggatacagtttcctttatattagaagacaatgattttctaaattttcatgatgttgttcagtttatttataggaatttcaatcttgtaagtgatgatgtttctaattgcttggcaagttgttcttacgatagagttaaaggagtgtctgagtctgatgagattgcagcagaaagcctcgagacattagagtacttgatatcatcaaactggatatcaggtatagaaaatgaagggcaaggtggatatttttctatttataataacgaagggtatgaaaatggttcgcgtaaggactttttctttcgtaagaatgaattgatttatgtgcttactactgccgggattacattcagattcaatgaacaacttgataatgaaaattcagcagaaagcagtgtgcaggaatatgaaaagagaattaaaatattatcggatgaaaataaaaaattaaaaaacgaagttgatgagctaaggcatgataagcccaagtatcttggtgtgtttagagacgacgatccattattaattgctatcaacataaggaatgttgagtgggaattatttgatgagaataatgctcgagtcacgacgccatctgcagattatgtaatcgagaagttgaaagagcaatatggaatgtcacatgcacttgctagtgccattgaaagagttgcctgcccaattgttagaaaggcgtcttag

SEQ ID NO: 106281 - DNA, 1107 bp, Enterobacter aerogenes
ttgaaggcaaacgcgtcaatgtctaataattatgccggccttctagctgacaaactcgatgagaggggagaagcccgatacgcgaaaatgattcgtgataaattgaataaaatgcccactgctctggttagcgctcaaaaaggtgatggtggcttttcatttaatgatttaccagtggacaatgatagcagattaaatactgttgacgtcagcattccaacattacatgaagacaagattattttgtcagagagtgctactgaggtcatcgatgatttcatagcaaatattgataattatgataaattatataagttcaatgcggcacttccaaatagaataatattatttggaaaacccggaacaggtaagacaagacttgccagacacatcgcagcccgtttatcgttacgaatgttaactgtgcgttgcgatacattagttagcagccttctagggcagacaagtaaaaatcttagaaaagtatttgaatattcctcgacagtcccttgtgtgctttttttagatgaatttgatgcgctcgcatcagcccgcgggaatgaaagggatatcggtgagttacaaaggatcgttatcgcattattacagaatattgattctcttcccgaaaatgtgattgtgattgctgcgactaaccatgagaatcttttagatccagcaatttggaggcggttctcatttaagttaccgatgtatacaccagatgaaaatattttgactgaaatatggagagacaagcttggtcaattcatcagcaaagatgtagatataaattacattgcaaagaaatcattgggagtgactggctcaactgttgagcaaatttcacttgattgtaaaaggaaggcgatactttcaaataataataatgttgacgagatattactccttaaaaaaatcgcatttacaatagctcaggatcaaaatatttccttgaagagtaaagaagatgaaattagatggttgagaagttgggacgaaaaaaagttttcactgagagtattatctaaactatataacctatctgttcgtgggataggaaacattgttaaggaaaataattatcatggtaaacagagtatctaa

SEQ ID NO: 106282 - DNA, 216 bp, Enterobacter aerogenes; identical to SEQ ID NO: 90444

SEQ ID NO: 106283 - DNA, 378 bp, Enterobacter aerogenes
atgtttcatcgggttttaatgctgctttttttcggttttctgccgacgtcgttggcgtgggcggcgccagcccagcagttgtttggagactggcttgtcacctgcaacaatcaaaattattgcgtcacgcgtaatgtcgggctgcatcatggattggtgatgacgttaagccgcagcgcgggggcagccaccgatgccgctttacgcatcgaacttggcggcgtcggtaatccggttgccgcgctggcggccatcggcccgcggctgcagctagatggaaaaccgctgcattttgacggtaaacattggcagattgccgataagctgattaaaaccggtgatagcgtcagtatcgacgctttcctgcagcaggcctag

SEQ ID NO: 106284 - DNA, 675 bp, Enterobacter aerogenes
gtgactcggattccgacagcgactcggattcggacagcgattccgactccgacagcgactcggactctgacagcgactcggactccgacagcgattcggattccgacagcgactcggattccgacagcgactcggattccgacagcgactcggattcggacagcgattcggattctgacagcgactcggattcggacagcgactcggattccgacagcgattcggactccgacagtgactcggattccgacagcgactcggattcggacagcgattccgactccgacagcgactcggactctgacagcgactcggactccgacagcgattcggactctgacagcgactcggattccgacagcgactcggattccgacagcgactcggattcggacagcgattcggactctgacagcgattcggactctgacagcgattcggactctgacagcgactccgattctgacagcgattcggactccgacagcgattccgactctgacagcgattcggattcggacagtgactccgattcggacagcgactcggactctgacagtgattccgactctgacagcgactcggattccgacagcgattcagattccgatagcgattcagattccgaaccgcaggcaaatgatgatacgcatacggcagctatcgataccgtag

SEQ ID NO: 106285 - DNA, 285 bp, Enterobacter aerogenes
atgcgtaaagcccgattcactgaacaccagatcatcgccgttctgaagtccgttgaagccggacgtaccgtcaaggatgtgtgccgtgaggccgcaatttctgaagccagctattacaaccggaaagcgaaatatggtgggatggaagcggccgatattaaaaaaatcaaagaccttgaggatgagaatcgacgtttgaaacagatgtttgccgacctgagccttgagaaccgggcacttaaagacgttatcgaaaaaagctttaaaaccagcgataaagcgtga

SEQ ID NO: 106286 - DNA, 795 bp, Enterobacter aerogenes
atgagtttacgcgaggcctgcaggacgttatcgctgagcaggacggtctatttttatcagcccgatacccggcgtgatgaaccggcgatccatgcgctgactgaactggcagaacactatccgcgctacggttttaagaagctgttccagctgctgcgcaggcagggcaatatctggaaccacaaacgcgttcaccggatttactgtctgctgaaactgaattttcgtcataagggaaaacagcgactgccagtgcgtaatccagcgccactggcgacgccgcaagtgttaaaccagagctggtccatcgagtttatgcacgacgccctggtctgcggcagacgattccggaccttcaatgtggtggatgattttaaccgtgaagcactggcgatagaaatcgacctgaatatcccggctcagcgagtcatctgggtgctggacaggatcgtggcaaaccgcggctacccgctgaaaatgtggatggacaacgggccagaactggtctcgctggcgctggcacaatgggccgaagaacacggcgtgatgctcgaatttatcaagccggggaagcctacacaaaatgcttttatcgaacggttcaaccggacataccggacagaaatcctggatttttacctgttcagaacactgtatgaagtacgggaaattacagagcgctggctgatggaatataacaacgagcggcctcatgaatccctgaacaacctgacgccggaagagtaccggctgatggctgaaaaaacggaactctcaaaaagtgcgtggaactaa

SEQ ID NO: 106287 - DNA, 558 bp, Enterobacter aerogenes
atggattttaatagtggcgggcgtaaagccatagaaaggttggtagaagcatatggttttcatacaagacaggctctagctgatcatcttggggtatcaaaaagcactttggccacaagatatatgagagatattttcccatctgactgggtgattacatgtgccctgcaaacaggtgcatctctagcttggctcgttgaagggaaagggccaatgttcgatatcgggaaaacggatattctgaggctaaaaaaggaaaaagtaattggtggaaatttactagattccggaactgtttattttgataaaactatattacctctcaacataacttctccaattattttggaagaagataacaacttatatgttgctgataaatcattcaatgaaatagtagatggacaatggcttattagcatcgatggtaaatacagtattcgaactgtttctcgcatccctaacaacaacattcgcgtaacaaaaggcgaaataacttttgactgcccaatcgatgatctgcactttaccgccatcataaaaaaatcctttatatga

SEQ ID NO: 106288 - DNA, 339 bp, Enterobacter aerogenes
ttgactgattccaaaagcgatcgtaatctcgcacttgatggttccatttggaatcttcacccgataccactcgttaaccttgctcaccacaagctggccaacatggaatcatgcatcatgaaccaacacatttcaatctcaatcgcaactcctcatgtgaccattgaacgctatagcgaacttacagggctgtctgtagaaaccataaatgacatgctggctgatggacgcctaataagacatcgtcttcgcaaagataaaaagcgtgaaaaagtaatgattaacatcgcagcaatgactgtcgacgcgctctcaaatagcaacgtagttatctcttag

SEQ ID NO: 106289 - DNA, 2283 bp, Enterobacter aerogenes
atgtcgcaaaccgttatcacgctggcgtttgaacagtggaaagcacagcagggggaaacgggtgaagtcgtcctgctggatgagtttgtctttgccaacgtaccggggcttgatccggcaaaacctattgaccgcaacgaaaatataccaccggcaggccagatagtgcatcgccaggcagtttcgcgcaaaggcgtggtgaatgaaaacgccgtggtgcattccgttgtgctgggcgcggatgtgggtgatttttcgtttaactggattggtctgattaacagggcaagcggtatcctggccatgattgtacatgcgccagtacagcagaagctgaagacaaaagaagggcagcaggggaacgtattaacccgttcttttctgatggagtacaacggtgcacaggctgaaacggcaattaatacgccagcggagacctggcagattgacttcaccgccagaatggccggaatggacgagcgccagcgcctggaaaatactgatatttatggcgatgctgctttctttggtgatggctggctggttggtaaatccggcaatcagtattttgtgaccaaagggacaggttatgttgccgggctgcgtgcagatctcaccgcgaatcaaaatattacagttgctgcaaagcccgttaaggtctggctggatgtgtgctggacgggtgggtttaccagcgcctgggaagtgcagaccaaagtcacggtggcggcgagtctgacagactatgagcagaacggtgtcagacatcatgtatttgcgctggccagtattgatgccagtggcaacatcacggatttacgccctaaaggttcactggttgagcgtgtggccgtgaaatcggttgataacgttaagccggatgcaaagggtaatgtggatacgatgcggggcgatgccattcaaccggtgattaaacttccgccagtggccagtggtaatagctcttatattaaaattgccaccatcaaagattgtggatcgagttccggttttttccaggtcattgtgtccggtaccgggaactatggcaggccagggcagagtattgaagaaataacagtaagctgccgggggattgccgccatgacggcggcaaacgtagacaattatatcaaccacaaatctggcaataatggttctgattcccagttaagggttgttgttgccccgaacggaaaagccggggaatttaatgtatacattaatgcctccagtggttggtggtctggcgtcataatgcgggtggaatccatggctggcggcggagtctatattaccggcgcggtactggatcgtaagatgggggcgaatgcctggacgacgaacaagccagccaatagttttatggccacacgctttaatatgctgacgagtggtgataccggtaccagtggtactaaaattccgttactgagtacagctaatacgtggtcggaaatccagacatttaaaaaagatattaatgttggcactgttggggatacgtctgttatttccatggggggttcctcacagattatccgtgataatggcaagaaaggattaattatcaccagtgcatccggtgcattagctggcaatggtgcaggattgtatttgcgtccaaaaggtagcactgatagctcaatggaattagtcgggaatgccactggctggagcgtggataaatttaccgccacgacatttaaagtggaaggtgccagcgttctgaatgcgctcacattaaatagtgtaagtgggattcaaaagaatggaatttacacctataccgatggtgggcaaaagtataatgaaaccaagggcatcgaaatgcgaggtgcgggcgatcagtttggtggggtaagatttaccgagcgagtcggggtcaatgcgtttattggttttcaggttgtaagcggtgggcgaactggctggtttgaattcagaaatgatggaaccataaacacaaatggtggcgccaaacttgcgggaaatcttgttatatcctggggagggcgtacagctacgtaccaggaaaatggcgacgttgtcggccctatttggggaggcaatttaaccagttatctttcaggatttgtgagggatgtgcggatgggcagtcctggaacaatcattctgaagcgcaatggctggaactatgttccgggcgggtgcgcatttaccgggtggtatgtcgaaggtgatgcgccggttgatgacactatccagtataaaccgatccagatactggttaacggttcatggagaacaattgcagggtaa

SEQ ID NO: 106290 - DNA, 1119 bp, Enterobacter aerogenes
atgactgaaaaattcaccgcaattttgttagacacaagtatctacgatcagtacggattaaagcttgagaaaggactactgggtaagctttcccagttcagccgaaccccgacaacgtttttgataccggatgtaatttacaacgaagttaaaaatcatcttgaaagaaaaatcaggacttcacgtggctctcttgagaaagctttcgaagaggctggcgatcatcttttttttgatggaagcgaactaaatgacgcaaaaagaacattgattgaaggcagagaagttgaaggattaggaaagagtagattagacagatttgttggcgtaacagatgcggaggttttgactactggggattacgtttcggtacctgaactacttgaacgatatttctcttctgaagctcctttcgcagatacagggaagaaaaaaaatgagtttcctgatgcgatcacattaatggccgtccaagcttgggctgaagagaatggtgaaaatgttcttgccgtagcaagagatgacgattggcagagattttgtgctgatgctgagaatttgcattatgaacctgacttatcaaaggctttagcacacttcaatgaagaaaccgcaccttatgaactaattgataacttacaaaaagcacttgctgaaggacaggccggtaaattcttgcatgatgttgctgtacaccttgagtcaacctttgacggttttgcaccagaacaagaggcagattcatatttgtactgggaggctgatggatgctcaggtggatttgaagattttgagtttacagataatcacttcactgtcattgacaaggatgaaaactgggttgttttagaagcatttgcagaaatttcactttacgcagatggtgatttctccctatcagtttacgattcattcgataaggatcatgtctacatggggtcaatcaccaagcgtgccgaggaaacatatacatccagaatactaataacaatctccggagacttgtcaggttctatagatgatttgaccgttgaagatgtggaagtaatagagcgtccgacgtcgatggattttggggagctggaattagcatatgaacctgacgagcaagatttgtaa

SEQ ID NO: 106291 - DNA, 1080 bp, Enterobacter aerogenes
atggtgctggtgacgctggtggcggcgaaagggataaataagattgccaaaattaccgccgtcggcggcatcgcggtgatgtgcctgaacctggtgcttctgctggtgagtggggcgattctgctgctgaacggcggccatttcgcacaatcgctggatttcacggcgtcgccgaacccaggatatcaatcggggctggcgatgctctctttcgtggtattcgccattttcgcctatggcggaattgaagcggtcggcgggctggtggataaaaccgagaagccggaaaagaactttgccaaaggtattattatcgccgcgctggtgatttcgatcggctactcgctggccatcgtgctgtggggcgtcagcgccaactggcagcaggtattgagcaaccacagtaccaacctcggcaatatcacctatgtgttgatgaccagccttggcgcaacgcttgggcaagcgctgcatctgtcgccgcaggcggcggcgctgaccggcgtatggtttgcacgcattaccgggctgtcgatgttcctggcctataccggcgcattcttcaccctgagctattcgccgctgaaggcgattattcaggggacgccgaaagcgctgtggccgacgatgatgaccaaagtcaacggcaacggcatgccggctaacgccatgtggctgcagtgtctgctggtgagtctgtttatcctgctggtctccttcggcggcgataccgcctcggcgttttataacaagctaacgctgatggcgaacgtctcgatgaccttgccgtatctgttcctggcgatcgcgttcccgttctttaaggcccaagccgagctcgatcgtccatttgtgatgttcaaaagccgcataagtacgctgctggcgacgacgatagtggtattggtggtagcattcgccaatatcttcaccgttattcagccggtgatggattccggcgactggaacagtacgctgtggatggtcggcgggccgattttcttctcgctactggcgctagggatctacgagaactatcgtcagagaacggcggtacaggtagcgctggcggagggttaa

SEQ ID NO: 106292 - DNA, 384 bp, Enterobacter aerogenes
atgcctcaacaaatcaagaagatgagcctgattgggctgatattaatgatctttacttcggtgtttggctttgccaacagcccttcggcgttttatctgatgggttatagcgcgatgccgttttatcttttctcggcgctgtttttctttattcctttcgccttaatgatggcggagatgggctcggcatatcgtaaggaagagggcgggatctattcgtggatgaaccgcagcgtcgggccgcgctttgcgtttatcggcacctttatgtggttttcctcttatgtggtgtggatggtcagcaccgcggcgaaaatttgggtccctttttcgacctttctctcggcgcggataaaacccagagctgggcttttgccggcttaa

SEQ ID NO: 106293 - DNA, 1791 bp, Enterobacter aerogenes
gtgcaaacttttcaagccgatcttgtcgtcattggcgcaggcggagcaggtcttcgcgcagccatcgccgctgcgcaggctaatccaaaagccaaaatcgcactgatttcaaaagtctatccaatgcgtagccataccgtcgccgccgaaggcggttctgcggcggtcgcgcaggatcacgatagctttgaataccattttcacgacaccgtcgccggcggcgactggctctgtgaacaggatgttgtagactatttcgtacatcactgccccacggaaatgacccagcttgagctgtggggttgcccgtggagccgccgcccggatggcagcgtcaacgttcgccgcttcggcgggatgaaaatcgaacgtacttggttcgccgccgataaaaccggcttccatatgctgcataccctcttccagacctccctccagttcccgcaaattcaacgtttcgacgagcacttcgtgctggatattctcgtcgatgacggccaggcccgcggcctggtggcaatgaatatgatggaaggcacgctggtgcaaattcgcgccaatgcggtcgtcatggctaccggcggcgctggccgcgtctatcgctataacaccaacggcggcatcgtcaccggcgatggcatgggcatggcgctgggccacggcgtcccgctgcgcgacatggagttcgtccagtatcacccaaccggcctgccgggctcggggatcctgatgaccgaaggctgccgcggcgaaggcggtattctggtgaataagaacggctatcgctacctgcaggattacggcatggggccggaaacgccgctcggcgagccgaaaaacaaatacatggaactcggcccgcgcgataaagtttctcaagccttctggcacgagtggcgcaaaggcaacaccattccgacgccgcgcggcgacgtggtttatctcgacctgcgtcatctcggcgagaagaaactgcttgaacgcctaccgttcatctgcgaactggcgaaagcctatgttggcgtcgatccggtgaaagagcccattccggtgcgcccgaccgcccactacacgatgggaggcatcgaaactgaccaacagtgcgaaacccgcatcaagggcctgttcgccgtcggagaatgttcctccgtcggtctccatggcgccaaccgtctgggatccaactcgctcgccgagctggtggtctttggccgccttgccggtgagcaagccatgcagcgcgcaatggccgcgggcgaagccaacaacgcggcgctggatgcgcaggtcaacgacgttgaaaaccgtcttaaagatctcgttaaccagcagggcaatgaaaactgggccaaaatccgcgatgaaatgggtatgtcgatggaagaaggctgtggtatctatcgcacgccggagctgatgcagaaaaccatcgataagctggccgagctgcaggagcgctttaagcgcgtgcgtatcaccgacacctccagcgtgtttaataccgacctgctctacaccattgagctgggccatggtctcaacgtcgccgaatgtatggcgcactccgctatcgcgcgtaaagagtcacgcggcgcccaccagcgcctcgatgaaggctgcactgaacgcgacgacgtcaatttcctcaagcatacgctcgccttccgtgaggccgacggcagcacgcgcctggagtatggcgatgtgaagattaccactctgccgcctgctaaacgcgtctatggcgccgaagcggaagccgctgagaagaaggagacgacccatggctga

SEQ ID NO: 106294 - DNA, 189 bp, Enterobacter aerogenes
atgaattcaatatatgataagcgtactaaagctgtcaagaaagcggaggcgagtttatatttatcaaacaaagatccgcgagggttaccatactatgaactaataaagagcaaggtcattaatggagaattgacttatgaagaagcaagacttgaggtatttaactattacactggaaaatcaaaataa

SEQ ID NO: 106295 - DNA, 1398 bp, Enterobacter aerogenes
atgcaatttttgaaagatttaatctctagtatgtataaacacattgacaccagaataaatagtccaatcttaggtacattgagtgctatatttgtaattttatactgggataaattcacattgctattttggggaactggaacaatcgactccagagtcactcaatttaaatcattcttaactgggattaccacttcagaatatttattgatagcatttctgatactagcatatttatttttattacccttagtaaattatcttactgggttaattcaaggtgagatagaacacataagatattgttctagcattaatcaaaaagtaaaaaaagagaaagaaagagcaaggcttattaactcaaaatataaggctgagcatgagagtgaaattgcagctcaagaaatcatcgaagaaatagcatttagcaatgaaagaatcgaacaacaaaaaacactaactgaagatataaaggaacgctctaaagcatcctcggtaattattaaagcgatgtacgaaaaatctcagaaaatgaaaattgaactggagacttctatcaaagaaaaacaagcaacagaaatcaaactctcacgagaggctatgagcagagagagagaaaaaatgagctatgacaaactgaaatatcaaatcgaggaaaaaaagaaaatatcacaactttcctcagccttctatttaattaataaacttgacttaatacttactgctgattcaattaaaatctcgctttcgggtttaggcgcagtaatcgctagtgtttttggatacacatcttttacaaaattactcgaagatgaaaatttcaacacagattctttagaggcgattgattatataatttactcagaaagtttaataacggatattaaatcaataatcgaagacgaaaatattgatgaagatattgacagctacacgttatttgaacatttacagaatatattcgaagaggatctaaatataaaaatccttacaaaagatgaggtcagtgaaaaaatacgtgacaatcttgaggaaaatggtatgtacgacttaattcattgtgatgaagtaagtggtagcatagcagaaactaacgcttactttgactatgtagaaaacctgcaaattatagacagcgaactcactgatgaatcgtttaaagtcaagttcgagtgcatcctttcaggaaccactcatgaagacaagccttattgcggtgaagaaattgatgtctcctttacaaataaaagtaaaatcatactaggcaagtttgctataggagaagcagaaattgaagagattgggagttctgtgaaagactatcatgaagaagatgattacgaacctcaagaaatcagtagtacagttaatgaaaaaaaacacgataatgagttttga

SEQ ID NO: 106296 - DNA, 1284 bp, Enterobacter aerogenes
atgtgcaaaagccctgacaaaatagctggggtgaacatgatttacaagcgagatcgttacttagttttagatccatgcggaaactatctggtgaggatcgccataccaaagtacatgcgtcatctgttcggaggaagacataactatgtgaagagcacaggcacacgcgatgtgcgcgaagcccgtctctttcgtgatgcggttgctctggagtggtttaagattcgtaacctgataaagccacagcgtgatcgaggctcgaaggtagagcaaatcctcaatgaactacgtcaagttggtacgtatgcacatgcagcaccggagccattaagcgcccctgtaatgagttgcccttccctcttgaggatgcgggatcaatacattctccagttcagcgagaagcgcaaactcaccacgctatcaaagacaaacaaggctgtagaagtgctcttagaacatctgaaaaagcgcgatgttcagcttcgtgacattaaccggaccaccgttacaggttggcttgataagctcaagacggagaaagcaccacagaccatacaaaactatgtcagcgcactggctcaaatctgggatctggctcgtaacagatatcacgatgcaccacaggaaaacatctggcgcggtcatgcgctggaggccaaaagtagcaaggtgagctatgaggtgtttgagcctggagaattggcgaaagtattcgctgtgatggcagatgatgaagagatgcaaaatgtaacgctgatcggcatgtatagcggtatgcgtcttaatgaaatctgttcactacgtgcagccaacattaaggagatcgagggggtgctctgcttcgaagttaccgaaggtaaaaccaaatcagccgctcgtattatcccatgccatagcctgatcactccgttggttttgtcgctgcgtgagaagcctcacgacggctttttattctatcgcgcgtcaatcactgaccgtgcagacggaaagcgctctacatggcattcacagcgttttacgagggctaaacgtaaggcattaggcgaagctggatcagagttaaaagttttccacagcctacgccaccaggccgcgcaaattttggacagaggcggcataggtaagaatttaaaacctgtaccagaagaccggatcgcccttctcctgggtcacgagcgcggctctacagagagtttcaagacgtacagcaagaatgccgcctctcctgttgagctacggcagtatatagaattgctacgctatccagagatagagaatcaataa

SEQ ID NO: 106297 - DNA, 1866 bp, Enterobacter aerogenes
atgcttgaaatccacacaagttctatcaagaacaccgtgacattcagcgttgatcgtaattcaatgaaggaagctatggacgctttcgatcaaattcagaagaaatccaaaggcattaaagaccctacgttgaacatgaaaagattcagccaggggctaaaatctgctgaaagggaactcgataagctgaataagaaagcgtcaaagcctcgtaatagcgatgaacgagaaaaggcaagggcagctaaggcgcaagcccgtgtagaggctcaggcagcgaaagaggccgcaagaaacgcacagcgccgtgaacgggctgaattgaagctattggacactgccagcagctttagaagtatgcaacaccttaccaacgtcgaattgacccaggcggcactggcagcgtcacgcataactaaggcgtactctcagggaacgatcagcctcgccaggcaaaacagcgagatcaaacgactccagcagagctacagacgcattaacgcagagcgtagggcagcagcaaaggcgggaggatctaacgctctcggtggcggtggtaaggctacaggggctatctctggctctctgatgggcttaggcactggtgcgctggctggcgctggtatcggggcggcggcttatggcgcttattcatgggggaaagaagctgtaacggcacaggaagagcgtagcgaaattgtacaacgtgcgaagctgggcggggtggattacaacgttttgcaggcactttcgcagtatgccacggctaacggtattgattccggtatgggaattcaaggacaacgtaagctactggactcgggaaaagacatctccgaaaagctggcagacagctacaccaacagcacctttgataagaagtctggacagtggaaaggtggaaacgctgctgtagatacagccctgaatatgggattcactaaagacgatctgaaatcctaccaatccaatccgtttggcttcgtctctgcttacaccaacaccatgcaggggaaaggctattcacaagagcaaattcttcataatctggaagaccttgcagacgatttaggcttgtatcacaaggcattttctaatcaaggaaaagcaatcactgatcaggtggacgtgctcaaacgtaatggtcagtggttgaaccaggaacagcaggatcagcttgtagcctaccgtaagtttaaccaggagcttagcattctctccgatagccagaagctggcattcttcgaagggtttatgtcagagattgaccctgaaaccatgcgagagtttaaagaagctatgcaggaggcgttacccttctttcagggtgtcggacgggctgcgggcgatgtggtggatggtctgatgaagctaaccaactggatcactggaaagctaaaccttcttactggtgacaacagcactaaagaggcggtgagccagcattacggcacaacgtcagcacctgcacagcctggaagtaatccagtggctaacgcctatggagccagccagccgaaagcagacggcacacaccagcctaatgtgttcgatacattccatgattggtggaacgggacaagcgacgctaaggacgtgagcagctacgcgcagagcaccaatggagattactctcctgtttcaatgttgaaacagagtgcagcagcgccagctaagccagccagtgcgccgatcatgcagcctgtagtattgcagaatcagctaccggaagggcttatccatctaactatttctcctgatccaacgtttggaaacatgctgaatgctaccgttgaccagcgtatcaatgataacaatcagcgtatggtgttggctgtttcatctggacaagggacggggggctaa

SEQ ID NO: 106298 - DNA, 219 bp, Enterobacter aerogenes
atgtttctacttaataacaaatcgcgtgtactcaaatataaaaatgatgttctcaccgtcaatcctcagatgattgagatggtggctcagtatgctggttgttcggttgatgaagtgatcaaagcgatggataaatattttcctgacgaatcaccaaaacaagaaacaactattcaggatttgattacacgtaaagtaaaggaatcaaccaaacaatga

SEQ ID NO: 106299 - DNA, 348 bp, Enterobacter aerogenes
atgaataataaaactatggacaccgtgaacaacgtgaacaccctaattaactctttccacgatatttggcatctaccagcattgcagcttgttaatgcagcgtggcgtgagagaacgccctccgcgcttctggaagcgatacaatacactgaacaggcaatcaccgcccttgaacactggaacgctgctgtagagcacctggtgcagatgaacggggatacagtcaccgtggatcaggcgtggcgaattgccaatgatatggaggagcttgccctcgctatggaacacatcaccgttgaactcggagagcttgccatccagatcgcggaagaatgcgctataacataa

SEQ ID NO: 106300 - DNA, 384 bp, Enterobacter aerogenes
atgggacgaaaagaacgaaatccaattaaacggatagaacaagcaacacgcgccagcaaacgtaaatacacctcttctctacaagacctcgcccgagagtctattccaggagaatggatcaccgaaataatagaataccctgcaacggtgcccgtaggggctgagtttgaactattgcaggatgttttagcatcttcggataacgtcttctataaaccacgccgccgccgtgaataccgtgttgattcatcgaatcttaagaagtggcagctatacgcagaaaactatattgactgggtggggtattcccaaactaacggcttatctcaccacatacaagattttgacattctctttgacgacaaggaaaacaacaatgaataa

SEQ ID NO: 106301 - DNA, 1449 bp, Enterobacter aerogenes
atgaaccaaagaagaaaagtaataacctacgttgatgcaatttgcggatctggaaagtccaccacgttacagcactacatcaagtcaagtttattaacaaattccgaagcaattcccccccgttatcttctcgtgatgccaacacatgatttatgtaatcaagtgaaggaagaacttgaaagccgaagggtgaagagttatcacgtagacaccgaaacagaagcggtaaatctcctaatttccaccctggaatacgatttccagcattcggtgattatctgcacacatcaatgtttcattcattattgctatcgcgcagcgcttgaaacggaacttcaaaaccttctccgtaatttcagaatttttgttgatgaaatccctgatgcaatgtttggcgcttacatcaaagtgcagcatacaagtcggacggaacaaaatttcccattcttggatatgctggaagagcgggacggattgttattcctgcgtgaggatgagcgtgaaaatttctacgcctactggcacgaaacacaggcgagtggtcaggatttaaagcgcctactctgggcgataatgcagggtgctggacttctctacgaagagaataaacacctgtttgccttcactgcttcaccaattatcagatctgtagaatgggctgaacaacttacactcttaggtgctggctcttctcgaagtttgtttgtctgggctgctgaacatctggcgaaatacgaagttgaggaagctggtgaagatttacagccgccacttgaaagacgtaaacataagcgtgtaccgatctccctggtcgccgtatgtgaaaacagatgcaccctgccagcattacagaaggtgtttcacgaacatctccaggaaatcatccagcgcgtgcctggtgaatttatcttcgctaccaacagagataaatccctgtgtcagtttactacgataggggatgaaattcttaccgatgcttcccgtggtatccgtgtttcaatggcttcctatggcctgaaccattaccagcacatacacaatgcagcgtttcttggttgcagtaatcttgataaagatttccaaggtaaatggcggcagtatgcagagcttaacggatgggatgttgaagaatttgaacagaagcaacgcgccgcgatgaattatgaaaggtgctaccagtttattagccgtacatctatccgtaatgctgatactgatcaccctctgatgttcgtagtacctgatctggcaactgctgaatacatcaaagagcattatttccctggagcaaagattgaatgtctgaaatttgggaaagtgagaaagaaagttaaaggtaacaacacccgtaaagaagtacaggaacacaaatccaaaggattgacccaaagacaaacggctgaactaatgaagaaagggatcgccacaatacaacgccactggaactaa

SEQ ID NO: 106302 - DNA, 159 bp, Enterobacter aerogenes
atgaaaatcaacttcacccctgagacttatcaggcgctgatcgcgcgtgccaatcgtgaaaataaagccgccgccgcactggtgagcgaattaataacaacagtccttaacaaagaggaaaccaatgaaccaaagaagaaaagtaataacctacgttga

SEQ ID NO: 106303 - DNA, 609 bp, Enterobacter aerogenes
atggaaggtatcgcagttgcgcttaaaagcgcggaggacgtgaaagcagtggcggcagagctacgacgcaataccagaacaaacctgttctactgtgcatgggtgatgcagtatgagagcgcattacgtatctctgacctgttaaccctcacctggtcacaattcagtgcagggaaaacgcatatcgaggtgaaacagcagaaatctaaacgaaaggcagatcctaataagaaggtgaaaccgctccgtatcaagattactgacaccatgcggaaaatcgtagagatgcggagagaggaacaatccactatgcctgtgaagacggatttcatctttagcaaaggcgatctccgtagcaaaggcaacgccgtaacccgtaacactgtgttcactgagttcagcaagatcgggcgtagagtgggattctctaacgtagggtgtcataccccacgaaaatcaaaagggcgaattttattcagtgcgggtgtgccgattgaacagatcgcccttctcctgggccatgctgatccacggtcaacgctcttttatattggttacacgctcgaagtaggcgacgaattgacagaggagtttagccttgaaatctaa

SEQ ID NO: 106304 - DNA, 213 bp, Enterobacter aerogenes
ttgaaatctaaatatcttgtgctgacgctgacattattaccagccgtggctaatgccggacaaattacgatgaccaacccacaggaagaacagacggagaacggaaaaacgctatgcgtgtatgagaacaccaattacctgttcacatacgttacgagcgctcagagttgcctgtatgcaaaaacattcgatacagaggattcagaaaattga

SEQ ID NO: 106305 - DNA, 327 bp, Enterobacter aerogenes
atggaaaaagaacactttaaagcgcacgttcagtatgacgactggaagggaagcgttgcagcagacagtgctgatcaggaagactttagcgactttctgagagacaaaggggtattgaaagaaggtgagattgtgaaaggtatttccttctactcagcagagcgtttctttgatgttgaagcatttgtttcagacgatgaacatgggttaagaagggaaaaagtcacaatgacgcttgaggagtttttcaaaaccttcaaacgtttttcagtcaagatttctcgcaaaggggaatttgacgatcaagaaatcgagttcaaagagtaa

SEQ ID NO: 106306 - DNA, 1506 bp, Enterobacter aerogenes
atgactatcacaggtaactttattggtgggaaaacggtaaccagcagcagccgggaaacgatgccggtgtacgacccggccactggcgatgtggttcgcgaagtcacgctttccaccgcgcaggaggtttccgacgcaatccaggtcgctcgcgacgcttttgacagctggtcccgtaccacgccgctgcgccgcgcccgcgtgctgttcaattttaaaatgttgctcgaacagcacgtcgatgaactggcgggaattatcgttagcgagcacggcaaagtgtggtccgatgcgttgggcgagctgacccgcggcatggaagtggttgagttcgcttgcggtattccgcatctcattaaaggtgagttttcttccgacgtgggtaccggcgtcgacagctattcgctcatgcagccgctgggcgtggtggcggggataacgccgtttaatttcccggctatggtgccgatgtggatgttccccatcgcgttggcctgcggcaacagcttcgtgctgaaaccaccggcgctggcgccgaccgcggcggtacgcatggctgaattactgaaagaagccggtctgccggacggcgtttttaacgtcattcattgcagcaatgaagatgccgagcagctttataccgacccgcgtattgccgccgtcagctttgtcggctcctccggcgtggcggaatatatctataaaaccgccagcgctcacggaaaacgcgtccaggcgtttggcgcggcgaaaaaccatgccatcgtgatgccggacgccgatcttgatgcgacagtaaatgccatcatgggcggtgcgtatggttccgcaggcgagcgctgtatggctctgccggtagtagtggccgtcggtgacgagaccgcagataaattaatcgcccgcctgaaaccattagtcgagtcgctgaaagtggggcccggctgcctgcgcggcaaagacgaaaacgagatggggccggtagtatctgaagcgcatcagaaaaaagtactcggctatattgataagggcgtcagcgaaggggcgtcgttggtggtggatggccgcaggctgcgcgtggccgggcatgaggacggatattacgttggcggtacgctgtttgaccatgtcactccggaaatgaccatctggcgtgaagagatttttggcccggtgctggggatcgtccgcgttgctgattaccaaagcgcgctggcgctggtaaacagccacgaatttggtaacggcagcgccgtctttaccagcaatggccataccgcccgcgagttcgttcatgatgtacaggccggcatggttggcgtcaacgtaccggtgccggtgccgatggccttccatagctttggcggctggaagcgctcggtatttggcgcgctgaacgtccacgggcctgacggcgttcgcttctatacccgtatgaaaactgccaccgtgcgctggccgcaggggcagcaaaccgtatctgaattcagtatgccgacgttaggttaa

SEQ ID NO: 106307 - DNA, 135 bp, Enterobacter aerogenes
atgcagcatgtgaaatcgattcaattcgacgtacatttgcacttctttctctgtctaatgatgataatctggctgtatcggctgctatgctctatgaagaaaggccaagaattgtgcatgaagccggtgctgtag

SEQ ID NO: 106308 - DNA, 546 bp, Enterobacter aerogenes
atgaaaaaagttcaattcagaattgatgaaaatcagcatgatgatttgctggattgccttaaaactctttatccggatgaaccagctttaacagtagctaaaggcatgaaacttttagcaaatgctttattaaaaagtaaagctgtcagtaaggatataaatacgttttttgataataatgattttatcaaaacaacgatgtacttaacaggtaaacaaagggctgatattgaaagagctgctaatcgtcacggatggacgttatcacgagaatgtcgttaccgcatacagacgacacttgaaaatgaactggatttctttgaccaggaactgctgatgatgaatcgttgccgtaattcaattgataagatcggtcgtaatttccatcatatcattgttaatgatcagaccagggttcttgataaagatggtttctatcaggatgcggagcgtcttacaacagaaatttttaatcttaagaatcagtttgagaattacattatgttatgtaaagggagaactgtttcaaataaagtggagatgtga

SEQ ID NO: 106309 - DNA, 1167 bp, Enterobacter aerogenes; identical to SEQ ID NO: 4298

SEQ ID NO: 106310 - DNA, 519 bp, Enterobacter aerogenes
atgaaaggacagaaacagttttatctgcttcagtgttctccgcattttcatcagtcggttctgttgcagttatcccggagcggtatcgcttactacaatccagttatacgcactttctataagaggcgtgactgtagtgcatacaggggacaaatcatgccaatgtttcccggttatgtattcgttcttctggattttgaggttgtacatccatcctgctttacccggatgaaaaatgtttatggactggtcagttttggtgaatatcctgctgaagttcctctaagtgtcataaatgaagtaaaagagcaggagaagattttttcgatgaatttaagcctgatgaataactcctgtctggcaaaaatacttctccttgcagacgcttcaaagcgtggacaagtctttgccgactatgtgtgtaacagaaaatatgacaggttaaaaaatgacagctataaaaggaaagcggaaaccgcaacgcaatgtactctaccttcctacagaagttcgtgttga

SEQ ID NO: 106311 - DNA, 648 bp, Enterobacter aerogenes; identical to SEQ ID NO: 4300

SEQ ID NO: 106312 - DNA, 2754 bp, Enterobacter aerogenes; identical to SEQ ID NO: 4302

SEQ ID NO: 106313 - DNA, 750 bp, Enterobacter aerogenes; identical to SEQ ID NO: 4303

SEQ ID NO: 106314 - DNA, 285 bp, Enterobacter aerogenes; identical to SEQ ID NO: 4304

SEQ ID NO: 106315 - DNA, 1062 bp, Enterobacter aerogenes
atggctgaagcaagtaatttttttgtcacagcaaaagaagagatcctctcggttctcgatgcttcggtttctggtcagttaacaagtttaagtaatatagcaggcaccctaggacgctacggggtgtccatctatgtgttatggtatgcttttactgttctggctagaaaacagcaaacacctgtgcctgattttatctggaacttgtgcaggttttctataattttaatgtttgtacaaaatgcaggtgggtggctaaatacttccctggtagcaatagatggtttaaaggattcgttatctggtaataatgatgcttggttatggttagatcagttatggacgaaagtacaacaggttgctgcgcatgttatgtctaaggatacttcaacttatgtaaaaacagatggcgctatagctgctctttttacttattttggtggaatattagcattagttgcatgtgctatagtttttcttgctgcggaagtaaccctgaaattattgactgtcactgcacctgtttttatcttttgcctgatgtttggttttttgagacaaatgtttaatagctggttgcagcttattttcagttcatgcttgatatttatgttcggttcattagctttaagagccggaacatcatttctcaatatagttttatctctggcaatagatacggtagacaatcgtaatctaattaagattggcgctactgcggctgttgctggcattttcatggcctggattatctggcaggcgaaaagttatgcttcacagattgcaggtgtgggtgttgaaggtgccatgcagggcgcagccgctatggggattggtgctggcgttttcggtgcatcccgtatggcgcgtggcgcacttggtatgggcagaaatgccggtattggtgcatggaaaggtctgcgtcgtcaggaaggcgggtttggtcagtctccgggaataacgggtaagaccgctaacctggccggacagggcgttaatattggtgccaaaaagcttcgtcaggcagctattgagagggcaaagaaaatgtatggagggtga

SEQ ID NO: 106316 - DNA, 714 bp, Enterobacter aerogenes
atggaatttaaacttcccggatttaaaaataaaaaagacgttactgactcatcagtttcgtttgaagaaaaaaacattgcactacaggagagaatgaatcgtatttataaattcggtggtatcggaggcatgttaattggtgggctgtctttacttgcattaaatgcagcattaccactgaaaacaacagttgttgatgcctaccttatcgataaggttacaggtgtggctgaacgtctgacttctgttaaaaaagaaaatctttctgaaaacgaagccattgcccgatattttatcacccagtatataaaacatcgtgaaggttataattttttcagtctccagcatgattatgattatgtaatggcttacagcgcggagaatgtcgcggcagattataacgcattatttaacagtgaacaggcaccaaaacttgtttataacaaagcagaaaaaacggcaatggttcaggataatccatctgtcataatttcaccttcgtcacggacggatgataaagatatcggtgcgtatattcgttttcgtctgaccatcagggatgttgctaccggacaaacccgccaggagttctggaatgttcgcctgacttatcgtatcgaaccgcaggttgaaatggtgtcaggggaacgtaataacaatcctcttaagttcgttgtaacaagctacgttcgcgataaagaagccagaggttaa

SEQ ID NO: 106317 - DNA, 930 bp, Enterobacter aerogenes
atgaaaatgaataaaggagcgttaattatggcgcttctgatggcggcgcacgtctgtaatgctgctgttcttccttcaggcagtcgctttgacccacgcaatcagatagtcagttataaccccaataataccaccataattaacagtgccgttggatacaccaccacactggtatttgatgaagatgaaacagttatcagtgccagaaccggttttccgcagggatgggcggttaataaagaagataacctggtatacctggaagttcgtcctgttaaacaaactgttcagaaaaataatacggatgcaaacggtaacacctcttctgaatccgtcagtgttgctcttgacccggaaaatgagcttgaacgctggcgaacgaatctgtttgttcgcaccacgaaacgtaattacagcatggagctgaacgccagaacgttccgacagccggagaaaattgcgtttgtggtgaattaccagtatccgcaggaacgccggaaggaacaggccgaaattgagaagaaacgcacagaggctcttgccagacgcctggaggaacaggcaatcaaccgttccctggaaaatgcgaaatcgccccgtaactggcagtactggaagcgggttgctgaaggcagccaggatatcagccctgattatgcatatgacgatggtcgttatacctggttcggcttcagtccgttaaagaaaattcccagcgtctttgtgatgaacggtatgcaggagactcttaccaatcctgtgattaaacagagcgggagttttacggctgttggcgtaccggttgataagcgttttgttttacgtcttggtgagcaggtggtggggattgagaacctgggcttcggaaaagtacgtttaccagccggggatacggtatccccggatgttaagaaagaggtgatccagtga

SEQ ID NO: 106318 - DNA, 1206 bp, Enterobacter aerogenes
gtgactgaacaggaaaataaaatcccgactgcaaccgaaattgaacagcagctacgggaacgcagacagaaagaactggaacaggccgggaagactccggaagaagagcctggcaagccagcattgcagcttggtattgaaaaacttaaaaagtcacgtaaagggatgattatcctcgtcgtgggttttcttctgcttgctgccggtgtttctgtttattatatcccgtccattatccgttctgtgtcgtcaggggatgagaaacccgcaagtcagccgcttgcaaccggagcggctaaacgtcagaccggactgagcgaagatatcgatccttttaataccgcacagaaaaaaacagagaaaccagaggaagaaaaagtcatttcttctgaaaagactgaaccgccggaaaataaacagcagagcttcagccgtgcacttgatgtttctcttgatggcagccaggcaggaaacagcagcagttcagcgggaacgtcagtttcacatactgcggccagtgagccagaaagcgataaaaaggatgaagcaaaagcaaccgcacaggctacagaatctgcgccactggcgaaaataacgaaacttccatatgacccaaatttgtttatcccggaagggacatcaattccctgttcactggacaggcgttttgtttctgacctggcggggaaactggaatgtacggtcaacagcgatatatacagcgccagcggtaatgtaaaacttatcgaaagaggaaccgccgcaaaactgatgtataaggccgggtctttaaatcatggacaagggcgtgtgtttgttatggcttacaagctacgtactcgcagtaagccttttattgatattcccctggttgactcacaggcggcaggcgcgttaggcgaagccggtgcttctggttggattgacactcatttcagtgaacgttttcttggtgcaatgatggtcgggatgataccggatttaagtcaggccgccagtggtattgcacagaacaacagggacagccagaccgactatacggcaaacagtcgccaggcttttgctgatatagcacgcgaagcattttctaatagtgtgaatattccgccaacgctttataaaaatcagggcgaaattattactctgattgtcggtcaggatctggatttttcaggtatttataaactgaaaatgaaagggggttaa

SEQ ID NO: 106319 - DNA, 1032 bp, Enterobacter aerogenes
gtgaataacgaaaacagacatctgatttatgatgtggtcaacgattatttttatcactggctgaatgagattgatggtgtcacggaaatcgctgttaaccgaccaggagaaatatttataaaggtcaggggaaagtggcaatggtatgaacaaaagatgaattacagtgattgtctttcttttgcatccacactggctgattttcatgacggtggttctgtgactcctgaatatcccctgcgttccgccacgcttccgggtggagaacgtgttcaggttgtgatcccaccggcaacagaaaaagatactgtttctataacaatccgtaagccgtcaggtatttttatcagtcatgacaaatttataaaacaggggttttattcacgcgtcggtggtttaagtggtgattccattatggaagataatatttctgctttaatcacttccgaatattttgaacgggttatacctgaatcactgagtcaggggaaaacgatagttttctgtggagggacggggtctggtaaaactacctttgcaaatgcctgtctggaatatataccgcatcatctgcggtgtatttctattgaagatactgatgaagcaaaattcagattccataaaaaccatgtaaaactttactatccggcagagggtgagagtaaggttattacctcagcgagtcttctgcgttcctgttttcgtatgaatccggacaggattctgatgacagaaatcaggggggctgaggcatgggattttctgaaagcatcgagttcaggccatgcaggaaacatcaccaccgttcacgaaagtagtcctgaatctgccgtgcttgggattgtccagcgatgttatatgaatcctgaatgtcagaatctaccattcaatgtcattttaagacgtgtactgagtaatattgatattatcatgagtattaaataccttgatgatgaagattttcggttcgcttccggtatttactacaaacaacttcattttgatgactatttcagaaaactgaaggagtga

SEQ ID NO: 106320 - DNA, 1836 bp, Enterobacter aerogenes
atgtctttaaaactcccagataaaggccagtgggcttttatcggtctggttatgtgtctcgtgacatattatactggttctgttgctgtttacttcctgaacggaaaaacgccgctttatatatggaaaaattttgattccatgctcctatggcgaataataacagagagtaatatacggacagatatcaggttaaccgctatcccctctcttttatcaggtatggtttcgtctctcatcgtgcctgtgtttattatctggcaactgaataaaacagatgttgctctttatggtgacgcgaagtttgccagtgataatgatttaagaaaatcgaaacttctgaaatgggagaaagaaaacgatactggtattctcgtcggggcatataaaggtaaatacctgtggtataccgcaccagattttgtatcacttggcgcaggaacccgcgcaggtaaaggtgccgccattggtatccctaatcttctggtcagaaaacactctctgattgcgttagatccaaaacaggaattgtggaaaatcaccagtaaggtgcgtgaaatactgctgggtaataaagtttatctgctcgaccctttcaacagtaaaacacaccagtttaatccccttttctatattgatttaaaagcggagagtggggctaaggatctgcttaaactgattgaaattctgtttccgtcttatggcatgacaggggcagaagcgcactttaataatcttgcgggtcaatactggacaggactggctaagttgcttcatttctttattaactatgagccgtcctggcttaatgagttcgggcttaaacccgttttctcaatcggttctgtcgtcgacttgtacagcaatattgaccgggaactgatactcagtaagcgggaagaactggagggaacaaacgggcttgatgaaaacgcgttgtatcatttgcgcgatgccctgaccaaaatcagggaatatcacgaaacggaagatgaacagcgttcaagcattgatggttctttccgtaagaaaatgagcctgttttatctcccaaccgttcgtaaatgtactgatggtaatgatttcgatctccgtcagttgcgacgggaagatatcactgtttatgtcggtgttaatgcggaagatatatctctggcttacgattttctgaacctgtttttcaacttcgttgttgaagtgacattgcgtgaaaatcctgattttgatcccaccctgaaacatgactgcctgatgtttcttgatgagttcccttcgattggttatatgccaattattaaaaagggatcagggtatattgcaggttttaaacttaaactgctgacgatttatcagaatatcagtcagctaaatgaaatctatggtattgagggagccaaaacgctgatgagtgctcatccatgccgtattatctatgctgtcagcgaagaggatgatgccgcgaagatatcagaaaaacttggatatattaccactacatcaaagagcacaagcaagagccgtggacggtcaacatcacagggcgaatcagaaagtgaagcccgaagagcactggtgcttccacaggagctgggaacgctggactttaaagaagagtttatcatcctgaagggggagaaccctgttaaagcagaaaaggcactttattaccttgatccgtattttatggacagattaatgaaggtcagtcctaaactggcatcattgacgatggaactaaataagacgaaaaaaatatttggtgtgaaagggcttaaatatccgtcaaaagaaaaaatgctctccgtaggagaactggagtctgaggttttattatga

SEQ ID NO: 106321 - DNA, 924 bp, Enterobacter aerogenes
atgttacataaaaaatcagcacaagaaaatgtagccttcgggcttgctgtacttaaatactatcttcgtttcaactccaaagagaatttacaagatgctaatgtgagttcggaggaattgataagcaatttaataaacattttgaaagatactaattttgtttgcacgtcagaaatttcagccacatatccaggaatagatgccttagacaaagaaaataaactaggccttcagataacacatacaaaaaatacttcaaaaataaataaaacaatagataaaatacgcattaataaagttaacgaagaaattgacaccttatattttttcattacatcggaaaggcagaaaaaatacactatcaaagcacaatgtccaaaactaaatgtcacaacaaataatatattagactttgatgacctagctaagctgttatcgaaaagtcaggataaactgagtaaagcagaatccgaacttatgaaagcaatgcctcgtctctaccaagaaggaaaagaacggtatcaagcaatgcttaataacattcttgaaaccagaaataaactagatcgaagagtattcactgctaacaaaatcttagaagaacctgaagaaatgctgttgtccctcaaagagatcaggatagatatacaaaaagatggcataatgaacaaagccaatcctgctgtctctgattcatttaataaaataataaatattattgatgatgtagagagtaaaattgctgtacaatatcccgatgaatacaaaaaatataaagcaaagatccttccatcgtggaattctccagaaaaagaagaatgcttagatatttttatggctataagaaaagatgttttggaacaaatagacaatattgatattgaggtaaataagctaaaaagcattcttgataataacatttag

SEQ ID NO: 106322 - DNA, 435 bp, Enterobacter aerogenes
atgagcgaactgactaaagaagatgaatacggcattatcagccggactatgatgaatattcgttcattgcgtgtgtttgcccgtgagattgattttgagcagttgctcgaaatgcaggaaaagctcaacgttgttattgaagaacgtcgtgaagatgctgaacgtgaagcggctgaacgagcagagcgtgaacggaaacgtcaggaactgcttcagttaatcgccggagaggggttctcaccggaagaactgcttggtctgtctgaagaagcaccaaaatcacgtaaaaaaacgttaccaaaagcgccgcctaaatatcagtttgaagaaaatggtgaaacgaaatactggtctggtcgtgggcgtgcgccaaaaccgattgctgaagcattggcaagcggtcgctctcttgatgagtttctcatcgagaaatga

SEQ ID NO: 106323 - DNA, 258 bp, Enterobacter aerogenes
atgcacacagcgatgaaaaataaatatcacgccataaaacttgataaattattttttcagaaaaatatacaaaaaccttgttttgagggaattattaacaatttaaaaagattatgcccaaatattatagcggaaggtgtagaaaacatctattacaatggattatcaacgaaaactggattatggggcactcaaggatattttttcccttctgtgcctctatctgaaattaaacacataaatagtgcgtggctataa

SEQ ID NO: 106324 - DNA, 924 bp, Enterobacter aerogenes
gtggcaaagcaaaagttcaaaatcaccaactggcccacctacaataaagccctcatcaaccgtggctccataactttctggctggatgatgaagctattcaggcctggtatgagtcagcaacaccttcttcacgaggcagacctcagcgctattctgaccttgccatcaccaccgttctggtcattaaacgcgtattcaggctgaccctgcgcgctgcgcagggctttattgattccattttttctctgatgaacgttccgctacgctgcccggattacagctgtgtcagcaggcgggcaaagtcggttaatgtcagtttcaaaacgcccacccggggtgaaatcgcacatctggtgattgattccaccgggctgaaggtcttcggtgaaggcgagtggaaagtcaaaaagcatggccaggaacgccgccgtatctggcgtaagctgcatctcgccgttgacagtaaaacacatgaaatcatctgtgcagacctgtcgctgaacaacgttacggactcagaggccttccccgggttaatccggcaaacccaccggaaaatcaggtcagccgccgccgatggcgcttacgatacccggctctgtcacgatgaactgcggcgtaagaaaatcagcgcgcttatccctccccgaaaaggtgcgggttactggcccggtgaatatgcagaccgtaaccgtgcagtggctaatcagcgaatgaccgggagtgatgcgcggtggaaatggacaacagattacaaccgtcgctcgatagcggaaacggcgatgtaccgggtaaaacagctgttcgggggttcactgacgctgcgtgactacgatggtcaggttgcggaggctatggccctggtacgagcgctgaacaaaatgacgaaagcaggtatgcctgaaagcgtgcgtattgcctga

SEQ ID NO: 106325 - DNA, 645 bp, Enterobacter aerogenes
atgacttcaaatgtaccaacaagctttgtccgcgcttatctgagagcttcaacagcagaacaggatgcttcgcgtgccctggaaactatcgaggcttttgccagggaaagaggcctgatcatttgcagctactatattgagaatgaatccggcacccgtcttgagcgcccggaactttttcgtcttctgagagattgccaacaaaatgacattttgcttatcgaggatgtggacagactttcccgcctgtcaggggaagactggaatacgttgaagaaaatgatccggcagaaagacatccgggttatggcggtgaatgtgccgacgacatggattaattctggtatgagtgagtttgacagccggttgtttgcagccattaacgatatgctgctggatatgctggccgcagttgccagaagggactatgaacaacgtcgggaacgccagaaacaagggatagagaaagcaaagaaagacggcaaatataaagggcgtaaacctaatcaagccagacatgatgcaattatcaggttgatagaaagcggtagctcctggacacaggtacagaaagtgctagggtgcagccgtggcacaatcagtaatgcgctaaaacgtaaaaccgggcagaaatccagtaagtag

SEQ ID NO: 106326 - DNA, 231 bp, Enterobacter aerogenes; identical to SEQ ID NO: 4280

SEQ ID NO: 106327 - DNA, 294 bp, Enterobacter aerogenes
atggataaaaacgtcgttgatgcgctgaaaacgctattagaagcgttaccggaagaggtggtaacagaagtcacatcaaaactaaatccttcggcaagccatattcctgaagaaaacagtaagcaattgacagcaaaagcaagactactgaatttccggctaaccgaagcctatgaagaaatcctggaagtcgaagctatcagaacaggccagagcaaaactaccgttctaaaggcagcactggcgatgtacaacagccaggaggctttgttgaataaatcgaacttttgctga

SEQ ID NO: 106328 - DNA, 924 bp, Enterobacter aerogenes; identical to SEQ ID NO: 106324

SEQ ID NO: 106329 - DNA, 354 bp, Enterobacter aerogenes; identical to SEQ ID NO: 4285

SEQ ID NO: 106330 - DNA, 447 bp, Enterobacter aerogenes; identical to SEQ ID NO: 4286

SEQ ID NO: 106331 - DNA, 837 bp, Enterobacter aerogenes; identical to SEQ ID NO: 4287

SEQ ID NO: 106332 - DNA, 252 bp, Enterobacter aerogenes; identical to SEQ ID NO: 4288

SEQ ID NO: 106333 - DNA, 282 bp, Enterobacter aerogenes; identical to SEQ ID NO: 4289

SEQ ID NO: 106334 - DNA, 324 bp, Enterobacter aerogenes; identical to SEQ ID NO: 4290

SEQ ID NO: 106335 - DNA, 246 bp, Enterobacter aerogenes; identical to SEQ ID NO: 4291

SEQ ID NO: 106336 - DNA, 330 bp, Enterobacter aerogenes; identical to SEQ ID NO: 4293

SEQ ID NO: 106337 - DNA, 273 bp, Enterobacter aerogenes; identical to SEQ ID NO: 4296

SEQ ID NO: 106338 - DNA, 1728 bp, Enterobacter aerogenes
atgaatccacatctaatgcaaaagctgaatggtattgctgatgccttttcaatatttctgttatggctacagaacagccctgtcatattgtcattactggcaggactaacattaccatttatattcaacctaccacgagaggaaagaaaaaacgctcccttctggttaaaatctgttgcgtgcgtgtccattttctttttcatattcggcacaatatcaccacttagtattcatggtctgagctacctatttgacgttctcgatcccaatacactacttagaataccattatggataatcacaattctctttacactagccggattagcttttcatttgaccgcgcgacgattattagcaggtgaaatagacagcctgaaacacagaatgataaagaaaagcaaacttgagagaaatacaagaacagatgttcgcaaagtaaaagaattgttgccagacagcatagaatacaatcccctagattacattgatttgaaaaaaggggttttcattggcttagacaaagacgaccaaccgcaatatataacaataaaagaatttcagaaacaacatgcagcaatcataggtacaacaggttccggtaagggcattaccgcatcggttttgctttatcaggcaattctgttaggcgaggctgtttttgttgaagatccaaaagatgatgaatgggctgtgcatgttcttagggaagcatgtaaaaaagcaggaaagaaatttgttgtaattaatttaaacagaaccaaccatcaacttgacttacttgctgacatatcacatgaacaattagaagaattatttaatgcaggatttagtctatcaaaaaaaggagaggccgcagatttttatcgtatagctgatcgccgcgcagccagaaatgtagccgcaattcataaaaccggaatgacactgtatgatttattcaacgatgacaacgtaaaatcaataggagaagatgccccagcatttttaggtgaactagaagaaattgctcttgtaaattccgtcaatgcaaaaaatggattttctcttaaagagatttttgataatggaggatgctgctatatcattgggtcaacccgaaatcaaaaaattatttctgcacaacgcatgatacttacgcgtttgattcagatagctgaaaccagagacagaataaacacaactccacgtgttgttgcaatttttcttgatgagttaaaatatcatatttcacgcccaacaatggaaggattaggtacagcacgagataaaagtgtgcatatatttatggccttccaggcaatagatgatttaagagattgcccttctgacctaaatggcgattctgtaattggtgctgttattgaaaacgcaaaattcaagttaatctataaaatccagaatccagaaacagcagagtgggcagctaaaatgactggttcaatattagttgacgatgaaatgaggaaggtgagaaccgacttatcattaacagaaaaagttgatactgaccgcatgataagacaggcagaaagttattatgtagacagtaatatgtttttaaatctacctgaaagagtaggatttgtgttcacatcaaaagatttaccaaaagcaactaaaatgtctcatataccagcaaacaaagaaaccattgaattgctatcttttgagacagaacaaatagaacaacacaataacaacgatgtgccttccagtggtttatga

SEQ ID NO: 106339 - DNA, 735 bp, Enterobacter aerogenes
atgttaattcatgatttttacgaaagaaaaagaatatcagctaacaacatgctttgtcttttaaatttccttaaggatgaaacgtattcagattttcacattataaaaagaaaattaggattcacaaaaaaaagcagaaacccagtatataaattactaaacaaggctcttaaagaaggttttattatcaagcatgaaataccatcatcaaaaagaaaattaactgtttggggtattactatgcaaggattagcaatggttgtaaaagccgatgacattacgttccctagttatttcgaacccagcaaactaaaatactggactcttgagcatcgtcttttaaatcagcgagtgagaatatctctggaaagtaaaggcgctactgaatggattaacggtgatagtgcagccttcatcgcacgttattccggctgttcccatcgccctgatggagtaataaaacaaccaactggcgcaataatggctattgaaacagaacgaacaatgaaaactcgtgctcgctatataagcattataaacagtcatcttacggcaagagataaaggtaactggcattatgctttgtacgtcatgcctgacaccaaaagtaaagaatcattaatcagactgttcgactcaatcaaaactgtaatgaggaataatacacctgtgccttttgatgaaaaaaacagagagatgtttatttttagaacaattgatgaactggaacaatag

SEQ ID NO: 106340 - DNA, 480 bp, Enterobacter aerogenes
atgaaaatattaatcatattcgcattatatatcttgtcgccttcactatatgccaatgcagaggatatacagggaaaagttattcgtgtacttgacggcgataccatcgaaattttacagaataaaacgccagtaaggattcgtctggccaatattgatgcaccggaaaagaaacaggcttacggacgctggtcaactgaccaacttaaaagcctgattgccggacaatccgtcagggtgacatattcacgcaacgaccgttacggtcgcattatcggacgtgtattcacaacaggcggtagtgaggctaaccgctttatggtgcaatcgggtgctgcatgggtgtatgagcattacaacacagataacgctctggcagatctacaacaggaagctcgctcacaaaaacgaggtttgtgggctgaccccaatcccgttccaccgtgggaatggagacataagtataaggtgacaaaatga

SEQ ID NO: 106341 - DNA, 372 bp, Enterobacter aerogenes
atgaatgattgtttcggttgtatgcatccatatcccgccggccactggttttattctttacaggatttacttgctccactactggaaaatcctcttttctacgtcttttccttttttttcgcgggtatgataggtgcaattatatcaagaataatcaaattaattaaaacgatgaaacatagcagtaacaataaagtatcaatagataattatgaccaaattgaaatagaacgctatatgacaaatgaagaggttggcaaattagtaatcaattttatgaaacgcaccaacggagaaccgttactaatagtgttcccagaatatgacaatggagacaataatgacgataaaaatactcgttgtgtcaaatga

SEQ ID NO: 106342 - DNA, 264 bp, Enterobacter aerogenes
atgacgataaaaatactcgttgtgtcaaatgacggccatgaaaaaataattgatctaagtccagttaatgatttagctaaaattacaaaatcattgcgtacatcagaaaacaggatggtatgtgttatccaggacaataatcgtattctccgctgggacagaaactatgcctctcgtgcaaaaaatcactggcgaaaggtagctcctgaccgttttgagattttaggaacagttgaacatattcattatgttggtaagtgttaa

SEQ ID NO: 106343 - DNA, 234 bp, Enterobacter aerogenes
atggctaatgtaccaccaaaaccgcgtaacaacaaaggcgaaccgccaagcctggaggatacacaacacggatttaatccgacgcgtaaaaacgctgatgggagaaaagctcagcttaacctttatgttgatatggaagttaaacgggagttccgctcgattgcagcggctaatgacatgaagcacggggagttactggaggcataccaggaattctggaaaaagcatcattaa

SEQ ID NO: 106344 - DNA, 648 bp, Enterobacter aerogenes
atgacggtagctattgcgctggttaacggtaaaggcggggtgaaaaagtcctcaatgagcagggctattgccacagagtacacaaaggcagactggaaggtattggggcttgatatggatgttgatcaggggtcattcctggattgggggcagcggcgattgagatataaagttgaaccgcccgtcactattcagggatgcggaacggtatcacaggctaaaaaacatattgaatcggggatatgggatttagtcgtcatcgatagtgctgcttatgcaactaaatcactgttgagcctggcagaaattgttgatttgctcgtgttaccgtctggttttagtgtggacgatttgagaacgacggttacaaccgtgaatgcattgcgtaacaagggacactcaacaaataagatggctgtagtttttgtcggagtcagtgaaagcgaaagtgagtatcgtaccgcgcttgaatatcttaaaccgtgtggtgtccaggttatcaatggcgcaataccttttatgacctcgttcagccaggcacaggataaaggattggcattgacggaatccccttttccaggtccacggcagaaagctgacgaagttgtccagggggttattgacttgctgactaaactctcacagtga

SEQ ID NO: 106345 - DNA, 351 bp, Enterobacter aerogenes; identical to SEQ ID NO: 19483

SEQ ID NO: 106346 - DNA, 300 bp, Enterobacter aerogenes; identical to SEQ ID NO: 19482

SEQ ID NO: 106347 - DNA, 270 bp, Enterobacter aerogenes; identical to SEQ ID NO: 19480

SEQ ID NO: 106348 - DNA, 543 bp, Enterobacter aerogenes
atgacaacattttcagaaaaatatcagcctgtctttgaagttgtatgccgtattctggggaacggttggcgtgttaataaactggataattatcagcatcgtattaaactgacttctacagaacttcgtaaatactccatcattattcgtctggagcgtgaaagattttttatcgttggtagtgttgatagtcttgtatggcacggtaatccttccgtctgtacggtatctcttacacgcaatcctgttggtattgctaatgatatatctcggaaaatcctagctaatgcactagatgaaattgaattgctcaggaagcatgagaacgcattacagaaaaaacaagataaagtacaaataatcagagggatgttatcacagttgatttctatatccccttggtatggggcattaacgggatttaatgtggataatgggcttacaggaaaaatactacaaaatggtgatgattatgaaatgcttatcagagggcttaatgttgatcaacttatcaaagtggctggttttataaaaaaactataa

SEQ ID NO: 106349 - DNA, 534 bp, Enterobacter aerogenes
atgaatatccaagaagcattaaatatttttggcttgtctggtcagttgactgaaaaagacatcaaaaacgcctttaaaaaagctgcattaaaatatcatcctgaccgcaatccggtaggtgccgaaatgatgaaggcggttaattcagcattcgattttttaatggcgaatcttgataagattaatcaataccaaagtcctgaacaaagtgcaatatataactatggtgatgaactagaaaatgttttaaaggctctttacggtttgtctggtttagtttatgaggttattggtaactggatttggattagtggaaatactatcgagcacaaagaagcattaaaagaaatagggtgtaaatgggcggcaaagaaaaaacaatggttttatcgtccagaagaacataaaagttactggaaccgtgaagagcacacgatagaggaaatccgcgcaaaatatggcacaagcggaaaattccaggccggaggatggcaacaagttgaaggcagggcaagagttgaagccagagcataa

SEQ ID NO: 106350 - DNA, 300 bp, Enterobacter aerogenes
atggctcgcttaccttatattgaatcaaccacgcaacagatttttatttttaatactttgacactttgtactattggattaattcatatagagactggtaaaaaatatgttgtagtatttaccgataacaataagattcgagattataaaaatggtgtaatagaagaattaggggaaattacgcaagaagatattgaactgattgagtattatgctaaaaaatatgaaaagtattttgataatttaaaaataggtgaggagtctttgaatcttaaagaatatatagaatgtatgcaatag

SEQ ID NO: 106351 - DNA, 171 bp, Enterobacter aerogenes
atgagtgcatttatttttagaaccacatttaaagcaactggtgatcagcaaaaagacgctattacccaaattgaagttatgcaggggttccaagccggaaacctagatttttccgcgaccagtaacggcgtgggttgtcacataaacgaccgattgagtgaccgtcactga

SEQ ID NO: 106352 - DNA, 480 bp, Enterobacter aerogenes
atgggggcttgtgtccgtaaggtgacgcttatgaatgcatggtatcttttatactgtaataacaacgatttagatcgtattgcatatcgttgtaaaactatgaacgttgtagctttctgtccgagatacataaagttcacacctcggaaagattgcaacgcagtgcgcaaggaagaaaaagttttatttcctaactacctcttcctccattttgatgtgaatgtcacgcacacgtcagcaataacctctattccaggtgcaattggcttcgtaagtttcggttccacaatatgtactgtaccggaaaaagtcgttatcgctattaaatgcgccaagatactggcgctaaatcctgatgatgattccatagagtgccgtaacatcggtagtgacctactggcagaaattcaacgcatatcttcaatcatctcaccgttagaacgtcaaacggccttctctaggcttttacagaatcagtaa

SEQ ID NO: 106353 - DNA, 213 bp, Enterobacter aerogenes
atgccgaaccctataggccaggctaaatctacagccgttatttacatcggcaaaaaacgctatgaaacactggcaaagcacgccagagatataagttatgttgcggaggtaaatattcgtccaagtgcctttttgcagtacatgatcgacaaattaagtaatgaagctcacaacgaaatgttgaaagagctaatgtcaaaagaggataaataa

SEQ ID NO: 106354 - DNA, 207 bp, Enterobacter aerogenes; identical to SEQ ID NO: 19504

SEQ ID NO: 106355 - DNA, 705 bp, Enterobacter aerogenes
atgctttccaccgtttcatttatggcggtggctatgcagtgtgccgccacagttcacccctccacatcactggatgttgcgcgggtcgagtctggttttaatccctacgctattgctgagatcatccccaaacgtgaacgccagccaggcgacaagggctttatctcacatatgccaaaaactaaggaggatgcattaagcatcgtcaaacagatagaggcaaaaggtcgtcgctattctgttggtctgatgcaaatcacaagtacaaattttaatagttacgccgtaacggctgctgacctgttcaacccgtgcacaaatctttctgtctttgaaaagatcatcactgattgctaccagcgaggcggcacactgaaacgggcgctgagttgttattactctggaaattttactacaggacaacaaccagaagctgcgttatccagaaccagttacatacagcgaattggttactcacctgaaaagccccgctatgtcgttcctggaaccagggatgatatcgcaactcaatcggccattctgaatgcaacacccgttgaagctccggcacgccctcgcgttgtctggcctggcgcaatcgtgcgcggggttcctgctcaactgcgccagaaaaaggcagataccgtttattaccccgcacaagttatacgcggaaacagattttcaactgaaaaagaggattaa

SEQ ID NO: 106356 - DNA, 297 bp, Enterobacter aerogenes
atgtttaacaaattaaaggccatttgcagccgcgcatctgcttatattctgactccgttagtaagtgttgtcagtccagttttcgcggctgacggttttagccgagcaaataccatcatggaaaaggtttcgaatggtctgcatggtctggcagccgtcaccatcaccgtcgctgtgatctggattggctataagactctgtggaaaggcgaaagcctgtcgcagtgcggttacatcatcattggcggcattttaattggcggaggcagtgaaattggcgctctgctaatgagctaa

SEQ ID NO: 106357 - DNA, 2745 bp, Enterobacter aerogenes
atggcaaagctgcttaaggcgatgaaacgtccggcggcgctgtggggggtgccaatggtgcccctgctgactgtcgtgggcgtgacaattattgttgctatctggacttccatagccctacttctcctcctccctattgagtttctggttatgaaatcactgaccagaaatgaacctctgagatttaacctgatagctgtctggctaagggtaaggggtaatccggtagcaaaccgtttatttggcgcaaccgcatttatgcctgttgaacataatgctgttgatatccaggagtttatcgatgcgatgaagctaaaccaatgtgccaccataaaaaaatacattccttactcgtcacatattcaccctaatgttgtccgttcactgaatagcgattttttctgtacctgggaactgacaggaacgccgtttgattgtgaatctgacgagacactacagttcggtacaaaccagttgcacgggctaatacgctcatttgaaggctttccggttacattttatgtacataacagccgtgaacagtttacggactcactgcataaggtttcaggaaatccttacgcggataccgtgagcgaacgctattacgcatcactgaataaaaggccattccgacgtaaccgcctgtttgtgaccatctgctatcgtccgtttgccagtctggataaggcaaaccgtaaacgtatgaaagacggtcagaagctaaaagagatagacagcgcattacttgaagtgctggaaatcaaaagtacgctggatacagccttatcccgttatggtgctcacgcgctcggtactttcaccgaaaacgaggctgtattctcgtcccaactggcattttatgaataccttctcacgcatcaatggcgaaaagtcagagttacacgtacccccgcttacaacgtaatgggaaatgttgcgctgtacttctccgccgaatcagggcaaataaatcatgttaatggcacgcaatatttccgtggtctggaggtaaaagagttttcggaagaaaccgcaacgggcatgacagactccttactgtacgcgccgtgcgattatgtgattacacaatcctatacctgcatgtcccgtgaggaagcgaaaaaggcgattaagcgcacccgacggctgatgatgagtgctgatgatgatgctgtatctcaacgtctggatctcgatgtggcgcttgacctgctcacctccggtaaaatcgcctacggtaaacatcatttatcaattatggtgttttcgccgtcactggaaagcctgattgcagacacaaacgagatcagcaatgcacttaacaatatcgggataacccctgttcctgctgaaatctcattgtctgcggcctatatggctcaattaccaggcaattacaatctgcggccacgagctggagagctgagtagcctgaactttgttgaactggcatcacttcataatttctatccaggaaaacgcgacaaagccccgtggggtgacgcgatggcactggtgcgaaccccgtcaggtgatggctactatctgaatctgcataacactctggcagataaagacgagttcaacgaaaaaaaccctgcaagtacctgcattctgggtacaaacggttcaggtaaaacaatgctgatgacgtttttacaaatcaatcagcaaaaatataaccgtgatgacagcttttcaccggatgccaagactaaacgactaaccacagtttacctcgataaagaccgtggtgctgaaatcaatattcgcgcacttggaggaaagtactacagggtattcagcggtgagccaacaggctggaacccatttgctctgccagccactaagcgaaacatcaatttcattaagcaactgatgaaaatcctttgcacccgcaacggtgcaaccataacgccacgtgatgaacgtcgcctcaatgatgctgtaaatgccgtcatgagtgatgagcctcaatatcgcgtctacggcataacccgaatgctggagaacctaccggaaccggcaacgcgtgaagcgcaagaaaacggcctgagtatccgtctttcacagtgggcgcgcggtggtgaatttggttgggtgtttgataacgaacacgacactttcgatatcagcaactgcgataatttcggaattgacggaactgaatttctggatgacccgaatgtctgcgctcctatctcgttttatctgctgtaccggataaccagcctgctggatggcagacgacttgttattttcatggatgaattctggaagtggttacgcgaccctgtatttaaagattttgcgtataacaagctgaaaactatccgaaaactgaacggtatgctggttgttggcacgcaatcgccagcggaaataatcaaggatgagatagctccggcagttattgagcaatgtggtactcaaatactggccgccaacccaagcgcagatcgctctcattacgtggatggaatgaaatttgaaccagaagtgtttgatgtcattaaaggtcttgatccacaggcgcggcagtatgtcgttgtcaaaaatcagttccgccgtggagatacaaaacgctttgcagcccgtatcacgctggatctgtctggtatcggcagatacacaaaagtaatgagcggcgacgcacctaacctggaaatattcgaatcactctatcaggagggaatgaagcccagcgactggctggattcctacctggctaaagcactataa

SEQ ID NO: 106358 - DNA, 708 bp, Enterobacter aerogenes
atgaaaagatttcgtccccttattctggcggttcttattgccagtccgacagtaaacgctgcgggtatacccgtatttgatgcaacagcccgactggagaatattgcacaatgggctaaggaagctcaacaatggctacaaacggtacaacactataaagaccagctacaggcgtatcaaaaacaactggaaacagttacaggcatccgtgatattcaggcgttcgttaatcaggccaaaagccttaaagctgacctagataaactacgtaagccagggcaagccctgaacgatttgctcttatccggcggttcttctggccaatttgatgaactgtacaacaaatacaagattttcgataactgcaatgctgaacaatcaaaaagttatgccaatacatgcagacaagaggtcatcaacaaagcaatacaaatcgaacaaaccaatgaagtacaaaaccagattggtgagatgcttggtgagatcaacgaattatcagaccgtgtagcaaatgccaaagatatgaaagaggcccaagacttagcaaacagtattcagttaaaatctgtgatgctaaatacgctcacgacccaatgggaaatgaacgtaaaagcggcagagaagcgtgaaaagatgcttgctgaggaacgccgtaagaaatggaatcagcagcaattaaacgctccaacacttgatttaaacagttaa

SEQ ID NO: 106359 - DNA, 1071 bp, Enterobacter aerogenes
atgtctggtggtgtttttgtcggtgttgaaaaacatctgataggaggcataacagacgctacccaaggtttaatgatgtcttattcgtcaatgatgatggggctggcgggaacgtcagccacaatctacatcatatggagagggtatcaaaccttagctggtaaactgtcgaccccaatggaagatgtcatgtgggatataatgaggatggctattattttatcctttgtggcaaatattaatggttatcttgatggtgttattgatgctgttaatggtttaaaagagggattttcaagtagttcaagtatctggcaattactcgacactttatggcacaacgccaaagtattaggcaaaacattacatgatttagatgattcagaatttatcaaagatgagggaacaattgctgaattatttgtatggggtggtgtgtttgtcttaatgattatcactgcattcgtatctatggttgcggaggttataatcttattgttaggaattacagcaccgatatttatattttgcctgatgtatggttttttacggccaatgttcaataactggctgcaaaatatatttgcaggaatattaaccattctcctgtcctcattatcattaagaattgtaataagttatttaaattcaaggcttgctctagcatccgcaggggccaatcaagcaaatattgtagaacttggcgctcaagtttgtcttgccggagtatgcgctgcaatactggtgtacatatccgcaaaactggctggggcacttgcaggagcaagtgctacagccactatgcaaggtgcggcggctctcggcattggcgctgctgcatacggcgctggaaagatgttaaaggaggcaggaaaagtattacctaaagaagtggcaagcccaagtaataaagggttaggagatccacaatcgcgcatagtatttaacgctgctgatgcacgtaaacacgctatagaacaaatgatagcgcgtaatgaagcgcgaatgctgacagatcaatcagcaccaaaactaccgccatcaattaaacgtttacctcctccaagataa

SEQ ID NO: 106360 - DNA, 144 bp, Enterobacter aerogenes
atgaaacgcttaatcgcgctggctttgctgtgcgtgctttctggctgcgcacaaaaatctaaatctctgccgcccgcattcagcggtcagggtagccctgtaaacacaccccaaattatcgcggagctaaccacacatgactga

SEQ ID NO: 106361 - DNA, 684 bp, Enterobacter aerogenes
atgactgaacagaaattaattgctgattcccgctcgtttgagcagcaaatgattgacagggataaacgcgccacaaaggcaggctttctggtcggtggagctgggttattaatcgctatcctgtcactgatcgcgatagtgattatgttgccacttaaacaaacaacagttgaactctataccgtagataatcataccggacgagtggaacacgttacccgtgcatcaaaaacagccctgacagcggaagaagcctaccaaaaagctatggccgccaattacgttaaattacgtgaacggtacgtttatcctgcattacaggacgattacgagacagtacagatctacaactcaccacaggtaaacgacgactacctggcactgtacgccggaaaaaacgcaccagacaaggtttataataacgcggctcacaccgtgaaaattgaaattatttctgagcagataacgaatgcaacagcaccagacaaagtagccaccgttcgttataaaaaaataattcgtcgcatggctgataacagtattcgcaatgaatactgggatgcacgtttcaccttccattcagaccctgaaaaagaaatgtcagatgttgagcgggaaataaacccgttcggattcaccgtaacaagctggcagactgaccgcgaaatcaggggaggcgagtaa

SEQ ID NO: 106362 - DNA, 906 bp, Enterobacter aerogenes
atgaaaaaactgacgttaattaccctgataataatgctgaacagccaggcatgggccgcagctacaccacaggcgagccgttatgatgcacgtatccagcaggtcatttataacccgcagaatgttaccgttgtaaacacaaaacctggatttatgacgactctggtttttgataacgatgaagctgttatcagtgccagtcctggctttgatgaagcatgggaagccagagcagatgcaaacagggttaacattcgtccggttgcgctcacacagggcgcacctggtgaagacggtaatacaacacaggttgttatcccgccgaacagccgcgactggcataccaatatgctgattgtgacaaataagcgcctgtacaacgttgaactgaatgtcattgatgaaaaatcgccacaacagcccgcatacctggtgagttaccgctatccaggggacgaacgtaacagagccaataaggaagcagcagcacgtcagaaagaatgggaacaaaagcaggaacaagcccagattcagaaagcactgagaaccgcacaaaccccgcgtaactgggactacacgaaatatccaggaaaagacagttacagcattgaacctgattttgcctacgacgacggtcgctttacgtttatcggattctcacccaacaaatcagttccatcagttaccaaagaacagaacggccaagaatacgtggttaacagcagtatacagcgtaagggcaattttaccgttctcgttatccaagaaatcacaccacggcttgtactacgttcgggtgatgccgtagtggggctgaaaaataacggctttggaaaagtacacgcgactgataattcaaccgtatctgacaaggtggagcgcgttgaaaaaacagacaacacctaa

SEQ ID NO: 106363 - DNA, 1026 bp, Enterobacter aerogenes
atgacggttaaaaacatatctcttgatcgctataaacaacgtttttttagtgaatacctggaattaccaggactgacagaaatagctgttaatcgtccaggtgaactctggacaaagatagatggcgtctgggggcaacataccgttgatctgaaatttgacgattgctataactttgcacggtgtcttgcaaaacaccataacgataatatcgaggatatcaaaccaggactttctgcaacccttgaatcaggagaacgatgtcaggttgtcgttcctccggcgtgcgaacgtgacacgatctcaatcacgatccgtaaaccgtcaaaaattcaaattccgcatcaggcatatattgatagcggtttttataaccgcgtcacgggcattgaaaaagcatccacacataacgaagaactgattgaattatacaaatcaaaaaacattcctttgtttatggaaaaatgcgtggagtatggaaaaacattggccgtcgcaggtgaaaccagtacgggtaaaacaacatacatgaaaatgttgatacaatatatacctgtccatttacgcataacgacgatagaagacaacccagagataatattctacaaacataagaactatgttcatctgttttatccttctgagtcatccgatgaaaaaggatctgttgtaacaccagcggcgcttatacgctggaattaccggatgaatccagacagaattttattaacagaagtgaggggtggagaggcatgggattttctgaaaataacggggtcaggccatgaaggaagtatgacctccattcatgctggttcagcacatgaagcaatcgacggttttattacccgctgtaccgaaaacccacagtgtgcgcaattaccatattcattcttgctacgtaaagttctcgactctctggatgttgttgtgagcattgatttagatggaaacatacgccgtatgaatgatatttatttccgaccgttacaccgcaatcaatattacgaggaaatgaaagtatga

SEQ ID NO: 106364 - DNA, 216 bp, Enterobacter aerogenes
atgaatacagatgaaaacatggtattttatctgacaaactccgatcttgtttatagctatgcacacaaaatagtacactccattccatcaggaatgaaaggaaaattcatcacttctattggtgaaactattgaagatttaaagagacgacatcctgatattattctcattacagaatctgaagcattagcattgcaatcggagaggaaaaattaa

SEQ ID NO: 106365 - DNA, 306 bp, Enterobacter aerogenes
atgttaaaagaagatatgttcattaataatattcattcaaggaatcaggacagaatccatgtaaaaagagtctttgatgatattagtaataaagcaaacaggggatgcggactatattatgaaatatatcaagcgaagttaatgcgagggttaattgagcacacagtaaaactgaaaagttctgatgccaataagctgattagttacgctgcttcacaaggttatgaaataacagaagatagatataatgctgcaataaaagccgaggatgaatgtctgactgaaataacacgggcacaagtctga

SEQ ID NO: 106366 - DNA, 1182 bp, Enterobacter aerogenes
ttgtcactaggtggaggctcctataaaaacgaagagtttagtgactttgccatcgaattagaccatcttagcgatcaatatggtgttttatttgttgttgcatcagggaattacattccttacaattacaacccacctctatcagttcgtagatggccagtaaatggttcatatccagatttattatcctccccctcagaatcagttcggagtttaactgttggttctatagcacatttagagactcatgactcttacgttaaagtcggtgaaccaacgccatattctcgtagaggacctgggcctgtctttacaccaaaaccagatgtagttcatcttggtggaggtgtgcaccaagcatggtgctctggcaatacaagcttaaatgtcataggtccagacaatagagtatatggtggttttgggactagtttttcagctcctattatttctagtatggctgcaaatacttggcgttcactagaaggcaatcccaatatttcagtttctccaagccttgtaaaggctttgattatacatgctgcgcaacttaactcacctaaatatgacgcaacggaaagacgttattatggtgcaggaagaccacaaggtgttttggaatcattatatgatagtgatgatagcttcactttggtttttcaggcatctttaattccgaatatgaaatggaggaaatcaaattatcctattccacaatgtcttattcaggatggaaaattcaagggtgaaataattatcaccgcctcctataacccgcctttagatcctaatgctggtagtgaatatgttagagccaatgtcgaactaagcttcggcgtactggatggggaaagtatgaaaggcaaagtgcctatggaaggagaaaaaggaagtagcggttatgaatcagcccaaattgaacatggtggaaaatggtcgcctgttaaaatccacaggcagcgattcccgaatggtatttctggagatgtttggggtctacaggcaaaagtgatgctaagggcaaatgaaccagtacttcctaatcctttagatgtgaatattattgtcaccatccgctctttagatggaaacaactccgtccactcagatggaattagagcacttgacgcgactaactggatcaaaaatcaattatccaaccagttgccaattaatgtttaa

SEQ ID NO: 106367 - DNA, 306 bp, Enterobacter aerogenes
atggtgaccgtcgacccggcttccgccgtcccgctcaaagtcggcgtcgcatcattggtcagcccaccgctggtcagcggcccggtgtgctgcgccacatcatccgtcacctgcagatcgctgaccggcgccacggtagtgtccaccgtgagcacaaagtccggtgagtggccgctgatgttccccgccacatcggtcaccgtggtgctgaagcggtgctccccttcacccggcggatccggggtgaagctccagtgcccgtcctcatccgccaccgcggaacccagcaccgtactgccgtcgtaa

SEQ ID NO: 106368 - DNA, 306 bp, Enterobacter aerogenes
atggtgaccgtcgacccggcttccgccgtcccgctcaaagccggcgtcgcatcattggtcagccccccgctggtcagcggcccggtgtgctgcgccacatcatccgtcacctgcagatcgctgaccggcaccacggtagtgtccaccgtgagcacaaagtccggcgagtggccgctggtgttccccgccacatcggtcaccgtggtgctgaagcggtgctccccctcgcccagcggatccggggtgaagctccagtgcccgtcctcatccgtcaccacggaacccagcaccgtactgccgtcgtaa

SEQ ID NO: 106369 - DNA, 306 bp, Enterobacter aerogenes
atggtgaccgtcgacccggcttccgccgtcccgctcaaagccggcgtcgcatcattggtcagccccccgctggtcagcggcccggtgtgctgcgccacatcatccgtcacctgcagatcgctgaccggcgccacggtagtgtccaccgtgagcacaaagtccggtgagtggccgctgatgttccccgccacatcggtcaccgtggtgctgaagcggtgctccccttcacccagcggatccggggtgaagctccagtgcccgtcctcatccgccaccgcggaacccagcaccgtactgccgtcgtaa

SEQ ID NO: 106370 - DNA, 1884 bp, Enterobacter aerogenes
atgaagaataatgaaattgtcatcttctcagtttccagcactatcacccagcggataatgaatgttcttattgagcgtaaactggaaattcccgtctatgaatttcgttattctgatgttctcaataaagctaatgaaatgatccagtccggcaccaggattattattagccggggcggaaccgcggccctgcttcgcaataacatccctattccggttatcgaaattgcccatgattttcatggcgtataccgcatcctgcaggaagccaaaaataaatcgcagaaaattgccgccattggtttccctcagttttgccgggcgctccggcattaccaaagcatgactaacgacgagtttaaaatctgccaggtctacaatcaccatgacattgaaaatgttataaaaaatctatcagaaaatggttatcatatggttattggcggtttaactgtcgccgaaatggccaagaaatacaatctcaacgtcattgaaggcgacgccgacaataattccattgaacaagctattaatgaagctcatggcttactaaaatatattaatcgggaaaatttaaagttagtcatgagccaggcggcattgaatcagtcacgcgaaggcattatgtgtattgatcaactgggggagatcattaatatcaatgctatcggcatgaccttatttcaatgtcaggttggtgacaaaatttttaaaaaagaagcttttaaagatatctatgccagtatgattaatgagtccaacatcaaagagcaagctatcgaaattaatggcacacttgttggtatctcagttcgtcatttttccaatcgccaaaacacctatgccatcatcactggcttgagccaggaaagtacactttggcagcagactaacagtaaaaaaagtaaatcacgcggctatgccaccagctattcttttgacagtattattgctcaatcgccgatcatgcatcaggtgatacaaaaagccaggctgtgcgctcagcatgagcttccggtccatatcttaggggataccggcacggggaaagaactgtttgctcagagtattcatcacgtcagcgcgcgcagtcatggcccttttatcgccctcaactgcgcggctattccggagagcctgctggaaagtgaacttttcggttatgccgaaggcgcatttaccaacgcgcggaagggaggcaaacctggggtctttgaaatggcctctaacggaacggtattcattgatgaaatcagcgaagccccgctgtcggttcaggtcaaactgctgcgcgtgttgcaggagaagcaattttcccgtcttggtggcgacaccctcctttctgccgatttccgcctaatcaccgccagcaataaagatctgggtcagctcgtcgccaacggggagttccgccaggatctctattaccgaatcaatatccttgaactgcagctcccaccattacgcgacagacccgaagatattatggtgctgattcaccatcttctgcagcaacagaacaagcacctcacctttaccccggatgccgtgaactgcttacagaactatgagtggccaggcaatatccgtgagctgcaggcggtcatctatcgcctcatcgtcttgctggatggtgatacggtggataaagcgatattgcagcagattggtcacctctcgccggcctgtcaccagggcgtgtctcttgttactgaccacgcggtggtcgtggatgagagcgatctgctaaaaaaacaggagaaacagctaatcgcgagcgtgattgaaaaaacggatggcgacagaaccaaagcctcggccatcctcggcattagtcctaccacgctatggcgtaaactgaagcaacataacatcagcggataa

SEQ ID NO: 106371 - DNA, 1164 bp, Enterobacter aerogenes
atgaaactggatatagtgataaaaaacggccagatcgccgatattgaaaaccgtacttatcttaacggcgatattggtattaagggtaaccgcatcgttgatatttttcatcataacgatctacaggcagaaaccgttattgatgctgcgggctgtatcgttcttcccgggctcatcgactttcatggtcatgtttttcatggcggaacagcgattagcgttaaccctgacatcgtctgtttaccaaacggcgtcaccagcatggtcgatgccgggagcagcggatgggtaaactatccgctatttcgcaatagcgttattcatccggcgatggtgaaaattaagagctatttaaacatggtcaacgttggtctctccactctcggcggcgggcccaccggctaccttgaaaataccaatccggctaattacaacgaggaaaaaattgcccaaacgctgagggacaatagagacaacatattgggtttgaaattacgctacagccaggatatcgcccgaggtaaacagtatgccagcgatccgctgttagccactgtcgccctcgcacgcaaactggaaacctccatttgcgtgcatgtcaccgattccctgttgtgcgccgatgaaatgattcgctattttgaagatggtgacatctatgcgcactgtttccacggtaccggtcattccattctcaacgaacaagggcaggtgtatgacgccatcaaagaagcacagtctcggggggtgatcttcgattgttcaaacggtgtcgcccactttgatttcaaagtggcgcaatcggcgatggagcagggattctaccctgacatcatcagtaccgacttaaccctgcgcaatagcttgcgtaccgataaggtctatagcctgctgcatgtgatgtcgaaatatctcaatatgggcatgccgttcttcgacgttatccgcgccgtgaccgccacgccggctcgcctgatgaaaatgcaggagccgattggtaccctgacggcaaacgcgattgccgatatttccattgtgaaattacgcaaagataagatcatctttgaagatacccggggaaaaaccctggagggtgattgttacctcgataactgcgccactatctgtaacgggcagattgtttatcgccgcctgcgtttctaa

SEQ ID NO: 106372 - DNA, 1395 bp, Enterobacter aerogenes
atgctttatttaaaactcttgccgattatctttttcccttttttattttggataataccgcatccggaaggcgtcgccgccccgacctggcatatggtgggtatttatctggccatgctttgtggcctggttttacgcccgtttaccgacgcggtgattatgctgattattctgggattcgcctccctggtactcgaccccgctccactattcgctggatttggcagcccgatggtctggtttattatcagcgcttttattatttgcaaagcgtttgtcattaccgggttaggtaaacgcatcgcttatctgttactcaaacgctacggcaaaaataccctgacgctcggctatctgatgatggttaccgacacggtgctggccccggcgaccggttcaaacatgtcgcgttcaggaggaattacctaccctattttcaggaatatcgctgaggcgttgggttcgaaacccgacgagggtagccgcaaaattggtgcctatctgactatcctgatgtacgtcgtctcgatggggacctcaagcctgttcctaaccgggatggccaccaactcgatcaccgtttcattagctaatgaaattatgaaggtcaatcttgagtggatgacctggtttaaagccgccgttgtccctgcgggactggtgctcattctggcgccctggatcctgtataaaatctatgccccggaactaaaagtcattgataacgtaaatgaaattgcggaaaaaggtctcaatgaattaggcccggtaaaacgcgaagagaagctgctaatcgtattctttattctcggcgtgttaggctggatgaccgggtctatcaccggtattgcctttattccggtagggctcgccttcctcgcctgtctgttgcttttcggcgtcctgagctggaatgacgtggtcagcgaaaaatcagcctggcagacctttgtctggtacggcgccttctacggctgcgcggtggcgttgtcaaaagggggcttctatgtctatctggtcgacgtgattaaaaattatctcgatctctcgcatttgagtgaaatcagcgcgattgccgtgctggtgtttatcagccttgcggtccgctatttcttcgtctcaaacagcgcctttgtcgtctctttctatccggtactttttaccctgggtatgaccacgcaggcacatccgatgtacgtagcgctctccctggccttctccgcaggctatggcgcgttattgacccactatggcaatggggctggcgtatttacgttctccagcggctacgtaccacagaaaaccttctggatgctcggcaccattatggttttagttaacgttttaatcttcttcttaataggtattccctattggaagcttatcggcatctga

SEQ ID NO: 106373 - DNA, 699 bp, Enterobacter aerogenes
atgactattggcaaccgtgtatttttaaaacgtccggcaggaaatattgccctgctgaaagaatatgagcacctgccagcggcaaatattgcggacacaatgaaccgtatcgcggtattaggcaacggcatcaagcgtatttcctcacccaaaaaaccgattatggccggttttgccattacggtaaaagcacgcgccggcgacaatttgatgcttcatgctgctctggatatggcgggggaaaatgacgtcatcgtggtctccaacgaaggagaccgctcgcgggcattgatgggcgaaatcatggtggcgtatgcctactaccaaaagaaaattgccggtatcgtgctggacgggccgattcgcgatatcgacgcgctatcggtgcttgattttccgctctatgccacaggctcgaatccggcaggccctttcaaaatggggcccggggaagtgaatacctccattgccgtgggcggcgtcgcggtctgtcccggcgatctgatcgtcggcgatgcggacggcgtcattgtcatcccactgagcgatgcagaaacagtgctggataaagcgaaagagtacgccaaattcgatgccagcaaagtggacgccgccaaaaacggcaccgccaatcgccaatgggttaaaaaatcgctggatgcaacgggcgtcgaatttatcgacgacacgtatcgttaa

SEQ ID NO: 106374 - DNA, 954 bp, Enterobacter aerogenes
atgacgtataaaattctactcccgcaagagatcatggccgaagggagagagtatctggaaagccggggctaccaattaattaatggttccgggatggaagaggaagatatcatccgcgatattggcgactgcgatggtattatcgtgcgcctttcaaaaatgtccgaccgcgtttttgaagctgctaaaaaactcaaagtggtggcccgccatggcgcaggttacgataccgtagatctggagtccgccaaacgtcatggtgttgtggtattaaatgccccgatagccaacagcatgtcagttgcggaactgacaatattttatatgctgcactgctcacgtaatttcaagctggtcgaagaaaaaatgcttgaagattattactgggcaaaactgcgtactccgaaagttgaacttgatggtaaaaccctgggtttaattggcgtaggaaatatcggctcacgcgtcgcgttaaaagcattgcacggctttaatatgaaagtcattgcttatgatccctataaaacgcagcagcagatccccgagggtgtcgaacttactgacgatttcgaccgaattttcaaagagagtgatttcgtttcgctgcactgcccaacaacagcggaaactaccgacttcgtcggcgaaaaacagttctcaatgatgaagcacagcgcctatttcattaataccgctcgcggcaaactcgtcgatgaacacgcactttatcacgccttaagccagcaaattatcgctggcgccggtgttgatgttttgaagaaagaacccttcgatgccaacgatcctattttcgcgctgagcaatatcgtcatcggcccccatattggcgccgccactatcgaagcaaccgacagagcgtctttacattccgccatcggcattgacgaagtgttatcaggcaagaaaccgtcctggccggtctcaggtttttaa

SEQ ID NO: 106375 - DNA, 276 bp, Enterobacter aerogenes
atgaataatgcccagattgaaatgttctgtgtaatggtacaaacggggaatattcatcatacggcacaacgttttggtgtcgatgccgcttccattaccagcaatatttgtgtactggaaaatgagattggttttaatctcatcgtgcgagggaaaaatatcaggaaggtgatattaacggaaaagggaaaggctttttacaagctaacgccggagattctttgcatactgaatgctatcgccatgattcgttgcgcaaagagcctggctgaataa

SEQ ID NO: 106376 - DNA, 195 bp, Enterobacter aerogenes
atgctcaagaaatcagatatacggagtgcctttattgtcagggaaggagacgccatagaaggtgatgcgctcattgatgtagagttgataggtgttgatattcacatcatcagcaaagctggttttgatggcagccgggtgatgtgctggtggtctggaaactggatcggctcgggcgcagcgtgcgcgacttga

SEQ ID NO: 106377 - DNA, 1608 bp, Enterobacter aerogenes
atgacatcttttactgacgataaccttagagaagatttagcttcaaacgaagatggtaaaggcggttacctcgtagggtataaacggaacgatgtttacgatggcactgtttcaggttacttgaatgcagcagataaacacgtcactccagaaatgttcggcgcagctggagatggggtgaatgacgatacattggcagtacaagcagctatcaattattgtctgaataatcctcggatatctggagttcaaggctttggttgctacgcagtatctggaacattatttctacgagcgcctgggtatggattccgattttatttaaggagtctagtcacacactcaaactttcctaccttctcatcatggaaaaatgccactcctatgattgatataggaacaggagcatctggtagtcccgttggattaaatataacatgtgactatgtcaatggtggagaaaaagcaaactggattgcaataaatagttatggttgcggcggatcacattttcatgccggtcgattaacaaatgtcgttataggtgtccattacaatagatttaactacgtttcatcgtcaaaccttatttcaggagactactggtataatggctggcaagcagtccgagcaggcaaacttgatggcgcaacttccacatgtgaaggaacacgcgtcaatataaatttcgtcaccggatttaagtatggcgctcatcatctttcaaatggttctcagttttctgaattattaggacaatgtgactttaatggacgctatgtcttagaaattgttttaaaagacccttgggtatcttcaccagtcagaggtgataccattactaatggtacaaacaatggtgaaatactatctatttaccagcaccccgttgaaacttataaagtattaattggctttgaaagaaatcaatctgagaatgcttccttttcggttggagattcattaacatcaacatcaggatttagtggggaaacacaggaaattaatcaaccctcacttaacaactggtatccagacgtgatccacgatttttacggatatacattcggaaagtgtgaaataagactcccatactgtggcggtgtcgttggtggttatatccactcatcaagaataaactggtataattcaacaaatggaagaacaaattataacgatggtgcaatgacaacgcattctgggtctacattatcagaatatgatgcatattataattcgcagatttgggctcatgttcaatcaacttatagcagactttacaatcacctgtatatgggtggaaaaagaatatatggaacggaagttggtgccactttaagacagggtactactgccaacataatgacatttacaaaggctggtgatggaacgatgtctgacctcaaagaggtatggcgtgcaacgttaactgcgcaattgaccggtgttagcggagaagtattgatttatgtttcctcatcagctttaactcttgtcaataactctgtcagcggcttgaatttgtctattgacggcttaacacttaaagcggttcagggttcgcagtcaacaatgagagttttatttaatttccagagaatcctatga

SEQ ID NO: 106378 - DNA, 792 bp, Enterobacter aerogenes
atgacaactattattcgcaataaagacgtaatcattgctaaccctcaacttaagccgatttataccccattcgtggctgagcaaggcctgttggctgcatggagattcggcgatggaatggatgatctgagtaacaacgcaaatacactcactccaatcggcgctccagtgaccggcgaatactatattagcggcgataaagataatggatttatcacctccgttcctgacggactgcaacgtactctgattgctgtttggagaaatcattcatcttcagatgcatatgcgtatccagtaggtaaccttgcgcagtctgcatcagcacaggggattggtattggcttgaaaagtaacagtagtgcctcttcaaatttgattcgcaccagcggtaatgtaggtggcacttcaaaaaccggtaatctgttagccattgcggatggtccatcagaaacatatgcaaatcgtgttaatttccgttgggcagcttttacagttgatggtgcaagcaataaggctaatctttacttgccgaaactgaatgcttcacttattccagcgaccattgcttcaggtgcaaatcttgcaaccagggacatcactgaaggtggaatcagcagcatgttcaggcttatcgctttccgtgatccgtcaatgccgcctaacttacccggaacggatattgatgtagctgaagtactcattttcgaccgagcactggatcttgcaggtcttcaaagaacatatgcccgttcaaaaacctatcttgcttcatttggacaggatatttaa

SEQ ID NO: 106379 - DNA, 123 bp, Enterobacter aerogenes
atggttggggaaaagccggtgatcctctcactgcaggaagaaccactgggccacgcggtaatctccgcgacagtgaaggcgatttacccggtgaaagctacaccgatacttccgggacgctga

SEQ ID NO: 106380 - DNA, 1113 bp, Enterobacter aerogenes
atgcaagccttcggtgttggttcgttttacttcagcctagacttttctaaaaccccatccaaccttacagttggatcatttgtgagtgaaattcatagagtttttgattccatacaatcagttagcgatttggagttagattttgatgaagaaatgtgtccctcagatgcactcataaaccatgaagtttgggatgataatacaatcccacctgatactatatttccttttattccgctacttgaggttaaatttacactaacactgctaaagacttatcaaagaaaattacttggttatatagatgaatcagaaaatagcatgtcgacagatttattttacgtagaaatcagttacaattaccaatcaagtatatcaattgtaaaaatcgataacagcaatagaaaaagcgttggttccaatgcaattaaagttgtccgggattatcttaaatctgaatttagaagtgcaaacacttttgtcaccttcaatatattaggaccttcaccatttcatgcagacttttacctttctcatgatgacactttaaaaaccaataaaataaatcttattgaagaaattggctatgacgaaatagaaatcattcttggaagagatgatgaatcatcgtccctaagccaagaaaccagatttatgttggatttcaaaagcgaactggatactttttatgattgtattactatgcgtaactggtttatgcaccgctgggttgccattcgagaggacattgaaaaattagaaacatatcagaataagcgctttagtccattgttttattttcaaaagagaagacttatatccagcatactccttgagctttggaaatttaacaacgataaaattgccgctgaaaatgaagtcttaaataaacactcaaagttcccctaccataaagatggtgttataaaaaatttcattgacaaagaaataagcagcgccccaaaatactccgtcaaagaaaccatagagttggtgcaattttttgagcaaaaaaactctaagtcatttgaattaggcatggctctgataacatcaattattggcggtgtcataggtgccatagttacttctctgacgtcattatccacttaa

SEQ ID NO: 106381 - DNA, 216 bp, Enterobacter aerogenes
atgaaaacattcaatcaaattaaaagcctgatcggattttgccagaccgatgaatttttccttgaatacctacaaatgctccaggctgcgggggttattcatcccgttgaaagcgatattgatgctgacagcaaaactgtcagtgatgatttttatgatcgtcttgccagcgtgtatggcattgaagcagaggaaacactatggcaacaggactga

SEQ ID NO: 106382 - DNA, 3030 bp, Enterobacter aerogenes
atgaccgctaattatcccgccagtattctgccacccaacgccaccgccgtggagcgggccatagacagggccagcgccgccgcactggagaggttgccggtatatctgatccgttgggttaaagatcccgacagctgcccgctggcactcctgccgtggctggcgtgggaataccaggttgatacctggaatattaactggtcagaacaaaagaaacgcgatgcgatcaagcgcgcccactacatccaccgccatcgcggtacggtcgccgccgtccgtcatgccctggtggacagtccttttgggacggatattgttgaatggttcaatcagaacccgaaaggggatccgtatacctttcgcctgaacgtttatcagaacgatttgccggtgacggaatacgaccagcaggatctgaaactggcggtgctgcgcgccaggaacctgcgcagctggttttccgttcatgtatttggccgacttcagggaacctcatatgcggccggttacatgtacgccacggagaaaatcacgccgcgatttgtcccgttgcaggtgattttatcccgctacgagctgaatctggcccccggtgacgcggaaacggtcacggtgaccatcctccctgaatacgcggaagataaaacctatacggtaaccacgtcggataaaacaatcgcgactgcccgaatagtcaacggcgctattctggttacgggcgtgaagcggggcgcctgttcggtcaccgtcacgacgactaacggtgtcagtgcggtgatcagtgtgaaagtggtcgcggtgatgaagttcatcacccgcatcgacaatgcaagccgtccgttgttctacgtgcgcatggatgaggattttacaattgattacggcgacgggacagacagccgggaatacaccttcgaccacgcgagtgcaacctggggatgggtgatccccacgcgcttactggaggagggccaagaatacaccataacggttaaaaacactgaaagcgccagtttccagcgcacgtcgggtaacgtttcagtgacgttgaaccctgtgcaggaaatcatttttttgacgggagacagggacaatcttgtttctttcgcgagtggcgcaactggtctttacaaggtccatgccggggcttttgatgacctgccaaatatccagaaatgtacctccatttttcggggctgctcgtcgctgactgaactgccagagggtttattcgcgcggtttactggtgccacagatttctcggcggcgttttatggctgcacggcactggctgctgttcctgatgggctgttcagcgaattatcgcaggtgacgctattcacctcggtgtttgagaattgcacgcgcctgctgagtgctggcaaaaacacattccggggctgtgctgctgcgacgcatttcaccagtgcgttttcgggatgcacatcccttatcgataccgggacgggcatttttgacgggtgtgtcagtggaaataacttcggttataccttcgatggatgccgcgcgctgacaacattgtcagcagatttattcagcgatgtgcctggtggcgtctttacagcgattttcaggagctgtacggcgctgacgcagctaccgccgcgcctgttccgcaactgcctggaagctacgcatttcggcggggcattcagtggatgcacgcagctgctttctgtgcctgatgaattctttaaggatttacccctggttaaccattttggaaccgttttttccggctgttcttcactggtaaaagcgggaaaagctgttttttctggctgtgcgcttgcgcaaacattttcctccgctttttactattgccgtgttctggaagaagtgggtgatgatatttttgaggggtgtgttagtgcaactacctttgccagcgtcttcaatagttgcacagcattaacggcgctaccgtcgtttgtggactgtaacaaggcaacgagttttgaccgggctttctatgcctgttcttctctgacagccgtcagagcagaggcctttgcaggtaaatcactggtcacgacgttctattatgcattcacccaatgtacatccctgaaaaccataggggccggggcattccgtgactgtagttccctgactaatctgacctatacatttatgggctgcacggcgctggtatcgctggccggggatatgtttgcaggatgcagcaaagtgacgaatatcactagcctgtttaatcagtgctcgggccttgccgtactgcctgaaaagctgttcagcgatctgacctctctgacggcaatggggagcaccttccaggactgcaccgcgctggccgcgctgccgtccgatctgtttgcgggttgtgtcaacctgacttccctgacgctgacgttctccggctgtactgcgctggcggtattgcctgctgatttactgaaacataacaccctgctgatcagtgccggttctacgttctacggctgcgcggcgctggtgagcattccgccgtcgttgtttgcatcgtgtccgcttatcaccgcattcggcgcaacgttccagaataccggcgtggtggaaataccggaaaatctgttcagtggtaacccgctggtgacggcctacggccagaccttcaggggatgtaaaaacctgcgctcagtgcctgccggtctttttgtcgccagtatcaacgccacgacattcactaatgtgtttgccgagtgcatcgcactggaagaggtcgggcccggtctgctgaataacttaccggccacgacaatcggctacctgtttgacggctgcgtgcaactgaaaaccaacgtcagcacgatattcaacctcagcagttattcgacgattgtcaccacgacggccacattcaggggatgctctgccctcacgggtaagggcctggtatttatgggcaaggtgccaaacgtcacggcgcattattacgcgttctatagctgtaccagcctggacgatttcgcagatttacccggtaactggataacgaataaattatga

SEQ ID NO: 106383 - DNA, 1977 bp, Enterobacter aerogenes
atgcgaaatataaattcaattatgatgagactagcaaagagagcagagaaactacagccagaccatctgcttaagtcctttgttgatgtcggacccacttataccttattatcaagtaacgataaccaaataatgtttggtagaagaggcactgggaaaacacattttttagctgtcctttgtaataacatccaacaaaaaggcatcatttgtgtgcctatagatatgagattgataggttctactggaggaattttctctgatcccaatattacattaagtgaaagagccaccagattactttcggatacattgtgtaatatacacgaagtgatcttagactacattttcgaaaaagatattgaaaacaccacagaaatagctcaattactgaatgattttattgagaaatcaacctcattaaatatcgaaggtactactgaggaagaaatatgctcggcaaatcatagctctttcaattcgtctttagatgctcgtgtaactaataaaagcatctctgcaaacttctcattatcagataaaacttcatcagataacagtgagagaacaaaggtttcaggcaagaaaacattaaggattcactttggagaaataaccaaactacttagcaatatcgtttcaaaactaccagaaaaagaattgtggatattaattgatgaatggtcagaagttccaatggatcttcaaccctatcttgcagagctgcttcgtagaatattatatccaatctctggtattacagtgaagatagctgccatcgctcacagatgtaattttttaataagtgatcaggatacaggtgttcgtgttggaatcgaacttggatctgatgcttcatctgttatcaatttagatgagtatatggtttttgataatgatcgtgatgctgcaaaaaactttttcaaaaatctacttcataagcatgcacaggcaatagataaaaattcaatatgtgacgctgaggcaaatttatttattaatgatgtatttactcaactatcagcatttgatgaatatgttcgagccgtggaaggtgttccacgagatgctataaatatcatttcacttgctgcacaatcggctctagaaaacaaaatatcaattgtacacgtacgtaaatcggctcaaaaatggtttcaagtaaacaagcatactgctctcaatagcaaacctgaagccgttgtattgcttgataaaatcataaatgaagttattggtcatagaaagaccagaggcttcctaatcagtaatgaaaaccatcatccactgatcgactatctgtatgatatgagggtaattcatgttttaaaacaaggggtctctgctcgaaacacgataggaaaaaaatatactctctacactcttgactacggctgttatgtagaacttatgtcatctagctctgctcctttgggtttaataatagaatcagatgagaatgatgagttacgatatattgagatacctaagtctgattatagatcagtcaaaaattccattttagacatcgaaaatgacaatcaattaagattgaatttagtgacatctactgaccatcttcaacttcctgttaagggtagtaaacataaaaacgttgaaaggcatattgataacaagataataaattccatacctaaaaatattggttcattgaagatagcagggacaatatacataccaataatcatggtggccttggtattaaggaaagctagaggctttgagaaaagctatgctgtggaactgacgaaaataataaacgagcatattgttattgatgttaatagaccgaaaatagcaactaacaatatgtcgagagaacttaggaaggatgatatactggatcttccatggttagaattccatgtgaatggaagaaaccctcagttctctttacgctctaattggaaagagtactggaatcagtattttggaaaaaaagctccatcattttga

SEQ ID NO: 106384 - DNA, 1695 bp, Enterobacter aerogenes
atgatagctccaactaaaattgagcggttaaggcgtatcaccacgcggcaagagttagctgctttattaaatgtaaaaactcatttcttaactaatgtcctttatagaaatggagttaacacacagtacagtcagtttcaaataccaaaaaaagatggaagttttagactaatatcatctccttcgtcaagacttaaagatattcaaaggcgtttagcagaacttttgtacgaatgtcagggaaatgtacatattgaaaggaaaataaatcctgtgttgtcacatggttttgaaaaaaacaaaactattattaccaatgcaaccaggcatcgaaataaaaaaatattactgaatattgatttggaagatttttttgattcaatcaattttggtagggtacgtggtttctttattgcaaataatgattttaaattatcaccattgattgccacgactatagcccaaattgcatgttttaataatacccttccacaagggagtccttgttctcctataattagcaatctgatatgcactattcttgatattagattaagtaagtttgctaagaaatatggatgtcaatattctaggtatgctgatgatattaccttttctacaaataaagaagaattccctaaagagctagtaattgataatggtgctgtaactgtcggggctatgttactcaaagaaattgagcgcgcagggtttaatataaatgatagaaaaacaaggttgctttattcaacttcccggcaggaagttactggcttaactgttaataaaaaagttaatgtcgacaacaagtattacaaaaaagttagagctatggctcacactttatacaaggatcaatcttttgcaattataaaggaaaatgctgaaccgcgaaaagggaccctaaatcaactagaaggtatgatgtccttcatcgatagtatagataaacataacaataaattaaacctagttaacaaacacccccaaaagtatcaatcttttaattatggtttgaactatgaagggaaatattttcatgggttacaatctcccactatacttgtcgaaggtaaaacagatagaatctaccttaaatgcgcgttacggtcgctttatttaagttaccctacattagtgaaaaaaaatgatgcaacagataatatagagcatttgcttaatttttttagggaaagtacaagaacaagttattttcttgatatatctggcggcgcggctgagtttgaaaaattcattactcgttacccagaacaatataagcgctttaatcatactcctctttctcctgtcattatggttttggataacgatagtggcactagaactatcgttagaaaaatagcgagaatctttgcagtaacagaggattctattaaaaaaaatagtttcacacatatcatgcataatttatatattgtactcacgcccctccttccaggagacaaagattcatgtatggaggatctttttgatagctctgtattaagtactattattaatggacggtcatttgataagtctaataattacaataaaagcactcactatggaaagaatgatttctcattaaaagtgattaaggataatgaaaaaactataaatttttcaggctttacgccagtactaaatgctgtgcgagattgtttggcgcattatactagcctccctaaatga

SEQ ID NO: 106385 - DNA, 1017 bp, Enterobacter aerogenes
atgtctctaatccaatacccaaaaatcttgtttcaaaaggacacatacagcgttttatctgtttctgggggaaaagatagccttgcaacgtggttacttgccgttgaagcaggaattaaccatagcgttgtatttgctgatactggacacgaacatcctcagaccatggagtatctcgattatctcgaaatgaaactagggccggttgttcgcgttaaagccgatttctctgatcgtatcatgaaaaaaagggagtttattagaacagcttggccgatttcactggtaaatgagtgcggacttacagaggagcaagcggattatacagtagagcgagcgcttaaaattttgtggcccactggtattccttttctggatctctgtatgtggaaagggcgtttcccttcgactcgggtgcgtttttgtacttttgagttgaagcatgcccctatcaagaaccaggttattgatccgctacttgataactatgacaacgtaattagttggcaaggggtacgagcacaagagtctccagcaagggctgatttacctgagtgggaagaagatgcagatgatagacccggcttatgtatttatcgtccgatccataagtggctgcatgatgatgtttttgctattgcacgccgccatggcatcaagccgaaccccttatatttacaaggatgcgggagagttggatgcatgccatgcatccatgtcactaagggggagttagcagaaattttcgctcgctggcccggagaaatctcgcgagtagctgaatgggaaaaacttgtcgctgctgtaagccgtcgcggtaactcaacattttttccgtctacaaacgatccccacaaatcggaacgtcgaattgaatttatcactctagagaagtacgggattgagtcatatcgcgactgggccatgacgacaagaggggggcgtcaattcgatttattggctggcatgaataatggcgtcagctgttcaagcatctatgcgggcgtatgtgaatga

SEQ ID NO: 106386 - DNA, 1464 bp, Enterobacter aerogenes
atgcaaagtattgctaatgactttcctataggaagcatccttttatgggaagccaatgaaaaagaaaagttgcgttcaacaagaaatattgctggttatttacttcctgaccgtggtgaaaactggccagtcaattatgttcttgatggacaacaacgcctgtcttccatttatggcgtctttagtggtgatactcagcaagatgcatcaaacgcaaaatataatccatcattagatatatttgaaatttattatgattttaaaaacaagcgtttcttaagtaaaggtgaagtaaccgattttaaaacgtgtattctcttaagaaatattattgatccattaaaattagtcgatcaattaattggtatggattctaaattccatcaagatgcgaaatctttatcatctaaatttttaaattatgaggtgccagtagttcaaataaaaaacagaacaaaagaagaggttggggtgatatttgaacgtattaataacacggggactaagctaaataccttagatttgatgacagcttggacttggacaaatgattttcatttaattgattcaattgatgaacttgtggaggagcttgaagataaaggttttgggaatatagataatagactgatacttcaggtgatttctggtatgcttataggctcaactaaaacagaaaatatcttgagactaacgggcgataaagtaagagataaatggaatgatgttaaggaggcaatgagaaaggtcgttgatttccttgccacagaaatacaatgtaaaaatatcgacttcctaccttatcatcagcaacttatcccattgggaagaatgtactataaggaaaaaaaaccatctgctgacctattggatgctgctaaaaaatacttttggattacatcattctctgatcgttattcatcaggacaaactacagcaaaaatggactctgatatttcaagctttgatgcaatgatagatggggattactctgtactgaaaagatatactgtcagttgtacacctaaagaaattattgataccaaattctcgaaagcaaacccactaactcgcagcgtactgttattgttatcaacactctctcctattgaccttgttaccggttcaagaatagatgttggaaaagcgttgtcatcatataatagaaaggaatatcaccatatcttccctaatgcatatctaaaacgcattggtcattcgactaacgaaattttctccatagccaacttttgtttcttatcatctgcttctaataagaaaatatctagtaaagaaccatcagactatttccacagtatcatacataaacaaaaaaaagaggccattctcgaaagtaatgctatcccattagatgagaatatcttcgatacaaatgattattcagcatttcttgaacagagagctgacataattttaaatagattgtcaggcttgataagttaa

SEQ ID NO: 106387 - DNA, 1308 bp, Enterobacter aerogenes
atgcaagcactgaaaatcgccgttatcggcggcggcagcagctacacgccggagcttattgaagggattatcgttcgttatgaacagcttccggtcaccgaactggcgctggtggatgtcgaatccggcagggaaaaggttgagatcattgccgcgctggcccggcggatgttgaaacataaagggctggagcaggtggcggtcagcgtccactttacgctcgatgaggcgatccgcggcgccagctttgtgctgacgcagctacgcgtcgggcaactggcggcgcgcgccgcggatgaacggctgggtctcaaatatcatctattgggccaggagaccaccggcgtcggcgggttcgccaaggcgctgcggacgatcccggtgatcctcgaagttgcgcgcaaagtggaacagctggcgccggaagcgttcattcttaactttaccaacccggcggggatcgtcaccgaggcggtcagccgctacagcacggcgaagatcatcggcctgtgcaacgtgccgatcaacatgcagcacatgatcgtcgggatgttaggcgcgcaggagtccgaagtaaaactgcgctttgccgggctcaaccatatggtttgggtgcataaggtgctacaggggcgcgaggatgtcaccggcaaagtgatcgatatgctctgcgacggtaaggcgctgtcgatgaacaacattaaagaactgccgtggccggcggaattcctccgcgcgctaaaggcgattccgtgcccttatcatcgttatttctggctgacgccggcgatgctggcggaagagatcgccgcagcgaaaaccaaaggcacccgcgccgagcaggtgatgaaggtcgagcaggagctgtttgcgctgtacgccgacccgcagctggaagaaaaaccagagcagctgagctttcgcggcggcgcttactactcggaagtggccgttgagcttatcaatgcgattcacaacaacctgggcgcggagatggtggtaaacacccgcaacaacggcgcgattcacggcctggatgatgatgcggtggtggaaaccaacagcattatcgatgcgcaaggggcgcggccgctggcgttcggcccgctgccgccggcgatgaacggcctgacgcagcaggtgaaggcctttgaacggctgacgattgaagccgcggtacacggctgccgcgagagcgcgctgctggcgctggtggctaacccgttggtcggtaacgtcaccgatgcccaggcgctgctggatgaagtgttaacgataaaccgtcaatggctgacgcaatttaactga

SEQ ID NO: 106388 - DNA, 1353 bp, Enterobacter aerogenes
atgtcgaatacaagctggattgaacgttacgtcatgccggcggcgctgaaaatcgccgggcaaaagcacgtcctgtcggtacgcgatggcatcattctgaatatgccgtttatgctgattggctcgtttttcctgattttcgcctacctgccgatccccggctatgccgacatgatgagcggcctgtttggcgaggtctggcgcgataaaatgctgtacccggtgaaagcgacctacgacattatggcgctgatttccagcttcggcatcgcctatcggctggcggagaagtaccgcaccatcgacccgctgagcgccggggcgatgtcgctggtggcctttgtgatgactatcccgcagaacaccctctttaccccggtacacggcgcggcggaggtgattaaaggggtgatcccggtgagcatggtcggcagccaggggctgtttgtcgctattgtcatttcgctgctgtcgacggagatttatcgtttggtcgccagccgcaatctcgttatccgcatgccggacggcgtgccgccggcagtggcgaaatctttcctcgccctgatccccggcttctgtgttctggcggtggtgctggcgctgcgcctggcggttgaggcctcgccgttcggcgacatcaacagcatgatcgccactttgatcggtattccgatgcatcacgtcggcggtacgctgccggggatgattatttcggtgatagtgatcggtattttgtggacgctgggcctgcacggcgacgcgattgtgctggtatttattcagccggtgtggctgtcgaatatgtcagagaacctgacggcctttcagaacggccagccaatcccgcatatcattacccagcaattttacgatctgtggattgcgcccggcggcaccggcgcgctgctggggctggtgatatttatgttgctgcgcagccgtagtcagcagatgaaacagctggggaaaattgccgcgccgggagcgttgtttaacatcagcgagccgatggtattcggcatcccgctggtgatgaacccgtacttcttcctgccgtttattttaacgccggtgctgctggtgatcgtgtcctataccgcaatggcgaccgggctggtggcgccgccggccggaatcgcactgccgttcactacgccgatcttcatcagcggctatctggcgaccggcggccatatttccggcaccatactgcaggtcgtgaatttaactatttcgctggtggtttactatccgttcttccgcgcctgggatcggctgaaggccaaagaggagcacgcctcagcgcagccgcaggagagcgttatccttcctgacgctgaccgcgcgtaa

SEQ ID NO: 106389 - DNA, 1656 bp, Enterobacter aerogenes
atgaatacccttccccgctggtggcaaaacggcgttatttatcaaatctacccgaagagttttcaggacaccaccggcagcggtaccggcgatttacgcggcgtcaccgcccgtctcgactacctgcaaaagctcggcgtcgatgctatctggctgacgccgttctacgtctcgccgcaggtggacaacggctatgacgtggcgaactataccgctatcgatccctcatacggcacgctggaggattttgaccaactggtcgccggagcgaaagcgcgcggtatccgcatcgtgctggatatggtgtttaaccatacctcgacggaacacgaatggttccgccagtcgttaaataaggcgagcccgtatcgccagttctatatctggcgcgacggcgagccgggagcattgccgaataactggcgttcgaaattcggcggtaacgcctggcaatggcatgcggaaagcgaacagtattatttgcatcttttcgccaccgagcaggcggatctcaactgggaaaacccgacggtacgcgccgagctgaaaaaagtctgcgagttctgggccgatcgcggcgttgatggcctgcgcctcgatgtcatcaatcttatctccaaggagcaggacttcctctccgataccgttggcgatggacgccgcttctacaccgatggcccgcgggttcacgagttcctgcaggaaatgagccgcgatgtctttacccctcgtggcctgatgaccgtgggcgaaatgtcttccacttcacttgaacactgccaacagtacgccgcgctggacggctgcgaactgtcgatgacgtttaattttcatcacttaaaagtcgattatcccggcggtgaaaaatggaccctcgcccgtccggactacgtggcgctgaaagcgctattccgccactggcagcaagggatgcataaccgggcgtggaatgcgctgttctggtgtaaccacgatcagccgcgcatcgtgtcgcgcttcggcgacgagggcgagtaccgggtgccggcggcgaagatgctggcgatggtactgcacggcatgcagggcacgccctatatctatcagggcgaagagattggcatgaccaacccgcatttcagcaacatcagcgattatcgtgacgtggaaagccataacatgtttatcgagcgcgcggcgcagggacaaagcccggatgaactgctggcgattctggccagcaaatcgcgcgacaatagccgcacgccgatgccgtggcacgatggcgagaacggcggcttcagcgatggagaaccctggatcgcgttgggtaataactatcgcgagattaacgtcgaggcggcgctggcggatccggaatcggtgttttacacctatcagcagctgatcgcactgcgaaaaaccacgccggtgctgacctggggggattatcaggatctgctgccggaccatccgtcgctgtggtgttatcgccgccagtggcaggggcagacgctggtggtggccgccaacctgagccgtgagttccagccgtggcagccgccagagatgtctggcgactggcgggcgctgattggcaactatgcggagacgtccaaccgcccggcggcaatgacgctgcggccgttcgaagcggtatggtggttgcaggcgtaa

SEQ ID NO: 106390 - DNA, 1218 bp, Enterobacter aerogenes
atggtgcctgagggatggagtctagtagatgctaatagaatttgtgagtctatttctgttggcgtcgttattaaaccttctcagtattacgttgatgaaagtgtgggaataaaagcatttagatcagcaaatgtgagagaagggtttattaatgactctgattgggtctatttttctcaagaagggcacttggcgaataaaaagagtcaacttaaaacaggcgatgttttaattgtaaggacagggtatcccggtacagcttgcgtcgttactccagaatttgaaggggcaaatgcaatagatattgttatagctaggcctaagaaggataaggtgcttcctgaatatttgtgcgcttacacaaattcttcggttggcaagtcacaagtattaagcctccagggcgggatggcacaaaaacatcttaatgttagtgcctaccaaacattaaaagtaaaactacctccattatctgaacagagacaaattactcgaatattgtctacttgggagaaggcgatctcaattactgagaaactgcttgtcaatagtcggcagcagaagaaagcaattatgcaacaactacttacagggaagaaacgctttgaggggtttaatcgcgaatggagtaaggttaaagttagtgacatgggaagcatattttccggaggtacaccagatacaactgagacagaatattggaacgggggtattagctggttaactcctactgacgttacatccttgaaaagtcggtatgtatttaatacaaataagacaatatcagaaaaaggtttaaaaaatagttcggcaaagatgcttcctaagggagcattacttgtttgtacaagagcaactattggtgcaatggctatttctgcaacagaaataacgaccaatcaggggtttaaaaatttagttccgaactccgatttttctgttgagtttctttactatctattcatgttcaatgttaaagaattagttagaaaatcatctggttcaacatttttagaactgtcaaaatcagactttgaaaaaataacttttttatgtccttgcttagatgaacaacacaaaattgcttctgccctgactacggttgataatattattaatgtgctacaacaaaaactagattacttaaaacaagaaaaaaaagcgttgatgcagaaattgctcaccggcaaactccgggtgaaaatggaggcggtgtga

SEQ ID NO: 106391 - DNA, 690 bp, Enterobacter aerogenes
atgtcgataagctttggtattatgataacgcactttactaataaattcgaaaagcttttatctatagtaagatctaattcatttcatttaaggtattgtagtgaatattttggtgacaaaaatgggcgggtgatttctaatgccgcccatcccatggtttcatttagcggatatgaccctcacgaattaccaatgaaacggataacatatggcggctatggaatatcgcttaacaaaagatgggcgttaacaaacggaataacgcctgtgaactatatagcaaaaaattcaccagttgcattaggtcttatagcgttattaagggcccggcagttgaaacaattgcccggtcaacttagattaccagtaatgcaattgaagtgttttacaaaacatgtatatggttataacagctattttggctgtgatgattttgatttcgagtatgaaaaagaatggcggtatgtaccaaccagtaaacaaattaaaaagaatctgatttctattaatttttctgcttatgaaaggagaaaagatttttataataacaagataaaaatattccctcttttgttttcatatgttgatgttaagtttgtatatgtacaaaacgaatacgagcgaaaggaaattatatccctttctggattgcatgatgaaaaggttcttatttcgccctggggagtttaa

SEQ ID NO: 106392 - DNA, 1215 bp, Enterobacter aerogenes
atgaagctcaatgccagacaggtcgagactgccaagcccaaagataaaccctacaagatggctgatggtggtggcctctacttattggttaaaactaacggatcacgctactggcgtttaaagtatcgtatcgatggaaaggaaaagttattggcgctgggggtatatcccgatgtgtctttggctgatgccagagcaaagcgtgatgaagctcgaaaaggtatcgctgggggtatcgatcctttagagcttaagaaaaaacataaagctgagcgtgaagcgcaggtcaaaaacacctttcagcaaattgcgctcgaatggcacagcatgaaagtgaaaaaatggtcagttgggtatgcctctgacattctcgaagctttcaataaagatatttttccttttcttggtcaacggcctgttgcggacattaagccattagagcttcttaatgtgcttaaaaaaatcgaagccagaggtgcaacagagaaagcaaagaaagtgcgccaacgatgtggtgaagtgtttcgctatgccatcgtgacaggcagagccgagtataatcccgctcctgatctcaccagtgccatgcaggggcatgaatctacacattacccgttcctgaccaccgaagagcttcctgccttttttaaagcccttgctggctactctggtagtgaattgatggtgttggcagcaagattattgatccttactggcctaagaacgggtgaattgcgtggtgccttatggtcggaaatcgattccgagaaagcgctatgggaaatttctgctgaacgcatgaaaatgcgtcgtcctcatatcatcccgctatctacccaagcgttagccattatcgaaaagatcagagcaatgacgggacaattccctttgctgtttccgggccgcaatgatccaagtaagaccatgagcgaagccagtatcaatcaggtatttaagcgaatcggctatacaggacgggttacgggtcacggcttccgtcataccatgagcaccgttcttcatgaacagggctacaacaccgcatggattgaaacccaacttgcccatgttgataagaatgctatccgtggcacctacaaccatgcgcaatatctcgatggcagacgcgagatgctgcaatggtatgcagactacatggtaagccttgagaaaggcggtaatgtcgtacagggaacgtttaatcggcgtgggtaa

SEQ ID NO: 106393 - DNA, 141 bp, Enterobacter aerogenes
atgaaagaagggttatgtcttaataggcatagccctttttcttggctaaagcagataagaattaagtcagaatttaaactgatgtttattaaacagttgattaataaggaaattataaaaaaccttaaaacagaaaaataa

SEQ ID NO: 106394 - DNA, 201 bp, Enterobacter aerogenes
atgacaacaagaaaacttattcgcttgccagaagtgatgaataaaacaggatttagcaaagcatggatctatagacttattagtaagggcgatttccctaagccgattaagattggaataagagccagtgcctttgttgaaagtgagattgatgaatggattgaacaactgatctattcgtcacgtaatacagctgcataa

SEQ ID NO: 106395 - DNA, 129 bp, Enterobacter aerogenes
atgaaaagaattgacattttcaatcaaatcaataaattgctctataacttagataaatatactttcatttttctggttagactacatgacaagcaatacagcaagaaccatacttatggacatggttga

SEQ ID NO: 106396 - DNA, 477 bp, Enterobacter aerogenes
atgacaagcaatacagcaagaaccatacttatggacatggttgacaccaaaataaccaccatcaaagctaaatgcagaagaaataagcgtttttttcaattttttacagctggttctataattttaagtgcatcgattaccgttgtagttggtttagaatggcctaatcatgctgctattcaaaagaatattgcacttataatgggtgtatcattaactctcattaatggttgggtagctatctttgattttaaaaaactttggatgagacaaaaaaatacactttttggtttatatcttatagataacgaattaaaaatcctcactgatagcgatgaagataagttgagagttaaagaacttttcaatgcttatcaagcagtttgggaaaaagacggcagtgagtgggcaaatattttcagttccgacattgaatcatcgaaaataacacaaaatatcaaagagttgcaatcatga

SEQ ID NO: 106397 - DNA, 1089 bp, Enterobacter aerogenes
atgaacttcgtgcatttaaaagttgataaaatagctattcatcagatctttccaagaggtgaagatgggaaggaagtattaccgggcaaaggcacggagttaataaattttgatgaagatgctttgagcgattttaaacaaagaatttataactctcttgggcatgattcttctgctgtggaaatggtgataacaaacgaaaagacagaaagcactccgttttacgtaaatattttacatggttgtaatgatgtagaatttataaataacagttatgaaattgctaaaaatttatcaaaagcacaaacacgtagaggcatgtccggaggtatacttgttgttttcagcgccacctatcaatataacaagcttccttttgtaggcattatcaaagctgacttatacagtggatacgaaaaatggcaagataaaaaaacaggcattatttctttaaaacatgtaaaagagctactacttacgccttcaaccaagctttataagtctgccggattttttaaacgtgaaaacgtaaaaaatgatagcaccttaagtgaacaatgggccgtacatatttctgattatcagattgataaatctgacggtaaagctgctgctcagtatttttatcaaactttcctcggttgtgattacccagcaaccagtgccagaacaacaaaacgttattttgaaatagcatgtgattttataaatcaaatggatattgatgaagaagagcgaacccacttacacaacgtcttatacgcagacctaaaagcaggtaaatcacaaaaagttgatcctatggcatttgctggctcatatatgtcaacagcagatgtagataattttaggaactatttagacgattatgattttccggttggtccattcataaaagatacgcagtacatctctagcaaattaaagaataggcgtttaaaatttagtaaaaacattcgaatcagcgcaccatcagaaatctttgaagagtttgtttctattgaaactgtagagggtgaagcaggtcaagatggttatagaccaacttggacaaaaattcttgttaaagacagaatagtagatcaataa

SEQ ID NO: 106398 - DNA, 990 bp, Enterobacter aerogenes
atgactgagactgaattcctcaagcaatggcattccgagaaggcgatgtatggcgcttggggtcagtatattgttagttctatatcagaagcgcttatcaaatctcttaaggtagatcttaagaattatcttaaaataccagtaaatcacagagttaaagatgatgggtctttagttgataaagccttatatcgtaataaagcgtacaaaaatccttataatgatattgaagataaggtaggtgttcgctttgtcgtaatgctccaaactgacgttgaaaaagtatgcgaggttattaaacaagttgccgttcaagaaggttgggatgctacgcagtgtagaaactataatgaggagcgtagagaatcgccaatgctcttcacctatcaatctcatcattttatcatccgaaataaaagagcatttacacatggaggtattctcattcatgaaaacaccccttgtgaggttcaggtacggtctctgcttcagcatgcatatgctgaattaacccatgatgccatttacaagaaaaaaacaattatagaacctgatgttgttcgtaccgttgctaaaacaatggcttttatcgaaacggcagatgaattctttcaaaaggttgtggatagaactgagtcggaaaatatactcaaaaacgagtcatttttggatactctctttgaacaaataacaggcgtacaacctataaaacaaaactcatctgttattatatatgatacctttgagcatattattaatgataactttgaagaggagatgattaagtttattgggaagaatccccaacttggcgaaactattaaggaaaaaatggctaccaataaattttatcaacagagcgttgttttatttgtttattggttaattcgaaggagaaaaagcacccttgaatctgaatggccattaccatgggatatagttagtgatatggcaatggatattggcgtcgcgcttagtagggtgacttaa

SEQ ID NO: 106399 - DNA, 543 bp, Enterobacter aerogenes
atggacgcagagaaaattcagtcagatatagatgcacttttgacatacatgaacgatgacatggagaatcttggtgaaacaataaaaaccgttacatttggattcgaaacgggccagagtgatcgcattgctatagacgagttgcttcactggcgggaagagtatttgttcaaaattatcaatatttgccattcccgctctctattacgtaaggactatggagattttgagcatgtatccttgacagaagagggtcagagtcgtgctatatcaatcaaacacggaaaaaatcgctcttacgagttaggggccagcatgcaaatcgcaacgttaaatgttcatgggcctgcacaggttggtaacggtaatacgcaaaacattcacaatgtatttaatcaattacttcagcagatcgagaaatcctccgcttctgatgaagaaaagcaggaagccaaaaaccgcctggcgaaatttttggaacatcctttggttggttctattgtcggcggtcttgctggttctcttcctggtctgatgggatga

SEQ ID NO: 106400 - DNA, 273 bp, Enterobacter aerogenes
atgatggaagaccttaaaaaaacgatccgattgcgctgtgcattctgccgttcggaacagtttgccttaccttgcgagggttactcccccccaagtcatagctttgtcgtttgtgccaactgcgggagggaaaatgacgtcacatctctgctcatcgttgctaaatcgaaaggtatggaaatagctgaagagtatgctgatgaactatttgaacagatgacgaaagatctgtttaaatcttttaaaaacagtaaattcataaagataaagtga

SEQ ID NO: 106401 - DNA, 981 bp, Enterobacter aerogenes
atgtcaaggaccaaagtactttttgcttattgccatgagttagatcgatgtttatcgattgatgaagcaagaacagaattcttttcaaaaaaaccgcaagacagacaacgatttactttctcctgcagcgatcgcaactgcaacgtcaccattagtggtgttaattaccatgtcaaagcggaagatggtgaaaaattcaaagttgcacattttcgttctccacacccccataatctgggatgtgaatggatgcgattttctgaggaagctaaccagccccgtcaggctagtgaaacagaagctgactacagagaaagaaaggcaaggcagaagctaaatgattttatcaattgcttcgatccttgtactgatgagagagattctgggcaagaaaaatctggacaacagacatcactttcgcaggtaaaccatctcgtcaaagacaatgatttgtctaacgataaatcccacaagtggagccgttatacacgaactaaccagctacagcgcctggtagacacttggcaagaagccaagaaaacccttacatacgacgagttcagaacattaagactaagagttacaaactacgggaaggtttatttccatgaatacatagcgcatattcagaaagggctaaaaaaccaatacgcaggcgtcattttcggcggtggtcatttggttaaacgctatggtcgtggctttctcgttcacttcttcgataaacataacgataaaccaattcgtctgtatatcgataagaaccttatggagaaaggacgatttagtcattatattgatgaaatattatcaacagggaatgtgagatattttcgtgtctttttgttaaacccagaagtttccgaaaaaaaagaccgagctggcaatccagttatcaaccttgagatatcaagcctgcgacaattggcgatttactacgaactcaactcttctaaagataatgatttggataaacagtag

SEQ ID NO: 106402 - DNA, 657 bp, Enterobacter aerogenes
atggcccctggatatgtatacattttaatcaacccaagcatgccaggattaattaaaatcggtcgaacgctacgcgactcacgcatgcgtgcgcgtgagctcttttccactggagtaccaacaccgtttcaagttgcttttgagctttttgctgaacaacatgaagctctcgaggctatggtacataatgaattgaatgattttcgagttaatgcggcacgcgagtttttccgctacccactcgacaaggccgttgcgttactaattcagctggcaaccccccttcaaaactccactgaacagtatgtggccgaagatataacacaacggcttagagaaaaatatcctttatatatacgtccagaaattgtatcggtaaggattgttcaaatgcccagagtggtctggctagagattacgactgagaaagaaatcgctggatacctcgtagagcaaacaacccaacgaacagatttggcattcattgttgacacagacgaagcattctttcggccagaagatgatgtccgtttaaatgcaaataagctggtaaatgattacgatatttactccgttgtcatgaccacggacctcttccatgatgacgcctgccaacaaatagtaagtgcttataaaatgcaccaccacagtggctaa

SEQ ID NO: 106403 - DNA, 1197 bp, Enterobacter aerogenes
atgaaattagaagagcttccatttataagagaatggatttctcaattttccactccggatgtatacgttgttgaacagatgctaagcaatatgcgtttcgttggttttgaggaagttgagctttggttgcaaaactctgtaaacaatttgcttcaagaaattattactaaagatggaaaggttgccattgcattattcccagtcagtaagccttttattaatgaatttaataaagataaagacatcaaacttcctaatgacagcgctggacgaatcgctcactcattaaaaaatttagaaagaaatttaccaaaatatgtagaactaacaccacgactggactctatgcggcaaaagagagtaaaacatataatttttgtagatgatttcattggtacaggagatcgtttcattaagtcatggagaaatacagtttcaccgtccattaaatcctggatttcgagagggtggtgtaagatttggcttatttcctttgccgcacacgaaccaggcataaataaaatactgcataatattcgccctctatccaaatcacaaatcaaggttaacataaccattaacaaatcttttttgctgcaatataaaagcacacgggaagttttaacaaaatatggggcacacctcggctcacccagccaaacatttggttatggtgggttagctagcccaattatatttcaatacggttgtccaaataacgcaccattaattttttggttatgtcctactaagaaaaagggtgttaaatggcgacctttattccctaatcgaagcattcccaaagaagcctatgatttatttgaccctgctttgataaaaacttctattgcagactttttttggaatcaacgacgttatgagttagcattaaattttcttgataatattcataaattcgataaaagaatgtgtcaacgagttctgttattaacacttattgctgacggatatgatacgcaaagaatttgtaatatcatgctccttacaccagatgaactttgtgattttgtgcgtgagttgtatgatggaggagccattgatcaacaaaacaagatcactcgtttcggacatgacattattaatcgacttgcaaaagcgcctaaaaagagtaacataaagcacaaagagattaatttttatccttcaagttttttggggttccgtcgtgaaacttag

SEQ ID NO: 106404 - DNA, 1137 bp, Enterobacter aerogenes
gtgactcaatggaaccccaacctttttcgtaaggaaggtttatctaaaggatatgattctcactatttgacacgcttagtcgagcaaggggaaacaatcaatgaaagaaaccttcctgtagttttttctctagcacatttagccaatttatctcatactttgtattctgacttacacggttttgtaagccgtaatgaacttgaacgaaaagacttcccatataaaaacttttcaatttcgaaaaggaccggaggaaaacgttggatttccattcctactcctgcacttatggctgtgcagtattggataaaccaaaatatacttaatagagttattcctcacgctgctgcatatgcttatgtcccgaaaagaaaaataatccagcatgcacaacgtcattgcggttcaggctggttgattaaaattgatattaaagatttttttggcaatataagtgagcgccaagtttttgatgtttttctaaatctaggatatccaaaactcttatccttcgaaatggcaagattatgcacacgagtaacccccaaaagaaagggaaaaaggtggtgtaacactaataatgaacatacaatcactggttatgattcaaaatttgtgggcagcttaccacagggagcacccacaagccctgcattatcgaatttggtttgtatcggtctcgataagcaactaacatcgcttgcaatatctgaaggcgctacttacagtcgttatgctgacgatatatgtttttctttaccaatgggatgtagaaaaagcgcattacacatcaaaaaagaaatatctaaaattcttcatggatatggtttttctgataacagcaaaaaaacgaggctaattccgccaggggctagaaaagttcttactgggcttaatgtaaataatgacacaccaaggatacctaaagaaataagggattcagttagaatgcatctgtattacgcaaaaaaaaatggtatcgcaattcattgtaaaacgcgtggtttccgttcagttattggcttccacaactatctatcgggagtaataggatatatttattccatagactcaaacatgggaaataaattccggaatgaattcaactcattaccttgggtagatttttctttataa

SEQ ID NO: 106405 - DNA, 531 bp, Enterobacter aerogenes
atgcgtaaacttatgttagtagcgggtgcggctatcctgctgtcgggttgtggtgaaaaaggtgactttgagaaagcgataaatgccaagatcgggcaggccagatattgcttctcactgggggataacaataccagtttccccgtccgtcttgccaaacctcgacttgacccgactggtacagggacgaattcgataatccttgatggatttattgaacaaggaatgatggtttttgataaaggctacgaattcaatgtattaggaataacagacgaaggaaaaaaggctaaagtttggagcacaaatgatggtgcctgtgtaggtcgtcgggctcttgacgagattaaggaatggacagagccgggtaacggcggccagaaggttgttcgcgtatcctatacgtggaagcttgttgacgttccgagctggattgacaaaaaagcgttcgccagcgtcaagggaatgaatgaacctgctgatgctgccatgaatctcgttaaaaccagcaatggctggaaagctaattga

SEQ ID NO: 106406 - DNA, 660 bp, Enterobacter aerogenes
gtgtatggggatctgcacggcaccgatgatctgttcactgaaacgaccccttacgcgccaagcagcccgtactcggcctctaaagccggtagcgaccatctggtccgcgcctggaaccgcacctacggcctgccggtcgtggtgaccaactgctccaacaactatggcccgtaccacttcccggaaaaactgatcccgctgaccattcttaacgccatcgcgggtaaaccgctgccggtgtatggcaacggcgagcaggtccgcgactggctctacgtcgaagaccatgcccgggcgctgtataaggtagcgactgaaggacggaacggtgaaacttacaatattggcggtcataacgagcgtaaaaatatcgatgtggtccgtacgatttgcagcatcctggacaagttggtggagcagaagccgggcaatatcagccactttgctgacctgatcacctttgtgaaggaccgtccgggtcacgacctgcgctatgcgatcgatgctgcaaaaattgagcgtgaccttggctgggtaccgcaggagacctttgaaagcgggatcgagaaaaccgttcactggtatctgaacaacaccacctggtggcagcgcgtgctggacggctcgtatgccggtgaacgtcttggcctgaataactga

SEQ ID NO: 106407 - DNA, 156 bp, Enterobacter aerogenes
atgattttatatgtaataacgatactgatgaacaatatgctgcacttacttttatttattctgatttgttcaataaaaacggaggagaaatattatgatgcttatgtctgtagcaatggtaatactttgtattatgctcggtggttttatgattag

SEQ ID NO: 106408 - DNA, 474 bp, Enterobacter aerogenes
atgtcagagggaagtaaaaacggcagtggcgtagcgttgaacttttgcgaggattgcatcatttcagacatagatattcctgaccttggaagaactcaaacctctgagggtgttcttataaacaattcttctggttgtttgattcagaacataaatatcggcaatgcgaaaaaagccgtgtcaacattctttaaattcaaagatactcaaaaagaatttaaaccgaatatgataaagaacattaaaggttcaaattgcgacattgtattgtctgtatactctaaatttaacatcataagaaatatcaagggtgagaattctggaagggttatagccttgatgaatactaatgcagcgcgaaatgttataagtgctcctgaggcggacatctccaccccaggaaatgacgaaaccactcgagaaagttattccgcaaatgctcaggctgctcgcgcatcacagcttcggcgatga

SEQ ID NO: 106409 - DNA, 228 bp, Enterobacter aerogenes
atgaaacgagagacattccaccattttgcagacggccgcggtcgtcgccagattttcgttaatggaaatagaattagccgcgtaatttgggctgacgaagagaagggggtgttgtgttttcatccttatccgctaaggcgtcatcgtaaagaacctttcagtgtttactcccggaagctgcgcgggaaaatcactgttctctttgaaaaagagggcttgaaagcatga

SEQ ID NO: 106410 - DNA, 243 bp, Enterobacter aerogenes
atgcgactgataaaccgaagcaagcaatcaccgctaggccgccaggcttgtgatgccgcactggcaaaacacgttgagctttatggcgattatggtcggcagaaaatgaagcggacttataccgccgtggtgcagggttcaaaaatcactgttgaggtggttaaccgacgctgcagttatgtggctactgcgatgaatcaggtaaggcgtttgcgaaacctgcccgcacagtcagtttattaa

SEQ ID NO: 106411 - DNA, 213 bp, Enterobacter aerogenes
atgaccaataacaccgaaacgaaaggccgctatatctaccactactgtggcgcgctgaaaggtcagaacgccacgttttctggtgtcgctcaactgacgttcagaatcgcaagccagcaggatttggagagattcaaagaggtcgccagttgtgaggggaatgaaatctctgcggtgttatctctgagctatctgggccgggagcacgaataa

SEQ ID NO: 106412 - DNA, 243 bp, Enterobacter aerogenes
atgtttaaccagaacgaaaaatctatcgctcaaattgctgagtatatcccgcgcgcctgccgcgatatgcagctgcaggaagccaaagcgcgactggctaaaaaaatcgcgctctacatcgaagacggtagcgatgcagagctactcaacaccactttcgcggcggcgcttaatagccacacgcgggaagcattctttgcgaacgttacagcagcagtatgtaaggagcattctcatgaataa

SEQ ID NO: 106413 - DNA, 387 bp, Enterobacter aerogenes
atgctcgatcaggaaaccatccgcacgtttatacaggtcgccgagaccgggagtttctcccgtgcggccagcctgctgcacaaaacgccggcggcgattagctatcgtatcaaaacgctggaggagcaggtggcaacgcagctcttcttacgcacgacccgatcggtaagcctgacgctggccgggcaacatctgcttgagcactgtcggcagtggctgaactggctcgacgtgatgcccgatgaactccagcagattaatgctggcgtcgaaagacaggttaatatcgttatcaataatcttctgtatcagccgcaaagcgccgcggatcttctgacctggctacatcagcagtttccctttacccgctttcagctttcccgctag

SEQ ID NO: 106414 - DNA, 765 bp, Enterobacter aerogenes
atgaaatcaattctcgatgagcttacaaccgatcttgagagagcagagagtctacagaatcagttgatcagcatagctactggcgggcctggtttgccgtatgagtatcaggaattaaggcgctattttgttgattctccagtgtacaactcccttatcccttctttcatcaaaaccaaccgaaacacagatcagttttggcagtttattaaatatgaattcagtacatacgctgataggaggcaatacatttggggtgagtttcaagaattgatggattatcttgaaggtaaaaacaaagctcctgccgatgaagatatttcggatgttttaaagcgatttgatgaaaacggcgttcataatgtatggataaaagcattggagcgtcgtcatgctgatcctgagggtgcgattacatctgcaagaacattgcttgaaacagtatgcaaacacatactagatgatatgcaagtcccttataataataaaaatatcgaaatgtcagagttgtacaaacttgtggcgaaagaacttaacctatcaagcgatcaacattcagagactgttttcaagcaaattttaggtggatgctcagctgtagtaaacggtttgggaactttaagaaatcgtttaggagatgctcatgggaaaaataaaggcgcagtaaagccttcaccgcgccatgcagagttagctgttaaccttgctggttcaatggctctttttttaatcagtacttggctaaatcggaaagaaaacgtttag

SEQ ID NO: 106415 - DNA, 351 bp, Enterobacter aerogenes
ttgacaaatcaggcgagactctggccggaaggagagatctttacccgtaaggtgttgataccgacaaattacgacccactacctgttaaggtggtatacgttgtcccaccgttcgatgccgttattgaaacgtggcagaacaaagacccgatgaagtcttacgacttatttcgccagttcatcgttgactgggatcagcaggaaaaactaaccgatgacattctgaaatgttttctgatggcctatccaggaactgatgaggctatctttgcaggatggtgtgagtatatgaaagaaatattggctgctaaccataaatgttattcgattatcagccaagtagttaactga

SEQ ID NO: 106416 - DNA, 597 bp, Enterobacter aerogenes
atgcaaagtaaagaagtgatgacccgtattgaacttagtggtgtattagctaagacgttcggccgtgttcaccaccgagtaatcagaacgactcaggaagcaggcgtggcattagcggcgacaattccgggttttgagcgattcatgattgatagcaaagataaggggctgacctttgctgttttcaggggtaagacaaatattggcgccgatgatttgggttatccggtaacgggtgacgctattcgcattgtcccggttattgccggcagtaaaaaatccggtttgcttcagacaataatgggtgccgtgctcgtcgccgcgggagctattgcaacctttgttttcgatcagccatggggtgttaacctgatggtcgctggtggatctatgatggctggcggtgttatccagatgctctcccctcaacccggaggtttagcccgtaaagagtcctccgataataaagccagctatgcctttggcggtgtcactaatacagcctcgcagggctacccggtaggccttctatacggcaaacgccgaattggtggcgcaattatctccgctggtatctatgtggaggatcagctttga

SEQ ID NO: 106417 - DNA, 1914 bp, Enterobacter aerogenes
atgaaatcctggtacaccatcaaagcagccagcgatgccaccagcgccaatatcagtatttacgaggagatcggcggctggggtatcactgctcagcagttctccgaagacctgaaagccctgggcgatatttcccatatcagccttcacattcactcacccggcggtgacgtgttcgatggcatcgctatctacaaccttctgaataaacacccggcaaaagtcacagtgcatatcgatggcctggctgcctctatggcctcagtcattgcgatggccggtgaccgcatcgttatgccggaaaacgcactcatgatgatccacaagccgtggggaatctccggtggtaatgccaacgatatgcgcgactatgccgagctgctggataaagttgaaaacgtcctgatcccggcttacgcccgcaaaactgggaagtctgctgaagtgctggcggccatgctggaggatgagacctggatggatggtcgtgaatgtgtagctcagggattcgccgatgaggtgttaccggcggtcagcgcaatggcctgtattgaatcgaaacgaattgaggattttgagcatatgccaaaagaaattaaagggatgatcaccggcccgaaaggctccaccggcagcgcggtaccggaacagaatcgaatcaacgggattaaagacctgtttgctatgttcggcggtaagcatgattcactgaaaattcagtgcctggaagatgtgaactgcacgccggaaaaagcgaaagacatgctgctgactgcactgggcaaggttgccaccccatcgaacaaaagcactgatgcacacatttacgctggtaacggcaacatcaccggcgatgctatccggcaggggctttattcccgcctgggtcacgaacgcgccgaacgcgggaacccttatgccatgatgagcctgtttgaaatggctcaggcatcgctggtggatcgtggcattagtatcagcggctttggcaaccgctcgcaaattgtgaatctggcctttacgcacagtaccagcgacttttcccatatccttgctggtggcgctgagaaatctgtacttacaggctggcaaaaaagcggtgaaactttccagcagtggacgaaaaccggctcgctatccaacttccatgaagccaagcgcgttgggctgaatggtttctctgagctggataaggtgccagagggggccgagtataaatatgtcaccaccagtgacaatggcgtacctatcgctcttgcgacgtatggcaatatcttctccattacccgccaggccatcatcaatgacgatttgagccaactgacgaccgttcctcaggctatgggccgtgctgctgcgcgtactgtagggaatctggtctatctgaacctgacggcgaacagcaagtttacagacggtaggccgctattccatgccgaccataaaaacctcatcgctaaagggatggatactgacggacttaatgaagcccgtaaggctatgcgcctgcaggaagacgcgaacggcgatccgatcaatgtcattcctgcctatattctcgttcctgcggcgctggaaggggcagccaatcgcgcggtgctctcatcttcctcgttgttccctgtagaccaggacggcacactgaaccagaaccccggcatcattaacgtggttaaagatatggctcaggttgtggttgagccgcgactggataagtcagacaacaagcaatggtatgttgcggcggcacagggcacagacactattgaggtggcttatctcgacgggatggatacgccatatcttgagcagcaggagggcttcaccgttgatggtatcgcctggaaggtgcgcattgatgcaggtgtggccgcgctggattaccgcgggctggtcaagtcgagtggggcataa

SEQ ID NO: 106418 - DNA, 195 bp, Enterobacter aerogenes
atggcagaacgaagcaatacgcagcacgataagggcggcacggttcatatcgatgctgaaactatgaaaaaaatagaggagtatcaggcattcatccgtaagaatcacccggatatgcccgtaccaacgaaaggccagattgtgcgcagcagtgttaactactggcatcaccagacgctgggggcctgggtatga

SEQ ID NO: 106419 - DNA, 759 bp, Enterobacter aerogenes
atgactgatataagattaaatgttgcgatttttgttacctgtatttttttagtttatatttcaccatctgataaatttatattggatccattccctaaagtaattattcaggctctaatactgatcactcttgttaggattgttttcgctaccatcgcatttgcccatgaaataattcaacatcacaatcaaaaaaaaagagaagaacaaaagaaaataaaagaaatagcacaattaaaaaccatagaaaatgaaagaattaattcagccgcaagtctgttaaaaaagctagacgtgctccaattaaagataataaaagatttgcaaaaatcaaacactattacggcacccaagactgcagttcttttttctttaaaatcattaggtgtaattcaatcagtttcaactggaaaaacggtcgaaggggtaagccttaccccgcataccctagcagcaatagagcgtcactatgataatagtttagttcaactcgagcacgactcaatactaaggttctttaattctttagagaaaaatgaattaaataatttcgaagacatgctagaaatagactttgttagaacgtattacacttctggcaatagactacacgaaacaaaatatcatagaacctttgagtcttttagaaactcaatactttttgagcacccaattagagattatcatttccgactaagtacaagtgcgagagctgtactcgttgaacttaaggcgcaggtgaacgaaaaaacagtatag

SEQ ID NO: 106420 - DNA, 1374 bp, Enterobacter aerogenes
atgacagatgcagtgatgacggtcgaaacggtatctgatgccctgtttacctgcgtataccgctgggcgcatgggaagcctatgaaagccagtgaggttgccgaagctatccacgagcacaaggaaccaatgactcgctacggtgctttggcttcccggttaggccaactgcagtccatgacctatgagaaattatgcgaggcaggttttctggataccgatcacgatcgggagattctagtccggcgcctggttgtatccgagattattggagaagaagaacttaacgactggctgcgcgatattgaacggatccaacgtctgttttctgggaacagtaaacaggagaagaaaacgcgcctaccgttatcgtggggatcagatggatttgatgtgcgtcaggactttattatcaagcattacctgccgtcacagtctctatgcgccatatacggccccagtggctcatacaaaagctttctggctatttcgtgggcttgtcacattgccgcgggtaaaacgtgggggggtaataacgttgcgcgtggcgcggtattgtatgtcgttggtgaaggtggtgtaggtgttccgcgccgggttaaagcgtgggaaacggttaacgggccactacccaagagcatatgtctgataaaccgtcctgtttttcctgtcaggaaagaagaggtaacagaggttcttgccgcggcgaaacaggttgaacatgaaacaggtatgcctgtgcggctggtggtgatcgatactctggccagatgttttggtggtaatgacgaaaatgatgcgcgtgatatgggggcatttattgaaggctgcgacaccatcaaacagaaaactggagctacggtgctggtggtccatcactcaggcaaggatgaggcgaagggcgcgcgtggctccagttcgttccgggcggcgctcgatgcggaattccatgttaaacgtgaaggtgaagcgagggcgttgatattgtcctgtaccaagatgaaagattcagaagaaccagagcgccatgcttatgatctacggcaggtagacctgtataccgatgatgacggcgacgaagtggcatctctggttgtatacgacacaccacgtgaagcgagggagattgatccggcactggttggagcaccaaagttaagcaataaccatatggctgtgtggcaggccatacgcagcagaacagctaaaggagaaccaagtacacgggctgttattcgtgatgatctgaaagcggccggcatggataccagcaaacacttttcccgctggcttaccaagttgattgatcttggtatggtcgtaaaagatggcgaaaatctgtcaattcgttcattgcgggaagtggcggaatag

SEQ ID NO: 106421 - DNA, 369 bp, Enterobacter aerogenes
atgatcagcaacgtgaaatttaatgagctggctggtcgcgttgaacagctggtgggcaaggtggaagaactggaaaaccgtatcaaggcgctggcagatagtcagggtggcgaaatacctccgggcatgtctccggtttccacgctggcggccgagttcggcataagcactaagaaagccgaggaactggcgaaaaactccggcgtgttgctggttaagcataaaggcggcggctatctggcccatgacgataaattcagggaggcggcgcggctggtgctgcgtaaggcaacccggcgtcgcggttctgcctactggttccatccgttgatcggcaaattccagatgagcggagggatcccgaaatga

SEQ ID NO: 106422 - DNA, 222 bp, Enterobacter aerogenes
atgaacaatcctgaaccactgcaagaccaatccgatcgtattattcgtgaggatgaatgccgccgtctaacaggcatttgccgtacaacccgttatcagaaggaaataaagggagaattccctgcacgccgtcagcttggtgggcgttccgtcgggtggctgctgtcagaggtcaatagctggttgaacaaccaacctaaagcccagctgaaatcggcataa

SEQ ID NO: 106423 - DNA, 738 bp, Enterobacter aerogenes
atgatagataaaaataacctaccacaaagattatattacacacttcctgatgcagctaaagtcttggggtgcgaagttcgggatataattcattatgcggcaattcatgccttgcaactttctgtgtacataaaacttcatcattgtgagaccgattcatggtttcatcttaatatgccttcaagcaaagtagatgacattgatatgttttccatgctaaggggcgatggctgggagattgacttcgtagagtttaaaagcaaatctgaaaacttctttgctgatggctattatgctaaggctgtaagcggatttttttatgttgatggttacaacctaattcctcttgaattcaatgagtctgacgaaatctctctggttggcgtctctactttaccgagcttcatcgatggacagtgtattgatgttaattttatgatgaatcatttaaaagtgaatagtaattatttatgtgttaggaaaaatgacatggattttataaataaaaatgtctccatgccatctaaagatttaaatagtgaatcaaggaaaaccacagcaaaaaaatcagaacttatattctatcttttaaagatgattccagagttatcttgcgtggatttagagagagaaaaaatcacaaagatagcttcgatgatagaagaaattgcagctaagaaaggtattgatttaccgtctactcactggcaaacgtggagcaaataccttgagagataa

SEQ ID NO: 106424 - DNA, 1221 bp, Enterobacter aerogenes
atggctggcacaaacaaactcagcgacaaaaaattaagggcgctcttaggggctgccagaagcaaagaggaaatgctagcggatggcgagggattaagcgtgcggcttttacgttctggtgctatcagctggatatttgcttatcgcttgggcggacgtggttcgaaactggagcggttaacgttgggtagctacccggatatgtcgctgaagatggccagagaaaagcgcgaggagtgccgatcatggttggctgaagggaaaaaccctaaattccagcttgatattaagacggaggaaatactccggcctgttaccgttcgcgatgcaatgacgtattggtttaatgaatatgccattcatcaccgggttaactgggaaaggcatcaggcgcaggtagaaaaacatatttacccgtatataggcgatctgcctctctccctgtgtgaaacccgtcattggctcgaatgctttgatcgtgcgaaacgtgaaaccccctacgcagctggctacgttttccagatgtgtaaacaggccctcaaattctgccgtgtgcggcgctatgccattagcaatgctctcgacgacctgactattcaggacgtaggcaaaaagcaggagaagggcgacagggtgcacgatatgggagagcttaccaaaatctggtcatcaacgaccgggaaaatgtataagccgtattacgcctcgctgctgaggctgctggtggtgtttggctgccgatctcaggaggtcaggctatccacctggaaagagtgggatttgaaagactggatctggatagtaccgaaggaacacagcaaaggcggtgaaaaaattattcgtccgatccctgaaggtattaggccgtttgtcgaggatctatacaaagagcattcccattctgggctattgctcggcgaggtaaaaaagccagaagccgtcagccagtggggccggggaatttataaaaggctgggccaaacggaaccatggacgctacacgatttacgccgaacctttgccaccacgcttaacgatatgggaattgctccgcatgttgtcgagcaacttctgggacatgtgctgggcggtgtaatggcaatttacaatcggagccagtatttaccggaaaaactggacgcattaaataaatggatggagcgcctcgaacttatctctggtgaacattctaatgttactattttgaaggttgcaaaatga

SEQ ID NO: 106425 - DNA, 270 bp, Enterobacter aerogenes
atgtctgaggagactttgaaactggccgttagctactcaaatgccagcatggttattgaacgatcagtaaacattttccaaaacgtaaatgaaatccgttcatcgctggatgatatgcgcgaagcaatgaaatcctgcggcatcgttatggatgatcacttggacagttacgacactgctctgcgtaatctggaaaagctactgcaaaagattgaaggcgatgcccgtcaagaagctattgctctgcgttacaagctcaaggcgcagtaa

SEQ ID NO: 106426 - DNA, 987 bp, Enterobacter aerogenes
atgaatgaaaatctttatcgtttgattgttgactatcaaagcaaagttcaaatggttttaaagctaatgtatcgctctggcattcaaatgccatcctcatcctatgattggattgagtataatatacccatctcaggtgaattagatggtgggataaaatattataaacatggttccggatgtcaagttgatctaggttcagaaattgtggattttgattttggagaacatggcgaagtgggagcatttaattcttggtggttagctaaattcgctggcaaaaatttatataaatatggtttcaaaagccatgatgatatttacactcatttaaacacggaattaaatcatggaaatataacccctctgaataataacctttactacataacgaacgtaccttttaaatttgctttagagatagacactcgaaaccccggggataaactgccaagccgtaatcacgatcgtgtactaacgcttcagctacattatttcgaaactgctgaactcatgtttaaaaactacaataaaaccaaacaaaagatgaatagaaatggtaaactgacttatcgagataaatttgaaatgagaatttacatatctacctggttaggttttttgggggtagtttgcgaaggcttccgtaaattgaatatgcgaatcgtattgaataaagaacgcccgagcgaatttaaagaattgacgccagtttcagatcgtattggaaagttaatgaaagagcattcagattcactcagaatctttagaaataatgtctttcatcttagggaagataatgagcacgtacaccttttctttcatgatgaagttgatcgtcttcaatgggcccatgagttacatataatgctttccgattttttttcgaagtatcaatatttttgcgaagtgcattatgtaattaacggacgtataggtgaaagcaacttggtaaagaaaaagttaattcacaaaaataaactttga

SEQ ID NO: 106427 - DNA, 1743 bp, Enterobacter aerogenes
gtggctaaatctattactaaactccgcagcatgaatgttgaggtttttcgtgggttaaaaaatgttaatatatcctttggggagcgaataactgttatttgtggaaaaaatggtacatccaaatcaacgatacttggaattattgcacaaatttttagtttttctcgtgattactctaaagagccagcggaactattaagttcttatcggacacttacaggtaatcgttttaaatcacaattcagtgaccatttcaggttttctagtaaatttgatacccccggcggaatggaagtgcaaataagcttgtatgatggtgcttttgaaaaggagttgaaaaatttaaggcttggtcttgttgattcaacatatcatcagaaagcaagacctgttcttagaaataatgatgtgccaggtaataagaataccagtcgaaatgttacacatcctgtaatttaccttagccttcagagacttctacctataacgttacgacctgagtatagtgaacgggatgtgcagtatattatcgataataaaaatgaaattttatcgatgaatagaaggttactcattaaggaaaatggaacctctgttacagcgaccacaggaactattgactccatggttgtacacggagattactatgaccatgaatcagtttctgttggtgaggataacgttggacagataatacaagcaatattctcgtttaaaagacttaaggaagagttaaaagattatcatggggggattctattgattgatgaggcagatgcagggcttttcccggctgcacaaattgaactaataaacgttcttaagagaatggctagtaagctagatttacaaattgttatgacatcccattctccaatacttatagaggaagtgtttaaacttagccaggttgctgataaggattataaaacggtatatcttaccgacacatacggccccatttcagctaaaacaaatttatcatggccagaaataaatgctgatttgctcgttgatactattaatgttgatgcgggagaagcttttcctaaaataaatgtttattttgaggattatgaaggttatttgtttttcaaacaactaattacagagcggcatattaaaaaaatacttacgcctctgaaagaagtaaatattagttgcagtacaatgttggatttaatggctcgaaagatacctgagtttattaataaaagcataattgttttagatggcgacgttgcaaacgataacagtcagaatgctaaaaaagcaaaaactgaaagaagtttatgcttattaccgacgactcttccgccagatcaacttttgtttgagtttatgtataatttagataaagaggatctgtattggcaggaaaataagggtttcacaaaagttgtctttttaaaaattagtgctgacattattgaaaagcttaatatagtggaagaaaaaatttctttattagatgttattaaagattacaagaaaggaaaaaatgaagagagtgcgaaaggggaattaagaaaattattcaaaacttttgcccaaaatgaaaacgtccgtgctcttttaacaggtccagtgagcaagaatccatacagatattggttaaacaataacccagagtttaagtttgaatttaagaaaaaatttgaagcttgtctgattaatgcgctaattagtggttttgggattgagtcaggcaaagtgtacggatatctccaaattgataactga

SEQ ID NO: 106428 - DNA, 861 bp, Enterobacter aerogenes
atgcggtttaatacgccactacgttatcccggcggtaagggtaagttgttcaactttatgagtaaaatcatagaagtgaataatttacaggagctgcattatgcagaaccatatgctggtggtgccggtttggcgttgaagttacttttcaaagggtatgcttcgaaaatatatcttaatgatctgaacttggctgtatattctttttgggatagcgtgctaaatcgaactgatgaattgtgtcacctgattatgaccactgaagttacaatggatgagtggcatcgtcaaaaatcaataatgacgactcctgaaagtaaggatcaacttcaacttgcttttgctactttttttctgaacagaacaaatcgttcaggtattcttaaggggggggtaattggtggtaagaatcaagaagggaaatggaaattagatgctagatacaataagcaagatttagttcaaagaattaagttaatagctgagaaaaaggaacgaattcatatttttaacctcgatgctaatgatttcattacaaaaatcataaagaatttgccggataattctttgacatattttgatcctccatattatgttaaggggaaaggtctctatgaaaatcattatattcatgaagatcatgttgtaatttctaatagaatacaaactgagattagaacaccttggatagtttcatatgataacgtttcgcctattcgtatgatgtataattcctctaaaactttatcttatggaatcacttatagtgctcaagatcgatatactggagatgaagttatgtactttagtgatggtctaaagtatccgaaatgttctgatcctgcaaaatttaaagcgtag

SEQ ID NO: 106429 - DNA, 249 bp, Enterobacter aerogenes
atgaaagttaaattactgattgatcatgctgaagaactttcaaagggttcagtgtcggtgtgtgaacaaaaactattaataaaattttcctatcagtttgatgattgcagtttggtaatacgctgcgcaggctcgaatgacttaagaatttactgtgtcctaaaggaagttaaaaagcagattgtggaaattctcctgcaaattcgagactgcgcaaacgaccggttttgtcgatacaacatacaataa

SEQ ID NO: 106430 - DNA, 264 bp, Enterobacter aerogenes
atggctgtgaagaaagataagcccgtagagcagggagaaattgctgcagatgatagccatgcgaccacggtcgcacaggcagaacgccaacctgttgtgttcctcggcccatatagccgctattcccgtggtgatatcgcatgttttgacagtaagtatgcggaagagctggttgagcgtcatatcgctgtatggccgaaggatgccaaacgcgcgatggcaccaaaaccgggagataacgactttgatactgacattggatga

SEQ ID NO: 106431 - DNA, 543 bp, Enterobacter aerogenes
atggacgagcaatgctcctttgaacagtgtatttggccagcacatgataattactttttaaaaggcttatcgaaactcatctttgatatcgaagagcttatttatctgtcgctggataagatatgtaaggattttttgtttataaatctgagcaccaacgcattaaactactttatacgctatgacagcgattggttagcgaaggccaagggcaaaaaaattatcttgatcgccgcgagaaagtcagaggcgttagccaattattggtattacaacggtgatattcgcggcgtggtgtatgtcgacctcgcgcgcgatataaggaaagaactggcctatgtaattaatggtcggtttctgcgtaaagatattaagaaagaaaaaattactgaccgggaaatgacggtgatcagaatgacggcccaaggaatgcatccgaaatctatcgccagaattgaaaattgcagtgtgaaaactatttatacccatcggcgaaatgctgaggccaagctgtattcaaaaatttataaattagttatgtaa

SEQ ID NO: 106432 - DNA, 519 bp, Enterobacter aerogenes
atgataaaaatcctctactggctcatcctcacactgctaagcgcaacggggcttggcgcctggtttcttcaacagcaatatgacgcgcgctccgccgacttccgcatcctgtatcgcgaaatcacagtaaaagtgtcgcagcacgatgccatcatccccctgcttccgtccggtcaaaacgccgccgaagtccagcagatcctgccgcagattgtgcaatggcggcgctatgattccctggagccacgacgccccatcgtcgcgcaaagccccgcacgctactggctgaatcttccgggcatctccctgctgattgatttgaacaccctacttaacagtctcaatgagaaaaagacattcaaacatcttgccattcgttgggacggtaccacgttgtttgaggacggtaccgcatctgccaacacctggtggcgctgggagaaaactgttgccagcccaacacaaccgctgttcattagcgcaggtgataacccgcaatggcatcaactgccgtggtag

SEQ ID NO: 106433 - DNA, 654 bp, Enterobacter aerogenes
ttgtatacgccgcaaattgctgaaaacccgcagatgctctcgctgttaacgccgttccagaataaaggcaaggcgcagttacaggtaaaaataggcagcgtcaacggccaccttgaaggcgatcgcagcaaagttcgcttcgtacaaaccaatatggggcgtctgctgctggcggcgcagatggcgcgcagcaatgctgatttcgcggtgatgagcggcggcggtattcgcgactctatcgaagcgggtgatattacttataaagacgtgatgaaagtgcagccgttcggcaacgtgctgacttacgtcgatatgagcggtaaagaggtcactgagtacctgaccgccgtcgcgcagatgaagccggattccggcgcttatccgcagttcgccaacgtcagtttcgttgccaaagatggcaagcttaacgatctgaaaatcaaaggcgaaccggtggaaccggcgaaaacttaccgtatggcgacgctgagctttaacgccaccggcggtgacggctacccgcacatcgataataaaccgggatacgtaaataccggctttatcgatgccgaggtgctgaaagagtacatcgagaagaactcgcctctggatgcggcagcctacgagccgaaaggcgaggtcagctggcagtaa

SEQ ID NO: 106434 - DNA, 975 bp, Enterobacter aerogenes
atgcattatttaaaacgcggcgtagcgctggcgttattcgccgccttatcgctgggcagcctgtcagcgcaggcctatgagcaggacaaaacctataaaatcaccatcctgcacactaacgaccaccacggtcatttctggcgcaacgactatggcgaatatggccttgcggcacagaagacgctggtggacggtatccgcaaagaggtggcggccgaaggcggtagcgtcctgctgctgtccggcggcgatatcaataccggggtgccggaatctgatttacaggatgcagaacctgattttcgcggcatgaacctgattggctacgatgccatggcggttggcaaccatgagtttgataacccgctcagcgtgctgcgccagcaggagaagtggtcgaagttccctttcctgtcggccaatatctatcagaaaagcaccggcgaacgcctgtttaaaccctgggcgctgtttaagcgcggcgggcttaaaattgcggtgattggcttaacgaccgacgatacggcgaaaatcggcaacccggaatatttcaccgatatcgaattccgtaatccggcggcagaagccaagctggtgattcaggaactgcagcaaaatgaaaagccggacgtgattctggcgaccacccatatgggccactatgacaacggtaatcacggctctaacgcgcctggcgacgttgaaatggcgcggagtttacctgcgggatcgctggcgatgatcgtcggcggccattcgcaggatccggtctgcatggcctcggaaaataaaaagcaggtcgattatatccccggcaccccgtgcgcgccggatcgccagaatggcatctggatcgtgcaggctcacgagtggggtaaatatgtcggacgcgccgattttgaattccgcaacggggagatgaagctggtgcactatcagctgatcccggtcaacctgaagaagaaagtcacctag

SEQ ID NO: 106435 - DNA, 861 bp, Enterobacter aerogenes
gtggataaagctttctgtactattgatgaaaaagaatggattgcagatgcattttacgcattgcctcttgccgagatccaactgaagagacggagtttgctttgtactgaatgtaagggggatgcatggttcagacgatcaagttacggaaatgactcaccgcatttttgcgcccatcaccacgaaaactgctcactggggacttcatatgaggctgtaggggagggggatgaaaataaaggattgcctgcatcagatgccggcagcggcatagtactagatttgggattaacgcaaggctatgacattaatgtcaaaacagcggcagataacactgagactacaccccaggggcaaaagttcacgggtgaaaaaactgctgatggtgggagtttaaaatatccagctcattttactttaaaaaacctactttataagttagtgcagtcaaaaggactatgctacgccgataaaaaggtggggtttaaagatcaatcttttaacgatttaccggaccgtgggggagagctgtttgtcgagtttattaatgttgcaccatggatggacggtgctcgtagaatattttggggatttattagtgatgttggacaaacaagagatggcaaaatttggttaaatgcaggtaatatcaagtccgggttaagtatttgtattaatagtgaaatatcaagtgagtttaaagagcagtttaaggttaaaaatagtcttgatgaattagatggatgtcatgcactaattattggtacttgtacatatgctacaacaggtaaaccaatactgtggtgtggtgatcttagttatatagtgctgagaagatataaattagatcaagatttataa

SEQ ID NO: 106436 - DNA, 393 bp, Enterobacter aerogenes
atgaaacctcaacctgcaacaacttcgcgggcggtaaagccctgcctgtcgcccgtggcagtctggcaaatgttactgacacgcctgctggaacagcactatggcctgacactgaacgacacgccgttcagtgatgaaactgttattaaggaacatattgatgccgggattaccctggccgatgcagtcaacttcctagtagataagtacgaactggttcgtatcgatcgcagaggattgagttggcaggagcaatcatcctatctccggcttgtcgatactcagcgaaccattaaggttatggagttgtggcatacgtctgcggatatggatagacgcatgtcttacttatctagaaaatatcatgaaatcttaatcaacaaaatgaattga

SEQ ID NO: 106437 - DNA, 864 bp, Enterobacter aerogenes
atgaatacaagtgaaggacaacagtccctgcataactcgctttctgggctgccccaatgggtctctgaacgcattctgcagcagataaatcagattactcactatgagccggtgataggcattatgggcaaaaccgggacaggaaagagcagtctgtgcaataccctgtttgctggggatatatcaccggtcagtgatgtggcagcatgtactcgaaaaccactgcagtttcgcctgcagctcggaaagcgctgtatgaccatcgtggacctgcccggtgtaggcgaaagtggcgttcgcgataacgagtatgctgcgctgtaccgtcaacagcttccccggctcgacctggtgctgtggttgatcaaggccgatgatcgggcgctagcggtggatgaacatttttaccggcaggtgattggtgaagcatatcggaataaggtgttgtttgttatcagtcagtccgacaaggttgaacccaccagcggtggtgaaaagctgtctaaagagcagaaacaaaatatcagccgcaaaatctgcctgctacatgagttgttccagccggtaaaccctgtctgcgccgtatcggttcgtttgcagtgggggctgcggatgatggctgaacggatgattcgttgcctgccgcgggaggccagtagtccggtggcggtacagcttagtgctccacttcgtagcgatgtcgttaataaaaaagcccgtgacgattttggtgaaacggtcggctcggtactggacacagtaatttctatgcccctgataccggccccggttcggacagtcatccagtctgtacgcgacatcgtagtatcagtcgctcgtgcagtctggaatttcttcttctga

SEQ ID NO: 106438 - DNA, 741 bp, Enterobacter aerogenes
atgagaataacatttaattcagatagtgaactgacaattaatacaattgacagatatgcaaaaagctatggaatatcaagatcgaaagttatttctgatttgcttgattcaatatcacccgctctcgattatttagtttttcaaaataatttaaagcacgaaatggagactaagttattaaacttgtttgcgtatgagcttaaggaggtagaggaaaaaatatctaaagatgaaattttctttaggcatttttatcaaaatataaaaaatatttcttattccgttataagcaaagattcaattcggtttacattgccggatagagaccgatggcctgaaatgagagaacaatttcaaagtaaagtaaacaaaatgctcgatatatacaggccatgtgatagtggttattatgcttgtgttctgtaccctgattacctgaagaagggtacgtatacatcagttataattaatttcagttcgttaattgtcgatggctattgcttcgatatcaattcgctgtgttttgtcagagaggaagatttcttttattgcggcattaatgattacatgaagagaaatcttaaaaacagaaaccggttgcacctctcatggactccgctaacaaaaattgctgacgggtatctgtttatggctgcaatacgtaaagaaaactcaaactatgtggtcaaacaagaaggagattttacagtgaacttcccttacgatatatggaagcaataa

SEQ ID NO: 106439 - DNA, 582 bp, Enterobacter aerogenes
atgcaaagactttacccacactttaaaaaaatcactcccaatgacttcctcctgaatatgatcaatcaccatcttaatcagattctgatgtgccactcccaaatactggcgtttcgaatggattttgattaccagcgaggcaccaaccgattcattcgtaattcctcatttgagatacaggatgacctccgggagttaacccaagctgtaatgcaaatgcctcaactctgcggttttttctgggtgctggaatggacaaagacaaatgctatccacgctcatgccattttttatcttaaagggcagaagcatcagaagtcatttccgtttattcagcagacaggtgaattgtggcagaagataactaacaacgaagggaaatatgaacgttgcaaaccaaaggactactgtcaggacaacatcaataacgtcgttgattatagcaacgacgaggacgttaatagccttaggcgtattgccagctatctgacgaaagaatcccagaagaaaggggggctgatttggggatgtaatgaggttcccgcccctgcacgacagggcagacccagaaaccccaaataa

SEQ ID NO: 106440 - DNA, 534 bp, Enterobacter aerogenes
atgaacaattcacccttactcaaccattaccaaacctggctggatgattttacccgcgtcagtctgttccacggtttatgccagcagcacatcacgcagtggcacaggctggcgataaccgcctgcctgatgccggacggtagcgtaacagaatgcgtcattccacagtgtctgctgccggtcacccgcaccgaccaactgggatcctgttctgccattcctggcctgaccaaacacacagattattcccttctgcccggcgtgctgctcagcgaatgttaccggctggggaaaagccggctggcggaacaattgcagttgttattccgccagtacccacagcccggtatacgtgaatcgctgacgttactgtgctggtgcgagctggctacaggcaagaatatgggggagtggtatgagctgcatcttccacttccctacaccctgaagcgctggctggcggtaaaacagctgacatatcgggggctgaaaacgcttactgacgattacattcgtgccacccggccactgtga

SEQ ID NO: 106441 - DNA, 576 bp, Enterobacter aerogenes
atgaaaaaacgtaactggacaccggactggtttttaaaatctgttcttgatatgcatattaacgcgatggttaatcgctattcctgtctgagggtaatacggctggatcttttctatcaaaaaaatacctttaaataccaccatccggaccatcggcagatggagtctgatgtccggcatctgatggacgaaatgattagtatgcccgcagtggtgggttttttctgggtaattgaatggaccgaagatcacctgttccatgcgcatgtggctttctggctagatgggaataaaacccagaaaccctttttttggatggaggaggccggggaatgttggcgtgcaatcacggaagatgatggatgttactatcgttgtgagcataagccaaactatgaggcagatataaatataccggttcgttacagcgattcgagaagcatttgtaacatacgcgatgtactggaatacatgactaagattgaacaaaaaaacacattactaatgtacggatgcaacgaagtgcccgagcgaccattgacgggacgccccaagaataacaatacttcaatctga

SEQ ID NO: 106442 - DNA, 1785 bp, Enterobacter aerogenes
atggccgttgagaaactgatcaccgaccacatcgatatctggtcctctgcactgcaaacccgctccatggccgggcgcggcagtaacggtaaaatcgacctctatggtattaagaaactgcgcgagctgattctggaactagcggtgcgcggcaaactggtaccgcaggacccgaatgatgagccagcgtcagagctgttaaagcgtattgccgcagagaaagcggagctggtaaagcagggtaaaattaaaaagcagaagccgttgcttaggattagcgaggatgaaaagccgtttgagctgccggaggggtgggagtggatcactttaagtgagattgccacgattaatccaaagatagaagtaacagatgatgagcaagaaatttcttttgtcccaatgccatgtatttctacccgatttgatggtgctcatgaccaagaaataaaaaaatggggtgaggtgaagaaaggctatacgcatttcgcggacggggatattgcgttagcaaaaataacaccttgctttgaaaatagtaaggcggtgatttttaaggggttaaaaggtggtgttggagtaggtacaacagaattacatgttgctcgtccgataagttcagagctaaaccttcaatatattcttcttaatataaaatcacctcattatttaagtatgggggaatcaatgatgactggttctgccggtcaaaaacgagtcccaagaagtttctttgaaaactatccaataccgtttccaccaaatacagagcaggccagaatagtagggactttttcgaaactaatgttcctctgcgaccaactggaacagcaatctctaaccagtctggacgcacatcagcaactggtggaaaccctgctggcgacgctgaccgacagccaaaatgccgaagaactcgccgaaaactgggcgcgaatcagccagtatttcgacacactgtttaccaccgaagcgagtattgatgcgcttaagcaaactattctacaactggcggtgatgggtaaacttgtgtcgcaagatcctaacgacgaacctgcatctgaactgcttaaacgtgttgagcaggaaaaagtgcaactggtgaaagaaggcaaaattaaaaagcaaaaacctttgccgccagtgagtgatgatgagaaaccatttgagttaccaataggatgggagtggtgtcgcattggagaaattattgcaaacatggatgctggttggagtcccgcctgttctcctgagccatcacccaatgaagatatttggggagtgttgaaaactactgcagtacaaagtttggagtatagagaacaggaaaataaaactttacctaatagtaaactgccccgacctcaatatgaggttcatgatggtgatatcttagtaacaagagcgggaccaaagaacagagttggtgtttcgtgtttagttgaaaagacacgttccaagttaatgatatcggacaaaatcatcaggtttcatttaatttcagatgatatatcagcaaaatatatttcattatgccttaaccgtggggtgacagctgattatttggaagcatcgaagtctgggatggctgaaagccaaatgaatatatctcaagaaaatttgaggtcagctccgatagctcttcctcctacagcaattcaattgaaggtgatatccactattgaagattttttcaaagtatgtgaccaactcaaatcccgtctgcaatccgcccagcaaacccagctccacctggcggatgcgctcaccgatgcagcattaaactaa

SEQ ID NO: 106443 - DNA, 3009 bp, Enterobacter aerogenes
atgattattagccttgaagagcttggccttgcctaccgaaaagcaaaagtcgatctgtactattcatcccatgtttcgctggaagcaattgcgtcttacgaagagtccctacatacgaatctgacggttctgcagggaaaaatacaaggtgacgacgaatcatgggtggaagagaatgagttcactggcaactggtttctggccaccaaatctgtagacatgtcttgctgggaacagcagcgagaaccgcaagctaacggtctcatattttcctcacctgctgaaaagtgggcatatgcttgcactgataaaaacgaacaaaaaaaaatcaaagccgagtttcgagtaatggctcaatgcagtctggattttcatgttctctcggctctttggatgttaaaagtcgggcatctttttgatgccaaattatctacctgtgcttacggtaaccgcctgcgccgtactctagatggaaaagacatcaatgcactttcaattggttcttttcaaccttatctcagaccttttcgtgattggcgtgacaatggcattaacgccatgcgaagcgcgctaagtgacagcaaaaaaatcgtggcactcactgctgatgttagttctttctatcacgagctgaatcccgggtttatgcttgatccaaccttcgtcaaagatattttagagttggaactcactgcagaacaaagcaagcttaatcgattatttattaatgcgttaaaagcatgggcaattgagaccccgttgaagaaaggattacctgtaggtcttcctgcttcagctgttgttgccaacgtagctctgatcgagctggatcgcgttattgagcagcaagtcgcacctatctattacggacggtatgtagatgacatcatgctggtcatggaaaatggtgcaaatttccgttccatggcagagctgtggcaatggttgttcgcccgttcttccggcaaattagactgggtgaagggcgaggaaaacaaacagatcagttttcaaccaaactatctgcatgacagccagattcgttttgcaaatgcgaagaataaagtgtttatcttggcgggtaaccccggcaaaaccttagttgaagctattgctcatcagatttatgaacgagccagcgaatggcgtgctatgcctcggttacctcactcctccagcaatgtcggtactgacttgcttgcagcaactcaaagtaatggcgaagtcgctgataacttgcgtaaagcagatgcactgactatgcgtagagcggggtttgccatcaaattacgcgactttgaagcctatgagcgtgacctgcaaccgggcacatggaaaggccatcgccaggcttttttccgggcatttattgatcatgtaatggttctgccacaattttttgatttatcggtctacctaccccgagtgatccgactggccacggcctgtgaggactttgtcgaactgcgcaaacttatcttcgcgctcgagcatatttgcaatgaagtacgagaaaattgcctccttgcgatcaaggcatgccctgatgatcacctcccttctgaagaagagattattggcaaatggagggctcagctttttagcagtgtgcttgaagctatcgttgcagcatttcctccgcgtatttccagggtaggtaagcaaacctggaatgacaatttaaaaaactggcacacccggtgtggactagacatagaatatttgggtcgtgatttttcattaaagggctaccaagaacagcaggcgagattattctctttagacttagcgcacatgccattccgctttattggtctaccaaaagagatgattgctcaacggggcatacccgctccgaaaacagtaggccattgtgcggaagcatcagaattactgcctgatattgtcgttttaggtaatcaggttttagcagaatggtgcaaatttaaaatcattccacatggactgttatttgccacccggcctttcagcctgcctgaactctttattctaaacaatgaggcttattcagcctcagctcggcaagaaatgcgagctgttgttctcgctgttcgcggttttgtcctcggtaataaaacaccttgtatcgataaacaaggcgtattgaaaattcctgacggtcaatctgctggaaaatatggggttgccgtctctagctggaaaacgtccatgtcaagctggactgcggcggtcatgcgttcagccgatcaggatgccaaccgttacactcgattatgtcgcttgcttgatggtgtgatagcccaaccacataacagtcgttacttaattctgccggagctctcactccctgcgcactggtttattaggattgcccgtaagttacaaggtcgcgggatttcacttgtcaccggtattgaatatttacatgccagtaaagcaagggtgcgcaatcaggtatgggcttccttgtctcatgacgggttgggttttccttcactaatgatttaccgtcaggacaaacaacgcccagcactgcatgaagagcaggagttacaacgactagcagggctagaaatgaaaccagaaaagagatggaccacgcctcccatcattcaacacggtgattttcgttttgccttgttgatttgtagtgagctgaccaatattagttatcgcgcagcactgcgtggcaacgttgacgcgctgtttgtgccagagtggaatcaggatactgaaactttcaatgccttggtcgaatctgctgcgctggatatccatgcttacatcatacaatgcaatgaccgccagtatggcgatagccgcatccgaggccccttcaaagatagctggaagcgtgatgtactgcgagtcaaaggcggtattacagattattgtgtaattggtgagattgacgtaaatgcattgcgacaatttcaaagtagctatcgttctcctggtaaaccctttaagcctgttccggatgggtttgagatagagcactctcgaaaaatgttgccagaagcataa

SEQ ID NO: 106444 - DNA, 363 bp, Enterobacter aerogenes
gtgcttgaggcctgcgcgacacgctggcaaagcgaaaaacagcgcttaatccaacaggcggaagaccgcttgccgcggcaacccgccgtcgaacaggtaaaacgcgtggaccggcagttacagctacagctggaagccgcgttcgcgctgatccgcgaagcgcgggaaaaactgatccgcggcggcgatgacagctttcgccgcgtgatccgcctggcgcgggagaagctgcatccgcactggaacggcctgccggagatcgcccacccctttgatgccccgccgggtgaatggcaaagcctgcctgcctggggaaataccgatgcatcatccactgaaaatgcagggagcaacccgctatga

SEQ ID NO: 106445 - DNA, 795 bp, Enterobacter aerogenes
atgaagccagaaaaagctatcgagatattaaaaagacaacgggagcaaatcccagcaatacaaaatgaacgaaggagtacaggaaataacccaagttttaatttatggcaaagaaacactaagaccgccatatcaaaaatatttggtgaagagtcagatcacaaaaaagaatttggctcaattcgatactctttaatggcatttgttggtgatacaccagattatgttttcgataacgcattttgtagtggtttagatgaagcacattctcttcttacgtctatgattgctgagattgaagaatatggaattgacggaaatttcatagagacaaaaaatgatcccgtagctcttgttgaactaatttgccatcaatttcataaggttgcaagacagctacagcaacgacacgataatagacaaaccattgaaataaatgacgaatatgatgttcaggatttatttcatgctcttttgaagattcacttcgaggatgtcagaccagaagaatatacgccaagctatgcaggatcttcaacacgagttgacttcttgttaaagaatgaaaaaatcattatcgagttaaagaaaacgagaaaaaatctcaagcaaaaagaagttggtgagcaattaattgttgatatagctcattatcaaacgcatcctgattgcgaaactttagtgtgttttgtatatgaccctgaaggtagaattgccaatccaattggtgtggagaatgaccttgagcgttgtacaaattcaatttcggtaaaagtaataatctcaccaaaataa

SEQ ID NO: 106446 - DNA, 267 bp, Enterobacter aerogenes
atggctactgtagatgatgttgcacaatggatgaaatcagagctggaaaacacaaactggctatatcaagaaactgttgtatataaaataaaagagttatttggcgatactttcgtatatttgaatgctaatggaaatttatccattgataaaaaagtattagcgaaatttagaaagctaactaatgacacggttatatgggagagaggtgaaaaagcatggcgaaaaagacaaggttatgatgcccctggtcgacagcaggactaa

SEQ ID NO: 106447 - DNA, 675 bp, Enterobacter aerogenes
atgtcgatacggaatatagatatcagatgtggccacagtaggacttctatagtactctctgttattggtgcgtcgttatttactgtcgcagtttggatatttatttttttccttatatttagaccaagttaccttaaattttttggatttgctccaaaatactttctcactaacccattaaaaaacccagactccgctcaaagtgaacacttattagagttaatttctaacggaacaattcttagcctagataacctttggagtatgcaaacagggctttaccaaactataatcactgtcttgatagcgattaatgccattctttgtgcattatcttttgtgctcatcagaaactcaactaattcagtagcccgcgaagaagccagaaaagaaacaattacggaagtttccatacatcttagtagcgccgagtttaacaaaagattaaaaaaaatagttaaagataaaataaaagatgccgattttgatatcggagatataatgcaatcaattgaatatttgagcaactcaattgaagatcttcagaagcaaaatcagttattacaagctcaagtcgatatatctaacaaaaaatcgccttcaaataactccgaaaataaaactataagtgatgatgaacttggtaatgatttgatcattagtgaaggaaaataa

SEQ ID NO: 106448 - DNA, 549 bp, Enterobacter aerogenes
atgatggcttttatcagaaaaaaaacacaagagaagaaagcaccttcttccactgatacatcaatgaaaacaccagagcagcttttacaattcgcacaaaaaaacaatattgacttatatcccttagatgtttcccgactaactattctgctaggaataaaaatgcggctggaacctttaaaaggtgaagactcaggctgcttatacaaggataataaaagccaagagtggattatgcttgtaaattctttacatcacccaaaccgacaaagatttacaatcgctcatgagatcgcacattatttgatgcatagcaagcaactagatttctttaaagatgaagttttctttaggaacggagagtctaatataattgaaatagaagcgaatcgtttcgctgccgaattattaatgccatccgaagcatttagtgtatttattaaacaaaaatctacacttgtagcagatattgccaattacttcggtgtttcagctatggctgtaaggataagagctcagcaactaggatatcaaggacataatttatga

SEQ ID NO: 106449 - DNA, 645 bp, Enterobacter aerogenes
gtggccgttggccggagcatcggccggcaaggttttctcatcgtagccgacgcagtatttatcgaggaacggctggtctaccagattttcattaatcaatacccaggcgataccggcgaccagcgcggcatcggtaccgggacgaatggggatccactcatcttcacgcccggccgcggtatcggtatagcgtgggtcgatgacgatcatgcgggcgttagagcgctcacgcgcctgttccagataccaggtgatgccgccgccgctcatgcgggtttccgccgggttattgccgaacatcaccaccagtttactgttttcaatatccgaggtgctgttgccgtcgttgctaccgtaggtatagggcatggcgcaggcgatctgcgccgtactgtaggtgccgtactggttgagcgatccgccgtagcagttcatcagccgcatcaccggcgaggcggaaggggaagagcgggtcatattgccgccgacaatcccggaagagtagttaatatagaccgcttcgttgccgtactcttttaccacgcgtttcagactttcggcgatggtattcagcgcttcggtccaactaatgcgctcgaactttccttcgccgcgtttgccgacgcgtttcattgggtagtttag

SEQ ID NO: 106450 - DNA, 531 bp, Enterobacter aerogenes
ttgagcacgactaaccatgatcaccacgtctatgtcctgatgggcgtttccggcagtggtaaatccgccgtcgccagcgaagtggcgcatcaactgaaagccgcgtttctcgatggcgattttctgcatccgcgcagcaacatcaccaagatggcttccggcgagccgctgaacgacgatgatcgcaccccgtggctgcaggcgttgaatgacgcggcgtttgccatgcagcgcaccaacaaagtttcgctgatcgtctgctcggcgctgaaaaaaagctaccgtgacattctgcgcaagggcaacccggacctctcctttatctacctgaaaggcgacttcgacgtgattgaaagccgtctgaaggcgcgtaaagggcacttcttcaaaacccaaatgttggtgacgcagtttgaaacactgcaggaaccaggcgctgacgaaagcgatgtgcttatcgtcgatatcgaccagtcactggaaggcgtggtcgccagcaccattgaggtgattaacaaaggcagtaactag

SEQ ID NO: 106451 - DNA, 237 bp, Enterobacter aerogenes
atggatatagaatataaacacaacaactcactgtttttatttggtttatatcctatatataataattttaatgcactcatctgtgtacacaaattaatgattaacatctgtgtctcatatcactcagcattctacatcttcgatgatcgtccggctgctaatgaacatcacaactcctgcaactacaacgtcgttaagcattcctccttcaatctcttctccttccctggtgattaa

SEQ ID NO: 106452 - DNA, 156 bp, Enterobacter aerogenes
atgcgtaatcagcgtaccggcgcagcctggctggtttcatttgattaccgtaatggcctctactggcacgaaccgcagggaaacttacgcaatattcgccgtccttacgcttcacgaagcgtagaagaaaaccttgtactagcggggactcactga

SEQ ID NO: 106453 - DNA, 606 bp, Enterobacter aerogenes
atgatgaccttgcgggtcacgctgcttgaagatgccctgctggcggaaagtatcgaaatccggcagttcgggaatcgctttacgcgactgctcatacaaatagcgcatccagccttcctgagtacggccttcggtaaacttctccgccacccccatgcgtttcgccaactcggtggtcatctcatagatggttttgcattcgaaacgcggtttgatagcctggtcggcaaagatgacataggacatattgccgcaggaggcgtccagcgcgaagtccatctgctcagaggcggtacagtccggcagcagaatatcggcgtatttcgcagacgacgtcatgtggcagtcgattaccacgatcatttcgcacttcttatcgtcctgcaggatttcgtgggtgcggttgatctcggagtgctggttgataaggcagttacccgcgtagttccagatcatcttgatcggcacgtcgagcttatctttgccgcgtacgccatcacgcagcgcggtcatttccggaccacgttcaatcgcatcggtccacataaacatagagatgctggtctcaatcggattttccagcgtcggcatacgttcgaaaggtag

SEQ ID NO: 106454 - DNA, 540 bp, Enterobacter aerogenes
atgattgagatagccgccgcagcagttcatcagacgagcaatcagcgtttttcctggcggccaggaacgagtcagagtcccgccgagcgtaccggttccgtagttcagatagatagattcgttgccataatctttaatcagacgctgcatattgctggcgatagtgtcgaacgcctcttcccagctaatttgttcgaattttccctcaccgcgtttgccgatgcgcttcatcggatatttcagccggtcagggttatagacgcggcggcgcatagagcggcctcgcagacaggcgcgaacctgatgcagaccgtcgtagttatcatcgccggtattatcggtttctacgtacttaatcgcaccatcaaccacgtgcatgcgcagcggacagcggctgccgcagtttactgtgcaggcgctccagaccactttctcactcactggcgccagcgtatcagcggcgtgcgcaatacgcgtgaagggcaaggtcaatgcgttgctggccatcgccaggccgcctatcgccgtggttttcattaa

SEQ ID NO: 106455 - DNA, 135 bp, Enterobacter aerogenes
atgtactccggtcgcttacatggccggagtgtaaattatagtctggagagactgaatccactaaacaaccagatgacggaagagtaccggctgatggctgaaaaaacagaactctcaaaaagtgcgtggaactaa

SEQ ID NO: 106456 - DNA, 261 bp, Enterobacter aerogenes
atgattgcatcactactcaccaatgaatacgtaagtgcctttggatatatagttggggtggtctctgggtgtatagcaatataccagactatgcaagtgaccaagaaaaataatgagatacaacagcttaatgttacgataaatgatctcaattcgcagattacaaatatcacaaccaataggaacaatattaatcaaggggagcgatcccaatatttccaagataataatgggcctgtaaatattgataatcgggggtag

SEQ ID NO: 106457 - DNA, 549 bp, Enterobacter aerogenes
atgggctctggtgttaattttaatgataatactggtcctgtacatataactaaccagccacgagtattaagagccagtgttattgggaaattgatagaaattatttccaatccagttggtggcgggcaaagtttaaacagaagtgcgtcaaatattgacgttaaaatctcgttcaatgatcttaaaagaaacagatgggtagctgaactttacaaagaagatgctttactagttgatgagtctattaaaacacttgatagtataattttaaatggtagtaccaaactgaaaagacaatttagaggctattataacgcggcattggggttatatgggatctatgaaaagccatttaatattgaagttgttaggaaaaactcagataatattattgacgatgttattagagctgctcaagaaacggttagttcatgctctaatttagattctgagtttttacaagaagacattgataatggcattcgtatgattgtgagttattcaattatcgagtgcatagtgctggagaatccaaatgattacaattga

SEQ ID NO: 106458 - DNA, 234 bp, Enterobacter aerogenes
atgattacaattgattcggatccaaaagcaaaccctgtatatattggaagtgtggtacttaggcttttccaaagcaatgattcaatggtgattgaaatttctcggctgtatgatttagtaaatgcagtctttgaattatcgtttgatctttttctttactcattagattggcttttcataatcggcgcaattgagttagatggaaatggtggagtagtatatgcggctcaataa

SEQ ID NO: 106459 - DNA, 2634 bp, Enterobacter aerogenes
atgcagcaaataggttcaaagtggtggaagtttgatttccacacacatacacccgcatcaatggattacggtaaagcagaccatcaaataaaacaaacaatgaccccaaggcaatggttattagattatattcaccacggaattgaatgcatagccgtgaccgatcataatactggatcttggatcgataaattaaaactagaagcagaaaatttaagatcagaggggcattcaatatatatatttccaagtatagaaattacagcacatggtaacattcacatcttaggtatattcgacattgataaaacatctagttttatatatcagataattggagcaactaactactccggtacagatggggatagtgatgcagtaactcaaatcagcccacaagacgtaattgatttaattattagtcgtgggggagttgcgattccagcacatattgacaaagcgagtggactttgcaccgttcattcttcaggtccgaccctaaagcagatacttactaatgcttctgcagttgaaataataagaacgcacgatgaatatgaaaccaaccagccaggttcaagtccactgcgcgggtatgtttcgttacaaacaggacttcctgaggtaattggttcagattctcaccaccctaatacagttggtagagcttttacgtgggtaaaaatgggtacaccatcaattgatggattaaaacttgctttgtttgacggtgatgactcattgaaaagatcagatcaacacccaaactctccaaatatttacgcggaaaatagaattacatccataaagataaacaaaactaaatactgtggaagagtaaatgaattttcaatacaatttcatccatggttaaattgtattataggtggaagaggaagcggtaaatcaaccgttttagagtttatgagaacagctttgggaagagagaaagagctggaacagttatcatctaacaaagaaatgtttaactcttattctaaactagccaaaaaagctcagagcagagatgatgatggtgtctttttagaagatagtagcattcacgtagagtacttaaaaggagaaaatcattataggttagaatggggctatggagaccagaaaatatccataaaccgaattgatggacaaagcattatcctagaagaaggtgatgtaataggtagattccccgtaaaaatattcagtcaaaaacaaatatatgaaatatctcgttcaccgaattatcttttaaacctgattgatgagtcaagtattgttaacttaaccgaatggaattataaatgggaaaatgaagttagcacaatttttcagttaagaagagaagttaaagatttaaagacaaatatatccactaaaagtaccttaactggccacgttgattttcttgaaaatataactagttacattactcaaaccagaccaattaaacttgaagttaattctgaactttttattaatcaaaatgaaacgaccacccaaaacaaaatcctagatattcaacaaaaagttgaagatagtattatcacattcaataagaccatcaatgatgtcactaacgaaattaaaggattaagcaattggtttgactcatctgcactgaatcaagaaattattgccaataaaaatcaatacaccacattagtagctaacctacaagctagtggggttaataacccaagcgaatatgaaagcctcattggtacaagaaaagcactgtcagaacgattaagtaaaatcgctgccgatgaaaaaactattgaacaaaaaaaagaagaaattgttcaaagttataagaagttagttgaacttcgtaaagaactcacagcccggagaagacaattccttgtcgacataaatgataataacactaactttaaagttaatgttgatttttgtggagataaacaattccttgaaagtagttttagaaatgccatcaataaaaatgatactgcattcagcaatgaaatatataatgaagatgacaatggctttttaaatatattaaacgttaagatcaaagaaatttcagaggacaatgatgggattataaaaaaaatccaagaactaaaaaatggattttttgataaaacagctaacacaatattggatgtgaagttaagcaagcgtttcttcgattttaaaaactcattatctgaggaagatctcaccgccttaatatgctggttccctagtgattcaatcacagtaaaatataatgacggtcgaaaatttaaagatctatctcagggctcagcaggccagaaggcagcaacagttctcgcatttttactttcctatggagatgatcctataattttagatcaacctgaagatgatttagataaccaactggtttatgaactcattgtaaaaaaaataaaggaaagcaaatgcaaaaggcaaataattataataactcacaatcctaacattgttgtgaacggagactctgaactagttgtttcattaagccagcagtcaggtattactgatttcctctccttcgggggattacaagaacgtgaagtaaggaaaaacatctgtgacataatggaagggggcaaagacgcatttagtcaacgctatagaagaattgtttctgcttaa

SEQ ID NO: 106460 - DNA, 363 bp, Enterobacter aerogenes
atggctctaacagatatcaaagtcagaacagccaagccaatggataagcaatataagctgaccgatggcaacggtatgcatcttctcgtccatcctaatggttctaagtactggcgtttgcagtaccgttttgacggcaagcaaaagatgctggcacttggggtatatcctgaaatcacattggcggatgctagatcacgccgcgacgaagcgcgtaagctgtggcgaatggcgtcgatccaggagacaaaaagaaaagtgataaggttgagcagagaaaagcccatacttttaaagaggtggcgattgagtggcatagcaccaataaaaagtggtctgaagatcatgcccatcgtgtgctaa

SEQ ID NO: 106461 - DNA, 843 bp, Enterobacter aerogenes
atgtctggacgtcttgaggttgctgcccgtcttcaacagcgaaccacagcaatcatgcgttatgctgtgcagagtggattgattgattataaccccgctcaggagatggctggggcagttgcttctggaaacaggcaacatcgtccgccactggagttaaagtgcatccctgagttacttgagaaaatagatggctataccggcaggccgctaacctgctgggcaacagaacttactttgcttatctttattcgctccagtgagctgcgttttgctcgctggtcagagatagattttaaaacgtcaatgtggacaatcccgccggaacgagagcctattctaggagtgaaacattctcatcgcggttcaaaaatgcgcacaccgcatctggttccgctttctaagcaggcattggcgatcctgaaacagataaaacagttttgtggggagcacgagctgattttcattggcgatcacgacccgcgtaaacccatgagtgaaaacacggttaacagtgccctacgggttatgggttacgacactaaagctgaggtttgcggtcacggctttcgtacaatggcctgtagttcgttaattgagtcagggctatggtcgaaggatgcggttgaaaggcagatgagccatatggaacgcaattcggtgcgggcggcgtatatccataaagcggaacatctggatgagcgcaagttgatgttgcagtggtgggctgattttctggatgcgaaccgggagaaagggattacgccgtttgactatgcgaagatcaaccggggagcaggtcacaggaggaacatatcaaaaacaggcagatacacaatttaa

SEQ ID NO: 106462 - DNA, 1599 bp, Enterobacter aerogenes
ttgaaatttgcacaagccctcagcattctctcaaagtcttcaccgtatgcggtcagtaccgagagagagcactatcaagatcacctcgttggattcaagagatacatatacatcacgacagatatagaagcggattttaaaaaagcactcctatctgctaagtccaatcaagtcatcttcctatgcggaagtagtggtgatggcaagtctgagatcttgacgcagtacagccaaaagcacaaagtgactcatgacttccatttggatgcgactcacagcttcaatccaagccagacagccattcaagctcttgatcaaagattcacccagttcaagcaaagtcataaaccacttgttgtgggtattaacgttggtatgctcggcaattatgcagaagaaggttccaaagagcatagcgacatcaaaaaggtgctcagagactttctctctcgtaagcgatcagcaattccaaagcagtacgtattcttggattttgaagactatccaaaattcaccttcaatgctgagggctgtgcatcagactttgcagaaaaatttctaaaaagattgacagcacaaacgcttgagaatcctttctatgcgctttatgacaaagagctcaaatctctaggtcatactcgcctgacggcaaactatgcgctgctgagtcgcccttcagttcaggaatctctgatcggcttattactcaaagcccgtcttatcaaagatcagttcctcacggcccgagcgttactggatttcattttccagttgctcgctgcggatggctacttgttcgacaacttgtttgcaggcagtgataacgagctgttatcccgtatacagggttttgacccaagtaatctgcacacgcgcaccgtcgatgagtttgtgcttcagcatgagctgggcattgaagatgagcgtttcaatgcgtttagatctaaaattaacgagcttggtttttacgaggtaaccaaagcaacgtcttttcttcgccttttctatttgcttcggggtgacaaagagctcagcaatgagtttgtaacgcctatccaaaacgagttcacaaacaatctggtagaaacctatgcatctgtctggatgcgacatcgtgatttcgatggttcaggaaagatgcgcaaactgcttggcagtttctacaaagaaacgctgatcgcagcgcttcaccgctattgtaatcgtcatgccccaacactcgacaaagacgagtatttagtttctgagcttaatggctacaaaacggcggtgtctcttgaagttaaggccgatttttcagcaatacaaaacagtacactcgaaaaaataggcaccttcaatgtgtatctgaaagtcgatgaacaatcgcttaagccaatgccaattagcgtcaaactacttgagcttttggtcaagattgggcaggggtatcgccctaacaagcacgacaaaaatgctgttttgttacttgatgaagcattggaacagatgctgacagtagctaagcaaaaagagaccttttttattctcaagggtgataagcgctacaaaatcgtgaaagaagaaagtgactattttgaagtgagtggtatgcactaa

SEQ ID NO: 106463 - DNA, 1356 bp, Enterobacter aerogenes
atgacgaccgataatttcacattaccgataaaggccggtttgccacaaacggtagctgataagttccaaaataagaatacgttgagcagttacattcccattcgtacgcaaggcaatgattttgactggtcatcagtcgtgggcttagtcctgcgtggattactttgtaaaaaaatagaaaagtacaattaccaagattttactgcggattgcaaaaacaacttacaaaacaaattgggtgaagaggcattttggagtgtacttgaagatatgtatttcactaatgaaaatatattctcggtaacccctgagtttctgttgtttaagagccagaagagtcaagataacaagtacacgcgcgacatgcgaatggcatccttgtttattaacttacttcaaggacagcaaattgaacgatttgaatctaacttgaacttcctcgaagaggagtttcttaaaacgcttttagacaaaacaaagtcagatcgtgacaaggacttccaagtgaccgagtcaccatatttgccctatatagcagaggcgtttcaacgtgacctcgagtttttaactggttatccgaaatacctgttggatgagttcgagcgtttcttggcattctatggctttgcttacacggctcaattaagcctatcgttgtcggattggaaaacaggtgaagccccaaccgcgaaaccgctgtatttcatcatggatcatgagcgcgccagcagtgaacgtatccatatcaaaaagcacggttacaagctttttagcgaatcgtctttcaagctgtttcccttcctctctatgctggaaaatcttcaaccaaacccagaaaaattaaaaaaacctttgtggcaattggcaaaggatattaagagttcagagcggagtgatctagctgggtatattgaaaattacgcaaaaatgtttcgccacaacagaaaacttgaaacagcaatacctgaaaaagcagaaaccgcaattgattggttggaatatgctttgaagcttgctgaagaacagttcagagaccctaaaaccgaccgtccggggactatcaaaaaatatattaaagcggttgaagaaaacatggctactggcttcgtgcaagctcgtggtcgctctggtcgggtgttagtactcactcaagaccacattattttgcttactaacctggtggtgggtaaggaagaaaagcttcgcttccatgagctgataattggcttacagcaaagggggatttttgttgataagcagacagaacaagagcttattaagttctatgagcgaattggcaacgttgaacgcatgagtgatagtggagatgcagtgtatgtgcgcaaaacaatttga

SEQ ID NO: 106464 - DNA, 5049 bp, Enterobacter aerogenes
atgtgcgcaaaacaatttgaatcgtttctggttgagcagtttttactgcacgcgaaaggaaacatccgcgcaggctatcgctaccagtttaactctcctgaccatgctaatagtcagcgacttttcgatgcgctcttagcgcgaaaaggaggagagagcgaagatcgcaatggtgtagcgctgagctatttagacctagaagactgcaaagtggtgccagtgcttcatagcgaagatgcgtgtgaaacgggctttaccgaaaactacatctctaatttgcgtgacgaaatagcaagccaggaaggtccgttgaagggctgtgcactggtggtgattcacaatagtcgcctagatactctcatcaactcggcggaagatcttggccagtctggccaggtgtggagtccagggaacatcaaattcgctcttagtggctttattgagcaatctgacaaatctcgagacgtttcgctttgccttttggacgaccaatttgacgcgattttggaagatggtgcgaccatgtttggtttcgagtctttatacaaggcagttgaggatggcgagctgtgtttcagcgagctaggcatgtttgaggatccttttgttgctgaattatcgggcaataaaaaacagatcaaacagcgcctagaagaaaaccgtacgctttaccaagagttgtcgtttgaagtagagcattttggtcagcaactcgaagaaaggctgaaaggctttagtagtaggtttatcaaagaacatttttctgacgatggttggaaagatgtggagtttgaaacttatcgagaagagataaaaaggaataagattcagaaccttaagcatgaaggtgaagacgagaccaataatgcgcaagtgattggtcgctacccaaaagaaactaaagcaggattgcgtgaccgtcacttgattattgcactggaagaagggcaaagtgagtttgaacttaaactgagcttttctggcatcagcgatttaagaaaagagcagtttaaagtctcgccagcgaatgcacttggcaaacaagaagtcatcagcacgcgcctaactagtaaaggggcaaacgctactctagcagctagttatgccaatgagcctttgtttttcacgctagcattgaagcgtgacaatacctctgaacaccataacttccgttgcttggttgtcagaaaaggcgagtttcacctcgaggcattcaaaaacattttcgccgttgagccttcaaaaaaacgccttaccttgaaaacggtagacaacagcttggttattaacccggcgctaactgcaaaccgaagcctagatgatgtcggtgaagtggttgaccgcgcagaatttggtgttgtcgattttgaatctttggccaacgagtcagaagaaatcagctttgtggtgaaatcaggtgataattccctgacattttatattgagggtgaacaggtagaaagcagcctgtccttcccattgctgcttaaccaatctcgcttccacaaattgtttgacgatcacgtgtttggcgagctttatccgagtaaagacgttgtcgcgatcgatcatagtgaatttcgcgtcatggagccgcgcattagcctacttcgttgggaagagtgtttcgttcagcaaaagcaagtctacctagcggaatccaacagcatggcgttggaacagttaaggtctattgatgacggtcttcactcagcataccaagcactgtttgactatctagcgagccgacgaacaactatttcgttggtttcgtgggggcctatatttacggcactcgtgaaagcgaccgtggatgcattccttgattatttcaacgcgatcccaactggtggcatgcttaccaaagagcaaaagcttgtgatgcaaatcggtttggttcgcgagaatggtgaagaatattactcgccattccacccaatggtgttggcttactacttaaatctttgtaatgaaatgcaaaaagatgacagctttgctgacttgccaactgtcacgttcaatcgcttggggccaagtggactgcttccgtatgtctatcatcccaagcatgggtttgcctacaaccagcaagtaacagaaaacgggttttgggttaaaagtgtccctcaccagaaaagttgtctgaagttcgttcgcaagctggttaaagaaaagatcaacgagttccaaaaagcgtttctccacttgtttaccggctcagagaagagtgtgttggtgaatgccgtgaatcaagatcgtgcagaagagttattcctcggtttggttgactatgtaaaagataacctcgataaagcggcatcaattcatgtcaacctctacgatgatgagctggttttcaatgcatttgaccagtttgcagaaacgttcaattacgaagaattaaagtcttggttggaattggaccgagagaaagtgcgagaaaatgccgacaccattatcgatattctgcgaacccggctaacttacagcaagtttaccaatgctcaaagtgaacgcgaagggcaagcctactcgcacctgtcttttttcagaaacaacgacaacgtgaagttaacgaccttgagcgttgacgacatgcctagtggtattgcgtgtgatggtctgctgacgggcgacgcttctaaaagtgatgaaggctcatacttcactgcatttggtttgcaaaacgttcaatatagtaaccaaccacacttggaaatagcgaagtatgttggctcgttaatagaaccagcatttaagcccagcacacaatacacgggggccaatgctcctgctcttgcggtcagtgaagactttaaatctctgctagcgcgctcttatgacagctcgatttggaccaccatcatcgacccgaaagtgacgctagacttcttccacgccaatcaatgtatcgtgcttattcattattctgatcagtacaccagctcagccagctacgatgcgataaccgtgacggcacagcgtggtttgttcgaaagggtggttgcacaaagtggcggcaagcagattaacgagttcaatgccttcaatggtgattggctactgaagatgttgacttgcaacgacaccattcgcaaagagcgaactggcattatcggcgcctataaatttgcgacgtgtctggtgcaccaatctgatatcacctgggttccgctctcagttggtgaaatgatccgcgtgtcgggtaacatcggcctgaaaatgaccgacagtgacttctcacgcaatgtgcagagatataaaaaaggcgcgatttcagatgatatactgctggtgggctttaaagagggtaacctttatttgcttcctgtcgaagtgaaaacaggctccacgccagactacaaaaaagcagtacagcaagcgaatgagcttcgccgctatctaacagagcttttgagcgacgagacactggcgtcgaagctataccgaggcttgtttatccgccaagtgttgatgcaaatcgacaaataccgtctgtacaacgtattcagcaatgactatttcgaagccctgctggcagagaaagaagagtggctacgcggtaactacgcgattgcggaacttgagaactatccagcaggtctagtggttagccaccttgaaagcggaagctgtttcgaacctggctataacatgcaggatggcgtgttgaaggttgaccttcctatgtctttgctgccttcactggtgcaacacccgcttcaagtattaatgaacgaaaaggacatcgcacagatctgccatgtgccggcggagtatatgttggtggggcagacagctttgaaaaaaagagagtcgctcgttccattagacgttgtggtcgataagccagaggatttaaaaccgaacctccaaacagaggagccgtcaaagttagctgcagagccaaccccagattatgcgagtgaatgccgagttgaaattggtcagaatacgcttaccggcgaaaaagttttctgggagtacgggcacaaggatttagcaaaccgtcacctgatcatttttggtagctcagggcagggtaagacctactgtatacaaggtttgttgatgagcttggccgatgctcaaattcggtcgctggtgattgattatacaaacggattcttgccgaatcaccttgagccggagtttattgaacgaacaaatcctaaatccaatattctttgtaatgagccatttggtatgtcgccatttagagctcaaaagcaagattttggcgggatttttctcgaagagaagcctcatatggtggctggaagggtagcctctgtttttaacaaggtatattcgacaattggtgagcgccagatcgcagtgctcaatgaagtgattgaatctggtgtccaacgatatggtagtgcttatagcttacagaatatgttggatgacctaaacgaggaagaaactgcaggaccagcacttgcaagcaagctggctcctcttgttaagtctaacttgttttcatctgacagtgataaaagttggaatgatgtgtttgagagtgaacaccaccgctcaacaattatgcaacttgcgtcgcttaaccacgatatttcaatgctttgtactgagtttttactttgggatctatactcctacgcatgtagttacggtagtaaggaaaaaccgattcctattgtattggatgaagtgcagaatctcgatcatcgcttggagagcccattgggcaaaatgttaacggaaggacgcaagtttggggtatccctaattctggcgactcaaacgctaagtatgctgcgtaaagatgagcaagatcgtttattccaggcgtgtcacaagctgatttttgcaccagcaaaaacagagacaaagacgtacgcgaaaattcttgaactgagcatgccaggtacaaagcaggctgagtgggaaaagcaactaggagacctatccaaaggacagtgtttatcagttggctaccatttggataacggtcagttgaagatgagtgttaagaaagtgaaggtttcctccatgttatcccgcctaaacaattctaagggttga

SEQ ID NO: 106465 - DNA, 1086 bp, Enterobacter aerogenes
atgacaaactttgacgctgactattgctattcatttcccgcagtccgcggggtgcaagcggggagaccgttttatattgctacctgccctatgcgtatcatccccaaaatttttagctttgatgaaacagatgtacctccagagttaagagcacaacgcacattgaacaagtcacgcataccagaaatggtacgctatctactggaaaaccctaaagactatgttttttctgcactaacagcgtctattgctgtagacgtccaatttgatgaatactctggctcaaataaccttggtactttgcgtgtccctatggatgcgcagattctcattaacgatggtcagcatcgtcgaaaagctatcgaagatgcactttcagagcgaccagagttaggtcaggataatattccagtactctttttcgttgatgaaggcctacaacgcagccagcaaatgtttgccgatctaaataaatacgcaatccgccctagcccgtctctgtctgcgctgtatgatcaccgcgatgtgagttcaaatcttgctcgttacctggcaatgacagttgagccatttattgggctcacagaacttgagaaatcgagtatcagtgctctttctaacaaattatttacactgagcagcattaaacaggctacgcgagcacttcttggcaaagacccgaagattggtgacatagaagaaaatacaaatatcgcggccctttattggcaaacgctttacactgtaatgccagattggcaacttgctgccaaaaaagaggtttctccagcacagttaaggcaagattacgtgcacgcccacggtataggtctccaggcactgggattacttgggcgagcattaattcaggaagagcctcacgaatggcatgtaaaactcattgctcttaaaagtttcgattggcggaaaagcaatcccgagatggtcaaacgtgccatgcaacacggaaaactcagcaagactagcattgctattcaacttacctgtaatgcactaaaacatgcgttgtcacttcccctcactcctgaagaacaggagcttgaagctcaaatggttgtctcatga

SEQ ID NO: 106466 - DNA, 2190 bp, Enterobacter aerogenes
atgtcctggcttaattcccttttagtggcgcttacatcggtggaaccccattgggtaccttttaccgtgatcggtctcgttacctttgcgttcttctgttttattttcttttatttggttagagcggtcagaattgttaatggcctaaaaaaatacacgcaatcaattaacagccttgaaaacagcacacctgaggctcagcttgagcagcttaagagcctgtttcagcgacctgaactcaggcatgcttggaatgagttcgaagaatcgttgcacctgcagagtgaacagagcaacggggaagagaacattgtacgggttcgggcgacagcaccgagtgccagttttttctcagagcagcaacttgtcgatattcctctgaacaccgaattcttcaaacacctgcccggtattcttaccggtgtggggattatcggtaccttctatggcctgatgattggtctcaatcactttgaccccagcactccagagcaggtctccagcagcgtcaataatctgttgcacgatgtgttgtacgccttcctgggctcagcatttgctattttcgcctccattcttgtcacttggctggaaaagctatccatcgccaagtgctacaaatatctggaaaaattcaccgcatccctcgactccctgtatgacagcggcgttggcgaggaataccttgcctcactggtgaagtccagcaatgaaagcgcgacccaggcacgccatctgaaagagagtctggtcaccgatttacgcgatatgttgttgcatctggccgagagccagaaagtcgaaaatgaacgccttgctaatacgttaagcgcaacttaccgcgagtcaggttcacagtttgccgaccaggtcagcggcgcgattgaaaacagcctgaagtcgccattggataaaattgccggtgcggttcagaccgccagcggtgatcaaagcggcatggtacaaaacatgttgcaggatgtgctgaccgcgtttatggcgaaactcgacaccacctttggtcagcagtttacaaacctcaacgaaatgatgggacaaaccgttggcgccattcaaacaatgcaaaccggtttcgccacgttattacaagatatgcgtcaggtgagcgatgattcccgccagggcagcgcgcagctcatcgagcaactgttatcagagatgaaatctggccagcaagctatgcaggctggcatgaatgacatgctcagtagccttcaggcctcggtggctaaaattggagcagaaggtgaaggtgccggagagcgaatggctcgccaactggaaaaaatgttcgctgatagcgaggcgcgagaaaaagcccaggcagaacatatgaccgcctttattgaagccattcagaattcagtgcagcagggacaaagcgccacaatggaaaaaatggcagcctctgtcgagtcgcttggtgaacaactgggtagcctgtttgggcagattgataagggccagcaacagatttcagcgactcagcaagcgaatcagcagtcccttcacgaacagacacagcgtgtgatgagtgaggtagacgatcagattaaacagctgatcgacactgttgccagccagcatcagggaacgacagaaacacttcgcttgctcgcagaacaaaccaaccgacagattcaggatatgcaaaacggtgcggacaaaatgcgtatggctgccgaacgctttgagcatgcaggtgatcgggtgtcagaagcaaaccaccttaccgctgacgtgctgaataaagcgcaatcggcaggttcatcactctcccttgccaccagcgaactcacttccgttgtggctgattatcgtaacaatcgggaagctgttagcaaatccattgccatgctggagctgctcgccgcaaatacgcagtctgaacaaaccacgcgcaaccaattcatcgccgaccttaagcagcacggtgaacgtctgcagagctataaccgggaagcacaggcctttatggaaaatgtcagtgacgtgctcgggaaagggtttgaagacttctccgaaggtgtttcacgcagcctggataaaacgctgggcaaactggacgtcgaaatggcgaaagcctctactctgctcgcgggttctgtcgaacagatcggagaaagcgtcagcgagcttgatgatgtcctgtcacgcgttcgtgcctaa

SEQ ID NO: 106467 - DNA, 741 bp, Enterobacter aerogenes
atgtttggaaatgcatttggtgttaaaaaacgccgcagcgatgaagcggagaaaccattctggatctcctatgccgatttgatgactgccatgatggtgttatttctggtcgttatggttgcgtctctgagttccgttacacagcgtattcaacgtgcagagcaaggggaaaaagttagggggcaggacatatccagattgtgtgagcgactggagctgcatgctcgcaatgttaacaaaaccatagtggttgattgccacgataaccgtatcagttttggcgaggccggtcgttttgatcacaatcgttttttcctgaatgccgaggggcagaaagcactgcaggatgttgttccgttagtgttagacgctgctgatagtgatgaaggaaaaaaatggtttaagcaaatcgtcattgaagggtttaccgacacagacggctcatatttatacaacttacatctttctctacaacgttcggaatgggtaatgtgtagtctgctggatagccgtagctcgctgcaaaaaagtatttcctcagaacaacagatccagattcgcaaacttttcctcgcgggaggggtatctttcaataacgccaaggaaagcaaggaagctagccgtcgcgtcgagctacgtatgcagttctacggtcttaaagataaacgtgacaaggcaaatgaggtggattttccccctgtagtgaataaagaagtctgccaattggtaatgccgcaatga

SEQ ID NO: 106468 - DNA, 1680 bp, Enterobacter aerogenes
atgacccccgcgctgaatgctcttgctcaacgtattgccactaagctctctgcgagtcaacgggatgaccattatctgcataatgatttccacgcgctggcctccgctgctttcgacatggaaaagcgttttgataaggcagaaaaaatccctttaccgccacaagaaatgcggctggcggctctgcgtcgacttcgccttgcacaagaactttcggaacgagagtggcggatggtgttttatggtctcgccgataatgatccgtcatatcctgatcagccaatactacttgaggatgatgcgttttttcctgaagtaaacaatgcaatcaaaaaacggcttgaaactaaaaccctgaaacgccgagactgggccgcactctgttcaagctattttgcttaccagaacccatcacctgagaccaacccgcactggtgcgtactgcgcggtcatatcgctcagggttacctggtggtgaaagcggctatacgacgagaaaaatcgtggatgaaaaccattgagttttatcacgatatttttaccccgcaggcgggaggcgtgatctccagacagttacttgcgggtgagagcaattcgctctcgtcattagaaaaaatcgcgcaaatccctgatagcagttggttgtggaaacgtattttcacggtgcttttagcgcaactggacacactcgatgatccgcagtttctggacaaaattagctggttgttaggcctggctgggcaatgggttcgtttccgtgatgacatcatgacggcgaccctgactcgctattaccattctatatatcgcgatcagcctcattcggctctgaagcaagctgcgctggaatactgggatagcccgcaactgaaaagccagcagaataaatggcatcagtatgtctctgagccggtggctgcgatggtccggggctggctggcaaaacaagatctgatgcatttctttgaattgctgcgcggtaatggcgatgttgatcaggcacgattgcactattggctgcgattcgccaatcagatgggatttactcgtattgtcatgggtactgatgcctggcaagaccgtggtagcgattttgtgaaattccgcgatgagaataaaggtcggttgagctatttacgaggtgggcgtagtctcgataacgccatgattatgcagatcaatgattatctgttcgtcgagttttcaggaacaggcaatgcaatgtatgcctataggataggacacgcgccatttaaccctgaatctcgtaccctggacatcaaccatctaaaagaccagggacgctgtgtgattcgcatgcctcatacgccacgagctgagggctataacaaggtccgtatcacaggctggatgctgaaatacgacgatgagctacgcaagttggggattcggtggatggcggaagaacccgtcaagtttgtcgataaaaaatcgtcctcccccttttctctgtctgccatcaaaatcatcaatccgttgcgtgatacggctatacagcacttggtagaaggtagttcttgtatcgtcagcgataatcgacaaaaaggtggcgtgctgtccgtacagctcagaacacctgacgacaccatagaaagagagctgttacgactaggctttgcgcctgtgactaaagaatcgcatcgttactggatcaaataa

SEQ ID NO: 106469 - DNA, 3246 bp, Enterobacter aerogenes
atgctgaaacgtctgttaagtaaactgacgggaaaccgtcagcagatagaacgccacctaaagaatcagtaccaggttgaagaaaatgggctcagttttccgcaatcgttggttgacgacccagagctttgggctctggcatcctggcttgagcaactggctgaagaagactatctgatatcactaacagaccggtggttgttgagctgggacgcgctgtatcgcctgctggaggatgaggaacatgccagcagcctgcctcttatcggtgtacctgatgtactgcctttacgcgcaagcctgtgttcacgtggcgcattaagcgatagtgattttcttgtctggatcgctgattgggctacgcttccagcccgcaagccgatccgtttcagtcgtaccggtgccatcttaacccatgaaaatcagcaatacctgttatcgcgggaaaactgggcactcttacaggcaacagaacaactcagtgcgcagcaaaatcagactcctggtgaaaccactaaccagttgggatgggccgctatccgcaaatgtgcgaagcaagcagccgcaaaatttgatgattatttagaaaaaacgcatgtcgtcaaaccaacttcattgtcattacgtctgcgtaaagcaacggttgccgatactgctgttatcgaaattgagccccagttcgaggaccaacctgctaactggctgggcagttttgacaagaactcgcaggttcacgatagctaccgcatccctggagagaatggcgaactcagccacgtcatcatccctcccgaagtgaaagaagtcctgaattcaatacactcgatcccaggtcgtcgagtggccggaagcgaagcgctttcctttgttcgcaatccttataccttcctgggtgaggatgccgccagtgttattgcccctgaagaacatgaacaggcactgtttgatgccaggattttctttcatcatttcaggttgataccgcaactgaatgcggaaagtaagattgcagaagttatgctggtacttgagcctgtttcacctgttccccagccagaaatcacttttgtgttctcagccccctgggaactaggtaaattcgtacagcaactcggtattagcgtcgctgcacagatgcctgccggttcatggcaaggttacgagctggaattaagtcagttcactgaacagcagtggcacgattgccaggcactgctaactcgctggcagcaagaaattgaaggaaaagaatttagcgatgtgctggatattgcgaagtatggcgatcgagtgattggcattggtgagtttgaaaaaatatcctctccttggctgactaaagcgcaaagcgaaaactggcttcctgatgacatcgatttctccgcgttttcagtcgaaactctgtctggctggcaacctgaaaatcttcaccattttgatgaactgcaggagagaattactcaggcagaagccgctggtgaaacgcatatcatcgcaccatggaatgacagccaattaccgttggatgctgctaaaaccttcagtaagaactgggaaaaacagcaaagcactgcaaatgaatctcaaggtaacgttgcagataaaacggcccgagccgtactcaaaattgagcagaatattgaagaagcggcttacatcaaacagcgccgcaattcactcctcaatgcgcgtcatgccgaacctgaaattcctctgagccttaaagagcatatccgactcaaagaccatcaacgtgaaggcgtagcctggctccagcaactcttccttcgttcacctgaggaaaccgcaggttgcctgctggcggatgatatggggcttgggaaaacactgcaaatcctgagcttcctggtatggttcattgaaaaattcccgcaagaaccgccaagtctcattgttgctcctgtctctcttttagataactgggaacgtgaactggacaatttcttctataccgcaggaataccggtattgaaattgtatggcgagaccattaaagcggtgaaatatcccaaacaggcaatccctgctcatctacagtctcaggggatcaaaaacctgcttaaacctggctggcagggtgaggcgaaaatcatactgacaacctacgaaacgcttcgtgatcaagagttttctctggcacgccagccgtggtccattatggtgtgcgacgaggcacaaaaaataaaaaacccagcagcgttaatcacacatgcggccaacgcggtacaagccaggtttaaagtggcatgtacaggaacgccagtcgaaaacacacttgtcgacctgtggagcttatttgattttgcccagccaggattgttaggggcactaaatgaatttggtaaacactatgttcgccccatcgagaacgaagatggccgcgatacagaacggctggaaagcctgcgtgcgctgatagaacctcagactttacgccgaaccaaagaagaggttgcgcgtgatttacctcagaaaattgaagtggaaagctgcaagcaactgacattgtctggcgtgcaaaaacagctctacctttcgtctgttgcaaattggcaacaacagcaagcattgagcgaagggatgcagcaggccggaagcggtatgttaggtttgttacaccgactgaaactcatctgtgcacaccctgcagtagttaatccagagccacgttttcgtgataactcacccaaactgaactggctgctgaaaatactcgaagaaataaaacatacctcgaaagataaggtcattatttttacggagcttcgagatttacagcgcgagcttcaacatgcagtccacctaaagtttggtttccgtcctgtcattatcaatggtgatactagcactaaaagtcgaagccaaaacagccgccagcgcctgattgatgattttcaggctcagcctgggtttggggtgattattctctctacggttgctgtcgggttcggcgttaacgttcagaaggccaatcatgttattcatttcactcgctgctggaatccagccaaagaagatcaggctacggaccgggcgtaccgaattggtcaaaccaaagatgtgtatgtttattacccaacggtaagggatgcggaaatcaccacatttgaagaaactctggatgaccttcttctgcgtcggcgtactttggccagagatatgctgtgcgcaacacctgaactaagcagtgcagattttgagggggttttgaaagggcatagttaa

SEQ ID NO: 106470 - DNA, 903 bp, Enterobacter aerogenes
atgaaacatgaaaaaagccttaaaactgaaaagcaccattggtggccacaaacaatttctaaatattggggaaactcaagaggcttcattaacagagtgaatgtaaagggagaaagtaccgaagtaaaaccaaaatccttagctgtaataaaaaatggtcatataattaaattcaacgataatccagaaaaaaggtcgggttttgatcaaaatttcgaatgtttttttgataaagcagacagtaattcaaacgcaataataaagttattatcagaaattcgaattaagcactttcaatgtgagagtgaaagctctaccaaatctaatatctgttcgtcagaagaacatgaattactcatagaaataattgtttccctggcagtaagaagcccaatgtatagggatgggtgtatggcgattgctgaaaaacttaggggggaaatacgggcgctagagaaggatagattgatcgctatcaatatgagagatgctcttaaaaatattacaaaccatataaaaaacgaagcatcaatttatcttcttctaagtgaagagaaagagtttatctttggtgatggattttatcatgacattccaacagttactatacctggtagagcaccgaccatagtatgtccacttacacctcatatatgtgtcattattgatgcaaaagaaagaaaaaaagatgattcattaatatcagtagcattaaacgaggaagaagtgacaatctgtaatgacaccgttcagatatattcaaaaaatgaaatattttatagggaggataaaccaatattatctgagcactttaaagataatataagaaaagaatattacccttatgacaacccgctattaaagttgcttgaaaaaatcaaggcgcaaaatcattcaagttag

SEQ ID NO: 106471 - DNA, 255 bp, Enterobacter aerogenes
atgaacacgtcaccgtggaacaaagaccgtatcatcggccaaaaaagaccacttcagatatctcatatctgggggatccgaatccggcttgaactggaaggtaaaacgcgcgatttagctctgttcaatatggccctggacagtaagctacgaggctgtgatctggtcaaactcaaagtatctgatgttgcatatggtagctctgttttaagcagagctacggtgttgcaacagaaaaccggtagccctgtgtag

SEQ ID NO: 106472 - DNA, 249 bp, Enterobacter aerogenes
atgacaaagaatcagatgccgaaaataaccagaatgccgacctttgatggtcgggagttaagtgcacaggctgggctacaaatggcagtgaatggtgctcaagttgaagctaggggaatccagatggttgcgcgtccacaacaaggtaatcaaattccggggtatggtcgtcaaacttctgctcagacaacatctcagggtacttttgcacctgtgagtggcccgaagatcccgccgatgaaaaaataa

SEQ ID NO: 106473 - DNA, 876 bp, Enterobacter aerogenes
atgaataaatctgtcggccttcaggcccttgaaaaaccactagcttcgttaccgcataccctacgcaatctcgtttttgaacgtctccaacatctgactcactacgaacccgtcattggcattatgggcaaaacaggtgccggtaaatcatcactttgcaatgctctgttccaaggtgaagtcactccgatcagcaatgtggaggcctgcacgcgtgaggcgctacactttagacttcgtaatggcaatcacagcctaatggttgttgatttacctggtgtgggtgaaagcgagcaacgcgacgaggaatatacagcactgtatcgtcacattctgccagaactggatttagtgctgtgggttatcaaaaccgatgaccgggcactgtcagtggatgaacacttctatcgcaaggtgatggtggcatatcagcatcaagtgctgtttgtgattaatcaggctgacaaggccgaaccctgccatgaatggcgtaccaccgataacacgccgtcaccaactcagcagttgacaattgaggctaagcgaatggcggtgcagcagttgtttcttccacatcatccggtctgtgtggtatcagccagtaccggatgggggctgaatgagatggtggaaaccatgatgcgcagcctgcctgatcgggccaccagcccactaacgacgcaactgcatggcaggctctgcacagagcaggtaaaaaagcaggcgcgtgaacgctttggagagacggtgggtgaagtgtttgatgctaccgcttcaacatcatttctgcctgcccccattcgtaccgttattcaaaccgtgagggaggtcgtcgtatctgttgcccgtgctgtttgggactggattttcttctga

SEQ ID NO: 106474 - DNA, 561 bp, Enterobacter aerogenes
atgtcccagaccgagcgtcgccatgagcggctggcggtccggttatccctcattatcagccgcctggtggcgggcgaaacgctggatatgcgattactggccatcgagtttggagtgtcggtacgtaccctgcgccgggatttccgcgagcgtctgatgtacctggatctggatatcagccacgggcaatgtcgcctgctgtccggcagtcgccagcgtgaactggcaatacaggctttcgcccgtcagtccggggtggatgcactttttccagatatagataaccgtctggttggttcactgctcagcagctccggagaatccccatgccttatctggcacagcgatacttccggggaaccaacccgaccagatgtcttcgtccaccttattcgcgcggtgtctgagcaccgacgggtgacgctgttagcggacggcagtcgctgctcaaaacttgcaccttatcgcctggttctctgtgacggtcactggtatctgaccggtgagcaccagcaccaggtggattggcccctatatttccatacactttttatcacttaa

SEQ ID NO: 106475 - DNA, 213 bp, Enterobacter aerogenes
atggggccagtctaccaggtagcggtttttccgctgaaagatattcacactgtaaccctgcatccggagaacttcgaaccggacttacaaatccgtagcctgctggaaaaacactattttctgcaggcactgcctcatttttaccttgtccgtcagctactggacaacctcacttcgctctctgccgttaatcataacgatatctctgactga

SEQ ID NO: 106476 - DNA, 957 bp, Enterobacter aerogenes
atggcacataaccagactcctggctctcctgtgactttacgctacctgctgatagcaacactggcaattaccggactcagcgtcagtggcattgctctggcagataccataatcaaaaaggcgataccggcaatgaagtgcaaaccggataagaaggaaaacaacgggcagggttcctgtccactcccggcggacctctggcagtcagatccggcttacaaaaaggatatggagtctgcactgcagaattatggtgtgaccggtgtgctgggcccggaaggtagtctgaatgggccgcaggatgccatcgctccggtagtagcagaaggcaaaacatggcttcagggttcattctgtgaacagggtaactgtggggatcactatcttcgttttctttatcagcctgaggaacatcaggtgctgggattttactttgacgggaaagagcactggattggcgacccgctcgaagacgaggcgaagctgctgcgtggaaatactggtgtgagcacggttgcccaactgcctgtatcagcgccagcagtatccccggatggagcaccagctaacactatctgggccttcaccggcgatggagggaagtcactctggcaggtctgcggcaagcagaacagcagctgtacgattatcgccaacaccaaatattacgttgccatcctgaaccgtaaatcagcacacagctgtgcctttggtgacttttatgtagctgaccgggatgctgcatcgtggcaccagtacgataccggcacctgcagtcctgacgcatggattcgcaagggctccatcagcaacggtcagtacttgtcggtagatatcggagtgaacaatcagatggtacagcagtaccccattggctattggtccatgaagaaggagttttctggtaaccgccgtccatcgtggtcaaaagtgaaagccaaaaatcagcaacactga

SEQ ID NO: 106477 - DNA, 366 bp, Enterobacter aerogenes
atgaacaatcactcagaatccggcaccaggccggagaatcccgccatccagcagtggggactgaaccgcgatataacaccttgttttggcgcacgtctggttcaggagggcaaccgtctgcactatctggctgaccgtgcagggtttaacggtgctttcagcgacgaggacgcgttgagcctcgaccaggcatttccattaatacttaaacaactggaactaatgctcatcagcggcgagctcaatctccgctatcagcactgcgtcacgctttaccacaacggactcacctgcgaagccgacacactcggctcctgtggctatgtctacattgctatctatcctgagcagactgagccgcagtaa

SEQ ID NO: 106478 - DNA, 477 bp, Enterobacter aerogenes
atgccgatatgttttcagaaagatgatgagaaagccattactcgggctatagaatccctgaaaagccagctacgggaagaacacaaacgttcaggtcgggctagtaagccttcaccattcgggtatatctgggcaagagagcgtgtaaccggggaacgccctcactaccatctggttctgctgttcaacaaagacgtttacggttatctgggcgattatagtaagcctgacgctgataatatggggactcggatacaaaaagcatggtgcagtgcgattggtctagaatatccttactatgccagtcgggttgaattccctgagaatcacagtgcctggttcatccggcaggatgcgttaacgttaagtcccgattattacgacttcctgctgcgggttgcttacatggcaaaagagtacagtaaagatttccatgatggttatcgtaacttcggtacaagtcagcttatagtttga

SEQ ID NO: 106479 - DNA, 366 bp, Enterobacter aerogenes
atgaacaaaaaaaatgcacacaaaaataatcaagagcataacctgcgatttgagctgctacccagccactttaggcgttgggccttgcatttacactacataactggagtggctgtcgagataatcgttgttacgttattagcctttttaggactggcctgtcaggatttgtgctgtgttcaactgggcaataaacagcgatctcctctggcattatatctgctgctactttcaaggtctggcagtggcaagtcacggatattcagattgctaaagtggagcgggagtttgaagatgcttatcgtgctgagcttgaggaatatgaacgaaaaattattctctgggaggctgagtttaaagtattaa

SEQ ID NO: 106480 - DNA, 366 bp, Enterobacter aerogenes
atgaacaaaaaaaatgcacacaaaaataatcaagagcataacctgcgatttgagctgctacccagccactttaggcgttgggccttgcatttacactacataactggagtggctgtcgagataatcgttgttacgttattagcctttttaggactggcctgtcaggatttgtgctgtgttcaactgggcaataaacagcgatctcctctggcattatatctgctgctactttcaaggtctggcagtggcaagtcacggatattcagattgaacaactggagcgggagtttgaagatgcttatcgtgctgagcttgaggaatatgaacgaaaaattattctctgggaggctgagtttaaagtattaa

SEQ ID NO: 106481 - DNA, 1284 bp, Enterobacter aerogenes
  misc_feature (1262)..(1271): n is a, c, g, or t
ttgactattgccgatgaaggaaaagatactggtattttaacgttatcccttaccggcgatgatcaaacacaaatcaagaatatcatagatagcattagtactaactacttagcacaaaatatcgcaagacaggctgcgcaagatgcgaaaagtttagagtttctaagtgagcagttacctaaagttcgcagcgatttggatcttgcagaggataaattaaatggttatcgtcaacaaaaagattcagtcgatctttctcttgaagctaaagctgtgctcgatcaaattgttaatgtcgataatcagttaaatgaattaacaatcagggaatccgaagtttctcagctgtttacaaaggagcaccctacctataaagcgttaatggaaaaacgtaaaactcttcaggaggaaaagaacaagctgaataaacgcgtatcagcgatgcctgaaactcagcaagaagtattacgtctaagtcgtgatgttgattctggacgtgcagtgtatatgcaactgctgaatcgacaacaggagttgagtattgcaaaatcaagcgcgatcgggaatgtcagaattattgataatgcgataacgcaacctaagccagtcaaacccaataaagtattagttattctgttgggtatcgtaattgggttactcatttccgtaggcttggtactcgccagagtagttttacgtaaaggaattgagtcgccagagcaactggaagaattagggattaacgtctacgcaagtgttcctgtttcagaagaatttgccaaacgcgtagagcgttctagcaaatggaaaaataagaatcgtgatgaagctgctgtgttcctggcgattgaaaacccagctgatttggctatagaatccattagaggcctacgtacgagcttgcattttgcaatgatggaggcgaggaacaatgtattaatgattactggtgcgagtccaaatgctggtaaaacatttattagctcgaatctcgcagaggtaatcgcacagactggaaaaaaagtactatttatagatgcagacttgagaaaaggatatacgcataaattattcaatacagagaataataatggcttatcggacatattgtcaggtaaatcctcaatagagaaagcggtacaaaagatatcaaaaattggcttcgattatatttcaagaggcatggtgccaccaaatccagctgaattactaatgcataagcgttttggagagttgattgcttgggcgaatgaacactatgnnnnnnnnnncaaattcttctga

SEQ ID NO: 106482 - DNA, 165 bp, Enterobacter aerogenes; identical to SEQ ID NO: 96225

SEQ ID NO: 106483 - DNA, 1230 bp, Enterobacter aerogenes
atggcgatcaacaacaatcagtatttatttcaaaaccgtactggcctttgggtgtttcaaatattcgtacctaaatatatgcgccacgtcttcggacataaacgcgcctggcgcaaatccacagggacaaaggatattgttaaggcccggcaattcagaaaccaccttttgattgaattcaataaattgaaagaacagttaaggccagataccgaggagaaacgcatctccggggctattgcagcgctttatcaggaagtgagcactaatcagcagattgagggcagattcagccagcccgtagacaacaaaaacacttcccctactctctgccttatccgtgatgaatacgcagatagctataagaaccggcgctcatattctacattgagcaaatcagcgcgggctgtagagatctttctggcaaccatccaagaaactgacatcaagatcgatatgattgggcggcgcatggtgacgcagtttatccggtcacaacaggaacaggttgcaggtcagacgttacagaactggttaacgtgtttagggagcctctatgagtttgcactgagaacctatgacgccatccatgagggaaaccctttccatggtcataatctggaggctcgcagaactattgagagctaccagccattcaccacaaaacagcttgtgacgctcgtagagaatgcagaggaggaattacaaggcgtgatcctgattgggctatatagtggaatgagactggacgaaatagcatccctcaagcgggacgacattgtagagatagacgggatcagagtgttcagcgtaacaaagtcaaagacgaaggctggcatacggtgcgtccccatacattctaaagtgattcccatcgttgataggtggctctccttaaaatctggtgaatatctcctaccaactgctaacagaattcaacgtgcagacggtaagaaaggcccgtattactcccaggcattcaccagactgagagacaagatgatcctagaggctacaaatcgtcaatgttatcatagccttagaggacattttataacgtacctggacaggaacggggtagaagaaacgagaatcggcactatcacaggccaaattgagaagaaggctaaaacagaggcatttaagacatatagcgcagggccattaatgaaggaattaaaagggattgtagagcttgtatcatatccagaaatagaaaaaggggcgtaa

SEQ ID NO: 106484 - DNA, 366 bp, Enterobacter aerogenes
atgaaaatttctacatcacacctgtgggcatctgatatcgtcgcctatgctgctgacccaatcaattttgatgaggtcgttaaggttaatgcactggcgtctgaaattgtagcaggttcgctactcgataaaactacattgactctcgcaaatgattccaccacagcagaaaacctaattctggttttagatcctgcctgggctggtcaaaagtatttacgtatttgccgcaacggtctggctacttttgtacgccgtgaaaatctggttgctgcatctggtgcagatatggaaaacctgtttaataaactggctgaaaatattatcgtcattgctggcgatgaaaaaatgcttcctaccacctaa

SEQ ID NO: 106485 - DNA, 261 bp, Enterobacter aerogenes
ttgatatatgatgaaaacagcattaaagttttaagtcaggaagagttagaacaccattcggcagatagcatcttaagcatccttcttgatgaaaatcctgatatctcgcctgaccatctggcgaaaatggctgaatgcctggttacgttggggtatggtgtaaatgaatatcgggaataccgaaacggcaccctggacaatattaaactccagacgatgcaggaatggtttagagagacaaacaaaatcaaaaaatattaa

SEQ ID NO: 106486 - DNA, 363 bp, Enterobacter aerogenes
ttgtcattagcgagaaatgtagtatttgaggaaacaacagagatcggatttaacaacaagaccagaaaattcaaagtcccaaaaaagttaaaacctctacaaataatcaaactttacgaaccatctgcaccactaacaccagacgaacaagaaataattaactctatcgatggtgtgacgtggaagcctcgacaacggtatgccggattcaggttcaatcgtgaaccgctcaagtttgaatgtctctttgataacatcaatgagtatgaaggttggcttgagtttaaccgattggaaaatgaacagtaccagggatacgatgttgatattatggatgccgttatatcctgcatcaccgactaa

SEQ ID NO: 106487 - DNA, 570 bp, Enterobacter aerogenes
atgagtcgtatttttgcatattgccgtgtctcgacgaacgagcagacaacagaaaaccaaatcatggcgattcgtcaggctggttatgacatccttgatagtcgagtagtgtctgagaccgtctctggtggtgtacaggccatgcagcgtagagcttttgctaacatggttgatcacaaacttgaggaaggtgacacgctggttgttttaaaacttgaccgcttagggcgcgataacatcgacgtacagcagaccatcaccatgttaatcgagagaggaataaaagttgtctctcttgatttgcctgtgagagacctttcaagcgcagaggggaaactcatgctacagatgttttcatcttttgctgagttcgaaaagtcgcgcattatagagcgaactaaagagggtttagagcgtgccaaacaggaaggtaagatattaggccgccctgttgctacagagacacgcagacgtgtacaggaagccagggagcagggattgagtcagtcaaaggcggctcaatctctggggttgggaatcgctacaattaaacgctactggaacatctag

SEQ ID NO: 106488 - DNA, 711 bp, Enterobacter aerogenes
atgaagattaataatccttttgaaaaaaagttaaagagaagtgtacttgaacatctatataaaaaaggcactcttgatgaaaagaccattgttatcaatgagttaacaattgattctttttctcgaagggctgatcttgttgtcataaaaaatggaaaaatgattgcatatgagatcaaaagtgatgcagatagccttaatagattatcagggcaaatggataaatatcttgactatttcgataaggttgtagtggttactacgtcaaaacacaccccaaatatattaaattctattaatgaaaaaattgaagtttgggagatcgcagatgacaaagttattttaaagaaaagaggtaaattacaacgagtcgagagtaaggaaaaatatcttgatcttttaaaagttcatgagatgaaaaagatggcgcatctatttcagataaaattagaaggaaaaaacaaacaagaagttagaaaaagtattataaaaggattaggtggtatttcttttgaaaaattgaaggcatttacaataaatgctatctctaatcgttatgctttgacatcaaacttgtttatagagaatattctactgagaaagaaagttattcttagtgatatcgatctattaagcccatactcagctcaaaggacaaatatatatattggtcatgaggaaagtatcttaggacaattgatgaagttataa

SEQ ID NO: 106489 - DNA, 150 bp, Enterobacter aerogenes
atgattgaattaacatctaaaggtgacaaatttggcataaactcggcgcaaaaagcaactgcagttagaataaatttgcacctttacacccaactacattacaacgatgaattagaaagcattgatactgatgaagagtgggaggattaa

SEQ ID NO: 106490 - DNA, 957 bp, Enterobacter aerogenes
atgtttaatcatgatgataactttcaatatgactatgctccaatattatcgcttagcccttctgaaatgatggctttagaacaattgccagggaaggataaagacaatattttacccgtaataccgctaaaaggttgggccagctcacagcagcttgaaaactcgctattgagaattgaaaaatctattgacgacaggaagtgggtagcatccattgataaggattacctgttgaataataagacttttctttttactgggaaatatcccagagaggttttttatcaacttaaagagttgttacaaccaacaaatggttatgataattggtataaatttttagtaaaaactatacatgccatacccgttgtaaatttagaggaatcatcagccctcgaattgcaaataaaaaaactatattctcttgatagaggtattgtttttatttttgacttgaaaaacatgactctttcttattatcacgatgtaattcatctgatttccaagatggggatacaagacttattatttatttatgatatcggaactattaatggtgattataataattactatcaaccgatacttaacctgataaataagacaaaagaaaaaatcccttttgtgagggtggcgatatcgggaacgtcatttcctttcaattttgctggctatcatcgaggtgaaaaccctatatttgaaaggttattatttaataaattaaaacaaaacattacatcatatcccactatatattctgaccgaggtagtgcaagaattgaaaaacaaagtggaggcggtaatctacccccgccacgaattgactatgccttgaaaaatgattggcgtttcattaggcatgaattttacgagccgaactgtactctttatgtgctaaagaaattatggaacaagagtattggtcagaaaacttacatctttggggaactcaaatga

SEQ ID NO: 106491 - DNA, 501 bp, Enterobacter aerogenes
atgattatgactaactctaacgaatggttttctctttcagatgagcaagtatccttaattaaaaaaatgcaggaagagtttccaattcctgtaggtgcaatagctaaagaattaggggtaacagttatgaaagcaactttacccgcaggaatctcaggtgaaatcaaggaagacaacggccgttttgttataagagttaatcgtcatgatgtaaaagaaagacagcgtttcaccgttgctcacgaaatagcccacttcctgttacatagagatcgtattggagatggtataacggatgatattctttatcgttccaaactttcagactatatggaggttcaagctaatagacttgcagcagatatattaatgccttggcatttaattcaactaaaattatccgaatataaggagttccgggaagaagagagatatgaaaaaatagctgacgaggcagaggtatcgactacagctattaaaattcgactcggaaaattataa

SEQ ID NO: 106492 - DNA, 663 bp, Enterobacter aerogenes
atgaaaaggttttattcgcagaagatagatagtacactatgtgtactacatactgaaaagtacctaatcatgaaagataaaaaatttaaattcattgttttttttctgacattctttattttttcttgtgtaaataatgtagcatttgcttcaaataaaacaataagcgcacaaccaacagaaaaaaaacttatcgatgataagcaaaacattccacctgagaatatcaagccttatcttgaatcaaaagaaataattgaactaacgtctttaattaattctcagaaaaatgaaattgaagtaatgaggaataaaataaattcattagagaatagtagtggaatgaattttgccgtatggaccggtattttattagcctcagtggcagtaatactgacagtacttggtattgcaatggctgtgttttcatttttcggatataagaaaataatggatagtgttaaagaggttgcgacgaccatatctacaacagaggcagctattgtttcagaacgactcgcacctacagtaacagaagatgtgttattaaaacttatagaaggtagaagcttcgataaaataatttacgaagctgtacaaaaagtaacgtatcgagggattagattttcatcagaggacatgctggaggaggaaccaaaatga

SEQ ID NO: 106493 - DNA, 654 bp, Enterobacter aerogenes
atgcttttattcgatgatactaaccctatgaagcttgacccaagccatgcacctttcaacgtggcttatctgcaacgcattgcacaagtgctctataaagcactgcaggaccatccgcaaaccacagttatcagggtggatctgcacttaccggaagacggggatgtgggcgacagtattatcagcgatgctgatttaagccaggggctaatgtcccgttttatcgactcactgaaagctcaaatagtcgcttaccgacaccaaaaagccagagaaggtaaacgctgccatcgcacttcagttcgctatgtctgggtgttggagcagcctgaacttgatggcaagaagcattaccacctggctctcctcgtcaacaccgacacattcaatgctctgggaagctacgatgaacaggggaaaggtttggcatccctgattcagaacgcctggctgagtgcaatgaagaaacgagactggtctgaatatcttacgttaatccattttccggataaccctctggctttcctggacctcaataagcaggatttcagaaaaaaactggaggcactgactttccgtctgagctacatggcaaaacatcgcaccaagcgctatagcagtaccgaacgctcattcggctgcagccagggttga

SEQ ID NO: 106494 - DNA, 597 bp, Enterobacter aerogenes
atgaaagactataaacctcgttacgaagaactccataaatgttaccagacctggttgacagattttacgaagctggcggtcaggcagggcatgtgccatcagaacatatatcattaccataatctcacggttggtttccttaagtttccagaggaggagcccattattgccgttgtccctcaatgcctccatcatcttatttacggtaaaacagcggcagcatcattatcaattgatgatgacctgagcgttagcttattcacccaggagcatctgttggttcatcaccctatgctggagggtattttgctgtctgaatgcgtgcgtttaaaacagcgctcttttaccaataagctcatcaacctgtttcggaccttcgaaggtaatgaattacgactgaagctggtctggttgtgctggtacgatttgatgctggggaattgccttgatgactggactgacagactcaagttcaaaaagagcaaagaaatggatatctggattaatgaccgacaggcagaaaactcagcgtttaccagaatgatggatgagtatgtctgctttgcatggagaacagcctccgaaccactgggctaa

SEQ ID NO: 106495 - DNA, 1005 bp, Enterobacter aerogenes
atggcatggttaaaaaaagaccatagagcatgtcacttttttttgttccatttaactacagaattttcaggatgggcggaacgcagtagagttaaacagaataacaatgacactgctctacgcgagcctcaaagtgtatgggaaacacttgcgttgacgcctgatagccatttatatcagactgatgctggttttttttccccattacaagatttacctgctgaattagaacggcagattaatgaaggactggatattgaagtagctagtgaaaaaataaaaatctcggacgatgttacagaggttaatattggtttggttgataataaaattaaaagcaataacaaattcccatcggcagatttaatttttgcagacggcgtcaccaactcaaatgttaaaaactctatcaatatacgcaacagcttctttagcgttattgaacagttatttattagacattattctaatcgagagatattgaatattatatcggatgtcacttctttgtggggaatgcaattcaaaagattcccgtcacctttttcctggcttaacagtaaaaataaagaacattgccagtggctttgggatgagatgcataagcgctgtgttggcattccatttcaacctcgggatcatattcaacaatggcattttattatagcgacgttcgataactggaaagggtggacaatagaacagctagattatttaacggagaaaaacccaaagcgcaatccagacaaattattttctgatcgcctggaatcaaataagaaagaaattgaacacaaaacgattctccttgatgagctcaaaaaggcatgggagcaaagggaaagaagagcccgaagagcaaaggatcctgttgccgccagactaactaaagcggctcaaaaaaaactagagtttattgccagcatagagaaaaccacatcaaaggacattcttaacgaactgattgacaacgcttttcatgaagcgaagcgtaaagccttgtaa

SEQ ID NO: 106496 - DNA, 180 bp, Enterobacter aerogenes
atgaaaatcatcagcaaacgccaggcaatgaccctgtaccggcaacaacctggctcccgactgtttcgcttcagtacgggcaaatataaggacatacgcggcgttctggccgtgtttgctgaacgtcgtcaggaccgcaatggtccctatgtcattcttcgaagcgttactctcaattaa

SEQ ID NO: 106497 - DNA, 369 bp, Enterobacter aerogenes
atgaaaaatctacctgctacaatttcgcgggcggcgaagccctgtctgtcgcccgttgcagtctggcaaatgttacttactcgtctgcttgagcagcactatggcctaatgctaagcgacacaccttttagcgatgaaaccgttataaaggagcatatcgatgccggtatcactctggctaatgccgttaactttctggtagagaaatatgagttagttcgtatcgatcgcaatggatttacctctccggtacaagcaccatatttgactacgacagacattcttcaagctaggaaagcgtgcgggctgatgagccggtgttcttacagggaggtaagtaatattgttcttagccgatcacggctgtga

SEQ ID NO: 106498 - DNA, 144 bp, Enterobacter aerogenes
atgccagaggaagccacaccggaaaacattaaggctttagccagcattcagcatccgagcatggttatatttcggtggagcgccgcccaatgcaacgcggcggctgatacctggaacgcccgccgcgcagccaccctgaagtag

SEQ ID NO: 106499 - DNA, 969 bp, Enterobacter aerogenes
atgattaagtcacctatcaagtgggcgggcggtaaatttcgcgccatgccgcagctgcttgagcacctgccgaaagccgattgcttaatagagccattcgttggcagcggtaccgtatttatgaatacggaataccgccgctacgtcctctgcgacagcaatcgcgcgctgatcaacttctttcgcgtgctgacctccgacattgagcggctgattggcactgctcgcggaatgtttctgaatggtaataacgaagaacggtattacaaccgcagagagctatttaattcgatgcagtggagtgacacgggtaagcccgataccgccttgctgtatgccgctttgttcctgtacctgaatcgccatagttttaacggggtatatcgcgttaatcagaagggtgagcataacgtcccgttcgggaaatatgccgcaccttactttccggctgacgagatgcgcagctttgccgaaaaggccaacgacacaaaagccgttttcgttgatggcgattttcgccacaccatccccaacgccgcgcgactggtatatgacgcggttttttactgcgatcccccctacatcccggccagcaaaaccgccaacttcaccgcttacggaaagccgtttaccacgctcgatcaccgcgacttggtgacattactggtagctgtaaatcgccagcagggtacccgctcggtgatatccaacagcgacaccccggaaacccgcgaaatctactccgctttcaatctccatgccttcagcgttcgccgctccgttagtgccaaaagccgcgatatggccggtgaagtgatcggcgttcttagcggcgatgtgggttgcaaccctggcgcatgtggagcttggacgagcaccactgaacatctgcggccggcgacgacgtggatcgggtttgacccgaccgtcggattcgataacggggagccatctgatgaacacgcttga

SEQ ID NO: 106500 - DNA, 1023 bp, Enterobacter aerogenes
atgtcatctcttgatgcatattttcgtgatgttactcatcacgaatttgttttagatacagcttttagaactcaaaagctagatgatgttgataaacagacttgtaattgtccaatacccgaacttcatgagcttgcacctttaattattgctcaaaaggatttctcatacccatatttatccaatactcttattcttactctacaagatgctcagtactttcctcagggtagtagtaacccaacacacctatgcctcttgttcaacgcaacagacaggaacggttcaactacagttctgaggaatccaaaacgaaaaacaagaagaaaaatagaaccagatcataaggatggagaaggttacgagttctcttctcacattttaatttctctttcaggccttaaaagatcctacaaggcagtaataagccgtgcaccaaaaatctcaacaaacttaatagagttgttttttaacaaaattttattccaaatttcacgaactaatacagaaactttctctattaatgcaaaaaccaatgccactgatacatctacgggtaaaactaaaaaggttttatacaaacccgtagccgaattacgtggaacattagatatagagctattcaataaaatgaacagtggcggcttatcggaggttacgctgataagatatgacactgggacaatcaatgtccctgatatgaatggggtagtaattccaattgaaagcacaatgaaaataaaaccagtacagcaatctaaagatgtaatttcctggctaaaagatattggtggacattttaataaaaagacaaatggtaattacaaagacatcagagtcaaatattatgatgacaatagtaaaacgcgaactgtaacaatgcacactaataatataaaattagaatcacttgaaaaaacctttatcaaaagaagtgtaattgatggcttcagttcgcgcttaagcaactcatatgataatatagacgcagagattacaattaaactccatagcattttatga

SEQ ID NO: 106501 - DNA, 573 bp, Enterobacter aerogenes
atgtacataatacatcaattatttagaccatttggatacctaagcataaaaggcgtcaatggaaaattcatatatgattggttaatcccatttattttatcagttttatcaatgggttacttctatggcctgaccacgccatccatttctttaagcaatgatgggtttttcaaaaacaccatatcattcatttccattctgccgggattttacatcgctgctttagccgccatcgcgactttcaatagaaagcaaatagatgatcctttaattagcgataatggtaccccttacatttatgtaaagggagtaaaagagaatggaaaaccatatcaaacaaaagaagatatgacacgcagattattcctctgcatgttattttcctttctcactgctgaaagtattgttcttattatgttacataactttgtgtcacctctaatatcgacagcaacaaatatttattgcttagcattttattcatttattttcttattaattctttggcagctgttagtgaccactttttttggtctttactatctcggagacagaattcatctcaataactga

SEQ ID NO: 106502 - DNA, 354 bp, Enterobacter aerogenes
atgaaaaccaaaagtcttgaagacctacagaaggaattggctgactttgccaaggttagggattgggataaattccattcaccaaagaatctctcaattgcattgtctgttgaagctagcgaattaattgaaatattccaatggctcactgaggaagagagtaagaatctcaactctaagcagttaacagaagctgaacaagaagtggctgatattcttttatatctcttacagattacagataaattaaatatcaacatcctcgacgcagcttataaaaagctcgaagctaacgataaaaaatatccaattgaagcctgctttggttcagcgaagaagtacactgagtgctag

SEQ ID NO: 106503 - DNA, 858 bp, Enterobacter aerogenes
gtgatttgggtagtatatatatcagataaacctcactcgaaaattaattttccgattggtatgaatcaaggagtttggggagtaaaggagacaaagaaaggtactattcagaatataaagaaagatgatctaattgccttcgtttattcaatttcttggctaaaatctgagggggcatctcctcctggcttctcccgcgtgggcaaagaacacctgcaaaatttccgtggtttggtgcaaaagattattatcggtcaagtaacaagaggctattataccgcctctacgaaagtttggcctgatgatgagatttatccccatcgcttcgacttcaaaattgttcaagattatggtgaagatatctactttggtacagagttcttcaatgaggcattcgttgaggctgtgcgttattctgcctgtacacagggttcgattactcaggccatctcgatagagcagcttacagagattagctgcaatgaggatgagcaagctgatgaagagtcatctgctatagtgtctagtttagaaggtaagcccataacgagattacaccagtcccgggagagagatcccaaaatcattaagcaaaagaaagaacagacacttaacgcaacaggtaaacttcagtgcgaaatctgttcaatggattttgaggaaacatacggtaaactcggccgcggttttgcagaatgccatcacaaaaaccccctaagtcttcgagataaaaatgaagaaacagccctttgtgatctggcaattgtctgttcaaattgtcacaggatgcttcataggaaacgtccatggctaactcttgatgacctgagggagatttatgaaaaccaaaagtcttga

SEQ ID NO: 106504 - DNA, 543 bp, Enterobacter aerogenes
atgggtactgttgcagaactgattgcacgttataaagtagagatggataagcttggtaatgttgaagctgttaagacaggaaaacaccattctgatgaagcttacaagcaagtctctgtttcagaagaacaacgtaaggctgaattgcttaaacttgctccagccattaaagatggttcggtgaagaaaactgaaatcatcgcagaagttaaaagcaagggtggacgcctaacccctgtacaggttaatgaatggcttggtgatgctgttcctgttcagcgtcgttctaaggctgctgaaggcccttcagatggtggtaagacctacacgataagcgaaatggaatattttgctcttgagtccatcaagaaagatgctgcacctgtgtgggaagaagctctgaaaagtggatttgaaattaaaaagagacaagctgaagaagagctgagagcgaagttcgacaaggaacaggaagagcttcacaagaaaatggatgctgagcgtgatgcactgctagagaagcttacaaatccagctaaataa

SEQ ID NO: 106505 - DNA, 1956 bp, Enterobacter aerogenes
atggctaattcatggaatgaagtgagggctacacaagccttcttagatagtagcccagagaaaagagaggctatcagacaagattattttcaacaggttgtagctccaaacgctcaggctaaaggtctggatgttgatagcatctatcgtgactacatggctaacactgatgctcatccatattacaatcacgaaagcaaagctgacatgtcctctggtgagtggttaaacaaccagtgggaacaggttaaagaccttgggaaaggtgctgaagcttatgttaataagtggtctggttctgattatagcaatgaagatattaatcaattcaagagggctattggctctgatgaagggcaggcattaaagaccactgctgctattggtgcttctgttgtagctccagagcttatccctgagcttgcaggaggtgctttggtgggtgagggtgcaaacttggcctctcgctctatctggcttgctaatagcgccgcttctaacattgtttcttcagcggcttatcagttggttgatagtggtgatgttaatgcttccaccctcgcaacagatgctgctattggcatgggcttagaaggcggcctgagaggggttgctcattttccttcattgttcaaagctaagtcagcagatgtaatggctgctgccggggctacagctcgtgctcagcatgatgttgacaccctgattaatgccaagaaaaatgcttacaccgcttcagctaacacggcaacacttgagagtgtgtggaatgccttgaaggaagaaaagcctaatattcatttcgatgaggtgttagctgaatggggagagaaagagccagcaatgatgaagggttctcacagtcagttacagcgattgcaggatacactgttccctgatggtgttcctgaaggccttactactgaagcacttaaatctcgtatcaaggctgcttctctacaaactcagcgtgacctgttggctgccaagaatgaatttccccttgagagtcctgctgttgctatccgggctatggagtcaatgcgtgaggctggcttaggtgttcctaatatctcgatgctatctaaagacttggctaatgacctgaatatgaatgacagcattgttgataagcttcttaactggagtgatagctattcatatgcctctccgtattttcgtagaaggacagcagataaagccattcgtaatattcttgacagctccattgatatgattgacaaggtggctgagcgtgaccttcttcagagtcgaaacattgacagtgatattccagttggtgacagtcttgaccatgtgctgcatggcagtaaatcacgagcattcaattatcgctctatcaatacacagaagttgctcaagaaactcagagagcttaaaggtagcgctcgtcttaatcctgataacttcggtagcatgattagtgaagctcaggatttagtgtatggtgaaaacgctgttagtgagcttagtcaggtgagggataatcttgctgtggtcaacctcatcaatcagatgaagaagacggatgatgcaccgcttgccttcaagctcattcttgctaaggtgttgggaaccatcccggacgttgtaacatcccctttcaaatacatcaaagaccgtagccgggcttctgctgcaattcttggtaaaaggctctatcacgagcatggtgaggttctggatgagatgaatgatattaactatgaccttcagcagtggggtgacatgcttactgatgaagagaaggctaataactacaagcgcctcaaggagcttcgggctgatgaggggctacaagattacatcctgagtgaaatcgccaaggatagtgattttgctaagaagctgaaaaccttgctgttagctgttccagtggtcagggctgctgcaccgtccatcagcgctcaactacgtgaagccaatagcaaatag

SEQ ID NO: 106506 - DNA, 1824 bp, Enterobacter aerogenes
atgaataacattgtaatgcctaatgatgggcaacctcacgcaattggtggtgggatttttagtccatatggaacaacagtagatattgactctctggctactcaggccttgcaggatagtaatgcattgcaatatgccaatccttatccgggtcattctgtttatgcagatggtgagagtcttccattgtcaccagctcagactgtgcagaatcaagtacgacaggctcaggtaagccgtatgcaagagactgccaaggccacccctatctatggtagcggggccgtcacacagcctacaccccatcaggattacatggggatgatgaagaaggctcatgatgatgcattaaatagtaagcagcgctggaatattaagcctcctgaagataaggatattacttggggtatgtggcttggtagcgcaatggttagcctgttcgtaggggcgactacgggaaacatcggtcaggctatttcagcaggtggtttagcagcacttaatattcatgaccaaggctatgcccgtcaggagcgtgagaaagaatgtcagaagctgttagaccaaggctactcttatgatgctgtctatcagtggtatgagagcggtgataataaatccctgattaaagaccgtgaacagatggagaagaagcgtgagtttgatgcgactaattctctgaatgctcagcgagctaatgacactgctgttaatcagaatatcaatgctcaggccaatgctgctcgtgctggatatgatgtgacgatgccgggtgatgcctctacagagggtttagccaacaccattaagagccttgagggtggtacagagcatgtcatgaacagcgctggtgcttctggtgtctatcagcagaaacaaggcttctggaatcaatacaagccttctgatgctcctgctaatgtgaatgatgccactgaagaacagcagcgtagtgcggctatcaactttattcagcagatgcaagccaaaggctattcaccagagcagattttagctggttacaatcagggtgaaggcgctctacagaatgccattgctaatggtggtcagaatcactggatggactatctgaagccagaagggcaggcctatttacgcaatgctgcaagtcgctgggcttccctgaattacaatgggcatcctacgggcattcgtggcggtcgtaatggtggtggactgatgaatcagggtggcttcattactatgcctgatggctctcagaagcctgttgagattgctcgtgatggaagtaagaagattatcaagcaaggctctacagcttattatcagggaactgatggtacgttgattcctgttgatagcgtgtcctctactgcaacacctacacagaatgcagctaatagccttctgctggataacatcaatactcttcaagctcttccagagggaacagtgaatgatattactggcttcacaggtggccttggtgatttgccatacggtgcagatagtgaaaccaatgttcttggtggtggtgctcgtaaggcatataacgcagccaatcagattaatggtgctctgttaactggtggtgtcagcaatgctaaggctatgggtgcaagtggtattaacaccaagcaagaggctgatatgtatttctctgctatgcctcgccctgacttctcaagctatgacagtttgatggatagtcttgatgcaattgttgaatacactgacaagttcaatgctgctcatggtacttccattggtaatggacgtgttaagaaggttgttagtaataacaccatctctgacagtgagcgcaatagcttaggatattaa

SEQ ID NO: 106507 - DNA, 561 bp, Enterobacter aerogenes
atgaatgatagttttaataagatgctgtctgattatcaaggattgaaagaatctattcttaatcatgggagtattaataagggtgcaactgaaagcacctctgaacaaattaaatgggctgtagcgcaagaggaaggttttgttcctcattacaatcctaatctggataagctcgtttggatgcctaagcaagaaacaccaatggagcaaattcctaatgtaatgaaagcaggtggctctatgtctcctgagcaactcgctaatgtctatccaatccttcagtggaagaatacaagcggctttaacgatgctttggcagggattattacagaccttcactccgggcatattaccacccagcgagcagaagaattagtaatgcagcttgctaaagaggcttataaagaggctcgtaatgctacaagcttctctgaaggtaagctcaagccacaggataaagtaagcactaaagaccttcgtgattctattatcagcgttaaaggtagtgattatgcttctgagtcctcctatttaaaacaattacaaagggaggctgaataa

SEQ ID NO: 106508 - DNA, 441 bp, Enterobacter aerogenes
atgtcaaatatgtgggatagcatggtgaatgccttcacccctacagatagttatgaagatagttatggctatgctcagccttcttatgctggggctggtagcttagatgctcaggatgttgctgatattgattctggtgattacttacaggctggtcatggtgtagcttctgctgttcctcagagtgatattctgatggctgacagtggaatggttaaggacaagagctggatgcatcaggggatgcaagctgcgttgaaaggtatggctcgtatgcctaaaggtggcttaggtggtggtagtggtggtgcgagtggattcgctccctctggcagcgtttctgctaaaggcgatacatccaccatcaatgagattaataagatgattaagggaagccctcctttggctgacttgggtaaatatagcaagctgtttgggtaa

SEQ ID NO: 106509 - DNA, 957 bp, Enterobacter aerogenes
atggttatgacagccatgatgattgggggtgcagcttctttaggtcgctcccttggtcgaagtgcagtaggtaatagcagaagtagcagctctacacatgattccaccactaacaagaagagctggctggctcctacagtggaacctatcattacagatttgctgaatggtggtatggatgttaattatatcaatcagggtattgcagggcttacacctgctgagcagcaggctctagaatattttggtagtggcgctggtattcaggctggtcagaatgtttctggctggggtgctggcatggttaacagtggagttggcctgtataaagacttgctctctggtaacactggtgtaaataagaatgcctttaagtctgatgttatgggcttgtattcaggcgctggtgattacatgaatactcagaatgcagccattgagcagaatgcagaacttaacattgcaaactcattggcaggtaatgctgaaagcttcaataacaccaatagcggcgtgtctggtagttcaatgcagaacaatgcaaatatggcagttatgcaggctggtatgtctgatgctgctcagcgtgaagctgatgtaagtaatatggtgatgaaaggtgctgtagggcttacggctaatggcatgtcaatgcaggctggccttattgctaatggtgctaagggtgctgttgggctaggtcagaatgcatttacacaaggtcttaaaatgtccagtggtgcagcagccaatcaatttaagtcaggtttgtttcagcagtatttcaatcaggaaactattaataatgaccgtcgtaatggcatggttaacactaaccttcctctgatggaaaccctgatggctcttaatacagcgtctggttggtcaaacattgatacaacaaccacttcccattcatccagcagctcaagcagtaagagcgggctattccattaa

SEQ ID NO: 106510 - DNA, 1026 bp, Enterobacter aerogenes
atgggaatggaatttgatatgaacagcaatgctgtaatggatgcgttcgttaatggctttgctgatgaagcgcctgtagagcgtgatgagaaggcttctgagggtttctctcgtaaagctgatgaatcctatcgtaatggtagtggtattgatgctgaagtgcctgagagctttactgaaggttattgggatgtagatgaagacggtgaagacttctttgttgaagatgttgccgatagtgattatgtagcccctgatgatggtgatgttagtgacaatgctaccttctcttcattcagcgacatggatgatgattatgagcttgagctgttctctgatgatatgggtaataccaccaaggcaactaaagctgatgtagttgaagccttcaagattaaagagcgctatgaggcaatgaataagatcatcatgggtgctggtaaagatcttcaggcctatgaagaggctgtgattgaccgtattgaaggtgctacttatcagagtgagcgcatcattgctgagtgtcagaatgctttacgttcccctcacatcacttccgctgagaaggctcaggcttacgacactatcgagcgtgagaagcagaagcttcagatgattaacagtcatgtcagcaatacacgagctgagcgaaagaaagcagagcttgcagctaatcatgccaaggtaagcagcgttagtcacatgatgatgaatgcttatcgttgggatggtgagacgcttggctcagttgataactatctggcttcaacgctacctagttacgatgcttcaatgctttcccctgaattgctggtcttggcccgtaaggctatggaagctgataaaggcaaggctaacagtgctaatgagcgaatcagcaaggtggttaaaacttctggtaacagtgtcaatgcttctgaacgtgcagcccgtaaagcagcaagtaataagcaatcacaggctatgcagaagatgaagaagggaatgctaagcgctggtgaaatgtttagctatcttcaggactaa

SEQ ID NO: 106511 - DNA, 222 bp, Enterobacter aerogenes
atgactaacttatttctttcagtggataagctgaaggctaccattgctattcttaattacgagaataagcaggtgttgaatcaattattaaatgcagatgaagacaatatttttccactgcaaagggcatataaaactattgggctaatcatcaataaactcgaacaaatgaaagagggtgatgtagctggatatgaaacagaaattaaggatggtgtgtaa

SEQ ID NO: 106512 - DNA, 1989 bp, Enterobacter aerogenes
atgcgtactggcgttaacaatctgcttgctcagttggttcccatgtttaccagtgatgaaaagagcgtggttaaggttaaagctgttgatggtcgtgttcctcaacaggtagctgatgctctgacgaaagctatcaatgctgtagccctgagcgataatcaggtaagacgcttatacactgatatgcttacagaaatgctggtctttggtgacacgttcactaaggttcatcggtatgagaaagtgttaaacacctacgctgataagtttgaagacatgccagaggctgagcttcatcttttgattcagcagctgcttgagcttggttattcagaggaagatatttccattgagcacgagccatctaccagaaccgtttataagaaagaacgtgaactgattgccaatgcaacaggcattcctctggctctggttcctaagaagctcacgacagttacaggctctattaaggccatccttcgagagaagaacatcaaggttgagatgcttccatttgaggagtgctatgttccttctcgctatcgtggggatgtaagccagagtcattatttctgtcatgagcaaactgtccgtaaagagctgttgcttgctgaaggctttgaccatgcgtctgttgaagctgctacaggtgttacagaccgctctccacaagcgtttaacgctggacgaacaacatcactcaatcaaaatgattacagtgaatataacagcgactgtgattatgcagtgattcaggagcactactggcgtggtgtttatgatggcaaagaggaagctctctatcgtattaccacctgcaagaatgcatctgagctgatgaagcgtaacgggaaggttgatattgaacgtattgactttatccctgttcagaatggtaagtgtatgactctccctgctgagttttggggtcaaagcttgtttgatttgctggctccattgcaggatgcaaagacacgcttacagcgagctattgtccttaatgctgagactgctgctaatggtagttacacatccatcaagggtgctgtagaccgtcgctcattgcttgaggctggtaggccgggtgctgttgtggaaatgacacagcccaatgctattcagttattcccatatcatcagcttcctaattcagcgatggaactggataaccagcttgataacgaaatcaaggcaatcattaacggtgctcttggggctaatagccttactgaagacatggctaacatgtcaggtactgctattgctctgctacagagtcaggataagacagcatcaatgacactggctcatacgattgctgagactctattcaagccaatgtacacagctttgcttgctctgatgcaagagcttggtaagcccctgatgattgagggtaaagcgcttgatttgaagatgttgcctaatgaccttgaatttattgtagatattgatactgctgatgatgacgccaatacggctcagaacctgatgaacttcctttctacagcgattcagcagaatggtggtttgccttccgttatcactcaggagaacctctacaacatctataacacctatcttgagacagctacgggtatgggtgatgtgagcacctatctgacggctccagaagatttaccaccaccaacaaccatgcagaaggttatggaagcagctcaattcaagcaggctatctatgctgaccagattgcagaggctggtgtaaccaagcttaaagctgacattgaaaagactctggcagaagctgctaaatctacagcagagctacagaagactctcactgacattgataacagcaaggttgagatggtcttgaagaataaggctgttgaggttgatgagttcaatgcagtggttaatgcaaaggataagggcttatctgctggtcaggatgctctaaagctcgcctctgatattaatcaacagagttttgaaatgactcagcaactggctatggctgcttaa

SEQ ID NO: 106513 - DNA, 1638 bp, Enterobacter aerogenes
atggacgtgtacaagcagagggaagcctatcagaagctcctgaatgagcttgagagtgttgacttaacaacccttggtgttgatgcattatcaaagatcaaagatctcctagaggcttacagatcgtttaaacgctataaccgattagcattcttcaagccttacgattaccaacgtaaattctttagagcaggtagtgaatacagctatcgaatgctttgctgtggcaaccagatgggcaagtcttacggggcttcctatgaatatgctcagcacttaacaggcatgtacgctgatgattgggatggtgacaggtggctagatggtggtcatgtctattgggctattggtgtaacgctggacagtacgtccaaggtgttgcagaagctcttgcttggtacatcagacattcgacggattgatgagattggtactggtgctatccctcgtgattgcatcgacactgacaccatgattaaggatgggcctcactgcaaagaagtgctgattaagcatgtaagtggttcaggagctacaagtttcaacacgctgcgcttctatagctcatcagtcactgaatctaccctgatggggcagactgttggcggcatgatttgggctgatgaacagtttacggacagtgaaagactccacgctcagtttgtggctcgtatcacagccggtggtggtcgcattctctacacgatgacgcctgagaatggtagtgagcttgctctgtatgacatgttcaagggtgacactacaggccgtctttattggcagaacgctacatggtgggattgtcctcatctaacagaggataagattgaggccttacttgaggctatccctgaatggttgcgtaagctcaagagtgaaggtgttcctgtctctggtgctggtgctatctttcctttcagtgatagtgacatgtttcagtattgctcttgggatatggttaggcctacatggaatgtcatagctggcgttgacttcggttattcaggggtgagggatgattcaacaatcatcttctgtgctcatgataaagaatcggacaccatctacattattgatgcatggtttagcagtgatgacaggaatcacaacatccttagtcacatgcctgagtatatggcttcaatcatcacctcatgcccttatccaaacatccccgttatttgtcctaatgatgcctctggaattattcagggaacaacaaagacaagggcacaggtgttacgtgataacggatgcaatgtctattacgagaattactatctcccatatcaactaacaggtagcgataagaaatcgacttccaaggttggtggtttgaattacatggttgagtggttcagcaagggcaagctcaagattaacctacagaccgtatcaagtggcctgaatgcattgcataaagaaatcaggggttatgtctggcaggacagcaagggaagtagtggggttataaagcctgtagataagaatgaccacggtattgatgcattacgttatgcagctacaacagttaaatggtttggtcagatggcagccagttgtattaagaatgctggtaatgacattcacgattacaacagagagaacaatattaaatggcaggaagcctacagctaa

SEQ ID NO: 106514 - DNA, 351 bp, Enterobacter aerogenes
atgaatcaagatagcaaaggtcgctttgttgctggtaatcgagccgctaaaggaagaggtaggcgcagatttactgaagactttcagcagtggattcaaagtaatggaacggtaactgatgcaacgaagcgattgcatgaaattattaatagccctgactgctctactaaagaggtgttatccgctattaccatcctgtttaacaatgcacttatcccagtgagcaaagatattgaattagatattgcagaagcacagcatgaatctgtggaagctctgatggatgatgtaaaggagctattacatggacgtgtacaagcagagggaagcctatcagaagctcctgaatga

SEQ ID NO: 106515 - DNA, 303 bp, Enterobacter aerogenes
atgaaacatgtgaataacaatgaacttactacagaagaagcagcactaatccttgaaggaagctcttgtgtgagtcgtatgtctgaggttgatatcatctcatctgaaacagaggtgaatagcctgttccttgagaatcctgatgattacgttagtaagagctggatgatggatttgtttggtaagaacaagctggtcgtagacattgaacagcatgatgtagatagtattattgatggcttccttgataccttggctcttcttggtgtcgatgctgaggtgactatcttaggggaggcttaa

SEQ ID NO: 106516 - DNA, 171 bp, Enterobacter aerogenes
atgaaatcttcctcactaattgctgtgctagccctgatgactagtttgtttacgttcagtgaattaaccgccctatctcataagcttgaacatgccacatcttctattgaagttaaacttactgcacatgatgtaaatatgactcatgtctctattggtcgaggtgaataa

SEQ ID NO: 106517 - DNA, 267 bp, Enterobacter aerogenes
atgactgaacaacatgctttcgacgcttctcttttgaatgctgcctcttctattgcgctgaacagtgaagagcgttatgaacttactgatgctaagcgtgagctggtagatattatgaagcgctcaggtgttaattatgaagaacgtgtagctgtactgaataccattgatgataaatatctggctaataagcgagtagctttcatgttccatgctcttcagaatgttgaagttgctattaatgatgctctggaggcttttcaatga

SEQ ID NO: 106518 - DNA, 306 bp, Enterobacter aerogenes
atgacttataaattaaaagctgtagccaataaggctgcaattactaaacgcaagcaggagcttgtaggctgtttgtcttatgtaatgactaaaggcaatttaaccagagctgaagcagcaagacatttagaaattgatgctcataacttcggtgcttacatgcgtgacacttctcgcgttgggctaaagacattggaacgcttccttattgaacttgatgacattgtagaggacatgaagaaagcctcttataacggtggaagtgaatctattattaacgaattaaaaggaaaccataatgactga

SEQ ID NO: 106519 - DNA, 708 bp, Enterobacter aerogenes
atgaggcatgtagtcattacatcatcacttgctccagcaacattcaccaatgaggaaggcgtgagcctttccattgctgctgtcagtagtaccggtagacgtacaaaagaaattagctatcacactacaaaggctgttgaactcagagctgctattgctaagcgtaacatcctagccaatagagacagtctgaacgaacagagggctatcaataagggcaagccttatgagtgtaataaggaaggggtgtttcaggacgctgctgatatccaccctcctgaatacgacaagaagcaagctacttataataatcgtcttcgtgaagctcttggttattcaaaaaattatcagcaaaccaaattattgctaggcctaattagctaccttgcaccagaggatgaacgttcaatagaccagctatacaaaagttactgcgctcaccttaaagatatggggaggaagaaaatcattccagctaaaaagaaagagcaaaagaaagagggaaagaaaccaaccgctcctaagctcagtgctacctattcaaatgggatgcctcgcataaatcgcgtctcttacagggctgataaagagctttatgtagtcagtatgattactgacgatggaaaggtggttaagacaaccagagattacaataaagccattgaattacgtgatgaattattagctattaaaaataaagccctctaa

SEQ ID NO: 106520 - DNA, 675 bp, Enterobacter aerogenes
atgaataagaaacatagctatgaattagatgtaaacaatgtagatgaagagatgatgaccactaagcttgatatgacagaagaggaagctcaatttctgcttgattatcgaaacaagtttaagcttttagaaggtaataatagtgctctggttaacttagaagagctatgggaagcacttgataaaccatacggaacttatcagaactggctagacaaaaaagcacaaaatatcctcgaacgtttaaaaacgcaaatttgcgttattgaacagaagactcgtggaagaggtgcaaacaagaagattcgttctattaacactgagtcagctaaagcattggcaatgatggctaatagcgaggcgggtgatattgttcgtcaatacttcattactatcgaaaagctattcaagaaagtgtgtgaacacaataatcttcggattagtattgagagtcgcgctaagaaggttgctcatgatgcagcaaagaaaacatacggaaaccgttttgctatgggtgctgctaaggttcgattcaatcgcttaatggctgatattagtggaaagcgtaatgacctatccactgacttagttgaatacgaacatgcagcccgctcagttgaaagaatgattgttaagggtgttactgatgatgtcattttaagtgctcatatctaa

SEQ ID NO: 106521 - DNA, 228 bp, Enterobacter aerogenes
atgacacacactgaacgtaaagaacaaatcaagcagatgctattaactgaactacttgcaaagcatcgctatctcactacagcagctaaacactatggcatcaaccaatcaattctattcaatgcatttaagcctgaacgaagtgtaacttatgaaacgctgatgaacattgctgtaatgatgggatataacactgaaattattgttgaacgcaaggaaggtgaataa

SEQ ID NO: 106522 - DNA, 729 bp, Enterobacter aerogenes
atgaataatttaattgaatttaagcaaaacaaatttgagatgccttttcagatgtttgcaaaggaactctgccaacgttgctctaagttaacaatcacagaagtaatgatttactctgttatgtgggatgactatttattctacacaaaagaaagaggtcactatacaccatctcaagcagatattgctgctgatgcctgtacatcacgtaagacagttaacgcgacaatccagaaactcattggtctggggcttattgttgaagttaatgaatataagggagttgccagcacttacaaggttattaactatcgtgagattgctgatgaattatttgactgtgagccagttgctgaaagaaaacgacgcacacaggaagagaatcaggctaagcgcgatgagtatcatgctactaaagtaactgaacccgtatctgttaacacccctgttagtgttattacaccagagccagtcattctacctatcattgtagaaccagagccaatgaacgagcctgttacagctaatgtaaccaatgacaaagcgagcgttagcgagcaaccaaccccagtcccagcggacacagctactaaattcgtttcatcagcttcagaaggaatgaaggaagtaatcaaaattgatagtcaccaagcctttatagctaacaaagccttgaaagagtgtggtgaatttcttatcaacaacattctatttaaggtggcaacatga

SEQ ID NO: 106523 - DNA, 681 bp, Enterobacter aerogenes
atgcaaaacgaattaaaaaaaatccaggaaggtttttctggctcagtgtatcgtttttttgatcaggcggaatacgctgagcaattttgtaaaggaaaactaagggttagcacattagaggcctgtagaggatatgagaatgctgagcaaggagataaaggtgaaggagtatggcagcataccataagtgatattcatattcctaatgcccaagatgttgatgtatcaggtttactatatgcaggtgttagggttgatgcctcagcaacaaacgtagtgatcaaaaatgtctctggtggcaaaaaaatagagaatgcttacgtcttatgtactactaagttatttaatccggatgctttttctacatcttttgggaagtattgtgttgaaatatcaaacgcacaatgctttgcgcacgccgttactgaagctatacataaatatcacagagatctcaaatgggttcgtgcagattttgggaatgttgattatatagaaaacagaagtggtgttgattttgagaagccagctaaccatatagcatttttgaaaccaaaaaacccatataaaagccaagaagagtttaggtttttatggtcgttaagtgaaccacacttagacattcggcctttagatttgaatatacccagcattgctaagtattgtaaaagagtcttatag

SEQ ID NO: 106524 - DNA, 522 bp, Enterobacter aerogenes
atgaaaaaactcatcccattattacttatttttccctttgtagccttcgcctccacagatttagttgatagtgcaagatatatcgtcccgatatcaggtccaggaatacaagttactaacccatataccgactataaggtgattagcggtatcgataacggtaaaaaaactgaagtgaatgtgtcggtattaaacctacatacctataaggagaatgcagacctaagcgaatctaataaaaattacgcaaaaggaagtaaaaatgcattcagtcacagtggtaatgtttacacagagaattatataaaactctcatcagaagctgctctaaactcaacaaaagaagacttaaaaaaattatattgtacgcctgatggtttttatccggcgtcttcaccggaaagatttttttcagatatacggaaagaacataaaactataatgattaattattatagtgattcaggaaaaacccttatgtttgggtttggggtttctcccgaatcatgtaaatcgaaatag

SEQ ID NO: 106525 - DNA, 525 bp, Enterobacter aerogenes
atgtctgaagaaaaaggacttgtacggcgtataactgaggccgccactagcgcaggtggtgctctgaaaggagcagttgatttagcaaaagaagttaatgcgttgcaggtcgattacaacgttaaaactaaaactattgatctacttgataaacttattgatgcacgtacaggacaattcgcgctaacggaacttctgggcgaagcgaaacagcgcatcgttgaactcgaatcccttctggaaaagaaacaggactgggatagtgagaaattgaactatgaggtgtaccacccgattaccaatacggtggtctatgtactgaagccgacggacgaccctgagttccaacctcattatctttgtactacatgctatgagtcgggagtgaagtctatacttcaataccattctgctaatattgcttataaaattctcaagtgccataaatgctccgctgaatatatgttccccaaaaacatagaggtcagtggcaaaatacctgcaccgttacggcctgccagatga

SEQ ID NO: 106526 - DNA, 696 bp, Enterobacter aerogenes
atggcaatggtttccttgataaatattccttgcccgcattgccttcggcacaatgcggttttggaggttgagggtgagacgtatctatcactgaaaagaacttttgcgcttatggctatatgccgaagttgttcgggggcggtcatcgcagaagttgaaccggatagtttggtatcaagaggtggtggttttctcgcatattcacggaattatcaaaaggatatgcttttagactgtcggccttcctacagtagtcagaatggtctcgttcaacgcacttacccccatgctgatactgttaaagcgcctgactccactcctgaaagggttggtaaatttttcattgaagctaaagaaaatttttctcgcggaaattatgaaacctgtggttctctttgccggaaagttattgatttagcaacaaaacatatggcattggcagaggatatctctgcatggaagttgcaaaaacgtatggagcagttaaaagcaaaaggtgccataacccaagaaatgtatgattgggctgatatcgttcgactcgatggtaatgaacaaactcactctgaagatgagttcgataaccatagtgcgaaggctgttttagattttaccgaaactttccttttgtacgcttttaccctacccgctatggttaaagctaaaagggcggaaactgaagacgggaacgagtaa

SEQ ID NO: 106527 - DNA, 402 bp, Enterobacter aerogenes
atgctcaaccctgtaaatcatactctcaatgcgggctctgtcgggatttataaagctgaaccttatgtcatgagtgctgatgtctacagcgtcgctccccatactggtcgtgcaggctggagctggtacaccggttctgcaggctgggcctggcgtttacttaccgaggaattactggggataaaacgcaccggcactgactttagtgttcatgccctattaccggatgcgtggccgtctttttctattgcttatcagtatggtgaaagccactatcagattagtgtctcacgcggcgatgcagaatattccgtgacgctggatggtgttctcctccctgatgacagaataccgctgaaggatgatggacaaaaccatacggttgagatcattcagaactga

SEQ ID NO: 106528 - DNA, 165 bp, Enterobacter aerogenes
atgaccaaaatttatacgctcacgctggccccatcactcgatagcgcaacgctgacaccgcaaatataccctggctgtagcgcaccggtattcgaacccggaggcggcgggatcaaggtacaaaccggaaacataggtaacactttagaccggatacatgggtaa

SEQ ID NO: 106529 - DNA, 1251 bp, Enterobacter aerogenes
atgaatacacaagtagaacacacgtcgtacacagataaagctgggtacatttggcgtaagcgttttggaaaaaatacactctccattgctcttcagacgaaagaggttggtgaggcatcacgccgtagtgcttctatgaccatgaggtttatgcagctcgaacttttgaacattgagtttggtgctatccgtgaagctctgaaactgtaccgtgatgaaattattaagcatgagaagcttgcaagattacaggctctcgtttcaggagcggcttcacaggaagccctgcaaggcactatctcaccccaagccactcaatcacccaatctaagtgacagaatcgctcaaatcgtcttacaggaggaattagagcaggtgcaaggccattcctttgaagaggctaagtccacctactttgatgctcatacgggagacttcataggggcatggagtgttaaaacggttagggattacagctcttgtattgacagatttattgtctggtgtgctgctacatcaatagcatcagtggaagctgttactaaagaaaacatcatttcattcaaacagtatatggatgcagaaggtttagctcccaacactaaacaaaaggtacttacacgattaggtagcatgtttaagttcattgttgatgttaaggagtggagggataaaaacccaatcacagggatgatgtataagaaggtggctgttgttactaaaaaggaagagataacacccgctcagttcagtgcagctatggagcagagtgatacaaagaacgacttgcaaacatcatgggctatgtatctgctttatcattgtggcttacgtgtatcagagcttactcagataactaaggctgattatcgtgagattgaaggaattaagtgcattagcatcaataaagacaatggtaaatcagtgaagaatgagagttcaattagaaacattcctctgaatgactctctgttagctctcggtgcatggaagcaaaagccagttatgaaatatggtgataacaggacaatggatagagtgagcagggcgttcaagttgataggcctgaagcgtacaacacattgcttccgtcatagtctctctaatcgccttcgtgacaccagcgctactgactccatcagggcttacatcttaggtcacactcaggcaaacatgacagaccgtgtttatgtcactcgtgacccactcatacagatgaaggctgctcttgatgttacagggagcgtttaa

SEQ ID NO: 106530 - DNA, 150 bp, Enterobacter aerogenes
atggacaacgtatctcttgaagaaagcgaagacatgcaatacaaaagccaccagtttgttcccatcataccaaaagagtttgttcctcaaaccttgatacctattggtgatgtggaacttgaacaattattaaatgaactggggatgtga

SEQ ID NO: 106531 - DNA, 987 bp, Enterobacter aerogenes
ttggaacctgatttttcagtgtcaatagaagggcatttcgaggaaggtgaagctcagcgtttaggtaagtttgcctttgacgtaacgaaagccctagcagaaggatgtaagctaaatatttccaagctgaagaagattgttatatcccctgatttcgctgcggcccttcaaaaagtaacctcagaatataatcacaaagcccctagctcgttcacacaaagcaaacaggcaacggcagcaggacagctagttactaaaacaggccctgacggtcagccagaagaatttacactggtactatctacaagttttttcgttgcactatttaatgaagagggtagatacgtagcgagtgatgaaggggtgaagatagcactgcaccttttgcatcatgagttgattcacgttcatgagaaaaacactctaacctgtttgctaggtggctttaatattaatgagtatggtgatgctcttcttatttcatctacccgcgtatggtctgagtatcttgctaattttatggcttcaacttcagtgcagcaggaaacagttaatgactttctggataatcttttagcagtgttaaatgaagtgcctctggagattgagaagctggttttgaactatgctgaaagagacttaccgttagatgaaatgtatttcgaagtaaaaaagagaattaggcttatagttaattcatatggctatgcttttggttatgttgacggggttggcattgacctctcagtctacttccctgagttggctacagcgctttcatgttcaaagctaagtaagcctttgggtaagctatatgatgctcttcgtgaattaatggttaagtataaaaataatgatattgaaggttatgatgattttagtgaagtgtcagaagcaatagattctatatttacttcattcggcttaacgctaacttgcgctgatatgactactgtcaatgcagaatttcatattcatgtggcctaa

SEQ ID NO: 106532 - DNA, 1737 bp, Enterobacter aerogenes
atggtattagggaaaactgtcgatgacctgaacctacaagctgaggtttctgagagttttttccctttatttggtaaaggctgggcaaggataacaggtcagaaagcaaataatattactgttgagcaattatatattccgccagttgcagaagaaacacctacaattacggtcgtggtagaaaaggataataaattcctggtccgtggtgaagatttcgaaggtgttggagagataggtgtaccatttgataaaaatggggtgacacttctcatcagcaagataaattccgaagtaggaactgaatttgaagtcaaatatctgacaaaacttgaagcaataaccaatctccaaaaatcatttgcagttaatgatcaagggaaaaatacggggatgcttgagttaacttacgttggtgataacccagataaaatttcacagattttaagaaaaataagtgacaactatctggaacaaaacatcacaaggcaagcagcacaagattcgaagagcttagagtttcttaagcaacagttacctcaagttagaaataatttagatatctctgagcaaaaattaaacgattatagaaggcaaaaagactcagtagatttaactatggaggcgaaatctgttctcgatcaaatagttaatgttgacaatcaattgaatgcattaacatttagagaagcagagatttcacagttatatactaaggaccatcctacatataaagcgctaattgagaaaaaaggcacgcttgtaaaagaaaaagagaggctaagcaaaaaagttaattcaatgcctgagactcagcaggaagtattacgactaagtcgggatgtggaatctggtagagctgtttatatgcaattgcttaatagggagcaagaattaaatatcgcaaaatcaagtgtgattggtaatgtgcgtattgtagacaatgctattacatcaccccatccaattaaacccaagaaaactattattgcgctcttaggtattattttcgggttgatagtatctattggtctcgtacttttgaaaatcattcttaaaaagggtattgagaatccagagcaacttgaagagattggtctaaatgtatacgcaagcgttcctgtttcaaaatggatgaccggttctgatagtcgattaaaaaaagccaaatctggtaaaatgccaaaatatcaaattggcttattggctacgatgaacccaactgatttggcaatagaagcaatccgaagtttgaggacaacattacattttgccatgatggaagctcagaataatatccttatgatttctggtgcaagtccaaatgcaggcaaaacatttattagtagtaacctctcagctgtgatatctcagtcaggtttgaaggtgttatttatagacgctgatatgcgaaaaggctatatccaccatgtgcttggagtctctgaggaaaacggattatctgatttattgtcagggaagattaatgctgaacaagcaattaagaaagttaaagaccttggatttgattttatttcgcgaggcaaaatcccacctaatcctgctgagctattgatgcatcctcgctgcaacgaatttttgaaatgggcgtcaaaagaatatgatctggtaattattgacactccaccaattctggccgttactgatgcagcaattatcggccagtattcggggacttcattcctggtagttaaattcgagcagaaagcaaactaa

SEQ ID NO: 106533 - DNA, 249 bp, Enterobacter aerogenes
atggtagctaatagtaaacagtcgtctaaagatgtatctcatctggcagcagagacccttaacaatccaaacgcctcggcgattcagaaaagtttagcaggttctgtactgtcccaagccgggacaaaaaaccagactggtgcagatatggaagccaaagcatcagcggcattaaaaaatccgcgctcaagtgatatcaccaaaacgctagctggttcagttgtttctcaatcgaacaaaaaacgttaa

SEQ ID NO: 106534 - DNA, 213 bp, Enterobacter aerogenes
atgaaattagctttgatcggtactggcaacatgccgcttatgcagtggattctagatggcaagggcgatgatgcgattatcaacatgtcagcgctggcgcgtcgtcttggctgtagcagatcgagcctattggatcggattcaaacctacggatttgatagtgccgtgaagttttacctgaacctaaaaagaagtaagacgttacaagtataa

SEQ ID NO: 106535 - DNA, 1059 bp, Enterobacter aerogenes
atgactatttctacctctggttttaaggttaattatttcactggcgcgtacaaagagcggttcggggataatttcctactccaagcgttggatattttcaaagaaaagacaagcccactgcctaaactggaactcgacgagcttcacgaaaatatgcaggccgtttcttccagtgtgaaccgttacagcacggaagtttcagtgacagatcgccccctcgcaaaaaatcgcctgattgaaatcccccattttgtaacagttgggaatgtgagcgcagccgatttccagtcacgtcgccgggcctctacccagcgtcagactctgcgcgatgagttaatctctgatgaggggattcgccagtatctgaaattccgagccaccaaagaagagtatcttgctcgcgcattattcaccggacaggttctgtcaccgtatacacaagatcgtcctgtgctggattttgaagatgaattcgggcagctaaatgcaactgcaaccgtggacgcgaccaaatcaggtgatggcccgttagaagatctggacaccgcagcaaacgcaatgagttttgctctaggtggttggatgtcgtctatgcgtggcgtggtggttctgtgttcaccggaagcgtacaaggcgattaaattccatccctctatgctgacactggttaatcatggcgtgttgccagatagcaacctcttcaatgcgagcgttaaggccagccttcctgcattccaagcaatgaccatcgatggtctgacattcgtcaatactggtttgctataccgcgagtttatccccgcagggcaggcgttcatggttcctctattcggtgcaaacaatgttgttggtagtgacctgcaaccattcgaggtttaccacgggccagcctcacgagatgcacgtctagcggcagaggaagcagagagccaattcttccagtattcatgggaggaccaccttcacaacaccacgatccagtcagaatatggcctgctgccgatctgctacaaccagtcaatgattacccgtttaacggtgaatacgtcagaaggctaa

SEQ ID NO: 106536 - DNA, 336 bp, Enterobacter aerogenes
atgttgatgtacgaagagaactattccccgcaggatgtgatcgcctatcgagacgatgaggtgttttcccataaaacccgcactttcgccacgctggcaattgatgttgtgcctggcacactgcttacctcagaaggtgaagcatactccagtggtagcgatgttctgatcgcgctggatgaccaaaaggctggcactaatgttccggtgattgttgtagaccgaggctgcatcttaaagcgcaatggtctgaaagcggttacccctgctgcgctggcgaacgccatcactgctatcgaaacagacggtaaaaaccgtgtttctatttctgaataa

SEQ ID NO: 106537 - DNA, 2166 bp, Enterobacter aerogenes
atgtctaacggcaacattattgtaacttctacagttaacaaggttacttgggtagttgatgagtcaagttacaaacgggcgctcaagcggattaaatccctaaagagcgctcacgagaagcctgctaaagcgctggaggctgcacagaaacgcgcctcgcagagtgaaggcaaagcagcattagccgcagcgaaagcccagacagcgaagctacgccaggccaaacagatcagcgctgaacagcagaaacaagcacaactttcagccaaggttgcccaacaagagcaggcccacgctaaaaagatggctgctattaacgctcgtggtgcagtccagcaaatcaatcaggccgatcaactggcgaaacagaatgagcgccttgcccgtattagcgcgaaggtcagagcggcggcacggtcaagatcgatgacctataacccagatatgggtggcacagctcccgaaccaggattattagcagcgcaaacagcagcaatgaatcgcggccatgcttctatcactaacgatattatccagacgaaaaaggcgatcgccctggaagagaagcgccagcgtgagaaagaagccagcctcaagcgccagagcactgcatacgatactctgcgccgggctagcttgacgatcagccatatcgaaggtgccagcctggctgacaaaatgaaagcggtgcaggcaatcaaagaggctaccaagggatactccgagcagcgttataccattgcagagatgagacacgagctagcgaaagcgactctggaaaccagacgccaggcacgattaaaccgccagattgttaaggataaagcgaaagctgagcgtgctggtcgcattaatgccgaacgtttgacccgtgagcgcaaagagcgcggttatggtggactgacgacggcaggcgttattgcaggtggttccctgattggctcaatgggtgttgctcgtgttggtcagaccctacaagggagcctcgaacgttcacgcgatgtgaaaaagctgcaacagtatggaatctcacaattggagtttaccgcacttcaggatctggctatgagccgcgttggttactcactgagtgctgataaattaagcgatctaaataaagatacactcgaaaagtctggggaattgctgaataccggttcctttaaacgcaactctaaaacaggtgctgtaacgttctctgggggcggtgagtttgcggatatagtgaaccttacgttgcaatccaccaacggcaatcagaaggtagcccagaaagtgatcgatgaactccaaaagctggattttccgacctttatcacttacctgaaacagttgcagaaaactttcaaatggacggacaaccagacccggcacctggctgaggctgtgaatgatggttcggtcttcctcgaagtgttcaatgatgaggggcagggcttgataaatcgtatgcagaaactttctgctgaaggatggaccctatctgatgcacagcaggccaaccttgataagctagcggcattaggtgctgagtataatcgagtgcaaaccagccttgcggatcacttctctgcatcatttgttcagggtcttggagaatacgccaccaatacggatacactccgtcagtcaatgacaggattaatcccgatagctgacaacctgggccaatcgctaggtgaactcacgactaacgttatcgcgtgggcctcgcaaattggtggagaactccagaaaggtgcgacattaccgagcgctatctataacaccactgttgatgaaggcagcaatgccgcagcgcagtggattaaagataagacaggttttgatcctcgtgtcatcggtcagacgcttaagcagatttacccgtggctggatagttctgcacagaacaatatcggcagtggacaggcctggacaaatccggggttaacccgtggggttgcaggattcagtcaaccacaactcaccttcactccgcctgagccattcggttctactggatggagaccagacaactccaggtttaatctgactggtgaggcgacggttaaagtcgaggttgagcagactctgaatgctggcgttttagatggtcttattgatacaaagatcaacgataacaacgtcagacagcagaatatgatactgggtatagctgattaa

SEQ ID NO: 106538 - DNA, 345 bp, Enterobacter aerogenes
atgaaaactctagaagaccttcgcgccagcctcctggaagcgatgagcacagcagccgatcccgtagaattaaacaagagcgcggaggaagtgctagctgacgctgtccaggaatacctgtcagcaccgagtgtcgccactagtgaaccagctccggggcgtggcagaccagggatcgcaatcactcacaaattacagggttatagtgcaaacaaccgcccggtgtcactcctaatgaaatcaggcattagcattcaaattaataaagccgctcttgataatgccgctcctgagattctcgccgcactcaagcgtctgggctatgacgttaatcaggaggtgtaa

SEQ ID NO: 106539 - DNA, 495 bp, Enterobacter aerogenes
ttgtgtgagcaggcaactggcgatagccagactaccaacagccttcaggctgacctagaagaacaactccctgatctaactcgtcttttcaaaaatcgtcgtaaagacgactcaattgttaaaaccgcacagaaattattggtaatgggtatgacttgcggcaaagtcgcattgctcctccgacttgatcctgagtttgtggcagagttggcggagacgtggaaccctcggtttagacgaattacatatacaaatcaatatgtaactagattaactgtccgccaatattttgagtccggtagtatgctggcaacgatatgccgagatttgcagatgccgctttttaccgtcatatcgcaccttcactctgagggcgtgacggatcagcagattacgagccgtatgcctgaccgtacagaccctctatacattgcataccgcaaaaccgtaaaacaccacgcgaacagaaagcacaaacccatccagttgcactaa

SEQ ID NO: 106540 - DNA, 834 bp, Enterobacter aerogenes
atgacaaccgagacagtagaaactaatcagccagacgaacaggacggcacttttgatcgcaattacaccgaggttaagcgcctgaaagtcttgattgccgacgatggaaccaaaatcccgttcagcgcgaacatgaaagtagtctatgcatacctctacaccttccagacgaacaaagaccgcagaaactaccctgagccaatccatcccaatatggaaataatcgcgtgggaaaatggcattactaaacccacggcgcaaaaggctgtggatgatttaatgcgggcgggggtgttgattaaggaccaaattcaggttgggagcgggtttaagtccaacaattacgttgtgttgaaaccctcgaaagtggtggcgcgtggcgtcactccaccgcatccaaatgcttctaaatattcaactgccgaggagagcggtaagaatgaacaaaaacgtgctgtggaatctttcgtgctggaatctgccgcgcctattgctggaaaacccgacggcgtacctcctgtgggtgttcctgtcgatgttgatttatccggttgtgatgatccatcactgagtgatttggtagagccagactcgttaaggggtactgatgcgatgaaggctgaacaggccgcgtacaccagcgaacaattacacaccaagctgaggaaatggcgcaattgggggctagatgatgaggcgcgggcattctgtttgtcacagggtgtaaatgatgatactgacagtatggctctgtttatccaacgttatcagatgcctgtattacatcagatacccggagagatccctcaatgggatgaaaaaatacctttctga

SEQ ID NO: 106541 - DNA, 177 bp, Enterobacter aerogenes
atgaatatttcatttccggatgaaacgtaccgcacattgctgaaagaggccaaccgccgagacatgccaatggcaaaattatgcagcgaattgctgcaaacggcagcaaaaataattgaaaagtgcaaaacagataaccagcgaggatacaatgacaaccgagacagtagaaactaa

SEQ ID NO: 106542 - DNA, 444 bp, Enterobacter aerogenes
atggcaaaacccgccaagattgattttgcaactgagaacgctcaaaccatcgctgacgctattctgaacggcgtaaccaacatccaaaacctgaaagccttccgctacagagtcgggaccgacaaggccgataagctctatccccaaacgcgcgaagcaatgaacctcattaatgcagaacgaaagaaagcccgtgatcgccaggtctttaaggatctgttgcgcccgttctctcaaaagtacgcagcaggtgcaacgatccctgaaatactcgctcccgttctcaaaggctatcgccagatgtatcttgaaaagctgggtctcgaccttactcatgagcagatcataatgttgttggtcgctactgatggtgtggaacaactcgaaaagtacggttatagcgtaatcggtgattttccaaccgctacaactacccgccactaa

SEQ ID NO: 106543 - DNA, 561 bp, Enterobacter aerogenes
atgaagagagtcgagccagtcagagacaaagagaagatcgcagagattgaagccctgctacgcaaacataacacaagcccaatctacggtgacttgtgggttttcctgaaccagacagccgcgcgcgtcactgacgccctcgcactccggtttgcagattttgacaagatagaggggaatgtgttgaatctcagggagaagaaaacagggaagacacgctccatcatgctgacagcgcgagcattggaacttgtagcccatcgccgggctgataatccgggtcacgaatatctcttcgaggtggacagcaaccgggccaagggcaagccgatcagccgcgtaactgtctcagccaaatttaaagaggctggggagatcctaaatctgcatatcgcagcccatagcccacgcaagaatcttggctatcatgccctcaagcggggtgttagcttaccaacactgactaagctgtacggacatagctcacaggccgtcacgctggcgtactgcgggctcatggataaggatgtcgaagatgtttacaatggcattgattattaa

SEQ ID NO: 106544 - DNA, 207 bp, Enterobacter aerogenes
atgaagaaaattatactttgtgtgctggccctgctgccgctggcgggtcatgcaggaaaaatcaccatgagcaaccccgacgaacaagagttacagggcgggaaaaggctttgcacttacgaaaacagcatctacctatttacctacgtcactaaaggagagtgtaaatatacgaaaacgttcgacacctcaggcaacgaaaagtaa

SEQ ID NO: 106545 - DNA, 1617 bp, Enterobacter aerogenes
atgattctaacaaaatggcctgggagatctgtaaattcccttatgattgattttcatcgcggtcaagatagaatgttcctacttacctgccggggggctaataacatgaatattcgggattttataggacagtaccgtaaccatcctgtactttttattggggcaggtgttagtttgcgatatcttaacaactcccatacatgggatggtttattgaagcatattgcttttgagttaaagggaaataacgagttttatctagatatcaaagctgaatgtcaagttgatgggaaatataactacgccctaattgcaactaaattagaaaaagcgtttaataaagctttaggtgaagataggaatggtaaatttgaaagtattaatgatatcttttatgctgagatggaacgtgaaaataacttaagtcgatttaagatttatatttctaaactagttgaaaaattaagttacagagaagaaaaaaaggaagagttggcagagttaaagaaaataagaaaaaatataggctctgttatcaccactaattatgatggccttgttgaggatgtatttggttttgaggccttggtaggtaatgatattttattgagtaatccttatggttcagtttataaaatacatggttgcaacaaggatgcttcaaaaataattatcactgaagatgattactctcattttgataataaatatgaattaattcgtgctcaattgctctcgatctttatacataacccaattatatttatgggttatggcatcggtgatgataatatcaagagcttacttaaaaccattttcacgtatgtcgagccaaattcattgacggctcagaagataagagataattttcttttagtagaatttgaacaaggctctatgtcgcatgaaataagtgagcatgatattgatttggaaggtttttctacaataagaataaataaaataaagactgatgactttgtcgagatttatcgttctttatcaaatttaaacttgcctgtatccgcaatggatataaggaaggttcaaagtatagttaaggatatttactctggtgttcatgatgacggaaccagcatcaaggttaatatcactgaggatattgattctcttaacaacagtgataaaatactagtaatcggttcgagcaattctataaagtatgagcataaaaattcctccagctttatgtcagattactttgaaattattgaagagtctaatcatcagttattgcagcttattgataaaataaatattgcttcgacgcagtggttcccaatatatggattctgtcaaatctgtcatgaacttgataagtgtgagcctcttaaagcacaacaaagaagaaaaattgaagattatcttggaggtttgccggtttcggttcaatcagtgcatgaaaatataagtgatatatattttgatgattcaataacacgcacgaataaaataaatgccataatttggtcggcttggaatgagatgattgatcttgatgaggttgagatgctattgcgatcaatgccggataagaaagggactgattatagacgactgctttgtgtatatgatattaaaaaatatgctgagtaa

SEQ ID NO: 106546 - DNA, 573 bp, Enterobacter aerogenes
atgctgattggttacgccagggtgtctaccggggatcagaacctcgatttacagaaaaacgcactgattcgagcagaatgtgagcttgtttttgaagatatggccagcgggaaaaatgccaggcgacctggtttaaagcgtgcgttgcgcagactcaagcctggtgatgtgctggtggtctggaagctggatcggcttgggcgcagcgtgcgcgacttaataaccatggtatcggagctacagcagcgcggcgtaaactttcgcagcctgactgactcgatcgacacgtcgacccctgcaggccgtttcttctttcatgtcatgagtgcgctggcagaaatggaacgagagttgatcgtcgaacgtactcgcgctggtttagccgcagcaagggagaaggggagaattggagggcggcgtcgggtaatgacgactgatatcgtggaacattgccgccggatgctcgcaaatggagctacccgacagcaggctgcagatgttattggggttggggtaaagacgatttacaaatatttccctgtagctggcgtagggaattttgagaatcagtaa

SEQ ID NO: 106547 - DNA, 909 bp, Enterobacter aerogenes
atgtcacagacttttacttataatttactccatccccgctactggcttacctggactggtttgggtctgctgtggcttctcgttcagcttccttacccggttttacatattctgggctctggtcttggaaaaatatccagaccctttctgaaacgtcgggaaggaattgcgattagaaatatcgaactctgctttcccgagatgacaccgtttgcccggagccagatggtcaataaaaactttgtttctctcggactgggactgatggaaacaggaatggcctggttctggagtgatgcgagagtcaaaaaatggtttgatgtcgaagggcttgaaaacctgaccggtgcgaccagaggggtaatggttgtcgggattcattttatgtcccttgagttgtgtggaagagtaatgggtttatgccatcctatgatggcaacgtatcgcccacacaataatctattaatggaatgggtacagacaaaagggcgtatgcgttcaaataaagcgatgattaatcggcgtaatttatctggttttgttcatgcattgaaagctggtgaagccgtgtggtttgcaccagatcaggattatgggcctaagggaagcgtttttgcaccttttttctcggtaaaaaaagcagcctcaacgaacggaacatatgctctgtcaaaactcgcaggtgcacaactgatcacacttagcatgattcgacgtagcgataaaaaaggttatcgcatgtatatcagcaatccgttgtcaggctatccaggggaagacaaggtcgccgcagcgggttatatgaataagatcatcgagcatgaaattctccgagcccctgagcaatacctgtggatgcatcgcagattcaaaacgcgtcctgaaggcgaagcctctttatataaatga

SEQ ID NO: 106548 - DNA, 273 bp, Enterobacter aerogenes
atgaaatctaaaaaatctgtttttattgaaggacgtatcctgtcgaacagctgtcacgggcaggctggccaacctttctgtattcaccgggtcaggtttagtaatggtaaatatgccattatccgggtggcatccgggatatgtttcaaaccaggcgaaattattcaacgaaacgattgtgagtggttttataaacttaccaaaattcgccttctttcttttgagtaccttgatgatgatgaatccagaagacaatttcttgaatatcaatga

SEQ ID NO: 106549 - DNA, 288 bp, Enterobacter aerogenes
ttgaaaattgaacgtctgatttatgatacactatccttccgtgagaaatttatgatgaaatcagaagacacccttgactggtatccggcgcaactaccgccagtgaaaattattcttggtgaagccgtgctggctgtgggtaaacagggcagaccgattaatacccgcaccttgctggaataccttcaggtcatgcaggacaaacaaaaaaggcgggatgacaaaatcgccatgcagactgcgattgatgttctcagggataatcagcgcattaacggcagacgttaa

SEQ ID NO: 106550 - DNA, 402 bp, Enterobacter aerogenes; identical to SEQ ID NO: 106527

SEQ ID NO: 106551 - DNA, 8178 bp, Enterobacter aerogenes
atgaaaatgaaccccagagcgtggtttaaccgctcccgtattccggtgaatgctgccgaaaacgtaacgttttcggcgaacgatcctgcaagcgaaagcactccgcggtcagaactcttttcgactgcccagatggaacgctatggtcagaagctggcgcggacccataaagtatcaccggataaacatccctattatcttctgaaacggcttggcgacaatgaggccgttatcacccaaaactgctatgagcttaatgcaggtaaaaagaccagtatcatgcccgccggggagtggttgctggacaattattatctgattgaggaacaaatccgcactgtccgccagcatctgccgaaaagttttggaaaaggtctcccgtcgctggtatcgccactgaattgcccacgaatttatcatattgcatcagaggccattgctcacggtgatggccgctgggatgccaccagtctgaccagctatctcgctgcctatcaacaggtgacgccgctgacactaggtgaaatctgggcattaccgggaatgcttcgactggcgctgattgaaaatcttcgtcgtatcagtatggaagtgataaaagcgcaacaggacagaaacctggcagatacgtggataaccaggattttcgaatgtgcagagagtgcgcctggtgatttaattatggtggttgccgatttagcgcgctcccgtcctccgttatccagcgcgtttgtcgcagagctggtgcggcgtctgcaggggcacggcaacgcgctgtcgttacctctgacctgggttgatcagtgccttcgggaacagggagtcaccactgacattctcataaataacttcaatcaacagcttgccgccagtcagctgtcagtcagtaacagcatcgcaggtctgcgattactgggtgaaacggactgggctgatttcgccgaaacgataagcgtcgtcgaacaggcattaagcaatgatcctgccggtatctatccccggatgcacttcaatacccgggatcattaccggcacgtagttgaggtcctggccagagacagtgggctcagcgagcctgaggttgctgacagggtgctggcgctttcagaggaaaaagcccccaatacaccggaacatcatgttggttattatctcgccggcgaaggtcgacaggcactggatatacatctcctggcagacacctcaagactcatacgcttgcggcacagtttcaacagaataaccctgctgtcatggcttggtagcctggcgttgttgacaaccgcagcgaccgcggcaatattgcacgaaactgccatgcagggcgcaggttggttgttaatcgcggtgatattacctctggttatcgctttaactcagttaatgagtgatttactcagtgacgcaaccacccgttttcgcgttcctcgccccttgccggggatggatttttcaaccggcattcccgctgacagtgccaccatgatcgtcatcccctgcatgctgaccagccacgaaagtttcagccagctcctctccagtcttgaagtctgttggttggggaatgaaaacgaaaatctcaggttcgcgctgctcactgattttgcagattctgaaaatgaaccctcgccggaaagtcacgcgctgctcagacaggctatcgctgatacgcaggtgctgaatcgccgctacccctccggccgaccacgtttttatctgttacatcgtcagcctgaatggaacccctcggaaggagcgtggatgggctatgaacgcaagcggggaaaactggcgttactgaacagctggttgcgccatcccggaacgcaattcgtcagcgttgcagacatgcctgcccaccttttaccgggtcacataaaatacgtcattaccctggacagtgatacggtgttgccgcgcgatacggctcacaaactggtcgcggcgatggcccatccgttgaatacgccagagtatgatccggtacgccagagggtggtcaaaggatttggtattttacaacccggtcttgctgaggagataccacgtaacggtcaggggcgttacgccgccctgcgcagcagcataccgggtaataacccctattctatgatgtcttcggatatctatcaggatctctttggggaagggtcgttcgtgggcaaagggatttacgatgttgacatttttatgcaggccactgccaatacctgcccggaaaatctggttctcagccatgatctcctcgaagggtgctatgcgcgctcgggtctgctgagtgaggtgttactctacgaacagtaccctaataattatctgtcggacgttgcacgccgttcacgctggatccggggtgactggcaactgcttaactggctgaaaccacacgtcagaaaagccgatggaacccgtacccggaatccactgaccgcgctttcttactggaaattactcgacaatctgcgtcgcagcctggtcgccccctctttagtggtattgctctacttcaccctgctttgggttcccaatccggtttactggctgtgcatactgtcactgatttggctgttgccagccctcctctgcatcacccatgaccttctcaataaacctctgcgccgtcgcctgaagccgcatctgttacttgtaatggcgggcgcgctgaagcgtctgtcaggtatcggtcttaattttgcgatactgccacacgaagccggatattcgctgaaagcgatcgccgtgacgctatggcgactggggataagcaggcgtcacctcagccagtgggtcagccacagccaggacagcaatcaggccagatccactgttgcacgtttttatcaggcgatgtggctgaatgttgccggtggcgtgacgctgataattctgaccggaaaattggccccccagctgctggggattgtgttaccgatcggtttggtatggtgtgtggcgccgttgctgatgagctggctgagtcgtcagcccgtgcgtaaggttttttcgccaggtcaggaacaaaaacagctgttacgccagacaagccgtgaaatctgggcattttttgaaacctttgccacagaaaaagagaactggcttccgcctgataattatcaggaaataccacaaccgacggtggcacaccgaacttctcctaccaatattggtctttcactaatggctaacctgacggcattggactttggctacctgcccggcggagaggtgctccggcgcgtgtcgctcacactcgacacgctggataaaatggagcactaccggggccatctgtacaactggtatgacacccgtacgctggtccccctcagtccacgctatatctccagcgtcgacagcggcaacatggccgggcatttgttgacgctgcgtgcagggctgtccgccatgcgtcatcagcctgttttaagcagccaacagatactggcaggactgaacgatacgctggatattctggaaaaacagtggggtaagaacccacctgacagcctgagactgctgcgcaagcattgcctgaacgcggtgtcgctctctccgcaggcgcttttcagcgaactgaaaagcatgcgcacccagtgcaaccatctgaccagcgcatgtcatcagggatctcctcttcagatgcgctgggctggacatctggagcatcaactggttcagctttgccatgagtggtctctgttgcttggctggttacctgtatcctggaatgaacagacgctgccgacgctgagcgagcttgcccgtccgacattaaccggtacaggaacgcctccggcgtcagtggcggagcaggcccgaatgcgactcaatattatcaccgagctggaacagcggctggatgagcatgcccggatggatttcgcctttctgtacagtgaagcaaccagtctgctcagcgtcggttataactgtgacaccaatatgcctgacaagagccactacgatctcctgccatctgaaatccgcctgaccagttttcttgccattgcgactaatcagctgcctcttaaaagctggtacgcgctgggtcgattgtttaccacgattgataatgaaacggccctgatgtcatggagcggatccatgtttgaatatctgatgccgaatctggtgatgcccacctggcccggcagcctgctcgatgaaatgagtcagtcggcggttatgcgccagattcactgggggaaagaacgcggggtaccatggggtgtttcagagtctggctatcatgcttttgatgttcagcataattatcagtatcaggcatttggcgtaccggggctcggtctgcgcaggggacttgccgatgacatggttgtcgctccttactccacgctgctggcgctgatggtttccccgcagaaagcctgtgagaacctgttcaggctgcaaaaaaatggtgcatgcggagaatacggtttttatgaagcgctggactataccccctcacgtcttgcaaccggtcagctctatgcggtggtacagtcctggatggcgcatcaccagggtatggcatttcaggcgctggctcatgtgctgcttgatgcccccatgactgaacgctttatgtccagtacggtattccggtcagcgagtctgctgttacaggagcgcgtgccggatgcggtcgatctgtacagtccgcgccgtcattttgaatctcatgagggcagggtcaaacccgttcgctatgaaccccgtattttctatagcgtggatacctccgccccggatattcaactcctgtccaacggccattatcatctgatgttgaccgcgggcggcggcggttacagtcgctggaatgatattgcactaacgcgctggcgcagtgataccacccgtgataactggggagcattctgctacatccgcgatacccagacgggagatgtgtggagcaatacctggcaaccaacaggctacaccagcggacaagacgaggaagtgttgttcactgatgcgggggcagaattcagacgcaacttagggggactcagcgtcaaaactcaggtggtgatctctccggaggatgatgttgaattgcgacggctcacactgatccatcgtggtcgcaagcctcgctctctggagctgacaacctatgctgaagtggtactggcacctgatgccagcgatctggcacacccggcattcagcaatttgtttattcagactgagttggctcctgagcgtgacgctattctttgccaccggcgcccgcgctcaccggatgaaccgggcccttgcctgtttcacatgatggtggtgcacggcgataaccgaaataacgtgtcgtttgaaacggacagggcaaggtttattggacgtggcagaaaccctgcgaatgcccaggcaatagaggcgggagggacgctcagcaacacgtcggggtcagtgctggatccgatactggctatacgtcactccatcactctacagccggggcatccggttacgattgatatcgtttatggtatcagcgagaaccgccagcagagcctggccctgctggaaaaatatcgcgattaccctattgccgatcgcgtctttgaactggcctggtctcacagtctggtggtattacgccagatgaatgccagtgaagatgatgcaactttgtttaatcgtctcgccagtgctgtgctttaccctgtccaggagctacgcgctgaaggccaggtgatcagccgcaaccggcgtggtcagtccggtctgtggggctgggcaatttcaggcgatctgccgatagtactgctcagtataaccggcgaagaaagtatcgcctcagtgaccacactgattcaggcacaccgttactggcgacagaaaggactggatgttgatttggttatcctgaataacagccccggtggctaccagcagggattacaaaatcaaattatggaattaatttatgcggggtctgaagccagtctgctggacaaaacgggcggtctttttgtccgtaatggcgagcatctctccgcagaagataagttgcttctgatgagcgtggcctgtctttatcttgatgaccgcgcagggagtattaatgagcagcttaaccagcgtatccataccctgaaatcgccggtcatagcattcatgccgcgtgcagtgcgcgagcgtaatcaacatacggactggccccccgatatcagtcagttatgctatttcaatgggttcggtggattttctcaggatggacgggaatatcaaattgttatgcgggaaaatgcgcagacaccggctccctggtcaaacgtactggcaaatccccgttttggcagcgtgatctcagaggcaggacaggcctatacctggtatgagaatgcccatgaataccggttaacaccctgggaaaacgatcctgtgagcgatcgctctggcgaggcgttttatctgcgtgatgaagagaccggggaaaactggtcaccgacagcgttgcctgttcgcggacacggtgattacctgacccggcatggttttggctacagcgtttttgcccatcgagagagtggaatagacagcgagctgacggtcctggttgccgaagaggcgccagttaaactggtgctcctgacactcagtaactcttcgggacggacacgtcaactctccgtcacaggttatgtagagtggacgctcggaggatcacgaactcgctcagctcctcacattgtgacacatgcggccagaacgtctggcggttgcggggtgctggcgaacaacttttatggtgataatggtggaggccgaactgcattttttgccgtcagcggtaatgactgttcgctgaccggggaccgtcgggagtttattggccgtaatggttcccttcacgcgccgtcagccatgaaactgcgcaggctttcaggtaacacgggcgccggtctggatccctgcggggcggtacaatcgacggtaacattaattgatggggatcagaggacgtttatttttatcctcggcgcagaagagaatgatgtttgtgctaatgagacgctggcccattacatgaacgaggatacagtccgccaggagctgaaccggattcataaccactggcacaatgtgctcgataaaatcgtggttaacacccccgacacgtcagtaaatttactggtcaatggctggctgttatatcagacagtcgcctgtcgccttatggcccgcagtggttactatcagtctggcggtgcatatggttttcgcgatcagttgcaggattcactggcactgagccatgctgatccgaaccggttgcgtgaacagataatactctgtgcctcccggcagtttatcgagggggatgtgcagcactggtggcacccaccacacggtaacggtgtccgtacccgttgttcagatgactacctgtggctgccgcttgccgtttgccactatgttgaaacgacgggggatatggaggctctgggaatacacattccttatctggaggggcgcccgcttccgcctggtgaagagtctgtctatgacacgccggtcatcagcggcatcggagagactctctggttacactgtgtcaaagctattcgccatggacttcggttcggggggcatggcctgccgctgatgggggctggtgactggaatgacgggatgaaccgggtgggtatcgaaggcaaaggtgaaagcgtctggctgggcttcttcctgtacgacattttgcagcggtttgcagcgctggcggagcgcaggctggatgaaagcgtcgccgcgatgtgccattcacaggctctgcgcctgcaaagcaatctcgaagcccacgcctgggatggggaatggtaccggcgcgggtattttgacgatggtactcccctgggatcgaaaacctcacaggactgccggattgatgcgattgcgcagagctggtctgtattgtccggtgccgcgagcccgggacggtgcgcaaaggccctgcaggcgctggataagcaccttgtggataacaaaggcgggctgatcaaactgttaacgcctcctttcgacggacacggtccaaatccgggctacatacaggggtacctgcccggtgtgcgggaaaacggagggcagtatactcatggcgccatctgggccgtgatggcatttgcccggatggggaatgccaaacgtgcctggcaactctga

SEQ ID NO: 106552 - DNA, 219 bp, Enterobacter aerogenes
atgtccacaagaattaaaggtttggtaaaatggtttaacgaagataaaggttttggtttcatttcacctcttgacggaagcaaggatgtcttcgtccatttttccgcactccatggtgaggatttcaataccttatttgaagggcagaaagttgagttcgccatgcagagtggtgaaaaagggcctgctgctacaaacgtaatactttgcgataaatga

SEQ ID NO: 106553 - DNA, 702 bp, Enterobacter aerogenes
gtgagcaacagcatcagcctcggcttctgctatttgaccctgcgtcagagtccacgtctcagtaaagcgcaggcccagcggataatttcgattatccaccgctcgtcgttgctggaaacgctaccgctggatgaagatctgattacgccgagccatgaagtgctaccgggctggtccattccccagggcccggaaaaccatgaggtgccgctgcctcgccagctcaccctgctctatcatttgccggtcgaattacacacaatggctgagcaactgaaactacgcctcgccactctcggctgcgaactgacgctcatttttcacgacgccaaaaattgggacggctgccggtatctggcgcaggccgatatgatgatgggcgaccgcctgattggcgaagcgccggaatatacccttgagcagtggctgcgctgcgatacgctatggccccatttgctgaccggggcgcaatatgcgcacctgcaggcaacgttagatgccgtgcaggcgcagcccgaagcgcgtagccgcaacgatgccctgcgcaacgtcttcaatacgctgatggatgacgccatcatgacgccgttattcaaatataattaccgcatcagcgcgccgcctggggttaacggcctgcgccttaatgccagagggtggttcgactttgccagcgcctggctaccagcatcatcggcgtga

SEQ ID NO: 106554 - DNA, 702 bp, Enterobacter aerogenes
atgtctgatttgatagcctacaaatccaacgcccttatcgaggccagttacaagctcaccttgcaggaacagcgcttcctgctggtctgtatcagccgcctgaaatccggggaagatgcccctttgccggatgaacaaaaaaccatgaccatcacggccgcagagtttcatgatgcttttcctgatatgggacggcagcacgctgaagccaagctcaaggaagcgatagatcgcctctgggacaggtcagtcatcatcaaaaacgaggagaagcgcgaggagttccgctgggtgcagtaccgggcgcagtatctcaaaggtgaggcgaaagtagagatcaccttctccgatgccatcatgccctatctgacacagctcaaggggcagtttacgcgggtagtggtgaagaacgtctccagcctctccagcacctacagcatccgcatttacgagctgctccagcagttccgcagcaccggtgacagaactatttcactcgatgacttccgatccatactggaactggaagataaatattctgattttaagatattgaacagagacttaataaaaccggccatcgctgagctgaacgaaaaaagcgatctggccgtcaccgtcgagacggtgaaaaaggggcgaaccgttgtcgcgttgcggttccggttcaaagaggacaagcagatcaagatggccgtatga

SEQ ID NO: 106555 - DNA, 126 bp, Enterobacter aerogenes
atgaataacgaaaccaaaaagctgacgctggatgaacttctggcacaatgcaatcccgatgccggcatgagcgatgaagatcgccagtgggtaaatcagccccctgccggcgatgaaatcgcgtga

SEQ ID NO: 106556 - DNA, 264 bp, Enterobacter aerogenes
atgaacagcactacccactacgaaaacgccaattttctgcgcgaactggccgagagcttgccccgtattctgccagatggcggcgcggataaggccgctctgctccagcgactcgctaacgaagaactggcacaggctgaatacgacgaacgggttcgcgcaaaggttgccgccgcccgcgctgacaagcggccgggcatgagtaccgcgcagctgcgccagcagttacagggacgctatcaggaactgagcaatgacctatga

SEQ ID NO: 106557 - DNA, 300 bp, Enterobacter aerogenes
atgacctatgaaatcgactggcggccgggggcggttgaagatatggccgccctgtttgagtatctggccgaaaatgcctcgctatgggacgccagaaacgtgacagaccgcctgatagccgccactgaacgactggaagattatccccgtttgtacgagaccgacgagcgatacggcgagggcgtccggcgtatcagcctgctcggccagcatgtgctgtatgaggtgaacgacgagttacggcgggtaaacattctggccgtggtcggtcagcgtcagaaccccttatcggtacgctga

SEQ ID NO: 106558 - DNA, 162 bp, Enterobacter aerogenes
atgacagagaaaaagcaatcagcaaatgccaggcgtcaggcggcgtttaaggccagacagagagaagccggccgcactcagcgggtgctgtggctgaccgatgaagaggtgaacgccgtcaaggcgttactggataaaatgcggggggatgaacgtccgtaa

SEQ ID NO: 106559 - DNA, 390 bp, Enterobacter aerogenes
atgaaaaaactgtctgtttattcacgtcttagccggaaagccggcgcgaaaatataccctaacagtaaccccgatgttcacctgcataaagcagatcgcattatccccgtgcgccaggagtatgccggcgcggccgccgcaacggctggccgcattgctgtggaagttgagcgccagacgctgcgcagcatgacctataagcgcctgtatccgtgggtgctggcgctgtccgttctctgcctgctcccgccgtttgcctcgatgggggtcgatatgttccatgcaaaacaggcgcaggcggaaatgcagcgccagcagaaacaacagctggaagagatgaatcgccggcagcaggaaagaattaatcgcctgcgcagcggcatttactga

SEQ ID NO: 106560 - DNA, 2106 bp, Enterobacter aerogenes
atgaaaaaactgtcacttaactggtctggcaatgtgagtcagtccatcgaaaaagcccgcacactggccgccgaatactcccgccgtgatgtacccgacaacgcaccggccgatctgcgcgactcggccagtcagggactggaaacgagcaaggggtttgcgttgtctggccgtctgctgcaaagcgaactggtctacggttcagatgtgccgctggcgcagttcggcactgtgctgatcccgctggtactggcgttcacaaccctgcttctgtactggctcccggcatggctggcattcattccgtccgtcttatgggcgctgtttgccatcatgaccggtggttttacgctgggctggtttgccggcgttctggcgctgctcctgctctggggatctgatatttcgctgttttcgatgggcgggacagcgcagatgctccagtttggcaccggtatgacgctgacgctgatttcgctggccgctctgccgctctgtcaccttctgcgccgcgccgagcgctttaccatcatcaacgatgacgctaaagccggcgcaatcattctgtccgcctcacgtcaggcaaaagcccgcgaaaagcagacagaacgagccgcacgcgacacctcgccgctgatctggctgggtgaggcgcagggcgtgacatgggagaagggggatattatggcgcccgatccggcgtcacgcgttgccctgtcggccgctgacctgtccacgggattgcttgttctcggtggcaccggcaccggcaaaacgtccggcgtgttcaggccggttatccgtcagtggtgtgagcacaattgcggtggcctgcttctgatggacggaaaggggcagttaccggccgaactggccgaaagcaacaggggaataacgctgctgaccccggataacccggaaacgcctgtcccgctgatcgatggcctgaatgccgaagaagtggccgccgtgctggtttctgtctccggcaaggggaatgataaaggctctgactggacatttgcggccgaaaaacagttccgtttttctgccctgctcgttgagctggccgtcagcgttcaggccgcaccgtggacgctggccactattgcccgctgcgtgtcagatacggcattcagggacacgctgattgaggctgtaagcgcccgtacagaaacactgtcacctgaactgaccacggccgcactggatttctggctcaaggaatacccggaactggcaaaagccgaagggtataccggttctgtgcaggggattgtgaccgcgtggctttctccgctggtcggtcacaggaaaatgcacggctggattaatgccgccggaggggtaaacccttctgatgtcctgcgcggggcgcggtacggcatagggattgattcatcggtatatggcgaactctgcaccgcagcggttaacgggttcatcaaaaaacggctgtacaacgaggcaacgcggcgcggtgataactggaaagcggacagcacaaatacagcggccatgattgtgatggatgaagctgatgtgctgctcgatgaaaccgatgcaggcattctgccgcgtgggcgctcactggggctgaatttcgtggttggcttgcaggcagtggaacaggcggaagccgctttcggcgggacgcagaacgcgccaaaagccctggcgatgctggcacagctgcgctccgttgtcgcgctgtcatcaacccatcacaccgcgcagtatgtctccgatcgtgtggggttcgggctgccactggagccggtatcgctatccaccgtgccggacatgcgctataccgtactgcaacgggcggcggcctcaccgtttaacgacgaggaaaacgagttccgcagctcgataacgctcgatattccgcatgtgattagtcatacggttggcaaaatgatggatcacaaaaatgctgccggcgaacgtctccagctggcaaaagagcctaagccgtggatctcaccgcaggaatgcaacatgctgacggcgacggagggcgtggccgttgtggttctcaaccgcgccggcgctccccgccgcgatgcgatagagctggttcccgaataccgcgccggctga

SEQ ID NO: 106561 - DNA, 1440 bp, Enterobacter aerogenes
atggcgattgcacgactcagcatgaaagcgggaatgaaaggccgtggcgcagaccactcggcctacatttcccgtgagggcaagtatgcaaatcgtctggaacggggagagcgtctggaggccaccgaccacggcaatatgccggagtgggcgaaggacaatccgcaacagttctggctggccgccgatgcgtatgagcgcaagaacggcacctcataccgtgagatggaaatcgccctgcctcgtgagctggacagcgaacagcgtgaggcgcttgtcagggactggacggagcaggagctgggcgacaaacacgcttatcagtgggctatccacgttcccaccgccgctgacggaggtgagcagccacacgtacacctgatgttctccgaacggcagcgggacgggattgagcgcgatccagagcagtatttcaaacgctataacagccggaacccggaagcaggcggggcgcggaaggggtacggtgagcatggcggccagccgcgcacgctggagcagcggcgcgaggaacttgtcgccctgcgcggccgttgggaggccaaagctaacgaacatcttgagcgagccggccagcgcgaacgtatcgacatgcgcagctatacagcgcagggcaaggacgccattcctgaaaaaaagcagctaccgagtgaatggcgcgacgagcggaagcgtgcagaaatactggatttccgcgctgcaaaagccgagcaggaacaggcacagaaagacgccggcaaggtgctttatgagcacaacagcgcggtagagcactatcgcggcgttgtggccgcggtgccggagcaccggctgaaaaactcctcaccggacagcatcgctctggatttgcgagaaaaactcgtcgggcagcgcgttgacagcgatccggccgtactggccgcacgggagcaggaagaaaaaaccggtaaggcgctggagaatgcgcggcaggaacgggacaaaacccggcaggaagccgagcagcagcggcaggagcagcaacgatgggaagaagaaaaccggatgcgccgctggctccatgacaagggcatcaaaaaggacgagcgttataccggactgcaacagcaacgggaaaaatcagagcagcaggcacaggccgccgtgcagaaggagcaacaggcagaaatgcagcaccggcaggccgtcactgcgcgggaagaaaccgaaactgatgtccgtcagcaggccaatgaaaaatggttcgagcatcatcatacggccgtgaaagaggctgccgccgaacgccagcgggaacttgagcggcaggagcgggagcagcagcaggcaaaacaggctgaatatcagcagttgatcgcccagcaacagcggcaacgtgagcaggaaaaagagcaggagcacacaccggaacggcagcacgggcgcggaatgagcatgtaa

SEQ ID NO: 106562 - DNA, 459 bp, Enterobacter aerogenes
atgcacgaaaatgaatggctggagaaacggctcgcatatattcgcagactgaacgcaccgaacgaacagcagcgccttttgctgatgctggcgcagttgtcccagccaacaccgaatgaccgccgcaagctgggagtactcattcgtgctgaaaaagccgcagagagggcgctaaaggctcgcgctgatgccgctaaagtgctgaatgccgaacgtcgcgccgtccgcaaagcgcgtgaccacgaactctacaaggcggctggtctgatgggcgtggccggcgtggttgaccgtgaaaccgggcggctcaatgtggatgccggcctgcttgtcggattgctcatggagttggctgccggtacactgccggaaaacctgcaccaggaagcacttaaatctcgcggtgatgctgctatcgctgcccgtgagaaaaaaaataaaacgaatcaggctggctaa

SEQ ID NO: 106563 - DNA, 150 bp, Enterobacter aerogenes
atggcaaaacacttgaacaggagtgaaataaaggcaattaaaaacattatactgccaatagctaaactgctctttgtatctattgttctgttttttcaacatttcattttcggctttaagatttattatttgttgtgccgcaatagttaa

SEQ ID NO: 106564 - DNA, 1218 bp, Enterobacter aerogenes
atgtttatacctaatagtaaaataagcagatatctaagtgcagagagtgtagggttttgggttgattatgctcctgattcgaaggcggtcggattagtttgtaagcttccgcttatgattcttaaatcaatattattaggagctaaggtagaccttcattttatgtttaccgaaattccgaatagatatttaacaatcggggtgactgttcatgatgtagaagataatcccagcatgtatgtttatcccattagagataaaatagaaataaaaggtcttaataaattacttgagaagaaaagaattgagatagcattttatgatgattttagtcatccagctatttcatgtgctactaatttacctttagaattcatcgaaaaacttaaaattcttaaaaacaaggggtttacaacggttaaggatttcttcataggccatgcagtaacagaatcgtgtttcaaagcgttacatgattcatatgaatcatcctcatctctgccaacatcaattgcctcgtgttctctggaattatatgcaataaaaagcttattgattggagcccatgagtctgtagtgaataagatttattatgatctttttgatggtaaaaatggtagtgaagggtacatacaagaggacatgataaaatatgcattatcatatctatttatgaataatgtagtaagtagtccaatgattagagaaggcaataaggatagggagtttactgacattgcagtttttgataacaataatattttacttattgaatcaaaagcaagtgcgataatagagaaaggtaggttaacaaacagtttcagacgagagtcaggaacaagtaaactgataaaaaaagccatatctcaagtcgaaggagtatctaaactctgtcactctggggtggaagtaaatattggagtggaaaatacaaatgtaattgacagtagcaataatatacatatctttatagtcgtcactgagttaatctatcttgatcaagaaccaagctttaatgaattaactaataaaatatatgatgaaacaggctgtaaagtacaagttgttgacctttcgtctttaataaatattatcaagctgagtcgaggtatacctaaggcattttggaaacatttagaaggaagatttgaactatcatattataataaaacttataatattcgtgatatagattcatcattgcctgtaaggttttga

SEQ ID NO: 106565 - DNA, 3114 bp, Enterobacter aerogenes
atgagatttgagaatcaatcagcaaagctactttcgattactaaatcaaaagctaagatgtatgaatttgggttggatgaagtgcaccatattcgtttaactgaatcgccaagtaatttattattaatgactattggcatattgggtgatgtgtgtcgtgaagagttatcagttgaaaggaatcatgttcttttcgagcaaaggaaactagagttaagaaatgtagcaagatattttgatgctttaatgggttcaaggcaagaaataacatatgattattatctttgcttattaggagcagcctcatattatcttgctgatatgccgggtagtgcaattgttctatctaataagctagaaaatttaaataatggtttaacggaatctcgtatagaattacttttggagtggttgttaaaatcgaaatataatgagccgatgacatttgataatgaaaaacaaatttccaaattaatttgttcattaacaagtatggtttgtgttttctttaatgaaaatattgatgtaactactgatgtgttagaagtgacaaaatcgttgagagatttttgtcatgaaagaggaagtgatagagagttattgttagccgatatcgtcgcctcggttattaaacataaaataaataactcttcatttaatttactcccgcaatatacaggattatctattgaagcatggaaacctgccttatcaaagccaacatttatcagggagttttggccggcccaaaagctactcggtgatgctggagtatttagtgggacttccgcagtaattcagctgcctacaagtgccgggaaaacaaagtcagccgagctgattatacgctccgcttttttatctggcagggcttctgtagcggtgattatagctccttttcgttctttatgtcgggaaataagtacttctttagccgcagcatttggtaatgaagacgtcaaaattaatcaactcaatgatattccacaaatagatgaatttgacgatgcattatttgcagaaataattgaaatagaagaaagtgatgttataccccttacagtaattgtagcgactcctgaaaaactaatctatttattgcgccacaaaccagagttatcggaaagtatatcactcgtaatttatgatgaaggacatcaatttgatactggatcgcgtggagttacatatgagttactcctaaccagcttgaaacgcgaacttgaaaaaaacactcagcatgttttaatctctgccgttttatcaaatgcagaatcgattggaaattggttatatgacggtgagggaaaggtagtcaacggagcagaatgtttatctactgaacgtagtatagcattttcaagttggaaaaggggtatgggacaatttcattatatagatcctttcgatattaatacagaagagtttttcgtgcctagagtaatggaatcattagaaattcctaggcaaggaagagagactgcagaaagattctttcctccacgtgacgataaatcattaattgctgcgtacttgggtatcaagctctgtgaacatggtccggtagctgtattctgtggacaaaaaagctccgtcataaaaatttgccgagaagttatcaaaccattagagcgtattgactcgctcaatgctcctatagttcatagcgatcaggatgagataaaaaaaataggtaaattatccgaagtccatttaggaagtagttcagttattacgaaagccattaaaagagggattcttccccacagtgcgaacattccaaatggtttgcgaatatcggttgaatatgccatggagaatggattagggcgttgtgtggtatgcacatctacattagctcaaggtgtcaatcttcctattaaatatttagttgtatcaggtgtgtttcaaggtgaaaaacaaatttcaacacgtgatttccataatcttttaggacgggctggcagggctgggaaacatacagaagggagtattatattcgctgatacggaattatttgatcaacgatatacaagtaaaaggtggcagtggtcccagatgagtaatttattagacccttctaagtctgaggagtgtttaagtagtcttttaactctagtaaagcctttttacgaagatccttttgccattgatcctatagattttctacaatccccagaaacttatcaacaatccgttattagaaatggtcatctacaacaaatcgatgttaaggatcttttgaagcaaatgagccagagagttaactatctagaaagtcttgaaagttttctgctagctaatgttaatagagatgaaatgcttgaagatcaagcattagtggaagtgtataaaaagacttttgcattctctctagctaatgataatgagaaacaaaaactcgcagaagtgttcacagttgttgccgaaaaggttaagcaaattgatgaagaaaaacgttcttactatggtagagcattactgggtattcacgagttagaatatatcgaaaattggattaaaacaaatgtcgagttactatctactgtgcaaaatgtagctggcatgataactgtattgtggccaatgattgaaagcctagcgacagataatagtttaggtaaattgataggagaaggagcaggtttaagaattgcaaatctttggtgttctgagatttcatacaatgagatcttatcacaagctaaccgtaataactttaaatttagagctggtagccaagaacgtaatttgaaaatagaaaatatcattgatatttgcgatagtagcttgggctatgatgcgatgctagttgtaggagcgtgtgctgatttattagagaatatgtttagagacaagccagaaatagtaatggttagacaattacaaatggctttacgtattggattatcagatggtttatcattgggtctttatggtattggattgacggatagagcagtagcatcaggtgtagcgaaggtacttagagactctggtttagatatagattcatatagtaaggagatggctttctcacatcgacacattattatgcctgagctgatcaagtatccaaccgttttcacagcttcgctctatggcggagaataa

SEQ ID NO: 106566 - DNA, 810 bp, Enterobacter aerogenes
atgccatggactaatgagcatattcagtggctccaggatactggaaatgtcctgacgttagcatgtggtagggaagcaaaagttttctgctttcgtcatgatattaatgatcaagcaaaaatgactgcatgggccaaacattttagaaaccattattgtaatgataatcagattgatttgattaaagcccctgggcaaacaagatcagattatttacttacgatgaagttcccaaatgctactacagcacctgggccaagtattcgagcaggtgattttgcagaaatattaattgctgattatttgacatatttacggaattatcttgtacctagaactcgttatgatcgtaaaggtgtacctaatgaatctaccaaaggttctgatgtattggcttttaaacaagtacaggctaatccaagggatgatgaattattagtttatgaagtcaaagcaaaattaagtgccggcacaaaatcaatgcttcaagaggctatagatcactctgctaaagatcatttacgtttggctgaatctctgaatgggataaaacagcgtatgattgatcgtaatgaactagggagcgtgggagtaataaatagatttcaagactcggttaatcaaccctacaaattgagatttggtgcagctgcagtatgttctgatagcgcttatgacgctgcaatacttgctggtgccaattctgaagcgcatccttttaatcaagatctagaacttttagcaatccatgggagcgaactgatggaacttgctcatgcattatacgagagagcagctaatgagatttga

SEQ ID NO: 106567 - DNA, 672 bp, Enterobacter aerogenes
atggcttgcgatgataatattcggtactcacaggagtttataaatattcatggggtaatggttgagaagccttttgtttataagaaaacttatgtagaagttcggggcgaaaatcgtagcgacatggttggtcataaactgacagggcttgcgagactatatggtgcacaatatgaatctttatatatatctatggctgttgaagatttttattgggcacaatttcaatatgaattaggtaataaaaaagagagttgtgaattcctgcttgatgccttttcttatattaatagctgtgtttcacattatgatagtacagaatcgccggagtatcatagattcagagttgattttgataaagcatgtaaaaaaatgaattcgagtattggaggaaggaacaaactgaaagaccttgactatttaaaagaagttatggctacctttcttaaaggtgtcgcacctatttgcagatacaaatataaaagcgaagcgcttgaaaaagtaactattcatctttgtcagtatgaccaaaaaaagaatcctaacaaatgggataatgataagggagaaagagaaaatactatcagaaaccgagttagtaagtgggctaaaactgaccttaaagtctcttttaataattatataaatgataagtcgaaagataaggtttaa

SEQ ID NO: 106568 - DNA, 240 bp, Enterobacter aerogenes
atgttacaaaaccacctctcctcacatacatccagttacgtaaacattcctgattcaccgaggatcttgaggctaaaagatgtcataagaaaaatgggaatttcacgctcaaccatatacgactggcttaacccaaaatcaccacgctacgatgaaacgttcccaaaacaaaaacgcctaggaaggaaatccgttggctggctggagtcggacctggacaaatggttaagcccacgttag

SEQ ID NO: 106569 - DNA, 852 bp, Enterobacter aerogenes
atgtctgattccactgaacggggcattaatgtcctgaagcaacatttatccattcttcctaggcatataaccagtatggtgctggaacatatacgccagagcattcattacgaaccagtgattggcatcatgggcaaaacagggagcggaaaatcctccttatgcaatgccctttttgaacatcctctcagcccggtcagccatgcagaaggctgcacacgtagacctttgcactttaccctaaacgcggaaggacgcagcctgacgctggtcgatctgcctggtgcaggcgaatcgctgaagcatgatgagatataccgccagatgtaccatgaacaactgccgaagctggatctcatcctctgggtgatgaaagctgatgaccgggcgtgtgccacagacgaagagttccatcgttttctactggattgtggcgtatcgacagacagcattgtttttgttatcaaccaggctgacaaagccgagccatcactggaatgggatcgtgaaaaaggatctccttcagtggaacaactcatgacgctcacagccagaagtgctgccgtttcccgccagttctttaccccttacccggtgcatgctgtttcagcaaaaaccggttacaacatgtctcgcatggtagaaacaatgatttttgccctaccaccagaggctactagtggcgtctttcgccagattagggaagaacatcgcactaaagaatcagagacaaaggccagaaaggatttcgcggatttgctgggagaattattgagtaggattctggaggccatccctctccccagtgtaatacgcaacgggctgggagttctcagagaagggctggtttga

SEQ ID NO: 106570 - DNA, 354 bp, Enterobacter aerogenes
atgcacatttcaactgtaccggccaaggtgccggtttcgtcacgtctgtcgcccgtaatggtgtggcagcagcttttaacatatctgctggagcaccattacggcctgacacttaatgacacgccattccacgacgacgcgactatagaggaacatattgacgcgggaataacgcttgccgatgcggtgaattttctggtggaaaagtacgaactggttcgtatcgacctgaagggattttcgtggcaagaacaaaccccatatatttccgtagtggatattctgcgagcaaggcgatctaccggcttgctaaaagctaacgtgaaacaaacggttaaatacagagcagactaa

SEQ ID NO: 106571 - DNA, 141 bp, Enterobacter aerogenes
atgagcccgtacgtagttgaactcatccgcgaacgctggcaaaagctccgcctctgccggcaccgcggaaccgtacttgttgactaccgaatttcgaagaatttcgtccgcatctatcagtctctgggagaaatagcatga

SEQ ID NO: 106572 - DNA, 660 bp, Enterobacter aerogenes
atggacatagaatttttcctactcgagcgaactaaatttattgtttttttttacgaaacagcttccgcaccattttctaaaatcatggatgacatagagaatcagcgccctccttatgttcctccttatagtgaagattctgaaccaccgtacttgattgaatggttagatgccaaatatggtttagatacctgcggtcatcatgccatctcaatgttgtcttcttctcttcaactatttttaaaagaatgggtagacagattagttagatttcacaaggcgacctttaatgttaacttcaaaaaaaaaggatggtttgatggatatcgtcaaattttcaaaaagttagatttgaacatggacgactgtcctgcgaatcttgaaatcattgagcaaatcccccttgtgagaaatcatatccagcaccccgagcaccttacctcactatatatcgaacattcagaatattatttaaagaaacattcaagaccatatttcattcaaaaatcagagtttgattcggtatctgatcaagaaaataactcttggttactaccaccagtgatctcaccaacacatgagaaaataatagaagccgttagtaatgtggaattattatgctcatggcttgaagagcagtacaggcaagctagaaattaa

SEQ ID NO: 106573 - DNA, 987 bp, Enterobacter aerogenes
ttgaaacttaacggtgaactagttcatataggcaatttcgatgatatacataattactcaaatcgtgatgaagaacatttagaagtagaaattgaattttcaaattttaatatctcatggggatatggtggggatagtcttcctttaagggaaaatgtaagtggtaaggattttttacctgtaacggaaaacgagaaaaaaataagtgcgcttattaaccacttggattcaaagttcaagtttcaatatatagaagcagagcgttatggacctcgagataatttacctctatctcaacatcattatcatgataattggctaggaaaaaaaggggagtatacgatacaaattttggagggattacgttccagggaatccctgactctagaagaaggtgatgtgagagttcattctaatcataaaaataatacatatatatttaaaaatattgagacatggatgaatgaaatatccccgggacatgcgcttgaaccacaaatagaacaaagagcgaacgtagcttataattctattatgactcagggggggcagattactaaacccattaatattggttatggttatagttatgctcttagtgttgtgacggctttaatgatttctgctcctggtgatttagtaattattgaaaaccctgaagctcatttgcatccacgtgggcaaagttatttggggcgattgattgcattagctgcagaatctggggtacaagtgataattgaaacacatagtgatcatttattaaatggaataagggttattgcaagaaccagtaagggattcgaacctaagttgttttctctgtactatatatctaatgatgggaaagatgctgatgctgttaagatagatataaataaggaaggaaaattatcatcatggccagaaggttttttcgaccaacagtcaattgatatgtatacaattatgactggaaatcaagatgctcctgaatttaacaaataa

SEQ ID NO: 106574 - DNA, 2007 bp, Enterobacter aerogenes
atgacctacgaagacgtcctgaatgatatcgaaatgtatctagttgggagagaactccaaccaataacaccaaacactccctccttgtttgtaaccaagatagatcgcgagaaaggtaagtactacgttacgcaaacattaggtgggaaagttgaggctcgttcaattaatgagattaaatctatttttgatgatttaaataggaaaggcttttgtagtgtagatcaggctctatatggtagtggatcgagtcgcaaccaacctgaaacggtatttgcaaatctgccatacatacaacactttaaatatcagagaaagaaacacatccttatcaggaataaatttgtccatgagccaggaacactttcagaattacaaggggtagattttaggattataagaaaacaagttgaaaactatttggggctcaatctttatcaggtatcaattaagcactacgattttcttagaacaatgtatgggctttatgattctgtactgaaaaaatatcccggcgaaatatctgtggtaaaaataaagcaggagttgaatgagatatctgctttaactgaaaacatagctgactccattgttactttagatcataataaagatgacattaagaaacaatacaaggaactaagcggaaaaactactgatgagggcgaggattatatatcttttggagatatcattgataatccagaatctattggtgttgattctggaactatagatgatgagccaaatgagaaaatcttagaattaaaatctagcctaactcgatttggtcttacaaaaataagaacatcaacacctgttttgtcattaattttcgatcgtgttaaatttggagatatagaactacaaccagattttcagcgaaaggatagaatctggaaagatgataaaaaatccaagttgattgaatcaattctgatgagattgccattgcctgttttttatttcggggagagagcagatggcacatggattatagtagatggtttgcagcgaataacaactatatacgattttattcgtggtgattttgctttaagtgatttaaaagtattaactgagctaaatggaaaagagtttaaggatttatccagaaccgagcagcgagatataagagaatattcaattacagcataccatatagaaataaccccagaaagtactggtatgatagtagaactgttccataggattaatacatatggtgtaaaattaagtgatcaggaaattcgttctgcgcttaataaaggtagttgtgtcaagttcttacgatattttgcctcgctaaatatattcaaaagtgcaactcagcgcaaagtgaaatttgatcggcaaaaagatatggagttgtgcctttctgccctttcatttatggtccaaggctataaaaattatggtcagcattcctataatgactttttgactaaaacgatggaatatctcaataatttcgagttaacgttagttgatgctaatggtaacttgattgataacaacgatactataatagacaatggtgatgcggtcattccagctgataacaaggtgtactttgatttatcacgccgatatagtgaagcacttagcttagctcaaaatatattcggttcatatgcttttattaaggatgtaaaaaataaaagagcgcctataagtaaacaactttttgaacttatcgttacgtatttttcatttgtcaatgaagaacaaagaaaaattatttctgataatagtgctgaacttgttgacttactttattttgcaattgaagaaaactctactagatttgctcaatgggaatcccaaaactacatcgatactaatagaggattcagagatgctatttctacttcaacaggtaaaagaatcactgtcatttatagatttgaggctttttcaaatatattagagtccagtaccagcaatacaggctataggattatttttacagtcaggttttttgagcaaaaactctttgaaacttaa

SEQ ID NO: 106575 - DNA, 633 bp, Enterobacter aerogenes
atgagtgaacagcgaccgcctccatcacgtccgccacaaggaccggttggctggctattgtcattagccggacggattatcgggctggttattggggcgctggtgttgcgggtggtgctggaactggcggggctctatttctggtggccgcaggaaggcagcaggcatgtttttcaggtgatgaagcgggagcaggtagagctgattagcgcgttacagccacatccgctgagggatgaaattgtcacgcttctggagagcggggtaactggtgtgcttatggtcaaccggctccagcaaaaacctttcgccgccgtggcttatacgctggtgagttttatgcagcgcctggtatggcttgccgctatgctccccctgatttgcctgtgtgttgtaatcgggctaaccgaagggctggttcaacgggacttgaggcgctttggctccgggctggaatcggtttttttccaccgttatgtcatcaggtccggcagttcagtcgccaccacgctgtgggtggtttatctggcacagccgctgtttctgcctacaatgttggttttactgactatcaacttatggttcgggataacggtatggatagtggctggtagctttaagcgctggttataa

SEQ ID NO: 106576 - DNA, 603 bp, Enterobacter aerogenes
atgaggttttttcaggaaggagcatttaattggcgtagtctgcaggatctacctaatgcctcattcgtatgtggctactgcaatattaatgtttcatctgtaaaaggatacaaactaggacagcatggtgacggaagtggttcacaggttggcgctgtatatgtttgcccaaattgtggtggtccggtttttttcactccagatagccaacagcttccatcccctgctcttggaaattcagtacaacatgtacccgctcatctaactgagatttatgaagaagcgcggcgcagtactggcgagggttgttataccggtgcggttttactttgtagaaaaatgctaatgaatatcgcagtcgatcagggggcgaaagaaggactaaaatttatcgagtacgttacttacctttccgataatggatacacgccaccaaatggaaaacattgggttgaccatatacgaaaaaaaggcaatgaagccacgcatgaaataacggtaatgagcgaaaacgatgccaaagagctaatcgtgtttattgaaatgcttctccggtttatttttgaatttccaagtatggtgcctaacaaaagtagcttttag

SEQ ID NO: 106577 - DNA, 690 bp, Enterobacter aerogenes
atggaccctaagaagctatttattgatgaccgtatgaagggcatttgcgcctattgcggtggtacgccaaattcacgtgaccacgtaccgtcaaaggtcttgttggatgagccatatccgaagaacttacccgttgtggaatcatgtgcctcctgcaatcaggggttctcggcagccgaagagtacattgcttgtctgatcgagtgcgtgatgcaaggtactacgattcctaacgaaaagtttcggccgaagatatttgccacccttaatgccagaccatcgattgcaagtagaattgagaatggaaaacaagctgatcgtcacggaaatctattttggcagccagaagaaggaagtgttaaagaggttgttctaaaacttgcccgtggacatattgcttatgaacttggcattcaacgcattgatgaaccagaatttatagatatttccccgttgcctagcatgactaaagaacaattagaaatgtttttctcgttaagctcaagtcatctgtatccagagattggtagccgagcgtttgtaagtgtgctctcggataaggtcagcgcttttgagaattggttagtcgtgcagaacggacgatatcaatatgccataggtcagtccgatggcgattgggtaaagataataataaatggctacttagcttgccatgtagtatgggactaa

SEQ ID NO: 106578 - DNA, 507 bp, Enterobacter aerogenes
atgattgttgaagcgacagaactcttaagtgcttttgtaaaagaagaacaagataaacttgaaagcatcaacatgccacatatgccaacgttggggaaagcctacgaggagattacaaaacacggtattaaccaatcattttcaatccctaaggggttgaatctctctgttgttagcggattcatccgcgtcggggaagagcaactacccaatcagatagattgcatgttggtgaaaggcaagggggataaatatggattaacggatgaatatatatatgatatagaaaatgtagtagcaatatttgaagtaaagaaaactctcaacaaagatgattttatcgatgcatatgaacatttagctatcctaagaaagaaatatagcgaatttttttcgggaaaaatggatgctatggagttgaggccaaatataaatgtggcctcggaaattttttcaaaaataacaggtgtaagtggcccaagtaactacgatgacatttttatttag

SEQ ID NO: 106579 - DNA, 852 bp, Enterobacter aerogenes
gtgttgttttactcgttagtaattgaacagttggcgccagtgacaattattcacggttatgggggatataaatcagagaaaggcctgagagatgtctttctggattatttagatgaagataattatttaaaaaaccttacgaagaaaaagaaaaaagaggaagaaaaaaaagcaaattcaattaacatgattagaggcataaatagtattccgactttaataactgcaaacgagttttcgttagtgaaaacaaatggtcttccttattccttttcaaaagaaaggaataaaaatgactgggcagttatagcttcgggaagagataacccacttaggattatgcttgaattaatttggagtaaaatatctattcagttcgatataagtatgccatggggcaatgatgatcatgtcgaaggattagctccattactttatgctaaggttgttaaaaaagatgagttattaggttggtactataggtcattcgagctttccacgaaaaaattaaaatcgtttctaccttcaaaatatgagccgctaaggatttctaatggagcgatacatttagttcgtaaattgccattaatgcctgatggatatatagtaaatgatgaaaatcgaaatgtgtttgattcaaaaggatttgatcttgatggggtggttgcggagctaatatctacatcatattttgcacttaacggtagtaatttgctcacaattcatcatacaacatatgtatgcgattttgatgagtatggtttcatagatagtcaatttcagcggctaaagtcatggtgtgataataatgaatataatgcaggaattattcattgcatcattttaagttga

SEQ ID NO: 106580 - DNA, 309 bp, Enterobacter aerogenes
atgcgccatagctcattatttctgttactggctttactcacagtatcgcaggcctacgcctccccggaatccacccaactcactctcgcgctgaagcaactcgacgccgtaaaaacctcgctggcgcgagcccaaaccagctccagcaccgatccgcagtcgcgctacttcttcgactacttacaggcgcagcaggacatctctgccgttgaacagggcatccgccgctaccttagcccgacgagagcgcagccacgcgccgtccagcccctgagcgccagctaccagcgggagcatcccgatgactga

SEQ ID NO: 106581 - DNA, 282 bp, Enterobacter aerogenes
atggcaaggccgtttaacttccctactccacaaggagtaactatcggtaacccaactcagtttgtgccagcggatttagccatcagtttgtacaaccaagattctgataaccaacctgctcagcgttttagccagtcagttaaagaatggtttgtggcgcaggcctattctgtaggctggagccatgcaggtgttcctggtgacaattcaggtgtgcttttgcaagcaacggtccagcttactccgcatccgacctaccaaggcttaccgaaccaacaataa

SEQ ID NO: 106582 - DNA, 573 bp, Enterobacter aerogenes
atgctgcacctcaaagcgcaactggcgcaggtccggcttgcagggcaataccgcgacggcggcgctggtgatgcccttgcccagcgcgtgggtgaagtaccaccacactggaacggaagcgctcttgccgctgagttcgttgatgagcggcgcatagccggaatcaccgggctgtaccaccgaccagccgcactgctttgtgtgctggctgtcgtaggtgagggtattgatatcgacattcagaaacggcacacccgcgaagaggatcaccagcagggcgctgtagagcgagtgctccacctggacgaccagcaggcgggcgacgttaccttcatccgccccctggccgcgcgctttcagccacagggcaatcaattttgccagcaggggcagggcgaacagcccggtggcggtcagcgtctgccagacaccgttgttcaccagccagccgagcagggtgagcacgtactcgaaatagctgttggcggtcatcgcggactgtccggctgcgggttattgaggttgtgcagacggcggtcgctgtcgtccggcacttccaccgcctgcccctga

SEQ ID NO: 106583 - DNA, 456 bp, Enterobacter aerogenes
atgcctgatatgaggttatttaaatcaaaaaataccaagcttgagttaagaatcaggaggccgttgtttgcaagagggtttcgttatcgattgcataatagtggtttgcctggaagaccagatatgtatttcccaaaatacaatgctgtcatttttatccacggctgtttttggcatgggcatgataacagctgccctatttctcacattcctaaaaataacgagtcctactggcaaaataaaatcaataaaaatcatgagagagatattaaaaatcaagatattcttgcatctaaaaacatccgcgttctgattatatgggagtgtgcaataaaactcaaaactattgattttgtcgattttattgattatatcgatgaatggcttagaggtggggcgaattcaacacagatgagcgcaaaggaaccaatgccgacttttgactttccgaagtga

SEQ ID NO: 106584 - DNA, 138 bp, Enterobacter aerogenes
atggatgaagatgaacttcattattaccatatgctgctgtcggagagtatctccagcgatgaagccttttatatgattttttactatcatcgccttcttctactgactggaatcttgctaaacctgctcgggccgtaa

SEQ ID NO: 106585 - DNA, 1077 bp, Enterobacter aerogenes
atgaggataacggcatcgaatctggttcaggcgatttcgagcttacccaaaaatacgctgtttaactatataaacgataggaatagcgggaagattgagattgtacgtatccaacatcccgaaggtcctatcgaaataaagagatttgatcctaagaaaggtcaaactcaagcaacagccaaaacagagagtatttcgactcaaatgctttggcgacttgcaaatgcgctcgaagaaaacagacctgtcaacgttgaaagggttttcggtgccagttacaacacccgctcggtattggagagcttgctcgcacatactccagagttctattggtgtaggccagccagactggaaatcatgaatgcacaaaagtctataaaaccaggacataagcatctgatttttctgccagatatgccacatactaatggtttgttaatagagcaccagactaatattgttgtctctgaaatgagcttcgatgttgttcaccaaagcgttgatattgagacaattaagccgactaaaggcatgactattgaagaaaaaagacgtcatgctcagatacaaattgccttagtaaaaataggtcattgtttaggtttagatacttgggtagcagccaatgatcgtagcttacaatataatggtaaagctatagcgcaaatggacggtgtaataagttcattatctgatgagcaagtactccaatcatataatgatgcaattaaagatgcccgtctaatagactgcatttggtttagggaaggtcgcatgatgccagctgtaatggagattgaacacagtactggtataaaaagtggacttactcgcatgaaacaattttatgatcatgcaccgaggttacaagatatccgttggactatcgttgcgcctgatgaatatagagaaaaagtaattgaatttgctaatatgccgcaatttaaagaattagatagcagattttttccttattcagctgtagaagagctttattctctgtgcgacaggagaaaaccttctggagtaaacgataaatttttagatgctttcatggaaagatgtcttaaacattaa

SEQ ID NO: 106586 - DNA, 1008 bp, Enterobacter aerogenes
atggctggcaagatgtggatgattcgtggcgatggtggaaaactatatgatgattttcgtgataaacaagtcgcggcgatagggtggtcaccttttgctccacatgtaaaaccgggattatccagagaacagttgttcgatttataccaagagcttgaacctcaaattaaaccgggaactgcacgttctggtacttctcagatttggcgatttgtgaacgaaatgcagaaaggtgactgggccattacgtattccccctctaatcgaacctacctgttagggaagatcgtttcagattttgaatatcatgcagagtggcttgaagatggtatgggcattgctcgccaggtgaaatggaatacggaagaaattgatcgtgataacttgagtgatgccaccagaaatacattgggttcaacactgacggttttccgtgtgccggatttcgctgtgaatgaattattgcaggggaaaaaacctgcacctgacgttacgccagaagttcttggttcagttaacgaggaagacgccgtatctaaccccttacgcgatatggaaatgatcgcctttgaaggcatcaaagatcgtatcaatcgacttgattgggacgagatgcaaaatctggtggcaggtgttttgcgcagtatgggatataaaactcaggtatcacctgctggcgcggataggggcaaagatattattgcttctccggatggtttcggttttgaaaacccacgtattattgttgaagtgaagcatcgccgtgaacagatgggtagccagcagatccgcagctttatcggtggccgccataaagacgatcgcgggttgtacgtcagtactggaggattcagcaaggatgctcgctatgaagccgatcgttcaacgatcccgctaacgttgtggacactcgacgatttggtgcgtgcgttggttgaaaactacgagcaggttgatattgaaaccaagttgttagttccattgaaaagaacctacttacctgcctga

SEQ ID NO: 106587 - DNA, 924 bp, Enterobacter aerogenes
atggaattgatgtttacctatcgaaaaaatgataatcacacccatcaggtacgtttattatctccgcttggggtttatcccattaaaacatttattatggatgattccgctctatttattagcgaggatatttgtttttcggttacacctttagtgactttcgttgactctgaatttgaagatgaagggtattataccgagatggaatgggcctctataaatgaaataaagttatactcgtcgataatgctaagccttgatagaatgtatggttattcagtcatttatcctttttcaacctgccattatgtgaaaatgagtggtgatgtatctaactatctatctgaaataaaaaaagaattaatcaaagcaataattatgcctgcaggagttaatggatggcatccatttataggacaaatcaatagaggtctgtctcttcctccggtgacaagtgatggggaaaaatatgatttaagagatcaaggattcgatgtcaatatacaggaaaaagtgtttgagaaaattgatgtgaataattttattctaattagaggcctatctaccttactgagaagtagaatgttattagttcatgggtattttatggaggaagccatttattctctattcatatcacttgatgcttcatttaatatgatattagataagctaaaagaagttggaatatctaacccaacctcgaaagatgcagctatgtttatctctaagacatttaatgctccagaaacagaaaaatattttggtgagtattacgaaggtagaataaaaacatttcatccaaaatctagatttggtgcatatcctcatgccccactgacaatagatgactatttttttctttctgaggatcttagtactgtttatttgtatcttacatgtggatatgtatcacaaaaatga

SEQ ID NO: 106588 - DNA, 306 bp, Enterobacter aerogenes; identical to SEQ ID NO: 96458

SEQ ID NO: 106589 - DNA, 1104 bp, Enterobacter aerogenes; identical to SEQ ID NO: 96459

SEQ ID NO: 106590 - DNA, 1221 bp, Enterobacter aerogenes; identical to SEQ ID NO: 95566

SEQ ID NO: 106591 - DNA, 534 bp, Enterobacter aerogenes
atggcatctcaacgggttctgatggtagtggatatgcaaaacggcgtattcgagacgccgcgtgtcgatcgcgaacgctgcgtggcgcaaatcaatcgcctgattcacgccgccgatagcgttattttcattcagcacgctgaagcgggtgggctggaagagggaagcgaggggtttgcgctgctgcctgaactggcgcaacccaccggggcgcgctacgtcaccaaaacggcctgcgatgcgttttataaaaccgaacttgaacaggtgctgcgcgagagcggaactcacgcttttgttatctgcggctccgcgaccgattattgcgtcgataccaccatcaaaaacggcgccagccgcggctacgctatcaccatcgccgaagatgcccataccaccgccaaccgcgccgccgccgaggccaaaacgctgatcgctcactataacgaggtgtggcggactttcacccttcccgataatccattacgcgtgaaacccgtagaaacaattcttgccgaatggcagacgaactaa

SEQ ID NO: 106592 - DNA, 1170 bp, Enterobacter aerogenes; identical to SEQ ID NO: 96462

SEQ ID NO: 106593 - DNA, 975 bp, Enterobacter aerogenes; identical to SEQ ID NO: 96463

SEQ ID NO: 106594 - DNA, 375 bp, Enterobacter aerogenes
atggcaacagttaaccagctggtacgcaaaccacgcgcgcgcaaagttgcaaagagcaacgtgccggcgctggaagcctgcccgcagaaacgtggcgtatgtactcgcgtatataccaccactcctaagaaaccgaactccgcactgcgtaaagtttgccgtgtgcgtctgactaacgatttcgaagtcacctcctacatcggtggtgaaggtcacaacctgcaggagcactccgtgatcctgatccgtggcggtcgtgttaaagaccttccgggtgttcgttaccacaccgttcgtggtgcgcttgactgctccggcgttaaagaccgtaagcaggctcgctccaagtacggcgtgaagcgtcctaaggcttaa

SEQ ID NO: 106595 - DNA, 1128 bp, Enterobacter aerogenes
atggctgccagaccacgtaaaaataatatatctattccaaatttatacccgctctacagtagaaaggttaataaagtatactggcgttataagcacccgataactggtaagtttcatagtctaggaacagatgaagcagaggccacggcaatagctattgaagcaaataaaagactggcggaacaacaaacccgccagataatggcaatcactgacagaatttccaccagctcagggaaatcaatatcaactaacacctggcttgaacgttactggaagattcagcaggaaagattaaagtccggagatattaaagaaaacactatcaaacaaaaagcaaaaccagtatctctgcttaaggagcgggtaggaatgaaattaatatccgctgtcaatgttcgagatgttgcgcaaattcttgatgaatatttagcggagggacaacccagaatggctcaggtcattcgctctgtcctaatagatgtttttaaagaagctcagcatgcgggagaagtacctcctggttacaaccctgcactagcaactaaacaacctcgtagaaagatcactcgccagcgcctcactcttgaggaatggcaaaagatttttgatatagccgatgaaaatcacaaatacatggggaacgccatgcttttagccatagtaacaggacagcgactaggtgatatatcccgtatgaaattctcggacatctgggacgatcatctacacgttgagcaagagaaaaccggaagcaaaatcgctataccattagctctgcgttgcaacgcaatcaactggagcctccgagatgtaatcagtcgttgccgggattatgcagtaagcccttatttggttcatttctttagaaccacctcacaggctgagcgaggagcacaggtgaaacccagaacactgaccatgaatttcagcaaggcaagagacagtgcagatattgactggggacaaggtacaccggcaactttccatgaacaaagatcgctttccgagcggttatataaagcccagggtataaacacgaaagatttacttggacataaaactcaacaacaaacggataggtaccatgatgatcgtgggaaggggtggacaacggtggccttatga

SEQ ID NO: 106596 - DNA, 246 bp, Enterobacter aerogenes
atgcttcagatgttaacccttgaagagtgggcaaacgagaaatacagaagcaatcctccaagcgtttccactctcaggaattatgctaaacagaatatgttttctcccccagccaaaaaagaaggtcgattctggcgcgtcagggaggatgctgagttggtcggtacattgaccactcctgtagtaaagaaaagcgaccctgttcttttgcagaggattttgaacgatggctgccagaccacgtaa

SEQ ID NO: 106597 - DNA, 345 bp, Enterobacter aerogenes
atggaatttggaatgaaacgcgtcctggcatctgtccaggccgccgccactttgaataagctctatgacggctcgcccgtttcactgacggccatcagtaaagagtcaaagctgtctacttcataccttgagcagatcttcaaaaagctgcgggcgggtaacctggttatttcacagcgtggcccaggcggtggttatagcccccgcggcgatgacatcaccgttacagaagtgatcactgcggtatctaaactgccagcccataaaacttttgagcctatcctgcgagcgcttgacgacgttcgcgtatcacagctgctgcggggcgattcgccagccccataa

SEQ ID NO: 106598 - DNA, 195 bp, Enterobacter aerogenes
atgaataccctgtttgcccttgtcatcagcgtatgtgctctcactggtgaatgctctgatgttctgatcggtgtttatccatcagaggccagttgcaacagcaacgccgatgaacaaaaagtacagggccagtgcctcccctaccgaaatgcacaaaaaatggctgacgaccaacagcctgcagtgagtttttga

SEQ ID NO: 106599 - DNA, 123 bp, Enterobacter aerogenes
atgaaggattttgcccgagtacctaccgggaaccaggcgacccgcctgaactggttcgaggtgagactacgccagctgtgttacttacttgcgcagaaaggaaaccctgaggctgaggcatga

SEQ ID NO: 106600 - DNA, 123 bp, Enterobacter aerogenes
atggataaagcatacgaagactattttgaaaacctctctgaaggtgaagaggcactgagtttcagcgagtttaccgcggcactttcaggtaagccggcagactgcgcctcttctgaaatgtaa

SEQ ID NO: 106601 - DNA, 1143 bp, Enterobacter aerogenes
atggctgaagaagcagggcgcttaacattttttgatgttacaaaagctggattttacaatctcaaagatgaagtgcaaaaaagtgctgatattgtaaatatattggactccctaactaattgggtttgttctctttcttttgaagagacgctgccattagtagacgattctagacttagaaaaaaggtatattgtcgcggtgttcataaagatgagaaaacaggcgattatttctttgttctctggaaatctgaactagatggaaatggtaatcttctgggggtagcacctgattcaaaagttaactcatcatcaaatgatgttatgatgctgtcggatgacatgactgatggggtaaaatatatttggggtaagccatgctattactggtatatacctgagttaaataagtttgctgctattcgcttcccacattcaaactcggatacgtatcttttcggccgttacattagagattatgctaatttcagaatgccgtatcccgggcgaaaaatatcagaaatatgtagaacaaatccgggcgggaaagatattaagtttagtgttgttacattcgaaagcgatgatggtcattctcgcgtcagatttttattcgaagcgcaacagtatatgaaaaaagcagggcgtgtaaacattaagaagatacgagattctattacgcatattgtaataagagatactattggagctaaagtccctgataaaagagcttggtgggtaaaggcttttgataagttccctgtattgcgtgatgaagttccaaaaacacataaagaacgacagatagagttaattattgaagagagaccaaccgaaaaacaaatcgatgagcttttcgatttttatgaagaggattatgcttttggatcttcttggaataatattggtttcaagcaggatggtaagaatgggcagactaagtggttagatgaatacgtaatgagagattatttaaatgccacttatactgttaatgataacgcacatatctcagctgaaaagttagctgagctaataaatgccaagcgagatgaacttgtaagtggtctcgatggtaatcaaatggataaaatactagtgatgccctcagtaagtaatgatggagtcgctttaggaggatga

SEQ ID NO: 106602 - DNA, 507 bp, Enterobacter aerogenes
gtgataattaaagttattatcagtgttatcatggttgtggttatttttgggggcggctttggtgttgctgaaaatgttaagtactcatacattattgatttgatgggggttttgcaaaacacgtcagcaatgatttttgctattgctggtatttggctagcttatttgtatccaaatgcaattgctgggctaatgaaatctgaaaaagtggatttcttagcaagcaaaaatgaagcgaaacgtattgagggaatgatacttataatcattatgtctgctttggtattgatcctcatcatagcattctacgcatttaacgcaatttttcgtggcactgaattatatattgtcaataaatatataatcaaaggtttaggttgttcttatgttgccgggatattgttcctacagctatattgcgtaattatgcttattagtagaaatattgcattcataaatagattgtatttagtaataaatgaaaaagagctagaagaaaaattataa

SEQ ID NO: 106603 - DNA, 732 bp, Enterobacter aerogenes
atgttcaagataccacaacatagaattctgttcaaatatagaagctttgataaaagcagtttggaattgtttattaatcgtgagttatggtttgctaaagcagatacgcttaatgatccttttgaggcaaattgttcattctcaaatgttcttaaagcagtttgggagcattatcctttacctaataatttgagggttaaatatgaagatattatcaaggagtcattacacaccttaggtatttgttcctttagcaaagcacgaaaaaatcaactaatgtggtctcattatgctgatgagcatagaggtatttgtattggttttaaagaagattatttgaaaaaaactggaatgaatttctatccaattaatattgtttaccaagatgattatcctttcaatgatattattaaccggattcattatttcgaaaaggagaaggttcttaatgggctggatagtatttctggagatatcttgttatcaattttgactacaaaatatactagttggaaatatgagagggaacgccggttgattgttaaagactttggtgcaagaaagtttgagccattagctgtgaattcaatagcactaggactgagaatggatgagagggataaaaagactttgcgaacattattgtcaggtcctgaatggtcgcatttgaaatggtttcaatcgacaaaatcgccaattaaatattctttggattttattcgtattaagtag

SEQ ID NO: 106604 - DNA, 393 bp, Enterobacter aerogenes
atgacgcaaacaaccgaagtatcaaaatcccatcagactggtgctccttcaacgagcgccggtttactctcgtcttcgaaactaacttttcgacagcaggaagtttttgacctgctggtggcctacatcaatcagaatggctacccacctacgttttctgaactggctgatatgctcggcgttagctcgtctaatgctgttctgttacatctgcgtgcgttagagagaaaaaattttataaaactctctcgccgtgtctccagaggaatttccatcgtcgggcgaaaggagcctatgctcgccgtgcagctgctgcaggaaatgatcgctgaagaacccggcgcgcgtgaaagaacgattgagtttttacgactgttcggtgatcagccatga

SEQ ID NO: 106605 - DNA, 204 bp, Enterobacter aerogenes
atgaagaaaagttggtttttacacgaacaactttcagagtctcaggctctggagctggcggaacgctaccggaaaaagaattgtcgggttgagaaaagcctttcgagcgactttatctcttgggaactccgtgtgctgttaccggaatctaggaagccaccgcgcgttaacagaacctacacacaaaaaatctggaggggctga

SEQ ID NO: 106606 - DNA, 1032 bp, Enterobacter aerogenes
atgcgcgcattactaaatgttgatgttgcccggcacctgggaattgtgctgcttaagccgggtagtgaattaatgccgttattcggcgccggccgagttcttgtagaaataccgccggcaagcatgagaaatacacctagcgggcgtcttccagatgcccggcagccgttgcgggatgatatggggctcagaccatttttcatgaagaaggcagttatcactgcagctggtggggttagtgccctcgagtcatggttgcgccggcaggttaaaaactgtcagtggacacattccgattaccatcaccgtgagctcgtcccgtttcgccattcgacgggtgtaataatcgcatgctggcactgtgataatgtgctgaaaaaccaaacggaacaaaccctcgatcaactggtaggtgttaacaacgctgactgggtaatcgacactgcccgcatcgcgcttggtctggacgctcagcgctcattgtcactggcggagctatgctggtgggcggtaggcgccgggattggcgatgaaattacagaagaaatggcgcggcgatccctgcgtattaaagacgatggcattaaatcggtttacagggagagtgagattgttccgtcggtaccggccaccagtattctttctccccgtctcgaaaaaacaatcaagccaacggcaataacaacgccgggcaaacctctggttcctgtgaacgtcgatcctgttgctccggcgacactattcgcgagacctaagcggagccgatggttatcagctgactttatctcatgggttaaaacacagccgtgtatgtgctgcgggcagcctgcagatgatgcacaccatcttattggctgggggcagggcggcgtaggcaccaaggcccatgatgcttttacgatcccattatgccgcaagcaccaccgtgctttgcaccatgaccctgccgcttttgagcgtgaatacggcacccagccggtattgattattaaattgctggaccgggcatacgcgctcggcgttctggcgtag

SEQ ID NO: 106607 - DNA, 603 bp, Enterobacter aerogenes
atgacaccacgtcaacgccgtctgcaccgtgcaggattagcaacagtggccgccgccccgcgcaaaagctggctgggccgattcactccccttaatggcattcagtccgcctggataaaatctctgcttactgtttggggggaagggatgagaggaggtgctgccccgcgtaaaccatcaggacattcatgctggcgaggcatgaagggtgatcactggtcagataaagcattagaacgctttacggcagcaattgagcaggcaagaagtgaagggtatcgcgggcggcaggcattaagcagggcgcatgccattttgtggccgaagcctgcaacggtcgcgattgacgctgcgatcactgaggatgatgttgaatttgttgaacgatgtgtactggcgatatttgaaacgggtgatccggtttatctcgttggcgttaactattacaccacccgtaaaaaaatctcagacataacacgggaattacagctggtggctccatggttaacagacagtgaggcccggaaaagagtgcgctggtgccttgaaatattcagagcaaaagctttcctttctgttcataaggcgattcatgcggattag

SEQ ID NO: 106608 - DNA, 204 bp, Enterobacter aerogenes
atgctatctactgataaccaaagaatttcagagatttttgaacgtttggcagaaatagcagctaaaactgctgaattaacaagcaaccctaatctatcccctgctcaaaagcaggcagcatgtgacagttactttagcgaacatgatcagttaacaaccgaagccctagagatcttcaaaaaaatcactaaaaatcctcagtga

SEQ ID NO: 106609 - DNA, 171 bp, Enterobacter aerogenes
atgcaacaacgcaaaaactcaaaaaacaatcgcaactacctcatcaaatgtacctgccctagctgcaccaaccaatcagaacatagttacacccgagtccagaaaggctctgcgctgatgtgccctcactgtagtaagattttcactcaagacaaacttcccaccgcttag

SEQ ID NO: 106610 - DNA, 498 bp, Enterobacter aerogenes
atgtctccgacactacgtaaaactgttcttgcggcggtgggcggcggggccctggcgattgcctctgcactcatcactggcccgatgggtaatgatgggcttgagggagtgcgatactccccttatcaggatgtggtaggtgtctggacggtttgctacggccacgcaggtaaagacatcatgctcggcaaaacctataccgaggcagagtgtcgggcgctactaaataaagacctgaataccgtcgcctggcagatcaacccttacatcaaaaaaccgatcccagaaacaatgcgtggggctctgtactcattcgcctataacgtcggagccgggaacttccagacctctactctgcttcgcaaaatcaaccagggtgaccagaaaggtgcgtgtgatcagctgcgccgctggacctatgccaaaggtaagcagtggaaaggacttattacccggagggaaattgagcgtgaagtgtgtttatgggagcaaagatga

SEQ ID NO: 106611 - DNA, 351 bp, Enterobacter aerogenes
atgagtcgcttaaccgccgttatcatcgcaatagcaatcctgctaatgtcctgtgccatttcatggcgtatgggatggagttcccacgctgatcacatcaatgctcaggctgcgaagaagagagagaaggccgagaatgccattaagcctgtagaggaaaaggccgcgactgctaacgaagcgggtaaggtcatctacaaaacaataacccgcgacgtggtgaaatatgttcagtctccgaatcgtactgtgtgtaggtttgatgatgctgctgtgcagttgcgtcagcgcgccatcgatgctgccaactccatccccggatttgatgagtccgccgtgcaaagcaagtga

SEQ ID NO: 106612 - DNA, 438 bp, Enterobacter aerogenes
ttgaaaacgttgaaagtcactattacaaaccttcaacagattaatgatggcattgtctgtggggtcaaagtcagatttaaagtcattcagtctggttgcgtgctggtcgagaaggttatatcaggcaaggctaccgctccgtttaccttatcttatgatgtcaatgcgaatgatgaatctctggtggtggaacatgatcgcccagacctgcaggagcttgtagtctcagcggcaatttcctctgcagagtgttataaaccggataataccctgacctctgtcagtgcttggagcattcaaacgcagggtaagatatacgcttcaggtatgcagccaaacattgatgaggtattcaaacggttagatgctgctgaggcactactacactttatgggctgtaagattgcggaactacaattaagatatcgaaataaataa

SEQ ID NO: 106613 - DNA, 225 bp, Enterobacter aerogenes
atggaagaagaaattaaatataacatcgaggtggattgctcaactctggagtctgcagcaaaagaaataagagctctcaaaggtcttctggcaactatgtttgtttgccttgatcaggatatgaagggtgtcgtaatacatcaactttcgcagattgatgatgaatacaaccagaaaaacttggagatgctaaagcaaatccaacatatccataaccgaccttaa

SEQ ID NO: 106614 - DNA, 165 bp, Enterobacter aerogenes
atgaagaacttaaaaattgcatacgtagacgagaagctggtggcgattgagtgtgacggattgtcatgctcatcgctgcccgtttcagagtttctcatcgacagtgccgctttaactcttctccctcaactcatgctcgaggatgtttatgccgccacgagctaa

SEQ ID NO: 106615 - DNA, 318 bp, Enterobacter aerogenes
gtgctggacctgccacagcaagaaaacagcaacagagagaacccgatgaagagtttcaaaattgaatacgttgatggcgttttgaccgttctggagacggatggtcagtcacgaatgaatgaagccgtgcatggcatccattttgagcatgtccagggcggccgcccactgctgaaactgacgattgcgcatgatattgctccggcaccggctgctgagtcggctcaggaacctttagtgggtgagctggtacaggagcaacaatctccgcttccaggcggtcgtcgttcccgccatcgtaggggaggtaagcaatga

SEQ ID NO: 106616 - DNA, 432 bp, Enterobacter aerogenes
atgatgtatcaacgcacggatctgacgctctccatgttctatgcatccagcgctgatgcagacgggaacaaagtggctacgttgacgatgcaggtaattgcggcagaggttggagccgtccagaccagccagctgcgatgtatcaccgatagcgcgaagaaaaaaacgtatagcgtaggtgaacaatctgtcagtaatggttccgatccgttactggtcgcgattgagaattactggcgtcagagtacggatgtcgtcgttaaaggattgatcgccgaggtgaccgacttcatcgcagggaacatcaactcagtcagcacctggatcggtcagtttgggatgaaggtgttcgagaaccagccattagatgaacggctaccagaaagcgtactgcaggccgatggaggctccgctaccgcgacagaatcctga

SEQ ID NO: 106617 - DNA, 435 bp, Enterobacter aerogenes
atggccggaggaattcgatcgtccggtggtggccgaaaacccactttacccaccgggcaaaaaagcaaattaacacgtattgcgccccccgctgagttaatgggggaggcggcaataagaatgtggaagacgcaaagcaaaatactcatcgaccgaggagtgtttgagctggaggacgcacctttgttgctggcttactgcaatgcttttcatctgatgctcgaagccgaaaaaatgctggccagcggactgacctcagaaagtgaaatggggggcctgaaaaaacaccctgcagttaatgtccggaatgactcggtttcccagcttgcccgcctgggctctctgttggggttagatccgctcagtcgtcttcgcatgaccagcggacaaaaggatccggacgatgacgggaatgaattcgatgagtttgactga

SEQ ID NO: 106618 - DNA, 1722 bp, Enterobacter aerogenes
atggcaacctatccgaacgtcaatgcagcgaaccagtatgcgcgggatatcgttggcgggaagattctggcgtgtcagttaacgatacttgcctgtcagcgacatctggacgacctcgaacgagcaaaggatccccactggccctaccgcttcgataaaaacaaagcagaacgatttcttcgttttgcccagaaaatgcctcatacctcaggggaatgggcccggcgtaaactccggattgaatttgaagcctggcagaagttcgctcttggcgtaccgtttggatgggtacacaagaagacaggcctgcgtcgtttctctgaaatctatatcgaggtgcccaggaagaacgggaaatccgctattgccgctgctgtaggaaattatatgttttgtgcagatggcgagcatggtgcagaagtctattgcggcgccacgactgaaaaacaggcatggaaggtattttctccggcgctgcaaatggtgaaaaagctgccggcattgcggcaaaaattctcgataaaaccctgggcaaaaaaaatgacgcgccctgacggttcggtttttgcgcctgtgatcggtgacccgggggatggtgattcgccatcatgcgccatcattgatgaatatcatgaacatactactgatgcgctttacaccaccatgaccaccggcatgggggctcgtgaacaaccgatgacactgatcatcaccactgccggctatgacattacatccccttgctatgaaaagcgtactcaggttgtcgagatcctgcggagaacccgtaatggcgaggaaaatgaaaccatatttgggctgatttatggccttgatgacgatgatgactggacgactcctgaggcattaatcaaggcaaaccccaactatggcatttcggtaaaagcagattttctccgggctaaacaattattgggtatgtcgacgcccgggcagacaaacaagattctgaccaagcatttcaatcgctgggtaagcgcaaaatcagcttattacgacctgagaaaatggatggatgcagccgataaaaaccttaagttgtcagattttgaaggggaagaatgctggctgggtatcgatctggcctcgaaagttgacctcaatgccgtggttccagtttttcgtcgtgaaatagacggaataacacatttttactgtgtttctcctctgttctgggcacccgaagaaaccatttactcgcaggagaccgcgctgaaaagtaccgcagaacgttatcagtcctttgtccggcagggtaagttgatcccgaccgatggtggcgaagttgattacaggctgatatttgaaacgatcctgaagctgcggaataccgtaaaaattgcccaatgccccattgatccttatggcgcgacttcattacgtcacatgcttgaggaagaggggcttgagcctgtcgagataagacaaaattttacccatatgagtgatcctatgagagagattgaggctgcgctcatctcggggagattccatcatgacggacaccccgtcatgaactggtgtatttccaacatcgtcggccagtaccttcccggaagtgacgatattgtgcgtcccgggaaagaagggcggcagaacaagatagatggtgcggttggtttaatgatggggctggggcgcgccatgcttaacagttcagtgatgacatccgtatacgatgaggaagatatagcatgctaa

SEQ ID NO: 106619 - DNA, 1260 bp, Enterobacter aerogenes
atgttccttccccagatgttcaggggccgacaatattcgggtaatagcttctgggaagccatgctgggcggggttcgttcaagccagagcaaaactggcatcataatcacgccggaaaccgctcttggactttcagcggtccgggcctgtgtcaccctcctggcggagtccgtcgcgcagctgccgtgcgaactttaccggcgggataaaaatggcgggcgccagcgtgcgacggaccacccggtttatgacctgattcactcccagcccaacaggaaagacacctcattcgagtatttcgagcagcagcaggggttgctggggctggagggaaattgctactcgatcatagaacgggacggaaaaggctacccgaaagaactgatccccattaacccgaaaaaggtgattgtgctgaaagggctggacggtatgccgtattaccaactcccggaagtcggcgaaattctgccgatgcgcatgatgcaccatgtgaaggtcttttctctggatggctatatcggcagttcccccattcagacgaacgccgatgttctggggctgaacctggcggttgaggagcatgcggccgcgacattccggcgcgggacaacgatgagtggggtgatagagcgtccgaaagaggccgcgaccattaaaagccaggatgctattgatcgcctgctggcgaaatggaccgagcgccattccggtattcacaatatgttctctgtggcattgctgcaggagggcatgagctacaaacaactgtcgcaggataacgaaaaggcgcagctgctacagtcgcggcagtggggcgtggaagaggtctgccggctctataaaatcccgccacatatggtgcagatgctggcgaaagcgaccaacaacaacatcgagcaccagggcctgcagttcgtgatgtatacgctgctggcctggctgaaacgccatgagggtgcgctgcagcgcgatctgcttctgcccagcgaacgccgcgatttgtacatcgagttcaacgtttccgggctgctgcgaggagaccagaagtcacgctatgaatcgtatgcgctgggccgccagtggggatggctatccactaacgatatccggcgtatggagaatctgccgccaattgccggcggggacaaatacctgacgccgctcaatatggtcgacagcgcgacgatccttcctggcgataaatcgccgacagcgaaacagctggccgaaattgaaacccttctggccagagcctga

SEQ ID NO: 106620 - DNA, 921 bp, Enterobacter aerogenes
atgacaacgaaattaattaacctgccgcacctggcagatatggtctttggcgtgccgcattacgtgacgcggcaaacaatggactccgtgaaagcggtgctcatcccccgtattcaggggatcaccgaagatgccgtcattcagatggcgctgaatccgggtaaatcgcctgccgctgagcaggtccagcccgcaggcggggtggcggtgatccccgttcacggcattcttgttccacgccgggggcagattacggcgatgtgctccgagctgaccagctacgagcggatccgcgggcagttgcaggcggcgttaaacgacccatcaatcagcgaaatcgttctggatattaactccggcggcggcgcagcggtggggtgcaaggagttggccgattacatttatcagtctcgcgacacgaaacccatcacggcgattgtgaactacagcgcgtattccgccgcgtatttcatcgcatcggcctgcagcaaaatcatcgtcagccagaccagtggcgtggggtcgattggtgtgatcatggagcacctcgatacgtcgaagatggaagaaaaaatggggctgacgttcaccaccatttaccggggagataacaaaaataatggcacccaacatgaaccactgagtgaagagtcgctgggtatgttccagggcatgatcgacgaaatgtacgagacgtttacggggtcggtggccgaatatcgcggcctgaagcagcaggccatcattgatacgcaggcggggctgtattttggccctggcgctgtgtcagccggcctggcggatgaagtctctgacccccaggcggcgatcaatgctatcgcggcaaagtataagcaaccccgtcaaaaaacctccattcagatgcaggcagccgcgatggacctgcaaaccaaaatgtaa

SEQ ID NO: 106621 - DNA, 261 bp, Enterobacter aerogenes
atggctgcgaaaaataaagcagtggagccggaagaaacaggcacacaggacaaccatgcgaccgagaccgcacaggcagaacgtaaatccgttgtgttcctcggtccgcatagccgttattcccgtggtgatatcgcgtggtttgaaggatcgcacgccgaagagctggttaagcgccgtatcgcggtatggccgaaggatgccgaacgcgcgctgaaaccgaagccgggagacagcgattttgatactgacattggatga

SEQ ID NO: 106622 - DNA, 318 bp, Enterobacter aerogenes
ttgatactgacattggatgatgtgaaaacccagttacgcctggaactggatttcacggagcatgacgccatgctcacgcaaatggtgaacgccgcgcagcggagcatcgagcgtgattattactgcaagctggtcaccagtgatgaagagctgcaggcgctcccggagaccgtccgcggatttatcgcggatgaagatatccggctggccattcagtttctggtcagcgatgcgtatctgaatggccataccggacagtggctggaaaccgctgcggtgaggcatcttctttttcctctgcaggagcatacgctatga

SEQ ID NO: 106623 - DNA, 339 bp, Enterobacter aerogenes
atgaacctgaaaccgggagaaatgacctgccgcattgtgattggctatatgcaatccgggcgggggccgctgggcgaacctctgccagaaaagctggttgagacggggaaagcttgggcgaaggacgagctggtatccggcaggaaagtccgaacgctggatcagcagcaggtagtggaaacccgccattttaccgtccatccaggggttctggtcgacctagactggaaaatcacgacgaaaaatttggtttataccgtccggaatatcgaccgcaaaacggaccggatcattatcacgggggaggccgacgggcggcatgatagagctggcgattaa

SEQ ID NO: 106624 - DNA, 390 bp, Enterobacter aerogenes
atgatagagctggcgattaagggtgcgctggagcgcatcaccggcatgaatgcgtatccgcttttactgccggacacggtccaggaaggtgcgacctttcagcgtatctctgacccggaaatggtctcgggaatgttgcgaacggggatcgtctcagcccgtatccaggtgaatctgtaccgtcttgatgattacacctcactgctgcagctggataaaaaaatctggacggaactgaaatccgtcgttcatggccagctggagggtatcccggttcagtatgtggagcgaggcggtatccatcaggataaaaaccagctgacgaatcgtcgcattcagtatcgcctgacccgcgatttcatcattcactacgtggaggactcctcgtga

SEQ ID NO: 106625 - DNA, 402 bp, Enterobacter aerogenes
gtgatccgaatggaagttaaagggctggatgagctggagcggcagttaatggccctgggcgaaaaagtggcgacgaaggtattgcggaatgccgggcgcgaagcgctaaaggtcgtcgaggaagatatgaagcagcatgccggctttgacgaaacgtctgccgggccgcacatgcgggactcaatcaaaatccgctcttccacccgcaagggtaaagggaacgcggttgtaacgctccgtgtcggccccagcaagcagcaccatatgaaggcgctggcgcaggagtttggcacggttaaacaggttgcagacccctttatccgacccgccctggattacaacctccagaccgttttgcgcgtgttaaccgtggaaatccgaaacggcattgaaaacaggtag

SEQ ID NO: 106626 - DNA, 462 bp, Enterobacter aerogenes
atggctgataaaacttcgcctgaatatgcgatgttgccggcgggcaccattgtgaaatacggggagcctggcgctgccacgtcagcgctgaaaccgctgattaactgtaaagcgttgggtgcaatggggcagacggggggctttgtcgactgcaccacgttactggataagcagaaacagtccatcagcgatctgcctgacgggcctgaaaagtcgctgggcttcattgatgatccgggcaataccgattttgccgcgctgctgaacgcagcagaggcccgcaagaccatccagttatacgtcgaattacccaacaagagaacagcgacgatgctactggcgctgtccggctggcagatgaatgaaatcgccgctccggcgaatgaggtcatccagatcactgttcagggtaagcagaacaagatcgcctggggaaccgtcgctgtctccggcggcgcctga

SEQ ID NO: 106627 - DNA, 3336 bp, Enterobacter aerogenes
atggcagacgtcgcatctttagcggtcgggctgcacctgaacgcagccagttttaaatcccagctgctgggagcgtatggcgatgcggagaaccagtcacgacggtttaaccgtaatgcccaggcggacgcgaaaaagacggaggacgcctataagaaggtcggtctgtcgatatccgggatggccagccggctggcggggctggcaggagccggcctttccatcggtacgatcgttaccacgtccagacaatatggacaggcgttatcagatctgcaggccatcaccggtgcgactgcagctgaaatgaaagcgctggatctggctgcgcaggaaatggggcgcacgacagagtacagcgccagccaggccgccgaagcgttaaagctgatggcgtcggctaaaccggagcttttaaaaacgtccgatggactgcagaaggctacgaacagcgcgcttatcctggcgcaggccgccggcacaacgctgcccgatgcgaccagaacgctggcgctctccttaaaccagtacggggcgagcgcgcaggaagcggatcgttatatcaacgtgctggccgccggcgcgaagtacgggtcgtcggagattgtggatacagcggccgccattaaaaatggtggcgttgcagccgcacaggccggcgttggttttgagcagctgaatgccgcgattcaggtgctggcagagcgtgaaattaaaggcggtgaagccggcacggcgctgcgtaacgtcatcctgaacctggaaaagggcacagacaagagcctcaagccatccgtggttggtctcagccaggcgctgaccactctttccgggaaaaatctatccacggcccaggccgtaaaactgtttggcgtggagaacctgaatgcggcgtctatcctggtccagaaccgttcaaagcttgatgagctgaccgcttccctgaccggtaccaaaacggcgcatgagcaggcatccatcagggttaacaacctgaacggcgatttgctggggctgagcagtgcgtttgaagggatggtcattaagatcggccagagcagtaacgggccactccgcagcgggattcaggttgccacggaggcactgaacagcctggcagacaatttcaacaccgtctccagcgtggcgctttacagcctgatccccgtgttatccacgaaactgactgcagggctgcgggagaatatcgcggcctggcgggaaagccaggcggcggtaaaagcgcgggcgcaggctgatgcggatattgcccgcaaaacgctggattcgacagctgccatcctgaaacagaacgacgccgagtttggccactaccggcagatggagcggacggctaaacagtacgggatgaatatcagttaccaggatgagtttacccgactcatccgacaggaaactgaacaaaccaatctggccagccaggcgaaactgaaactggcggcggcaaaccggcaattgtcgatatcagcccgcgcggcctccgttgcggtggggctggcaagaggtgcattaaatttaatcggtggtccgttcggcgccgcgatgctggccggttcgggcctcctttactttcatgagaaagcaaaggaggccaggcagtcagccattgatttaaaagatgccgtagtcgaaaccagtgaagcgctgatgcgcctctcgcttaaccagctaaatgtgaggcagttcgacctagaggatcagtacgaaaaccaggtcgtgcagcgtaaccagctgatgaaagagattcaggatgccgacagtcgtatcgacagcctgaaagggtttgaccccttcggccagctggaaggggtaacaaaaggccaggcgcgtgcacgggcggatctcgatagcgttaacgagggactccgcaaaaccgaggaaaacattaagcgtgtcagtgatgcaaaaacactggctcagctgggtttatcgggaaaaataacctcccttacggacgatctgaaaggggcgttaagcacgccccccaaagagaccggagatggaaatccctggggcggcgatggcggtaccggcacggggaaaggcagtaagtccaaggtcgaccagttcaaaacgctgcggcagcaaattgaagaagcccatgcgtccagcctggccagaattaacctgcaggaaaaggacagtaacagggagctgcaggaagcggcgaagaaaaatggcgccagtgatgctgacctgcagcgcgcgctgttaatgaacgcagagaattaccagaaacagcgactggatctgaccgcgcagtattcccccgcccaggaaactctgcgaaaagagcaggaagccagccgggacctggctgagcttttcaaagcccgccttcttgatgaaaaagagtaccaggccgcacgaataacgctggccagagatactgcgaaagagctgctgcaggcgcatgccgataaaatcgctgcgccggcactggatatcgccggcgaagttgatccactggtctcgctgcgcaatcagcttgcgcagcggcaggcattgctgcaggcgtactaccagggcagcgcgatcagcaaagaacagtacgaaatgctgatgcagaaggcgacgaaagaatccgccgatgcgcagtatcagacgtcactggagttataccgatcacagggagaattccagagcctggccgtcgggttatttgaaacggcccatgagcgctcaagcaacttcctgacgagcatgctgacgcggacgagaagctttaaggagaacatggctgacctgttttcctcgctcacgcagtcgatcataaaaaacctcgttgatatggccgctcaggcgctggtcaccagttccgtcatgcaaaccattatgggcgtggtgggcgtcgggaccagcgttgtcacgggcgctgcgggcgcaggctcggggacggcgatccagaatgccgccagtaacttccagttcaacgccaaaggcggcgtttacgactcgccgtcgctgagcgcatacagcaaccaggtctacgactctccgcagttcttcgctttcgcaaaaggagccggcgtatttagcgaggccgggccggaggccatcatgccactgacgcgtgccggcgatggttcgctgggtgtacgcgctgtcggtggtggtcagaacgccggcgcgtcggaagggccaaaagtctatatcacgattgaaggcggaaacacctcaacgcaggcgccatctggttttgagcagtttggccagcagatcggctcgtttgtggagaaaaaatacagggagctgatggcgcaggatatgcgccctggcgggatggtctggaatgcagttaaagggcaacgctaa

SEQ ID NO: 106628 - DNA, 339 bp, Enterobacter aerogenes
atggctattgagatattcacctggagtccgcgggttaatccccagcagaccgttaactttcgtgtccggaaggcgcagttcggtgacgggtatacgcaggtatccggcgatggtattaacacccgatcacaggactgggagctgagttttgtcggtacggaggactatatccgtccgattaagcagttcttcgaccgtcatgccggcacccgcgcgtttcagtggaccccgcctctggaagaggtggggcttttccgctgcgaacaatataaaccggtgccgctgggcggcggaaattactcactttcagccacttttattcaggcatttaaaccatga

SEQ ID NO: 106629 - DNA, 756 bp, Enterobacter aerogenes
atgagccttaacgcgaattatcagaagttagagccaggcgatgaggttcgtctcctggagatcgatggccaggcgtttggcctggatgaggttttgtatttccacggctataacgttccccatactgcagccgaaatcctcgccgctggcggcgacctggataagctgccggcgaaaagcatctggtggcaggggcgggagtataaagcctggccatgtgaaatcgaagggatcgagtcatccaccactggcagcgacgcgcagccaacgctgcgggtagggaatatcgacggaaagatatccgcgctctgtcttcattacgacgatctggctctggcgcgggttgtcatccacgacacgcaaaaacagtatctcgatgcgaagaactttccggaagggaatgcctcagctgatccgacgcaggagaaacggcgccttttcttcatcgacgtaaagcattatgaagacgatgagaaggtggaatttactctctccagcccgtttgccctgcaggggatgatgatccccactcgccagctgcatgcgatttgcacctggtgtatccgcaatcaataccgcagcggtaatgggtgcgactatgccggcacccggtattttgacaggaacaatcagccagttgatgacccgtcgcaggatgtctgcaacggaacgctaacggcctgcaaattacgtcatggtgagaatagcgaactgccgtttggcgggttccccggcacttcattaatcaggagctga

SEQ ID NO: 106630 - DNA, 711 bp, Enterobacter aerogenes
atgcgtcagaaaacgattaaggccatccaggaacatgcggccgcagaatatccgcgcgaggcctgcggcctcgtcgcccagaggggccgagcggagcgttatttcccctgccggaacctggccacagagtcgaaagataattttgtgctggcgccggaggattatgcggaggttgaagaatggggaacgatcaccggtattgttcacagtcatcctgatgccaccacccagccgagcgaactggataaagcgcaatgcgacgcgacccttctcccctggcatattatcagctggccagaaggcgatctccgtaccatccacccgcgtggtgagttgccgctcctcgagcgaccattcgtgctgggccactacgattgctggggcctggtgatgagctattttcggcaaacccacggcatcgagctgcacgattaccgcgtcgattatccgtggtgggaaaaggagtatccggacaatttttatcaggactgctggtatgaatgcgggttccgtgagtttgatggtccaccgcaaccgggtgacatggtaatcatgcaggtgcaggcggataagtggaaccacgccgggattctgctggaagggaacctgctgctgcatcacctgtatggccatctcagcaagcgcgtgccgtatggtgggtactggatggaaaggacaatgaaaatcgttcgatatcattctctatgttaa

SEQ ID NO: 106631 - DNA, 594 bp, Enterobacter aerogenes
atgaaagaaacaatgaccaaaataatactttctggagtattaggtaaaacttttgggaaaattcactatcgtttaattagcactgttcatgaagcagggcaggcattatcggcaacgataccaggcttcgaaaaattcatgattaccagcaaagagcgtggactaacctatgcggtatttaagggtgaaaaaaatattgggaaggatgatttaggatttcctgttggtggtgaagtcatccgaattgttcctgttttaattggtagtaaaaaggcgggactgcttcaaacaattcttggagcagttattattgttgcctctgctgtcggctcttactttgttcctggcaacccagtgtcagcatttggttataaaatgggggctgcgatgatgctcggcggcgtcgttcaaatgctttctccacagccagctggcctggcacgaaaagaatccgctgacaataaagcgtcctacgcctttgggggcgtgacgaacactgcctctcagggatacccggtccctttgctttatggcaaacgccgaattggcggcgccattatatctgccggtatttacgtagaagaccagcaataa

SEQ ID NO: 106632 - DNA, 12708 bp, Enterobacter aerogenes
atggcaaataacataattaaagggcgcaagggtggcggctcaaagcagcgtacaccgacggaacagccggatgatttacagtctgttgcgaaagccaaaattctgctcgcattaggtgagggtgaatttgcaggtggtttaaccgggaaagatatttatcttgatggcaccccgcttgaaaatgctgatggttcgcaaaacttcagtggcgtgtcctgggaatttcgacccggcacgcaggctcagacttatattcagggtattcccggcactgaaaatgaaatcagtgtgggaacggaagtttccagcaagacagcctggacccatacctttactaatacccagctttctgccgttcgtgtccgcctgaaatggccgtccctgatgaaacaggaagatgacggcgacgtggtgggcaataccgtcaagtatgcgattgacctgcagaccgacggtggcgcctggcagacggtgctggaaaccgctgtcacgggtaaaaccacctccggttatgagcggagccatcgtattgatctgccccatgccggcagtacctggacgctacgcctgcgtaaaatttctccggatgcaaacagtgtcaaagttggcgacgtgatgacgctgcagagctataccgaagtgattgacgcgaagctgcgttatcccaacaccgcgctgctttatatcgagttcgactccagccagtttaatggctccattccgcaaatttcctgtgagccgcgtgggcgcgtgattcgtgtgccggataactacaatccggaaacccgcgaatataccggcgtctggaccggcgggtttaaatgggcctggacggataacccggcctggatctattacgacattgttacagctgaccgttttggtctcggtaatcgtctgagcagcgccaatatttcgaaatggacgctgtaccagattgcacagtactgcgatcagctggttcctgacgggcacggtggtgacggcatggagccgcgctatacctgtaacgtctacgtccaggaacgcaacgatgcttacaccgtgctgcgagactttgccgccattttccggggcatgacttgctggaacggtgagcagattgttgtgcaggctgatatgccgcgtgatgtcgattttacctatacgcgcgccaatattgtcggcaaaccccgttattcgagcagcagcagccaggttcggtacaccaacgccctggtttcctggtctgatccggataatgcttatgctgatgcaatggaaccggcgtttatcccggaactggtttcccgctacagttttaaccagctcgaaatgaccgcgattggctgtacgcgccagagcgaagcccaccgtaaggggctgtggggcatactgaccaacaacaaagaccgggtcgttgagtttgatgtggggctggacggtcgcattcctcaacccggttatatcattgccctggcggatgagttgctggccggacgggtcaacggcgggcggatcagcgcggtgaatggccgggtgattacgctggatcgtgatgtggatgccaaacctggcgaccgcctccagctaaacctgccatccgggatctcacagagccggaccatccaggccgttaacggacgccggcagattacggtcacaacggcgtacagtgagacgccagaacgggaatgcgtctgggccgtagaatctaatgacctctttctgcagcagtaccgggtcacaggggtaaaagagaacggcgatgccaccctcacgatcaccggcgtgtcacatgacccggataaattcgcccgcatcgataccggcgcgattatcgatcagcgcccggttagcgtattgccggcgggcaaccagtcacctcctgacgatattgtcatcacatcccgctcggtcgtgaatcaggggatcagcgtcgaaacgatgcaggttaactggtcagcggtcagcggcgctattgcctacgaggcgcagtggcgccgtaacgacgggaactggattaatgtgccgcgcagctcgaccacctcgtttgaggtcagcggcatttatgccggtcgttacctggttcgcgtccgtgcgatcaatgcggcggagatctcgagcggctgggcgtattccgaagagaaaaccctgaccggcaaggtcggcgagccgctggcaccgctggcgctggcaacccgttcgctggttcatggggtccaggttagctgggagttcccgaccggctccggggatacgctgcgcacggaactgcagtacagcaaaaaccaggacggcagtgcgccaatgccgttatcagacgtggcctatccggggaaaagctatcagcagatgggcctcagtatgggcgccgaattctggtaccgggcgcgccttgtggatcgtcttggcaatgaaagcccgtggaccggctgggtccaggggatggccagcgataactttgatgactactacgaaaacctgaccgacgcgatcaaggatacggctgcctgggaggaaacgcagcgcaccattagcgaaacgcaggaaggtatccgcaatacgcagcaggaactggagcagaccgctgaagctttgcgtaaggaagccgaagaccaggcgaagcaggtcagccaggatattgaagcatcggcgaaaagcatcactgctgatgttgacgggaagatctccgccgtgaataaaaccatcacggatgagataacctcggtcaatgaggctctcgattctggtctggctcaggcaaacaaaggcgttcaggaggcaaaatccgccgtcgcagatgcgaacaagcagatcgcaactgtgaacaagtcgctgaccgacagcatcacccaggtaagacagtcagtcaccgatacggctgcggaaatcaacgccaccatcgacctggagattgccagggtcagcaaaacgctggccgacggcgatgccgcattgaatgcgcagataaagactgccgaaaatggcctgaagcaatcgctgtctcaggtcaacaccacgctgaccaatgcggtgaagcaggagaccgcggatcgtatcgccgatgttaacgcgaaggcgtcacaggccgctgatgaactgctggcggcaacgcaggggattgaggcgagtatcgagagcctgactcaggtgatgaagaccgccgatgaaaatctggcgcgggaaatgtccagcctcgcagccggcgctaatatccagttcgattcgcaggttatctggcatttcaacaatcagacgaccgagggctggaccggcagcgccggcgtaccgggtgtgtcacaggatggctggttacgcccggcggacagcgccaccgatccgtacattacctctcctggcgggctggctgtcgatggtgcggcgtaccgtttcatcatgctgcgctttcgtaaaaccggcaaaccagtttgggcgggtgagatccgctgggtgtctgtcggcgaaaacttcaataacacgaagcgatacattgttgctgagccggagtatgccgatggggtggcaaccctgacggtgcgtgatattccgtggacagggaacattgatcgtattcgcctggacctgacgaaccagcaggatgccagcaactttatcgaattcgactggatcgccgttggccggccagcacccggcgccagtacggcggctttgcaggatgtgcgcagtacgctgagtaacgcgctgaccgccgaagcgcaggcacgcagcacgctggcggcgcagatgcgtggctcctatgatgggagcgatctggagaaagtcacttccgggctgctgtaccaggaaaaaaccgcgcgcgttaccgcaatctcggcggaagttaaggccagagagtccctgcagacgcagtttaacgacaacaaagctgctgtttctggtgaactgagttctctgacgacagagcagagcgcgcaggcgagccgtatcggtggcctggaaaccagcctcgggaaaaaagccgatgcggccgcgctgacgtccctgacgcagaaagtggagcaacagggcgccacgctgacatcgcagggcgccgcgttaacatcgctcactaaccgggttggccagacggaaacgggcctggctggtacgaatgaggcgctgagcgggctgcagtctgttgttacccagcagggtgacaggataaccagccagggtcagtccatcacgaaactgacgagcgatttgggcacgacaaatgccgcgctggcgaagaaagccgaagcggctgcggtcactgccttaacgcagcaggtagagcaaaacgggcaggatattcgcagcaatactgacagcatcaccagcctgtcaaatcaactggttaatggccagccgaatcgctggtcccgtcgactctatcctgtgcagctggataacgccgggacagtcccgtcattcagcgatattcgcgccgtggcgccaacggtcgtggatgaggtggccgacgcggccaaactggactttacgtccgccggcagctatctgatcgcgcagtattcctgccaggtgaaagtggccgcagataccaccatcacactggcgcccggcgccagggtttttgatgataccggcgccatatttgtgaatggggttcaggtcgcctggggaaacgccagctggaataccgtcagttttgaactgaaaaccggctggaacaccgttgattttctggtgaatcagtggaccggtcaggcgtatatcaacctgggcctgaaggtgtcagacaaggttgctgagatgtactccggtctcggggtttccgcgctggcaaacgcagccggcgtgctcagctcgaatgtcagccagattggcaacgatgtggtcagcaattcgcagagtatcacccagctccggaatgcgctgacgcagacagacgcgaacgtagccagcaaagcggatcagacggcgatgaactcgctaaccggacgagtggagaagacggaatccgggctgacggctgctaacgccaacattacctcgctgaaatccgctgtacgggccggaaacgcatcaggcggggatttaattcccaacccgacgtttgacccggcgtatgaccagatggggttcagcgtggtagccacgacggctgaggaggtcccgccgggctgcccgtatggttatgcggcccgaattgccagccgggatcaccatcctaactttgccgcgttcccggccacgcttaacgatgtgattgagatcagcgcactggttgcctgcggcgccggcacggcgaattttaatctgtatgttggcaccgccgttcggccagatacgagtaccggtgcgccactcatggcggggggcggaaaatccccctccgcgacctggcagagaaccacctggcgcttcaaggtcacgcaggcgatggtagacaggggttatatccgcccgttcctgcagatctcgcagaacagcccgtatggcaccgtatggttcgttacggactggcatatgcgaaatgtgacagcggcgcaaaaggttcaggatactgcggatgccacggcggcggcggttgactccctgaccaccaccgtgacgcaacagggtaatctgctgacctcgaccggcaaccggacaacccagctggaaaacgggctggcaaccaccaatgccgccgtggccaaaaaggctgatgcgacagcggtgcaggatttgaccaataccgtcacacagctgggcaacgacctgacggctgcgaacagcgccatcacgaaactgaccggaaatctggcgaataccgataaagcgctggcgcagaaagccgatgcgactgcgctggccacgctcgacacgaaagtgacgcagcagggtaaaacgctggagagccagagcaattcgctgacgaatctgtcgaacagtctctcgcaggttgcggcagatatcgatgccagcggtcagataccgggtaacctggtcgtgaatccctcatttgaacgcgggctggatggttataccgggcggtcaaccgcgaccagtgtggtggaggtttccgctcctcacagcgggacgcgggcgctgaaggttgatccggggagcgtgtctccggggcaatacatcccgtttgttcaggggcgaacctatgaaatcggggtgtgggtcaaggaaccgggagcgacgacggataatggcgcggggaacaacaagctgcggatcggtaactctgccggccagccggtttttgagcgtccgtacaacagcggcacggtggggactaactggaccctgatttccggtcgctggaaagcgacggagacagccagcctgccggtgacgctgagtaactatctgattagcggcagccgctacttcgatgatttttacgtcactgacgttaccgaccgggtggacatcgatgccaccgccggcgccgttaccggactgacgagccgggtcagcacagcggaaggggccatcacctcacaaagccagcagctgacgaacctgcagaacagcctgaacacgaccaacagcaatgtgtcgaagaaggccgatgcaacggcactgacttcggtcgataaccgggtgacagaggcggaagggaaactgaccacacagagccagcaactgacaaatctggcgaatgtgctgacggccacccgcaacgccggcgacaacctgatcccgaactttgattttctgcagggcagcactgcctgggatattcagtatccagccggtgtgacctttggcgatttcggggacgggaaagcgggggtccggctgaaccggacgactaacaccagtccggggatcttctccaacaacaacaagccggtgccgctgaatggccagcgcaagtaccgggtggtggtgaaggccaaaggtgtttccggcgcgatgagtctgctgatccgtcgccagaacaaaatcggccagacggacagtacgtatgaggataaaacggtcacgctgaccactgactggcaaaccatcacctgggaaaccggattgacggctgccggcgcggacgggcagaacttcaaactttattctcatccgacaaacggtgaaatctggctcgattccgtccgcgtgtttgatatcaccgatgaaaccaacatcaaggcgaccagcgatgctgtttcgtctctgaccgggacggtgacgaaccaggggaacaccctgacatcacaggggcaatccatcacggcgctgaataacgcgctggaaggggtcaaaggcgatgtggcgaagaaggctgatgcgtcggcggtcagttcactgaccaaccgggttacccagactgaaaaggatatccgtagccaggctgacagcctgaccagcctgaatacatcgctgaagcagcaggcgacacggggagccaacgtactgccggacggcagttttgaatcctatgccgtcggcgatgttctcagtaatgcccgcgccgttatcaccagtgaagctgcgcacagcgggaccaaaagcctgcgtgtgacgcgcagtacggagtacaacccgaacgcgacggataataacgatacccatatcttttcaggcatgcaggttcgcgataacgcggtctattacgtggaggcgtgggttaagttgccggctggctcgaccgccgatccgaccgtttatatggtgctcggattttccttccaggattctgccaatggctggtcgtggcctggcctgaacgtaaaagtctccgagttgtcggtggacaactggacaaaagtcagtggctatctgaccaacaaccgaaccgcgctgaaacaggcaatggtgaggatctccatcccgaacacaccaaaagttcgcctgggtgacgccttcctgattgatgatctgatcatcactgacgtgaccgatgcgaaagcggcgctcgatgccgccgatgcgaatgcgcaggcgctttccagtctatccgcgtcagtcacgcagaacgggaggaatattacgtctcagggcagcgcgatcacgaaactgcagtcagatgtgacgcaactaggaaaggatatcagcggcaaggccgatgccagcgcgctgacgaatctgacgacccgcgtgacggctaccgaaggcagcctgaaatcgcagggagacagcctgaccagcctgcagaacagcctgaacacgaccaacagcaatgtggcgaagaaggctgatgcaagggcgctgcagagcctgcagaataccgttgaacagcatggcagggatctgaccacgcaaagcagcgcgctgacgaacctggaaaacaacttttcctccctggccgtgggcgggaccaaccttatccgcaatgcggacacactggagggatggagcagccgcctcgccacagaaacctatctgggcgaccgcgtggcctacacccggctggcgaaaggtgcatccggttatacccagctggatgaacagacgctggacgttaccgggcgtacggaatttgtattcagcttctatgcgaaaggggcttatgacgggcaggagatggcgagttatttctataacccatcgaacaccaccaccacggaaaccagccagggcgttaaaggtggggccggtgacggcaaggcggtcacgaaactgaccaccgcatgggcgcgttactgggtgaaatgggttattcctgccaccagtggcaccaaacggctgattgccgcgcgtctggaaagcgcgacgtctgccgacaaagaagtctggctctgccgccctcagctggaaaccgggaccgtgatgaccgactggtcaccgagtccggatgatgcggccagcggtattaccgcgaacacatcggccattaatagcctcaccagtcgggtgacgaacgccgaggggcaactgaccgcgcagtctcagagcatcacgaatctgcagaacagcctgaacaccaccaacaacaacgtggcacaaaaggccagcgcgcagtcggtgagtgatctcaccagccgggtcaccagtgcggaaggcaaaatcacctcccaggggcaggctatcacgaagctgcagggcgatttgagcagcaccaccgataaggtcaacaccaaagcggatcagacggcgcttaacgcgctgactggccgggtggagaaaaccgaggcaggcctcacggcagccaacagcaacattgtcagcctgacggcagcggtgaacgccgggaatgctgccggggatgattacattccaaacccgtcatttgatccggcgtatgaccgcatgggttatgacgtggtggagaccaccgccgatggtgtgccggctgactgcccgttcaggtatgccgtccggctggccgggcgagaccatgtgccaaaaatcaacaatatcgccgtgacgccgggcgacgttttcgaaatgtctgctctggtagcgtgtggtaccggcagcgctgactttaacttctatatcggtcgggccaccaccgccaccggtggtatcggagcgaaagcgtccgggggcaacaccaggaccaccaccgcgtggaaacgcgccacctggcgctttacggtgccatccgataccagcttgctgcggccgttcctgcaggttaatcagagcagcccgttcggcaccgtctggtacgctgccgactggcatatgcgtaacgtgacggcagcgaacagtgcgcagaaaaccgcagatgcgaccgcaaaagcggtggattcactgaccaccacggttagccagcagggcgctacgctcagcagcatcggcacgcggaccacctcgctggagaacagcctccggtcgacaaacgatacggtgagtaaaaaggctgacacgacagcggtgacgcagctgcagggctcggtgacgcagcagggaaatgacatcgcggcggccaacagcgcgctgactaaactcagcagcgatctggctacgacgaatgcgaacgtgaataaaaaagcggacgcaagcgcgatgaacaccctgcagaaccaggtcacggagcagggcaaaacactcagtgcgcagggggattctctgacgcaactgagtaacagcctgagccagacggcagcggatattgacgccagcgggaaaatgccgggcaacctcattgtcaatggcagttttgagcgcggcgcggcgggctttaccggctggagcagtaccgcgacggtggccgatttacaggttccgcactcgggtaacaaggcgctgaaaatgtccgccggccagtcgaacctggtcggacaggaaatcagtatcacccagggtcgcacctaccgcatgggggtatgggcgaagcaggacccggagaccacgattaaagatgcgggtaacacgaagtttcgtgtggctgacagcactggcctgctggttggctcaaactacggaccgtttagttctggctggcaactggtaacgtttgactggaaagccacgaagaccacgacggccagtttccaactgacgaccttcctcagcgcgggggccatgtatttcgatgatttccatgttctcgatgttacggatgaaaaggatatcgcggctaatgccggggccatctcacagatgaatacccgcgtcaccgctgcggaaggggctatcaccacccaggcgcagcagctgacgaaactcagcggcgatctggccgtcacgaatgcggcggtcagtcagaaagctgagcaaagcgctgtcaccgggttgaccacccggatgacgtctgccgagggtaaactggattcgcagtcgcagcagctcaccagtctgcagaacagcctgaccacgatgaatactgagctgggtaaaaaggctgacacgtccgcggtgagttcactgaccggtcgcgtaagccaggtggaaaacaccatcaccagccagtcgcagagcatcacgtcgatgaccagcaccatcaataccatccgcactcagggagctaatccgtgggttgacggtacgtttgaaagctacagcgatggccaggtgctgggcgggaacggcaccgccgttgtggtggtgtctcagaaattcaccggcgataagagcctgaagttgagacgggatgagaacaacggcggcaacagcgataaacagcttggcacctggcagtcagtccgtgaggatgcgaagttccggtttgagttctgggccatgatgccggcggatcaggcgccctcctccgggtggacaacgctggtcggtatccagtcacagaatgctgccgggcaaaatgcctggcaggcggcggtcactgtcagcgaagcctctctgggcgcgcgcgataagtgggtgaaattcacggggatcgccagtaacaacggggcaggcagaacacgcgcggtggtctggatctccacccgtggcgccaccggcaacggtacccctggctattcactgtatatcgacgatctggtcatcacggatgtcaccgatgcgaaagcggcacaggatgcctctgacgcgacggcgagcgccgtgagcggcctgacggcgcgcgtaacggatgccgaagggaaaatcactgcccaggcgcagcagcagacggcactggccacgaaagtggataacgccaactcccgcgtcgataacatggcgaagacgctgagcgacaaccagagcacacaggccagcctgaatacctcgcttcagtcgcagattgacgcccaggcggccgccaacatcaaaaaccagacgacgctggacaacacgattaaatcggtggccagtatcaccagtacccagcagacgcatgcaacggcactggaggcgctggcaacgcagcagacgaccctgacatccagtgtcggggatctcagcgcttccgttcagaacaccgctaaaaccgtggcggatgtgaatggtacggtgagttcgctgtggtcgatgaaggttgagacggttaacgggaagaatgttggcgcggggattacgctgggcagcaatggtgaaacgagcgacatgatcctctacgccgaccggttctcactgtttaaccgtaacaatgcgacggcagttccggtgatgattgccgaaggcaatgagctgtatatcgatacggcacgtatcaaaaacagttccctgacctcaaccaaaatcgcggacggttccatcacgaatgcgaagatcggcaacgagatccgctcgaatgactttgttgacgggtcacgcggctggcgtatcgctaaggatggctcttcgcagttcaacaacgtgatcgttcgcggtgcggtttatgcgactgacggctggttccagggtacggtatatgcgaaccgcatcgagggcgacatcgggtcatttgcgatcaacatcgctcagcaccgcacgcgcaaggtgccgaaggctacatggcagtggtttgagctggcccggttccggcggcagaatttcgaccaggtgatcaatattcgcggtggactcctccagacggatagcatcactatcgacggcggcgcgaaactcagagcggggatgtcctacgcgccagggtctgacggtggactggatcctggctatctgtcgtatgcaatgcttcttcgtggcacaggcgctacgtctggtggcggcagtatggagctaggcattgagcttatgtatgaaacaggtggagcaacacgcctgttaaccgcgcaagagtcaatgaacgtagacaacatgtcatttgtcgtccctgccggtactggcgacgctgttctgcgatatggctgttacctggaccgtaacggacagatggtattaaccatcctctcgagattcgacgccttcgccgcgcgcaataacaacgtaattagagctgcatcatctgcttaa

SEQ ID NO: 106633 - DNA, 1425 bp, Enterobacter aerogenes
atggcgatgtatgaagtcggcaccgtcacgggcgcagcatctcaggcgcgggtgacaggagcgacaacaaagtgggcacaggtggcgctggggatacagccggggtcgattctggtggtctaccgcagcggtagtgctgacctgtatgcgatcaaatccgtggacagtgacacgcagctgacgctgacccggaatatcaccaccgcattttccggcgccagttacggcattattaccgctgaaaccgccagtacctcgtcgtttgctaaccagctggccagcgcatttgcattctggcgtagtgtggtggagggctggtcgatggccctgaccggcagcgccaatatcaccctgactgacccgatcacaggaaagcaggtaaccgtgccggctgtaggcgggatggcgaaggcatcggatcttaacgcgctggcaaaactcaccggaggaaacaaactcgacggctcgcaggttataaccagcgataatgccggttttattctcggtaagaactcagatctggctctgctcaaaaaacaggggcaaggcgggacaattgccgttggctcgggaacaccgttcagagttcagcgttcaagagcgaccactgtgtcaccgtcagatacctttgatgacatcctcgttattgggaccgataaccagacgactttgcccggtgggttatcagctggcggcaacatcgataacacgtcaaaggggaaggttctgacgcaggcgatcgagctgtcaatgagcacgccttacattgacttccactacaacggcagcagtgcggattataccgctcgccttatccacgacaggcagaaccgcctgaacgcgcaggtacaaagtttttgggtaacggacgggaggatcacagcatcatcgaccatgccagccaacccagccatcggaacgcaactgacctccaatccggtacgctcattgatggcagggcgaggagcgtatggtgacgtggatggcgcttacgtccaaatgtacatggaggagcaggtaggcaccgaacaccgacttgttctgtacgctgacggattcgggcgaaccgatgcatggattttccgggctggcggcacgatctccaccggtaagggtgacgtcctgaccaccggctcagatgtccggctgaaagatgcgttcatggagcctcaagaaggggcctccaggcgcattaactcgctgggagtatgcgagttcaatatgaaaggcgaaacgcgccggaggcgtggctttatcgcccagcaggctgaaaaagttgacgacttgtataccttcctcggcatcgagcaggagatcgatggtgaaaaattcagggtgatgaatgtggattacacggcaatcattgccgatttggtgaccgtggtacaggatttgattaggcgagttgacgcactagaaagttga

SEQ ID NO: 106634 - DNA, 1059 bp, Enterobacter aerogenes
atgttaacaaatttcccggatgaaaaatacatatctgatagaaattcatcgttcattaagcgagtatattttttacgtcagattggtgtcgttctttgctttcttcctatatattcagtcctccaggaacagtcacatcaaaaaataacaacagccttgttaattctgaatgcactcatctggccatcggttgcttatcttgcaagcatgatgtcgaaggatatgctgagtactgaaaagaagaatatgatacttgattcattctgggctggaatctggatagccgtaatgcaagttagtccaattccatcattattcataatctcagttcaaatagctgatcgctatgctgctggtggatggaaaattttaaaaccagcattaatgtggatgatgattagtttcctgacagtttggttagtaaatgatttcagatatacgatagaattcagtacccgaacggtattgctttctttacccttggcgacctgttatcccatagtactgagtattgtttcaaggcacttatctataaagttgaggaaaagaagggagttactggaaaaacaggctctgatggatcctggcttagatctaccaaatcgccgtttttttgagcaaaaaatggaaagtgcttttcgtgcaacgcgtaaaaagagaattcattcttatcttatgctcattgatgttgataattttaaaaaaattaatgatacctatggccatgaagtaggtgatgcggtgttatctcgtatatcaacaatattacgagagtgtgctggcgagaaggacgtaccagcaagatttggtggcgatgagttggctattattgttaataatagtaatagcaagcttgttatagctatggttcatataattcagaaaaaaattaaagatctttcattaccttctcacaacgatatttactgtactgtcagtatcggtatttcttgtgcagaaaataaagaatcaatcatcgagtggatcaaagaggctgatgaaatgctatatgaagttaaacgtaacgggaagaatgggtattgcatgccgaataattga

SEQ ID NO: 106635 - DNA, 678 bp, Enterobacter aerogenes
atggaaatagattcctgtagatttgttttagaaccatcttttaaaaaagatggttctattcattcttgggaaattctcacgaaaaatgttaaaaaaaaggactgcaatgattatcttgctaatgaaagtggtttttgtttcacttcattaagcgataaagaaaaaatcgatgtgtttaagaaacagatattgacaattgaaaagcttgatgcatcagaattgaagttcaagccagtttcgttgaatgttgacagtcttattagcgattgtattttgaacgataaatatattggtgattacttaaaaaaccaaaaaaacattgcttttgagattaacgagcattttcatgaattcaatactaaatgctgtatggttgacttaaagtgtctttcaaaattgtgtccagtatggctggatgattttgggagtggcttaacaagcttaacacttatagatatgtttaattttgaatgtataaaaattgataaagattacttctggggaatacagagtgagagcgaattctttaaaataataaataaaataaaatcatactgcaatttcgtgattgttgagggagttgagacaatagaacaaaaaaataaagtacattctgttgttgattgcgcttgccagggaaggttgtggatgagtgattactattatgttgagatttaa

SEQ ID NO: 106636 - DNA, 129 bp, Enterobacter aerogenes
atgatagcaatatatgtcccgatgccgaaagacaccagaaacacaaccaagatcccaaagagcgctaccagtaaagatgtgcagatagatatcaaattaattgtcttgcgtgcatctcttgatacataa

SEQ ID NO: 106637 - DNA, 468 bp, Enterobacter aerogenes
atggcatacccaacgttagctgtagctaatgccttcatagaaaaagcattagcacatgaactatccgatttgacgccaatgaagcttcaaaaactgatgttctatgcacaatcttggcacctcaagatttacaatgaaccattgattgatgactttttctctaaatggcagtatgggccagttatcccatcgctttaccatgaagtcaaaagctacggttcatctcaaattaatagtctgataagtaatctgatgcataccccgcaaggtgtgatgattgctacgccaagcgttccaaagcaagattttaaaaccagacagttgatagacagaattgtaagcgtttacggtccattgcgtggaactcagctttcctacctgacacatcagccagggacagcatggtcaagaactaaggactatagctcagtcatcgacaatgaccttctcaaagaatgcattgagtaa

SEQ ID NO: 106638 - DNA, 282 bp, Enterobacter aerogenes
atggtaacaagtgatccgagcgcaatcattaatgcggtgatatgcgctgtaattgttgttgtgcttatgttctaccggcgtgatgggtcaagacaccgccccatgatttcgctgatggcttacttcactgtgctggtttacgccagcatccctttccgtttcctgtttggactgtacgagtcatcccactggctggtggtgctggcgaacattcttatctgcggcgcggttctctggttcagggggaatatagcgcgtctggttgatgtactgaggcactaa

SEQ ID NO: 106639 - DNA, 501 bp, Enterobacter aerogenes
atgtatctgatagatgccaacgtcttcattgaagcgaaaaataaatactacaatatgtctttctgtcctgcattttgggactggctcctacgcgaatgtgcggggcaacatattttcagtattcaaggcatttatgacgaacttgttaccgggaacgatgagttacgtacttgggcaatgaataaccggcattttttcttgcctgtgagtgatgaggatacccaacgtaatctggctacggttgcagctcatgtagcggagagacaacagaatgttccaatggctgcaattgctatggcagagtttttgaggggagcagacacttggcttatagcaaaagcgataaccacgggcgctacaatagttacgcatgagagacttgatttacaatgtaaacgtaagtttctgattcctaacgtttgtaatcattttggtgtgcggtatgttgacaccttcgcattgttacagcaattaaatgcatcatttattctcgctgcttag

SEQ ID NO: 106640 - DNA, 1140 bp, Enterobacter aerogenes
atggctgatttagcttacattaatccgcagatttttaattgggcacttgcaagagcgcaagtgtctgaggaagatctgtccctcagtttgggggtgaagctagaaaaagtggttgattggtctagaggcacccaaaagccaactttcgggcaggctcaaagattggctaacaagttacatataccgtttgcgttcttctttctccccgcacctcctaaagatgagttgcaaataccggatttaagaacgcaaggtaatcacagattagccactatcagtgtagatcttaaagacaccatagcctctgttgttagacggcaagaatggtataaagaatatttaaaagatcagggggcagaagccctgagttttatagggtcttatactgtcaatagtcagccaactgaggttgctgaaaatattcggcaaactcttgggcttcaaggcttagatcctagaggcttgggttgggaagagtatcaaaggaagatagttgaagcggccgaagcggctggagtgctggtaatgcgaagtggtattgttgaaaacaatactcatcgtccattaagcgtctctgaatttcgtggttttgctataagtgatagatacgcaccagtggtatttgtgaatctgagagatgctccatctgcaaggctattcaccttactgcatgagttagcgcatttatggttagggcaaagtggtgtatccagtgggagagctatcgaagagcgtagagaagaacagttttgtaatgcagtagcaggtgaatttttagctccagccaaggatgttaaggtctactggagtgataaaaaggatttggatgataacgtgggtgatcttgcaagaatcttccatgtgagtcgttacgttattatcaggagagcatttgatctcggtttggtgtcttacgatacctatcaagattactacggagatttaatgcaacaattcactaatgctgaagggggaggtggtaacttctatgctagtgctaagagtaaaaatagcgcccttttcagtaaagttcttctaaatgagactctcagtgggagagttcttttgagggatgcagggaaattgcttggtatatctcctgcaaagttgacacattatgcaacggaaattggtgcctga

SEQ ID NO: 106641 - DNA, 579 bp, Enterobacter aerogenes
atgattaatccttctgaagttggcaaatccggcgaaatggttcgcctccgcacactggaaagcatctggatacagggaaagctgcgtatgtggggccgctggtcgtatatcggcggtggtagcggcggaaatatgtttaatcagttactggcatccggaaagattacgaaaacggctatcaatgaggcactacgccggatgaagaagtcaggcttaaccagaccagagcttgaggcattctttaaagagattctcagcagtaaaaacaaaagcggccttgcgttctgctctgacgaagagggattaaaaattgatggtgttattgccggggtcctcatgaatgaggactaccggtcactctatggtgtgattgttgatcgccatcgcttacgcaaaagtaaacttcagatggctaacgagcttctggaaaaacatcctgaatggacactgattacttgccgcagaagaattgatacatggataagtttggcagaatcgatactttacgcaccattatgtgatgcgttcggtacaaatggcgacagattttacttgcaaagtgagcaagaaagtgcttga

SEQ ID NO: 106642 - DNA, 981 bp, Enterobacter aerogenes
atgagagcactactaactcctgagattgccccacgcatgggcgttgttcttcttcgccctggtgctgagcttatgccattgttcaggcgaggacgtgtactgattgagcctgagccagagcgttacgctgaatatcagactggcgctatccctccagcaacacagccgctggaaggtgacccaacggtattacctatctttgaaaatatggatgtgctgatccgtgctggcggtttagttggccttgagaccgagctggagcgtactttcgaatgtcaatatccgcatgcaacctggcatagtgagaatttcacactcttccgccatgaacctggaagcattcgcctttgctggggttgtgacaatttagtcagggaccaattcacacaggaactggcaggcattgcgcgtaaaaacctggtatcctggctgatatcagttatacgctccagactgggatttaatgaggaccatgtactaacaattccggagttgtgctggtggctggtaattaacgatctgtcgcacgtcataccggaaacgctcgcaagaaaagcgatgcgattgcctgaagtcaggcaccagtcagtgatgaaagaaagtgatttacagccagagtttgcggcaaccgaattagtccaaaaaaagatactggcgctgaaagtggatactgaaacgccggaatcattcatgcttcggccaaagcgccgacgctggataaacgagaattacaccagttgggctaaaacccagcagtgtgcctgctgtaataaaccagcagatgatccccatcacctgataggccacggacaaggtggaatgggaacgaaagcgcacgacctgtttgtgttaccgctttgcagagcgcaccacgacgagttgcacgctgacaccgtggcatttgaacagaaatatggctcacagttggagctgatatttcgattcttagatcgttcgctggcaatcggcgtactggcgtaa

SEQ ID NO: 106643 - DNA, 378 bp, Enterobacter aerogenes
atgaaactgactttaccatttccaccaagcgtaaacagttactggcgcgccccaagcaaagggccgctgaagggacggcatatgattagcgagactggtcgcaagttccagcaggcagcgagagcggcgattattgagcaactgcgagccgttccccggccatcctctgatctggctgaggttcacattgtgttgtatccgccggatcagcgccgtcgggatatcgataactacaacaaagcgctgttcgatgccctgacactaacaggtgtctgggaagacgacagtcaggttaagcgcatgctggtggagtgggggaacatcgtgaagaaagggaaagtagaaatcaccatcagacgttttcatgtagttgcctga

SEQ ID NO: 106644 - DNA, 810 bp, Enterobacter aerogenes
atgagcaagccatttcttaaatgggctggtggaaagtatacccagttggctgacctgttcgtgcatatcccggcagggaaacgcctgatagagccatttgttggtggtgggtcggtattcctgaacagcgaaaagcactcagattacctgctggcggacgttaacccggacctgatcaatctgtatcagatgttagcggttgtgccggatgaagtggaattaaaggcccgctggatgtttgagcacatgcggtcaccagatggctatgagatgatccgttccgagttcaacgctcagacgctggatgctactgaacgcgctgctgcattcctgtatctcaaccggcattgcttcaatggcctgatgcgttacaaccaggcgaacaagttcaatgtgggctggggaggctacaaggccccgtattacccgctggatgagatgaaaaccttcgcagctatggcgcataactgcgtattcatgactgctgactaccgccgaactatcagcctggccgggaaaggggatgtggtttactgcgatccaccttacgaaccgatgccgggaacaaccggattcaccgcctacgctgctggtggttttagatgggagaaccaggtggacctggcgaagcaatgcgtatctgcctttcaccgcggtgctcgggtggtaatttcaaactcatctgcaccgaaggttctcgacctgtatcgggagcatggttttaacttgcaattcgtcaatgcgcgccgttcgatctcctgcaaaagcagtgcgcgggaagtcgcaaaagacgttgtagcgatcctttaa

SEQ ID NO: 106645 - DNA, 915 bp, Enterobacter aerogenes
atgagcctgttaatgccatcaaggccgatagtcatcaatcctgaccttgcgtatagcatcggcctgaatgaagccattgcgctgcagcagcttaactactggctgcaggagactaactcagggctggagcgtggcggcgtacgctggatctacaacacaacagagcaatggctggagcaattcccgttctggtctgaatccactctgaagcgcaccttcacccggctgaagagcctgggcgtgcttaaagttgagcaactgaacaagtcccagcgcgacatgacgaactactacacgatcaactacgagagcgagcttttagatgaggtcaaagtgaccaaatcgaagaagtcaaaatgcgccgttccatcaggtcaaaatgacacgatggaagaggtcaatgtgaaacgatccaccgggtcaaaacgaaccgctgtcatcaggtcaaattggcacgatgatcttacagagaatacaacagagagtactacagagattacaggtaaagactcttgtccggttgcgctgcaaccagaccagaccgatccggcagatctcgttctggatcatttcaatcgggtaacaaactcgacctatggaaaggggggacgaaccaaaacgacgctgggttatatccggggacgcctggccgaagattacagccctgaagacctgatgctggtggttgactacctgaacgcgaaatgggctcaggatccgaagatgagcgactacctgcggcccaaaacgctgtttgctcccgaaaactgcgtcgagtatttcgacaaggccaaaaaatgggaagcagccggacgcccagcctggactggcggaaagtgggtgaaacaagacacggcgtttaagtccagttactccgacgtggattattcagtaccagcggggttccgttcatga

SEQ ID NO: 106646 - DNA, 468 bp, Enterobacter aerogenes
atggtagaacaaaagcaaagtttgaaagatgtagtcaaggctatgtgtaagtccatacatggtgggcgtgaggctatggctggcgcgctaggcatgaccttaacgcagttcaataacaacctttatgagaaaaatggttgtcgtttcttcgaagtcagcgaactggaagcgatggaggacatttccaacacgtcattactggctgactacttcgctcgccgtcgtggtgctctgctggtggatgttccgcacctggaagaactggaccgcgtggacttgtttagccgggcaatgcgtacctctgccgccagggggcaggttgatcagattatcgaacaggcgcttgaagatggcgttattgaaaggcacgaggccgaagaaatcatggtgcatcaccgccgtcacctggcagctcgtgaagaagagattgccgcaatcatcacgcttttttcacgcaaaaagaagtga

SEQ ID NO: 106647 - DNA, 471 bp, Enterobacter aerogenes
gtgacaaaaaaaattgaatcagaggtgataaagcggttgcaagcgctcaaccctgaaacggtaaggctggatgaaatgaatcgagtagtgactctgatcgggtggaccttatcagaaaaacttccagacacctatagcgatgagaacaaaggcaaggatatcgaacacgactccgattcgcttgggatttctcgggtaaccagaaatggttgctgtaacccgaccgaggccgtcgtactggagcatttcctggtaggggtggttaatccactcaccaatgccccaaaaaaagacgccaagggaaaccagtgctgtagggccaggaggatatgcagaaagaactccagtaccgttcagcagaaaaacgaatgcaccagcgacaatcaaaactttgtaccagtagtccagagtcaatttagacaaagggttattcatttaatacaccggctgttccgtgggctaagaaagtga

SEQ ID NO: 106648 - DNA, 198 bp, Enterobacter aerogenes
atgaaaaaagaagacgtgatctcttactttggcacggtcggcaacgtagcaaaggctttaggcatctcacatgcatctgtatctggatggggcgagattattccaaaaggtagagcgtttgaaattcaggcactaacagaggagaaactgaaagttaatcccgaactttatacaaagcctaatcaaacagcagcttaa

SEQ ID NO: 106649 - DNA, 657 bp, Enterobacter aerogenes
atgaaaatgaatgaacgcatcagggctcgacgaaaagaactgaaactaacccaagcggttttagccaaattagtaggcgtgaatcgtgtaactgtgactgggtgggaatcaggcgactatgaacctggaggatctaaccttcaggcgctggctactgcgttaaaaacaaaccctcagtggattataagcggcttaggtgaatcagatgctgaagaggcggcttataaaccaacagaacggtttggcgtgaaaagaatacccgtactatcttgggtccaagctggagagtggactgagagcggagcccccgtgactgaaagcgatgtttccgaatggatttatactacagctaacctttgtgatgaaggatttgctctcaaggtccgtggggactcaatgaccaacccgaacggagcccccagcatccccgaaggatcaatcgttgtcgttgaccctgattacggtagtttatttgaggttaacggtaagatagttgtcgcgcaggtaatgggatctgccgaggctacactcaaaaaatttgtaatcgatgggcctataaaatacctggtccccctgaatccaaattaccgagtccttgaagtaaacggaaattgcaagattgtcggagtcgttcgccaggttgtaactgacttataa

SEQ ID NO: 106650 - DNA, 300 bp, Enterobacter aerogenes
atggctcagacagcaaaacaactgattaaacaggcgtacgaaatagccaaaactatgccaccagaacaggcagcaatcatcaaggaactggctaccgtcctcgatgtgtcgaatgtagccctgcgccagacacgcaccgaacgtgacgcccttctcgcagaagtgaaatcctgggcgaaagagtgtgatcgtctgaccgagcgacacaccaagaatcgcacaaatatgcatgttctagaggctatgcgcgatttgaaagcaatttgccccaccagcttccgtaacgtggaggctctctga

SEQ ID NO: 106651 - DNA, 135 bp, Enterobacter aerogenes
atgaatattgatcatgagaattacagcaaatacaccctacgtcggttcgccgccttgttcgatgtgatctgctgggtgcttattgccgtagtaaccgttggtatctgcatgtttattgagtggtgggtagcatga

SEQ ID NO: 106652 - DNA, 1077 bp, Enterobacter aerogenes
atgagcatagttggtgattatttctttgagttccctgcgtctcgcggcgttcagggcggagcgattgtccttatgatgacagtgccagcacgaaccttggcacgcgtcctcgccagtgataattacggagatactttagaacgttcacagcgtgaaattaacccagcgcgtgctaagaaattctatgaatatctggttaatgctcacgaaaataaagagcccttcattatcccaccgctggtcggtaactgtaactctgagattgagtttcaggaattcggcaataccaacgttggtgttgtgcgcttccctatggatgcagaaattaagcttttcgacggccagcaccgtgcagctgggatcgccgaattttgccgcactgttggcgaaccaatccacgtaccactaatgctcacacataagctctcgttgaaaacacggcagcagttcttttccgacattaacaacaatgtttcgaagccatctgcggctatcaacatggcctataacgggcgcgataagaacgcgcaggagatggttaattttatcagctcacacgatgtcttttctgaagtcaccgattttgagcataacgtcgttcccgctaaaagcgataagtgggtaagtttcaaagcccttagtgatgccacagcaaaattttcaggttcctgctcacaagacgatctggagggtttgtggaatgcgtggctaatgctaaccgggttagatgatattcgccggggtacgaaccaggctgagtacaaacgcgagtatatccagttccacgcagtgatgattaatgccttcggttatgcagtgcagaggctaagcgaaggtcggggagttcgcggtgtcactctgatgattgaagacctggtaatgaataccggcattgctgatcgcgaagattttttcctcatttcatcgtgggatggtgtttgcgctagctgtgagaaatccaggccaaccgtcattgctaatgtctctgcacagaaagcagcggctttgcgtctgatggatgccatcgtgaaccagaacctgtctgtgaaaaatggtaaggatgccagccatgactga

SEQ ID NO: 106653 - DNA, 240 bp, Enterobacter aerogenes
atgactgatatcaacagactgatagccagcctcaagcgccgttcagcccacgtaaaagagtttggtgacgacattacgtttataaaactcgaagacctcgacgcgctggtagaagcggtggagctggcacgaaacaaagccgcggattgggaggaaaaagcagccatcaactatgcggaacacacagccatgattcagcatattgtagatctggaggctaagacaaaagtaaaaaagtag

SEQ ID NO: 106654 - DNA, 186 bp, Enterobacter aerogenes
atgacttctacagattttatggaagaaaaagaagtattcgaattgctgggaaagaaaaaaacagcagtatggcggttacgtaaagatcacgggttccctccccccgtcctcacttatcctacgcgttatagccgcaaggcagtaacacgctggatagaggagggagggattaatcgacaaatatga

SEQ ID NO: 106655 - DNA, 939 bp, Enterobacter aerogenes
atgcaaacgcctagaaaattatttaaatataaaaaatttaacgatgattgtatggagttgataatagatgattatttgtattttgctaacccagcccaatttaatgatccgttagattgcaaagtcacaatatttgatgatgtgaatgatgaggagcagttacggaatattctttcaacgcttctacagcaaaactctgaagagaaattaaaggtggccgcgaaaaatctacgttacaaaggcccaaaaaccactgacaaaatttctcttttaagcataagtgaaacggataaaataatttcaggtatctattctgaattttcatttggactatacgactataatgctccgactatcgaacaagtattagctaacacgattgggaatattatcttgtcagggtataacagaggggtgctttctttgtcaaaaaaagataagtgtccgttgatgtgggctcactatgctgataaccataaaggcctttgcttaggttattctatacctgaaaacgttgctaataaaataagaccaataagctatacaagtgaatctagagagataaggattagtcagatacataggatgttagcgggggatcaaaaggcaaagacagaaatagagcatgatatatttttgagaaaggccaagccgtggaagtatgaagaagagtggagaatgttatcggatgttggtttgcaaaattcatcaatgtatctgtccgaaataacttttggtcttcgttgtaaatatacaactatttttagtgttatgatgtctctctccaaaagagagaccccggttgatttttatagaattatcgaagttccgcataaattcactctcaaaaaagaaaaaatatcatttgatcatgaaggattgcaaggcttgccgagatgcatggaaagccttgatcaaatgttgaatgatgatgattga

SEQ ID NO: 106656 - DNA, 1479 bp, Enterobacter aerogenes
atgaaaatgacacgcttagaagctatcaaggcatggggtaaagcaagccgtgaaggtaaacctattcccgatgatgttagaaaggttctgattagcactcaaaatgatagccgtcatgatttcggtgtagaagctcctatagctaaagttagagttagaaaagagcaagtaaaaaggaatatgaacgccaagaggccgttagctacatcaggtactatccgtagtacgggaggtgctttaactcctgaacaaatggaaatatacaaccaaaaacgcaagttagataaccaaaggcgtaaaaataaccctcaactttattcaaagctaatacaagactttattgtatctggtttatctaaaaaacaagctactaagaaagccaaagcaattattttaagtgcaaccttagataaactcaatgacgataaaaaacctccttcagtaagaacaaaaaaaattgttaaacccaatgctttacttaatgaggaaaagattaaatctgatccctggtacatagcaaaggtcaagcaagatgagattaatttatctaaagtagaacaaagacggatcgacacggcactattaagacgtcctatttcatgtattgaatgcaaaattgactttaaatcatttggtggatttgtagatcatactaaagatgttcatcatgctagcgtaagtacacctaagttaattgtgaaaaatgaagcacctattgactctgttgatgttgtcattgagttgcctgtattgccagctaacgagccaggagagtccgttgtttctattcctgttgccaaaacgccagaagcatttagtgataagtggatcaggttatttgtagagaaaggttacagtgctgcaatggttgaagcgtttaaacgtgatgcaattaaagagaatatgacagcattacagatacatgattttcttagtgtctgtaagccttataaagcccctgtagaaacgcctgtacgtcctctagaaacgattattacccctgaatatgctagcaccattacagaggccgtagaaacgcttgtagaagcacctatagcatctgttgctaatgattcctcctacgctgttaacctagctgattctattgagcaagctttgtttgctgatcgcattgttcgtacccgtaccaatcagaacgattttaaagaacgtgtagccgctaactttggttatcgttgcgccattacgaatagcggcgaagcgttagaagccgctcatattgagccagtaggaacggggaataataacacttctaatggggtgcttatgcttgcttgtttgcatcgtctttttgacgctggattgatggctatcaagcctgatgctcttacagtgcatttcaaggctaattgtacatactttgctaaaagtacgttggaaggtaaaaaaataaatgatcactcagtttctttgaacaaagcaggattgttagaacgctggcttagctttaatgcttga

SEQ ID NO: 106657 - DNA, 513 bp, Enterobacter aerogenes
atgacattacaaatccatgaagccacacctgccgacgcgatgttgcttaatgcgctgggctaccgcatctaccgcgcacactttgaacatctgtgggagtcaaagtctgaactggaagcttttttagcaagcgaatattctctggacgagctggaacagagcctgaaagagcaagcgctctgttggtatgtagcagagaccgataggccaattggttttgcgaaagtgacctatgaaagcagcatccctgatacgaatatgtcaggtatgctgcttaacaaactctatcttgatcctgcagacacccgtaaaggttactgtcaggtgatgtttgacaccgtcaaagagttggcccgggccaagaggaaagactttgtatggttggaggttcttgaacagaacgaacgtgcctgtaatttctaccgcaaacagggcatgaccttaattaaaagagactatttcaaaacagcttcacagcagagcgtcatcaggatcatggggattgctgtctag

SEQ ID NO: 106658 - DNA, 183 bp, Enterobacter aerogenes
atgaagattatttttatccctgcgctgatcgtcgtcctgattgataaagaacaggacatgggacgggaattgacccgcgatgaggttgagtctatccgcgatggcgctacagccatccgcctgccggccgaagcagccgaggatataatcagagagcgcagctatcgcgatattgatccttag

SEQ ID NO: 106659 - DNA, 654 bp, Enterobacter aerogenes
atggtcattggagattttgatgatggcggcattcttcgtacagcacaaggtcctaagtctaaggctttccatttttcggcacgaatgtgctctttatgcaatggttctcgtacacagcctgcagatcgggaatttgatcgatttcacactttagtttcatcgctgttatcagaaggcaggaacccttctgaggtgtttaatatggcacagtataatttgggctcagaagcctacctcaatgtgtttagatacttttccaaaattttatgctgccaaattgcagaagcaggcggccctcgcccattagaagcttgcgaatttgctataggaaaaacgagtaggaacattatctttctacacattgatgtagatccaatctacctgacttatcgagatacatgcggagaacatgcttttgcaagacatggaggacttattgtcctttttgactcaaaaacacacaatccaacatgtttccagagcttgttaagtttgggtgctgtgagatatcttttttgggttagatttgatgcacttgttggagctgagttacgtacatcccatcatgaattttggctcaaatgtgaggccgcgtatcaagaggctataaaaaatccactatcggatgaacagcgatatcgcttaggtatttaa

SEQ ID NO: 106660 - DNA, 501 bp, Enterobacter aerogenes
atgagttatacaaccattatccgtgtttggcctggagagaaatcagaaactgccgaagagttccgcaacgcttggggtagtgccccagtagtctggaatgatatggctatgcgctacctggatgctcccaatcatggctatatgtcatgcatagataacatttggccgttagcgaaacgtgtagatatcccgctccatcaccgtgcagttttagcgatgacgtatgatcgaatgtacgttctgcgcgaacattatcatcatgctgccgagtgtataaagctttatttagctgattttccacctgacgaaatgcatgttaaccattggcctgatattgcaagaatattcagaggacagcctgattgtcctgcgatagggatgtggtgtacctcggtttgtggtaacccctttcagggtgagtgggatgatgaaacggaagaatacaaacaacccgattggtcccagtactggagcctcttcgactacctggaccaaaactga

SEQ ID NO: 106661 - DNA, 360 bp, Enterobacter aerogenes
atgtcagcatgtatggctgtagttcttaacggtaataccgaaattaaatatttcccgttccacaattgtgctagcgctgaagtagcaaccgatatggcagacgagtggcgttatgccgccatcgaggcgataggttgggatgaagcgcatcgcttccatcttcgcgccgtccgtccgatagtcgtcttgcagctaccgtctggcacagtagtggaatgtgacctggatgacgttgatattgacgcggtgaccggttcggatattgactgccgcctttccgcgttcgggtttgacagagagaaacgctattccggttattgggacctggatggcgctgaaattatcgaatacatcgcgtag

SEQ ID NO: 106662 - DNA, 1077 bp, Enterobacter aerogenes
atgagtaaagtaggcgatcatttctttgagttccctgcatcacgtggaactcagggcgggtcaattgtcctgatgctgactgttcctgcacggacactaacacgagttctcgccagcgataattacggggacactcttgaacgctcgcagcgagaactgaacccagccagggcgaaaaagttttatcagtatcttgttgaggcatacgagaaaaaagagccattcatcattccaccgctggtaggtaactgcgactcgtatgttgaattcgaagagttcggaaacacgaatgtcggggtggcccgtttcccgatggatgcagaaattaaattgtttgatggtcagcatcgcgcagccggtattgcggagtattgccgaaccattgatgagccgatccatgtgccgatgatgcttactctccagttgccactgaagacgcgacagcagtttttctcggacattaacaacaatgtttcgaagccgtctgcggctatcaacatggcctataacgggcgcgataagaacgcgcaggagatggttaattttatcagctcacacgatgtcttttctgaagtcaccgattttgagcataacgtcgttcccgctaaaagcgataagtgggtaagtttcaaggccctcagtgatgctactgcgaaattttctggttcctgctcgcaagacgatctggaggggttgtggaatgcgtggttaatgctaaccgggttagatgatattcgcaggggtacgaaccaggctgagtacaaacgcgagtatatccagttccacgcagtaatgattaatgccttcggttatgcagtacagaggctaagcgaaggtcggggcgttcgcggggtcacgctgatgattgaagacctggtaatgaataccagcatttctgaccgcgaagattttttcctcatttcatcatgggatggtatttgcgccagctgtgagaaaaccaggtcaacggttatcgctaacgtctccgctcagaaagcagcggctttgcggctgatggatgccatcgtgaaccagaacctgtctgtgacaaagggtaaggatgccaaccatgactga

SEQ ID NO: 106663 - DNA, 1008 bp, Enterobacter aerogenes
atgactgattttaaagacataatatcagcaataaaagacactatcatatcgcctgtaaaggaagcaatagaatacagagcaaaaaataacttcttcggaagtctgataatctcgtggtttatatggaactggaagaaaatagcgtacttcactttctctgcggatggcattatagataaaataaaaaatgttacatttgttgattttttacccaacacattttttggagataatttcatttccaaatccacttatattgtgcctttggcaatagcattaacttttactttgcttcaccctttcgccacatggatattatcaagaatccatagaaaggtgatggataaattatatgatttcaatgtatccgtagagcattcaagacttgacttaaaaaaaacatctttacaagacaccctagacctggagtcccttaaaactgtagagcaatctaaagctgaactcattgttgctcaaaataaggaagctgccacaaaagcactgtataatattgagcagttaataaaaaatgcgacagaacaaacagtcatcattgaaaatgcacgcactgacttagcctcaattgaatcaaggattaaagcgcaagaaaaaagaagagatacaatcactgatgaaataaacattttaaacgaaaaaataggccctctagaaaaacatcaagggataataaacgaccttaagaatagattatcaaaatccggtgataccattgaaaaaatgcatgaagaaaaccgagtaactgcaaggctaataagtaaagacaagcaggaatttgatatgctgtataatatatacaaagaactcttgattaaatccgaggcggttagcgacacactccttaaagctctcgataaaattagagaggaagagcaaaacaatataatcataaactacgaactaaaagagctagtgaacgaagcttacgcaaaaattgataaaaccatgctacaaagattcactcacccgaatgacagacaccaagtataa

SEQ ID NO: 106664 - DNA, 267 bp, Enterobacter aerogenes
atggagggttttgtgggattatcaaaaaaagttaaagcattctttgcaggtgatgaggtgctggttaacgaaggtctgggcttcgaatcatcactcgagaacatcaagatactcgcaaaagcatgcgaaccacttaaggctatcatctcagactatgagaatggatcacttagccaggaacagttcattgctaagagcatttcatgcatagctaaggacttcatccaactccgtgagtacaaagactcaatggacatgcagtggtga

SEQ ID NO: 106665 - DNA, 561 bp, Enterobacter aerogenes
atggagtttgaaggatttcacggcacagatgaaaaaaactatgattctattctgtgtaataatttttctgtgagtgcaaaggacgatgagtggttaggtactggagcgtattttttcattgatggtattagtgagccgctagttgatgccagaaactgggcgaaagtgcaatcttacgactctgatactggcggcaaaaagtaccatcgttatgcggtcataaaagctactatcaaagtggatttagttcttcgtcttgatgagcgagaagggcaaattgcttacaatgttttccgtaactatctcattgaaaagatgaagaaagaaagaataagacctaaagttggcgctatcagaaacgattgcgaagtttgcaaccacatacttgaaaatactgaattcgaagcaattattaaccacgagtacattaagcttgatgtttggtcaaggcgtaaaagatacgcttcacgcataccaacatgtagaatcatcagtgtgaaggaacctaagactgcaattgatgtcaatggcttaaaggtagtagagaagggaaggatatga

SEQ ID NO: 106666 - DNA, 246 bp, Enterobacter aerogenes
atgaaaactcaaatgcagattgttcaagaggcaattgctcgtttagaacgcatgagtcgtgaagagtttgttcaaaccttggtttcatctggcttagctgatcctgagccggatgaaaatcagcatcagctatttttccgttctgtttcggtggtagaactcgttgaggtcaggcgtagtgcccctgcaaaagatgtttatgttagtaaaagcggcgctgacagccttttgtcgtttgcattttaa

SEQ ID NO: 106667 - DNA, 867 bp, Enterobacter aerogenes
atggctaccaacaattttaaagcttttgctattggcagcggcgcaaatgtgctttctcaggctgattatgaggcactttctgccctgacatctggttttgtctcaggcaaggcgtcctcagctcaggttaacaaggcgctccgtcaatcctcaacgattgtcgccgttctggctcagttcatggcagacagtacaggaagcgatgtactggataatggggatattgccacgttgttaaatacccttaaatcggctcttaatactcaggctgaagggcggctgcttcgcattcaggtttttaccgctagtggcccgtggaccaaaaccgcagggactaaaaaagccagaataaaagcatggggtgcaggtggtggcggccagggaacaaataccgcagggagaggtgcagccagcggttctggtggtgcttatgttgagggtctctatgatgtttcagcaatttctggcgacaatatcgttattggcgcaggaggagcagccgtagcggcaggaagctcagggagcggcggtgatggcggtgatacaaaggttgttggtatgggtatctctgcaggtggtggcaaaggcggctctacagaaggcaactcttcaggtggcataccaggcgctccttctgttgggactattttttctataaatggtcaaggggggcagggagctgttggcagtcttggtggtgtggggggatcttcccatagtagctatggtggcctccctcataccgcttcatctggagatgatgggtttttcccaggttccggaggcgcaggggcttcttatgattcaactcccagagcatcaggaaaaggcgcaaacggctatgtcatcattgaggagtacgcataa

SEQ ID NO: 106668 - DNA, 198 bp, Enterobacter aerogenes
atggcaggtaaatatgcagtcattgaaagtggaatagtcaaaaatattattatcgcagaaagcggttatgaatatgatggtgctgaacttatagaatatcctgaaagtgtattctgccagcctggaatgttttataaccagtctgatggtttattttatgacgataaaacattcacaaaaattaaccaaaaaaattaa

SEQ ID NO: 106669 - DNA, 246 bp, Enterobacter aerogenes
atgtacgcgtatatcacctgcggtaatacggtttgtgactgtctccgcgccaaagatttcagctctacggtagaagatataactggggtgtcttacgaaaggatgatcaccaacgtcaagaatacaggttctgtctggttcaaaagcgtcggagatagatgtgaggttaacggcaaggaatgtttctttaaccagtttcggatagaaaaccggatcattgcagataaaatagatatgctcctttga

SEQ ID NO: 106670 - DNA, 558 bp, Enterobacter aerogenes
atgttctgcgaagaaagagtggctcagatagccgcctatctgctttcgaaagaaggtgggcgcatggcttatctgaaactcatgaaactgatgtacctttccgaccgtgaatcaatgaaccgctatggtgagcctttgactggtgatttgatggttgcaatgccccatggccctgtactttcaaaatcactggatttaatgaaaggagcagtcagaggggaggacggttggaacaactggatcactgatgcggaccattatgatctgcaatcacaaaaacacgaagcgctgcgtgaagatttcgacgagctcagcgatgctgatttgaatgtactcgatactgtgtatcatgcgtttggccatatgaataaatggcaaatcagggattatactcacgatcattgtaccgagtggagcgatccaaatggtggcgcattcactatcaacccggataacgtgtttcgggcgttaggcaaatctgaagagcaagttagacatttgtctaacagaatgagagaattcttagaactcgacaggatttctagcggattgaaatga

SEQ ID NO: 106671 - DNA, 204 bp, Enterobacter aerogenes
atgaagtgtccagcatgtggttgtgttgaagaaaataaggacaagtacggcgattatgaggttttcgaatgcaaaacctttggtacatatcgagtaacaaacaccgtgctaaccatggctcaacacgatccaaaaatctttgacaggattaaggaaattatttcgacgactgacagacgtgaaatcctttcctacgagctgtga

SEQ ID NO: 106672 - DNA, 573 bp, Enterobacter aerogenes
gtggaaagtaccaatcgctctgggcgctggcagccgatgcgcgcggcgagctatgttatctgcatcgtacattactggatcacggcaagaaatacgccgatggcagcgggcaaagtgctaaaaaagcttcgcttacaggaagaatcatataccgatcacacttcctcaattgctgtacgtctttttcctgtagccagtacgcttggcattgctgaagggattgaaacggcattgtcagcgcaccagattacacactgcaacacttgggcgacaatgaacacggcatttatgaaaaagtttcaggccccggcaggcgttaaacatctggtaatttttgctgatgccgataccaacgcggcggggcacgcagccgcctttgagtgcgcgtttaaaaacctgaacagtgccgctaatgatctggaaaccatcacagttcgttggcctgaaccgggggcagattttaatgatgttctgttaaacggccttcaggtttacgagtgggtatatacgaaaaacaaggaaggtctaggaagtagtgcccgccgattggcgggctttgctcacagctcgtag

SEQ ID NO: 106673 - DNA, 204 bp, Enterobacter aerogenes
atgaacacgcaagaagcagtgaaagggcgttgggcggagatattcgcttattatggcctaccggaaatcaccgggaaaaaaattttcggggtgaatgccccatttgtaagcgtaaagataagtttcggattgatgatcgggacggtaccggtagttttatttgtgtgtgtaacattggcgatggctggaaacttcttcagctaa

SEQ ID NO: 106674 - DNA, 192 bp, Enterobacter aerogenes
atgcagccttgccccggtatccagggtcgtccgctttctgatgcgtggtgcgcccatatctatcgcgataaattcggcgtatggccccaagggttgcattacaccgcccaagaaacttcgccggaagttgaaaactatatccgttcacgtcaaatcgccttcgcgaagggcaaaaagcagcaggctgcatga

SEQ ID NO: 106675 - DNA, 1284 bp, Enterobacter aerogenes
atgaatgattctcaaaaaatatctcttatagatattttcatcgattacccatctaaaccactcgccgacaaattaagtatggggcagcggtatgattttattactccgtttgagtgcttactgtcttccgttattaatccactccatcgtcaaacgaaaaaaatcacctctgccaaaatcaaaaaagatatagatgatttaaaaagcaacgatcaagaattaagaaaagcagcttcacagaaattgattactttgtataatcttgagttacttaataaatcagacattacaagtcttataaaaaatttatgggctaaacgagatgaatatggttttcctgttaatagcggttattatagatttttctttatagataatcttcgccctgaaaatgaagatatcgaagagaaatttataccaataataaaaacatacggtttccctattcaaaatggaaatagcgtaagcattaccggagggaataatacttattgcaaagaacttaatggtgccctttatcatataaacccatcagaaagtattttatcagaaattatttcagtgatgagtaagtggttttataatgataaacattggcttaaacggagtgacgatatttcaaaagaatttacgcttagatttagaaatataacagatattcttacttcaattttggaaatgcactatgcgaaattaagtcgagacacaattgctgaaattgccaacttaatacaacagatgaaatattcaggaatacctgcaaactctgcacttactatgctttcaatgaaacaaaaaaaccgttcactaactcttttgcaggacataagttctgggctatatagtttcaccaaggcagaagtaattgaagcgataaattcaatatatgtcctaataagaaataaagaatatccttcggaaataatttctatacttagtgataagatagcatggagtcgtgaaccatgccttcctgaatgctatgatctagccaggtttatattaaactctaatgaatttactatttctcatgaatttataaataaaatcctatgtggtttaagaggcttgttattcgcggaggggagcgagtttttgaataataacgattacttgagccatttagaaaagaaactaagcgcaacaaagttagcagcatctatttttcatcgaaataatagtctaggtatcttacaaccagatataatccaagaatgggaaaaaatgtgcaattccaaaaacgagtttgatgaaataaaaaatgaatgggataaccatatttaa

SEQ ID NO: 106676 - DNA, 561 bp, Enterobacter aerogenes
atgcctgtaaacgagaggattaacgcgacatccgggacgcgtatcaaacccggcggaacgaggcttataaccactggtgagattgggttagcaagaaagctatacagctacggtctccggtacaatacagtgtggattcatcgggaaagttatttgccattcaatctacagcctactgatattgctatgagccctaatggcgaaatgtggtttagggaagacacctactcccatgatttttcaatggaagttgatgtgcagaaaaaacatagattcatgcatgagttaatgcatgtatggcaagcgcagcacggaatgtttgtcagaaccagagggtttttctcccgatttgctgattacagttatagtttagacaaggaaaacatacgacattatagcttagaacagcaggcttcattagttagtgattactggttgttgcaagcttacggttttaaaaattatctgtatctgcctgcattacgagattatgatcataaagaatctgactatacattgcttcaaaaatataaattagttatgaagggatttccacaatga

SEQ ID NO: 106677 - DNA, 1341 bp, Enterobacter aerogenes
gtgaaattcgaaaatgaaatcaataccgtcttaaaagatatatttgggattgatcataacgtggattttattcacttcgaagtaatatataaagatgacgatccggaaaaatattcttcagtgaaagatggctataaagacaatcttctcaatcacgatgagcgcgaaaggctagctagggagctttatattggggaggactttattttgcacgcaactgtagtctttccattatcggaagttcaggggttagagagtaaaagtttattttattatcctatttgtacgcgtgaagagatacaaagaatagagtgtatttcgagcgctgatgattatcttttagccttacgagctaaaagcgtcgcttattgcccaaggctcaccagagtatttttacacaggagaaataaaaatattcaaaattggtcactctcttcatattatcaatcaaacgactttgaggattacatcgatagactacccgatgaaatggcaaaaatcagtcaaggtatagcggctggctatgctttgtctagggagcctcatggtgtatgcattagcaacgagcatggcaaaattattgttgtgtctgaggcgctaaaacatttcctattttatatgaatgctcatttcaagggggtcgcagaagagctggatcacaaggatacagacgcgtgtctttttatcgcttgtcgaacgatgctactcaccgaaactcaagattttgacctcgaccctagaggcgatctaccagacaatgtaaagcggcactgtactaaaattgtgaacgatcagctggcttttataatcggacatgagtatgcacacgcattacttggtcactttggcgaggacgcaaatcttacctcacattccgagttactgatgattcgtgatgaccttggccgagcagaaaagtattttacaccaagacagcatcaggaatttgatgccgatgcaggttcaattcttcatgctgattacgatgacgaagagtgtgctgacgtattgaatggtgcagttcttttctttctgtacattgatatattttatgcaatttcaaattatatcaacccgccatttaatgcctctagaacgcatcctgaccctatagaaaggctttgggctttgagggctgctgttttgaaggctaggactgtcgatgttgaaagactctatacagatcaagacgtcaaggactggattaagagtatgcaggggctcaaagaccattttgtaaatgagttacttccgtacggcattgagtattttgagacatatggatcggtgtatctaccttcctaccgacaatccgagttgttggatagactagacttttga

SEQ ID NO: 106678 - DNA, 3102 bp, Enterobacter aerogenes
atgaaattaaaatttaaacatcaggcatatcaggcggactcagttcaggcggttatcgactgctttaaaggccagttacccgatgaggctgctcgtcgctacagaatcgaccctggtacatctgctcaaggtcgctcaggctcaacaacctatgttgaagctgggttcaaaaacgccgatattcagctaagtgagtcgcagttactgaccaatattcaggcggtacaggcgcgtcaaaacctgcaactgtcaacggcgctagataattaccgggatgcgaatggcaataagcagaccaaatatcatccaggagccaaactcaatcttgatattgagatggaaacgggtactggtaagacatattgctatgtgaaaaccatttttgagctcaataaacattacggctggagtaagtttattattgtggtgccgagcatcgccatccgagaaggtgtttataagtctttgcaaattacggcggagcattttcttgaggattatcaccgtcaggctcgtttcttcatatataactcgaaagaactgcatcagttagaaagcttctcttctgatggtggtattaacatcatggtcatcaacgtgcaggcctttaacgcgcgtggtgctgatgctcgtcgcatttatgaagagttagatgactttcagacccgtcgtccaatagacgtgatcaaggctaaccgcccaatcatgatcctggatgaaccgcaaaagatggaaggtgctaaaacactggattcttttgccgaattcaaccctctttttattttgcgttactcggccactcataaaaccgagcataacaaagtattccgccttgatgcgctggatgcttataaccagaagctggtcaaaaaaattgcagtacgcggaattactacgcgagggctggcggggactaatgcctacctttatctggaaaatattgaaatatctgccagtaagccgcctgtggcacgactggaatttgagattaaattcgccagcggtgcgataaagcgtgatgtgcgtaaggtaggtaaaggctacaacctatttgaacagtcaaatggtttagagcaatatcagggctttgtcgtttctgacattaatgccaatactgatacgatcagttttactaacggagttgagttgacggcaggcgatgccagtggtgatgtcagcgaggaggcactacgccgaatgcaaatacgggaagcagtgaaagctcactttgaaaaagagcgccaactgttcccgttaggtatcaaagtattgagtctgttctttattgatgaagttgttaaatatcgcgactatagtgcacttgatgacaaaggtgagtacgcccggatcttcgaagaggaatatcttcgtgaacttgagttacaggctgatctactgacgctagattaccagcattacttgaatggaatcccggtagaaaaaacccataatggctatttctccattgataagaagtctaagcgcctgattgatcctgtattaggtaaaaaagcgacggaagccgatgatgtagacgcctacgacttgatcctgaaggctaaagagaaactacttagtttcgatgaacctacccgctttatcttctctcactccgcgctgcgtgaaggctgggataacccgaatgtatttgttatctgtacgcttaaacacagtgacaacaccatctcgcgtcgtcaggaagttggacgaggattgcgtctggcggttaatcagttgggcgatcggatggacgatccgctgacagtgcatgatattaatcgattaacggttgtggcgagcgagagctataaagactttgtcaccgcgttgcaaaaagatattagcgagtctctgtctgccagaccgcgtaaggctgatgagaaatactttattggaaaaatactgcatacagaacagggtgatatcagggttggtgatgacttggcgaagaaaatttatcgctacctggtaaagcatgattatacggacgatcgggataatattactgaaacgtggcttcaggccaaaaaagcaggtgtaattgcacctttgcctgacgatcttcaaccatactttgatcagatagttggtcttattgatggggtgtatagtgatggtaatctaccgccactggacaacgatcgtaaaggtaagactaatccactcagtgttaattttgaaaagaaagcatttcaggaattgtgggccaggatcaaccataaagccatttatcaggttgagttcgatacggatgaactcattagcaaggcaactaaagctcttgattcacagctacgtgtagaaatactacactttaatattgttcgtggcgaacaggtagacgatgctacttgggaacaactgaagactggccaaggttttgttgcccgtgaaaccgcacgtgaagaatataatgcttctattcactcgcgtgtaaaatatgatttactgggtaaaattggtgagcctactcgccttaaacgtagcactgtggctgcaattctcaggggaatccaacctgctgtatttgaacaattcaaacataatccagaggattttattagtaaggcagctcagattattaatgagcaaaaggcaacgatggtgatagagcatctgacttaccatcttctggaggataaatttgatgcaagtatttttactgccgggcaaattaagcaggattttacccatgctggtcagccgttgaaaaaacatatttatgattacttggttacagattctgagatcgagcgtaaatttgtctatggtgatccaaagtctgttgagcaaggtgggttggagttggctaaagaagtcacggtttatgccaaattaccaaaaggtttcttcattcccactccagttggtaactataatcctgactgggcaattgcatttgaagaagatgcagtaaagcatgtttactttgtggctgaaacaaaaggatcaatgtcatcgcttcaacttaagggaatggaagaggcaaaaattgaatgtgccagacgcttctttgaacaattaaatgcagagttggttgcaaaaaatgtaacttacaatgtggtggataattttaatagtttgatgaatatcgtgcgttag

SEQ ID NO: 106679 - DNA, 687 bp, Enterobacter aerogenes
atgaatagttatattaacgtgattgccattgttgaaggtaagactgagcaggtattcattgaacagatactagccccttggctggctgaaaggatgatttttatgaccgccacgcaggtgagtaaacctggccagaaaggtggagatgtacgttttagtcgggtgagccgggatattggtcttcatcttaagcaacgtactgacacctatgtcacgacgttggtcgattattatggcgtgacggaatggccggggatggagtcgttacctgctcagcgagcaccagcgcagatcgctgagcatttgaatactgcagtgatgaatgaggtcaataatctgtttgccgaacagcagtccgcgcggcgttttatcccctttatcgcgcttcatgagtttgaagctttgttgtttagcgacagttcaatcctggcggaagaactcggtatacctgtgactaatgtggaggcggttgtggctgagtgcggtgaacccgaagcgataaataatggtcgtgaaaccgcgccgtccaagcggttaaacagatggacgccagaagggaaatttggcaaaacgacgcaaggaattgcgatagcaaagcggattggaattaccaaaatgagagaacagtgcccgctatttaatgcatggattgcgcggtttgaggcgctgatggtggaatcagcatga

SEQ ID NO: 106680 - DNA, 1107 bp, Enterobacter aerogenes
atggggactgcattagataaattgactattcagggctttaagtcgattcgtgagcttaatgacttcaagcttaagaaactaaacgtcattgtcggggccaacggggcgggtaaaagtaattttatctctttcttcagaatgctacatgcgcttattgagggcaatttaaatcgctacgtgagagacagtggcggcgctggagatttgctgtttcaagggcgtaaaatcactcagaaaatgttttttgaaacccactttggttctcgtggttatcgctttacgctagtaccgactccggcagacggttgcgccatcgaaaatgaagggcgctactactcggggggaacaaccggatggtgggaattaggggatagcgatgatggcaaatccctgctggcgatggaggttttggaaaataaacctgatgcagcatattcaaaacccgtctatggggctatcacttcgtggcggatatatcattttcatgataccagtgctaccgctgcgatgcgtaattacgagatcgttcaggactgtgaagtactgcggacagatgcggccaaccttgcacctttcctgatgaatctacagaaagatcatccacatcaatataaagcaattattgatgcggtgcggctggtcacgccgttctttgatgattttattcttaagccaagaaatcaggggaccaaagaagacgtcaacctgagctggagacaaaaagggtctgactatccgatgcagccctaccatctctcagacggttcaatccgctttatctgccttgcgacggcgcttctacagcctaaaccgccatccacaatcattattgatgagccggaactggggcttcacccagcggctatcgttattctggcggagttaattcagcaagcggcgcagcgcactcaagtgattgttgctactcaatcgccggcgcttatcgaccagtttgctatagacgatattgtggtggtgaaccgccaggatggttcttcgacgtttacccggctgaatgagtctgactatgcgcagtggctggaaagttactctgtaggagagctctggaccaagaatgtcatcgccggaggcccacgttatgaatag

SEQ ID NO: 106681 - DNA, 2016 bp, Enterobacter aerogenes
atggataagctgaaaatgcacagccctaatctggtagaacagaatatcgacaagctggcgacgctgttccccaactgcgtaacagagtctaaagatgagaatggcaagctgaagcaagctatcgactttgacctgctaaagcaggagttatcgcgccatattgtcgatgggccgcaggagcgctatcagcttaactggccgggtaagcgtgaggcgttactgacagccaatgcacctattgctaagactctgcgcccctgtcgcgaagagagcgtaaactttgatacaacccggaatctgtttattgaaggggataatctcgaggcactgaaactgctgcaggagacttatctgggtaagatcaaattgatttatcttgatcctccttacaatcgtaaaaagggtaatgaccttgtttatcgagatgattttgtaggaaatacctatgagtatctgattcagagcaatcaaacagatgagcaaggaaatcgtctggtttccaatactgaatcaaatggaaagttccattctgattggcttagtatgatgtaccaacgcttaagagtagcccgaaatttgatggccccagctggggttattgctatttctattgatgatgctgaaacagcaaatgtgcttcatctttgctatgaagtatttggtgaatccaactttcttggcactcttatttggaaaaacgttaccgataacaacccaagtaatatagctattgagcatgaaagtattcatatttttgctcgtaataaaagtgatcttgagggggtttggaagagttccgtttctgacgtaaaggacgtgcttgctaaaattgggaaagagctaatcactcagtattcaaatgctaatgatttacaagccgcttatacgaagtggtttagggagaataaagcccaactagggccgttagatcgctacaagtacattgatttcggtggtatctatactggaagccaaagcgtccataaccccggtaaagaaggctatagatatgatgtagtgcatcctgatacagggaaagcgtgtaaagaaccgcttatgggatatagatttcctaaggaaacgatgaaccgccttcttgcagaaaaaaaaatcctgtttggaaatgatgaatcaaagatcatagaactcaaggtttatgcatctgaatttgaggacaaactttccagtgtcttcgaactagatggaaggactggcccgtatgatttgaaggcacttttcccagaagggaaaaaagttttttcaaatccgaagcctgtacttctgatggaacgcttaatatccttcatgacagccccacaagatatttgtctagacttgtttgccggctcttccactcttgcacatgcgatgatggagataaatcgtcgtgatggcggctttcgtcgtttcattagtgttcaattccctgagccaattggtcaagaaagtaaagatgccaaagaagcataccaattttgtacacaaattggattaaaaccatacatttcagaaatttcgaaggagcgaactcgtcgtgctggagttgctatacagcaaaagagcggcgctgttgagtggaacagggatactggttttcgcgtcctgaaaattgatacctctaatatgtccgatatctactatgcccctgataccgtaacccaggacgatcttttcgaacaggtagaaaacgtcaaatccgatcgcagtgaagaagatcttctgttccaggttatgcttgactggggcgtcgatctgactttgccgatccgccgtgaaaccattgctgataaagccgtcttctttgtcgatgcccaactggataacagccacggagcactggtagcttgtttcgataaaacgggcggaattgatgaagattttatcaagcagcttgcggcattcagcccgctgcggctggtattccgtgatgctggcttcgcgtctgatgcagcaaaaaccaatgccgaacagttgcttaaacagctcagtgctaccaccgacgtaaaaactatctaa

SEQ ID NO: 106682 - DNA, 699 bp, Enterobacter aerogenes
atgatgactcagcattatcgttttccagcttcagctgagttaaatcggcgcttgccaaaagaaacgttttaccaaaggttgaatccagattctgcccttagacaagcatttgtggtgcaactgcaggagattgtctggaaatataaactggcggatggaacactgaatctggtagcaaacagcgattatccggaactacaggttatcgacattgaacttaaatccgggtcgtctgatattgatgtggcggtactgcgtgcaattgattcattgattgtgttccccgtgtacttccgtgtcacccgcaggtgcaatgaggttctacagattcaatatcagctgggctataagccccctgttacagaggttcagcataaggtcacaccaatacgttacttcgcttccggttggttttcgctacctgatgaaaaagacctcgtcccgttacccgtggcgttgaatatctctcagttgtatcgacagttgctgcaaccattggctacactgccgcctcgtcgtgatgaacccttaactatgtggatggcgcgtttagaggatatagccaggcaggagaggcgtatcagccagcagcagaaacaacttcagcgcgaaaaacagtttaatcgccgggttgagctgaatcgtgagctggtggagctccggcatgcactagcagccttgcaggctgaaaatgactaa

SEQ ID NO: 106683 - DNA, 3294 bp, Enterobacter aerogenes
atgaaacttattgataacattaatgcgttattgggagatgagctgaagcagacgttacaacctggtgtgaagcttaaaatcgcagcatcctgcttttctatttatgcatttgatgcgctgaaagaacaacttgaaaatattgatagcctggaattcatttttacttcccctatatttgtagaggaagatgcggttgataaactcagaaaagaaaaacgcgagttccatattcctggcgaaaataaagagcgaagtttttttggtagcgaatttgaaatccagctaaaaaataaactgactcagaaagcgatagcccgtgagtgtgcggaatggatccgtcgtaaagctcaatttcgttcaaacttaactccagcaccgatgcagccttttgctgttgttaaagcaaatgataaggaagttgtttatcagcctttgcaaggattcacggcagtggatcttgggtatgagaaaggcaacgctgtttccaatttagttatgggcatagatgaatcgtcatcaacggcaacatttctgacgctctttgaacaaatctggcaagataaagaaaaactgactgatgtaaccgaacgcctggtgcattacatgagtacggtctatctggagaacccacctgaacagatttatttccaactactctataatctttttagcgagtttttagaagatatcaatgacgatgtactgccaaatgataaaactggttatcaggatagtttgatttggaaaaaactcttcaacttccaacgggatgcagcgaccggtattattaacaagctggaaacctataatggttgtattcttgccgatagcgtcggtttaggtaagacgtttacggcactggcagtcgttaagtactacgagctgcgtaacaaatctgtattggttctttgtccgaaaaagctggcggataactggaccaactataatcagaatctcgttactaatccgtttgcaaaagaccgatttaactttgatgtactatgtcatactgatttgcagcgcactcgaggagaatcgttcggtattgcactgaatcggatcaactggggaaattatgatctggtagtgatcgatgaatcacataactttcgtaataatcaggcttttaaagagagagaaacacgataccagactctgatgaataaggtaattagagcaggagtcaaaacaaaggttttgatgctttcagctacaccagtaaacaacaaatttagtgatctgaagaatcaactggctctggcgtatgaaggagatcctggttctctccatcggcagattggtactcaatcaggaatagatgaaatatttcggcgtgcgcagaaaagttttaatgtatgggcggagttgtcgccggaaaatcgcaccgcttcagcgttattgaatgcactcgattttgatttcttccgtttgcttgatagtgtgactattgcacgctcacgcaaacatatccaaactttttatgagaccaaagacattggtcgttttcctacgcgtaataagcctctttcattccaaccctctctgacaacccatgagcaggtgattggttttaatactatttttgaacagttatccagcctacgtttagctgtttatgccccggtcagttatattctgccgagtcgtatggctaaatatgaagcactttatgataccagcgtaaaaggtggcagtacgttgcgtcaggttgaccgcgagaaggccttacaacgattgatgaccataaatctgcttaagcggctggaaagttcagtacaagcattcaggttaacgcttagtagtttgcaaaaaatattacgtgatgctctgcacaatattgccgcgtttaaggctagcggtttagaagaggagcttacgacggttgatcctgataacggaattagcgatccggatattgagctcgaccttgaacttgatgatttggaagaagctttttcgactggtgggaaagtcaaaattaatctggcggatatggatttgccttcgtgggaataccatcttgtcaatgatctaaccattattgatgaactcttagatgagatggcgagagtaacgccggaacatgatgctaagctgttgcatctgaaaggtgtgcttgaaaataaatgggcaaatcctatcaatccaggtaataaaaaagttttgatctttactgcttttgccgatactgcggattacctctatgagcagttacatgatttatgctggcaaaaacacggattacatctagggaaagtcacgggaagtagtaccgttaaatcgacgattgggaagggttatgattttcagagcctgctgacgttgttttcaccacgatcaaagtcgaaggatcacatcttacctgatgaaccagccagtctggatattctgattggtaccgactgtatttcagaagggcagaacctgcaggactgcgattacctcattaactatgatattcactggaatccagtgcggattattcaacgctttggccgtgttgatcgtattggatcaaccaatgaatacattcagttggttaattactggcctgatatcagccttgatgagtacatcaatctgaaagagcgggtagaaaatcgcatggtaattaccgacctcacctcaacaggtgatgataacgtcctgacggcgcaggctaatgatgtggcttaccgtaaggagcagctcaaacgactgcaggaagaagtgattgacctggaagatgtgaaaggaggcgtttcgattaccgatttgggtctgaacgaatttcgtatggacttgttggggtatctgaaaactcatccagatattcgccgtttaccttacggcttgcatacagttgtatctgccgaacctgctaaaggcttagttcctggtgtcatctttgcgctgcgtaatcgccatcatggggtcaacatagataggcagaatcgtctacatccctattaccttatttatattgccgatgatggatctgtggccatcaatcatctgcaaatcaagacccttctggacagtattcgtgctgtttgtaaaggtcgcgagattaccgatgatgcagcctgtcagcgttttaatcagaaaacgctggacggaagggatatgagtcattattccgaactgctggatcgggcaattcactcgatggtagctgttaaggaacagagcgatattgacagcctgtttagtggtgggcctacttcagcgctgaacaatgagattgctgggctggaacagtttgaattgattaactttatcatcattcaaaattctgatgagggctgtggatga

SEQ ID NO: 106684 - DNA, 1116 bp, Enterobacter aerogenes
ttggccatcttatcgactgttttccagcgtaagatggctgaatggaatgaccatatcctggtagacagtttctgcccgtacggtgaggcattttcagaaggaattattgtggcgactaaaatgtggatgatccgcggcgatggcggaaaattgtacgatgacttcagggacaaacaggttgttgcaatcggctggtcgcagctcgctccctatgtgaaaccgggatgctcaagagagcagttgtttacccggtatcaggagcttgagccacagactaagccaggcacagttcgttccggtgcttcccaggtctggcgctttgtgaatgaaatgcagaaaggtgactgggctatcacttattcaccttctaatcggacttatttgatagggaaaatcgcctcagattttgagtttcatgccgagtggcttgaagatggcatgggcatcgcccgtaaagtgaagtggaacgcggaagagattaagcgcgatagtctgagtgatgcaaccagaaacactcttggctctacgctgacggtttttcaggtgcctgattttgccgtgaatgaattagtgcagggcaaaaagcctgtctcagatatcgtgccggaatcaactgtttcaggtgaagaggatgaggttgtttctaatcctctgcgcgacatggaaatgatcgcctttgaaggcatcaaggatcgtatcaaccgtctcgactgggatgagatgcaaaatctggtcgctggcgtgttacgcagcatgggatataaaacccaggtatcgcctgctggtgctgatcgtgggaaagatatcattgcttcccctgacggttttggcttcgaaaatccgcgcattattgttgaggtgaagcaccgacgggaacagatgagcagccagcaaatccgtagctttatcggtggccgtcataaagacgatcgcgggctgtatgtcagtaccggtgggttcagcaaagatgcgcgctatgaagccgatcgttctacaatcccgttgacactatggacgcttgacgatctggttcgtgcgttagtggaaaactatgagcaagtggatatagagactaagctattggttccactaaagaaaacgtacttgcctgcatga

SEQ ID NO: 106685 - DNA, 684 bp, Enterobacter aerogenes
atgaaaaaagctgaattagacgttgtggttttaagcgaggatttaccggatgaaggactggtaaaagggacggtgggtacgatcgttatggtttttgataccccgacgctgggctatcttgtcgagttttgtgacgaggagggaagaacaatagcaatgcctgctttgctacccgttcagctaaagagttatttcactcccggcatcctcaaaatactgctggttaataataattacccggtagccaacccagtagccccggatgtaatggcggatctaatgcgcaaagctgcccctgctgaatgggatgctcagaagagaagggtttatgaggatatccagcgcctgatgattaaacggctggactactctgatatgtttcaaatcatggatggatttgagtacaacggtttgatgctgtacagcatggtgcaggcggagaacggtgagccagtatggtcaaatatctacatccgcaattttgagatacgtgataacgagagctatgtcgatccgaaactttctgacaaggtactgattggcgaagatggtatgtccgtgtttgcctacagcttcaaagatgactgtttcgagatccgagataaagcgtctacgggttatgttattgagtcgcataataacttcaacgcattgttgtccgcgttgattgattcggtcaactga

SEQ ID NO: 106686 - DNA, 843 bp, Enterobacter aerogenes
atggatacctccaggcgctggagcagcgaccggaacccgttttacatcgacgacaacggcgatttgattttcacccttacagcctcatcatggcatgaatggtataacgccgaaatcacgagcgcctatcagcatgcgattgccgatcggcaaggcaggaagccagcccccactcaacgtatgcactatgattattacgcaccaacaaccgtgccggcggggaagacgctgaacagtaaagctgttggccgattactggctgctggcggtgtgtataacggcaatattgaagggtttcacgaaaccgcgcagcagctcggtggggatgctccagcgggctacgatcaaatcatgaacaacaaagggctaatcattgcgggtgcctccattgcggcaggattgacaatgggcaggttaaaccctctcagtgaattagatgaaatatcgagtctcagtaaaataccaacttttgaaagcccatatgtaaaaggtttcacatctgaaagcggtacgttggtgaacgctgaacacgccgttatcgacccgaaaaaactcgcaacttatgctttagattcaacacatcctacaggggggcacaaagccagggtgtttgagtcagcgctgggatacaacccaactaatgcagatgttttagctgcaagaattcaggaaggcgtattatcggccccagcaaaagtgttgcaggcaaataattacgggcaaacaatggctgtcgatatgcctattttaggcgtcaacggtgaaactgcgatcgtgcgtacaggctggatgtatgaaacagacgcgttagttcctcgcctgacaaccatattcgttaaatga

SEQ ID NO: 106687 - DNA, 432 bp, Enterobacter aerogenes
atgctgatccaaaacggcgtcccgatgagccgttaccgtgcggggcgtctgatgaaacatctgaacctgagcagttgccagcctggaaaacatcagtacaaaaatgcccgtcagaagcataccttcctgccgaatctgcttgagcgccagttcgctgtgcccgagccagatcgggtatggtgcggagatattacgtatatctgggcaggaaatcgctggtgctatctggcgatcgttatggatctttttgcccgcagggttatcggctggagtctgtcagcgcatgccgataccgcactgataagcaacgctctgcggatggcttatgagacgcgtgatcaaccgcatgatgtcatgttccatagcgatagtaataatgccggtgtcagtctttaccaccactcagtttgccgtttaacccgattggtgtga

SEQ ID NO: 106688 - DNA, 351 bp, Enterobacter aerogenes
atggctgataaagttaccgaagccgccgttgtgggtggcgtggatacacataaagatctgcacgttgccgctgtcgttgatcagaacaataaagtcctggggacccagtatttcgccacaacacgacaaggttaccggcagatgctggcatggatgacctcatttggggcattaaagcgaattggtgttgagtgtacaagcacctatggatcaggtctgcttcgctatttgcagaatgccgggttagaagttcttgaagtcaccgcccagaccggatggaacgacgcaaacggggtaaaagtgacacgattgatgctgagtgtgctgctcatgccgcattctccggaataa

SEQ ID NO: 106689 - DNA, 696 bp, Enterobacter aerogenes
atgaatgagtctcttcgggtgttaaaaacctgccgaaaaacagcgatatctgcccgcagagtcgctctccagattatccattccaatattatctctgctccggatgaattacgtgaacagctcagaaatatgacgcgtatgcagctcatcaggactctgggatcctggagaccagatgccagtgaataccgcaatgttaccaacgtttatcgcatttcattaaagtcccttgcccgacgctatctcgaattacatgacgaaatcgctgatctggatgtcatgattgcggcaattgtcgatgagctggcacctgaactgattaaacgtaatgctattggatacgaaagcgcttcacagttgctgatcactgctggagacaatccccaacggttaagatccgaatcaggttttgctgcactgtgtggtgtcagcccggttcctgtctcttcaggaaaaacgagccgttatcgacttaatcggggtggagatcgtgctgcaaatagtgcacttcacatcatcgctatcggacgtttacgaaccgacgataaaacgaaggaatatgttgccaggcgagtagccgaaggacatacaaaaatggaagcaatacgctgtcttaagcgctatatctcacgcgaagtctatacattattgcgaaatcaaaataagcaggtcaacagcatcccgataatggcttga

SEQ ID NO: 106690 - DNA, 558 bp, Enterobacter aerogenes
atgtcatccgtaaaaaataaacctgtagataaagaaatagaagacattgatctaagccgtctaatcggggaggttattgatcaccgtaagttaataatatccatagtgtcattatttactctcttagcattggtttacgcattatttgcaacacctatttatcaggctgatgcattagtacaggtggagcaaaaacaaggcaacgcaattttaagcaacttaagtcagatgttgccagacggtcaaccacaatcagcacctgaaatcgccttgttacggtctaggatgattttagggaaaactgttgatgatttgaatcttcaatctatagcaacacagcactattttcccctttttggtagagggctggctcgtttaagtggagataaacctgcgcaaattgcaatttcaaggctatatgtagctaaaaaagatgatgaaacacctaaattaaaactaaaagtagttgactcatctaattatattatttcttcagacgatactgaattacctgtctcttatacacatctgacgctgccgacgaagaggatagtgtag

SEQ ID NO: 106691 - DNA, 186 bp, Enterobacter aerogenes
gtgttgaacctcgaaacgcgagaaatggtgatagagcgcgtactggcgctggatacggcagagtttgaactggaagacctgaaatgggtgatcctgatggttctgtttaatattccaggctgtgaaaacgcctatcagcaaatggaagaattactcttcgaagtaaatgaaggtatgctgcattaa

SEQ ID NO: 106692 - DNA, 786 bp, Enterobacter aerogenes
atgtttcggatagaatcgtcagcagtggaaagtccacaagttgtggttgaatatcataagtctaatgcggaatttacttctggggaaggcatcctgtatacagagtttatgggggaaattgccacaagacagataagtgttttggatagcttatattacccatcagcttctttgattgatgaaaatgataaaataggtttccttctttatgatggaaaaaaaagtgaattagaactatctgattcacagattatatcaaaagacgaatttgatgctgtgtggttaatagctatgaatgatcacaaagaaaaagaaatcattcaatatgtaactggagatgctgctgtcccattaagttctgccactatcattgctcatatagttaataacaaagggaaatgggggaaaggattcgttttatcattatcaaaaaaatacccggcagccaagaaggtttatttggataaatattctaacacatcagatttaactttgggtgatatacagttcatatctgtagatgaaaaggatagaatatttgtggctaatatggtttctcaagatgggataagaaaaaaccatgctgataaaaaacaatatttatcatatcacgcacttgaggaatgtcttgaaaaactatcggagtttgcattgattaatcgattggttgtacaaatgccaaaaattggagctggattaggtggcggagattgggagcatattgagagtttaatacaaaaaaatttatgttataaattaattaaatgtactgttgtgatattgtga

SEQ ID NO: 106693 - DNA, 633 bp, Enterobacter aerogenes
gtggcggcggtggttcaccgggacgaggccaccccgcacctgtctgcgttcgtggtgccattgacgcaggatggacggctgtccgcgaaagagtttattggcgggcggtcaaagatgcgtgaagatcagagcacctacgctgaatcagtaaaaaaactgggtcttgagcgcggcatcgagggaagccgcgccacgcatcagacagttcagcactactacgaatcgataaaccgtggcacccgtagccaggtatcgatctcgccggaggcgctggagccgcgtgtattgcggaagggcattttcaccaaagacgtggaagatcaggcagccatagccaaacgtctaagccacgcagtgaacgatggctttgcaggaaccatcgctatggcctctcagagcgcccagaacgcaaaaagagcgcgtgagctacagaagactatggatgcgcagcagaaacgcctacagagcgttacagagccttttaaggggctttccagagagcagatgaccgaaatcctgatgatggctcagcggtttaagcagcaaaaccaggaaaaggaaaaacagcagcgtattgaacgtgaaaaacagcgacagacgcgatcgcgtggcatgggtggtatggagcgttag

SEQ ID NO: 106694 - DNA, 441 bp, Enterobacter aerogenes
atgagcaaggacacccagagaatcacccagattaacgatcaaggtgagattgttggcggcttcgtcgcggtaatcagacccaagcaaaaatcgtcatttcagaggcatttcactatgaaccaagacgcattaaagatcctcgctaaggagctaacgggcgagcaatttaaagttctaatgctcatgctcgctgatctggattacgagaatttcatccaaattgcacaggctgatatagcggatgcattggagatgcaaaagacccacgtaagccgcgctgttcgtgctcttcttgatgtaggcgtgatctttgaaggtccgaaagtaggtagatccaaaacctatcggttgaacgagcaattcggctggaaaggaacagtaagcaatcacaaaaaagcccttaaaaacggcctcagcgttatacagggcggcagaacctga

SEQ ID NO: 106695 - DNA, 1299 bp, Enterobacter aerogenes
  misc_feature (1258)..(1267): n is a, c, g, or t
atgagtaaaatatcctatattttcaaggagcgctctatcgcaaatattatctggcttatgtcagatagtattttgcggctcggcatggggtttataataaatgtatggctagccagatatttgggacctgctcagtttggctcattcaactatgcattcgctatgatctcaatttattcagctgttgcttctttaggaatgaatggtgttgttgtccgtgagttagtcaaaggggatattgacaatattaccataatgggaacgtcctttgttctccaggtcattggtagcctttcagcttcagtcttggtcatttttactgtaatggcattaaggcctggcgaatcaatgctaatgctgagtgtcatatgcatgttaccttcagtgatatttcgttcttctgatattattaaatattggtttgaatcgacagtttcatcaaagtatactgtaatttcacaaaacacagcattcttcatcagtgcatttttgaagattttgatcatatcctgtggtggaagttactatcttatcgcgataacagtttcgattgaggctttcttggcatcagtgatgttatttttcttttataggaaaaaaaacaagcaattccaatggcgatttgattatacagaagccaagaggctactaaatattagctggccgcttgtgctttctggggtggcactgatgctatatatgcgtatagatcagataatgataggtaatattattggcgatgccgctgttggtatttattctgttgcagtgaaaatggtcgaggtatggtattttattccagttgcgatagtttcttcattatttccgaaaataattaaagttcgcgagcagagtatagagtcttatgataaacgtttgcaattcctttatgatctattagttattataggtgtcacgcttgcactttccatcacatttgtttctgattacatcatttctctactttatgaccatcactatttcgcagcatctaaaattataaaattatatgcatgggttagtattttttatttcctaagctcagctagtggtagatggtacattaatgaaggattgcaaaaatatgctttaaccaggaatttagcggggctggccataggtattattcttaattatatattcattcctaaatatggtgcagaaggttctgtttatgccacgttgatagcatttggatgtgctggttatttttttgatgcgttaagcacaagaaccagatatgcttttattcaaaagnnnnnnnnnnggaaatattcgcaggttaataagatattataa

SEQ ID NO: 106696 - DNA, 426 bp, Enterobacter aerogenes
atgaaagaactcgaaaatccaagaattgaatccaaagttaactcctttgttgaaaaaggaaatgagttgcatgatgacaaaaaatatgcacaggcgttagaacaatatgaaaaagcctggaatattttgcctgaaccaaaaccagaatggcaagttgctaactggatttccgcaaatatattcagcgcttattttgaccttggtgattacaatgaggcaaaaaaatggggcgaaatgacgttgcaaacgagagggtcggagatagatacagcgccatcgatcgatctgggtatggtttgttatgagctagaacaatttgatgaagcttacaaatattttaacgatgcttatagctatggaaaagagagagcatttaaaggcagacctaagaagtaccttgagttttttttaaataaaagggcatag

SEQ ID NO: 106697 - DNA, 1023 bp, Enterobacter aerogenes
atgccagaaactcagcaagagattctgcgattaagcagagatgttgaatctggtcgggctgtttatatgcaattattaaaccgccaacaagaacttaatatcgctaaatcgagtgctattgggaatgtgcgcataattgatgatgctgtcactcaaccaatcccggttaaaccaaaaaaggtactgatagtattggccggtatgatttttggtgccatgctttcgattggtattgtccttcttcgagtatttttacgtagaggaatcgaaagccctgagcagttggaagaaattggcgtaaatgtttatgcaagcattccagtatctgaggaatatgctaaaagaacgaataaaataaagagcagtcgtaggaaaaataatgcagaaattaatcaagggctattagcaattgataatccagctgatttagcaatcgaggcaatacgcggcttaagaacaagtctgcattttgcaatgatggagtcaagaaataatgtgttaatgatttctggcgccagtcctaatgcaggtaaaacattcgtcagttctaacttagcatcgattatttcacagacgggtaaaaaagtattatttatcgacactgacatgcgtaaaggctatacccataagctttttaatatgggtaatgaaaccgggctttcggattatttgtcgggtaaaattgacttaactaaagcggttagaaacgtatcaatcgccgggttcgattatatatctagaggtatggtgccgccaaatccggcagagttattgatgcataaacgatttgatgagctaatcagttgggcaagtagtaactacgatattgttatattagatacaccaccaatattagctgtgactgacgcagcaataattggtaattatgctgggacaactttactgattgcgcgttttgaacttaatactgtaaaagaaattgatgttagtgtaaaacgattcgagcaaagtggtgttgtagttaagggatgcatattaaacctgtctcttatacacatctga

SEQ ID NO: 106698 - DNA, 324 bp, Enterobacter aerogenes
atgggggtagtgaatattgttgaagggtctatccctatagtgatgaatgatatcgttcgcggtattgcagcagcggcaatcggcggtgcttgtggtggtgcaatcaccatggtgtatggtgcggatgcaactgtaccttttggcggggtattgatgctcccaacaatgtcaaatcccatggcaggtattatggcattgatagttaatatattagtaacagcaaccatttatgctgtcatcaaaaaagatgttcctcgcgatgttgttatcaataacgatcaagaagaggaagatatcaacttcgatgatattaagattagttag

SEQ ID NO: 106699 - DNA, 360 bp, Enterobacter aerogenes
atggaaattggattattaacatgggttgctgacaagttacttggtttgtcgaagttaaagcgtgaagataaactggctgcgatatcagggttgacgcctgcggtcgcggagacaatcgtttataacgacaaaataaataaaggctttgagagaagcaaggaaacggaagagaagcttcataaaatgtggtatgaagcttcttctgcggttagtcggtatgacacggaattggctatcgtctgtagagaaaaagctaagtactggcttaattacgatgaatattccgactataaagtggcagagcttaacattaagctcgttagtgtcgctcaaaggttggaagacttaaagctctcataa

SEQ ID NO: 106700 - DNA, 249 bp, Enterobacter aerogenes
atgtataaagataaattgaacttagagtctggatatactcttttggatgatgggacctttaggaaggggcaccttgcaagccatattgttaagaaatacaaaatatttgatgaagagcagaaactaattggtactgcgcgggttactgttattgaagagacaagcagcccatacagagaaaccactcacgttgttaggtgggatcttgatggaaatgtgataatcgatgagaaatttatcgatgactag

SEQ ID NO: 106701 - DNA, 705 bp, Enterobacter aerogenes
atgactgagcgcggaatgatttttaacggtgagatggttcgcgccattctcgacggcaggaagacgcagacgcggcggatcatgaaaattcagccagaacattcagggcttgggttacgccaggtgactgactccaaaaacggtagtgatgacggtaagtatttttggtcatcgtctgatgcgtgcggcctgaaagcgcgctccaaatcgttcacctgtccacttggtgtcgtcggcgatcgcatctgggtgcgtgaaacatttcaggggccgttattcgattacgaacagatggagtcatacctcgaagatagctcgaaattcgaaaagccagaattttgccagtatgccgctgatggcaagccagcaccggaatattacgacgctgacgacaacctgcgtcacggatggcgcccgtcaatccacatgccgcgttgggccagccgtcttctgctggaaattacagacgtgcgggttgagcggttgaacgctatcagcgaagaagatgcgcgagcagaaggcattattgacgggggctgtctgaattgcggggaacctgagccatgtggatgcgccaatccagagcctgatgctaccgatgcttttgcctacctgtggcaatcgatttacgggcaggaaaactggaatgctaatccctgggtttgggttatcgagttcaagcgcgtagaaggcggtgcagcatga

SEQ ID NO: 106702 - DNA, 753 bp, Enterobacter aerogenes
atgcgagtagataatgaagttctgaatgtactgagcgcggcagagtgcaatggaacgcaactcttccttaccggtcagcttgatcgcaacctctacaccagaaccaataaagtgctggaagcggctggaggaaaatggaaccgcaaagccaaagcgcacgtttttgataccgatgcctccgaccgcatcgagcaaattattcttaccggtgatgtcgtagtgccgaaggatgattttgaattctttcctaccccaccagcgatagccagacgagttgttgaccttgcggaaattaccaacgaaatgaaaattcttgagccaagcgcggggagaggtgctcttgtattggaagtaaaagaatgcgctccagatgcgatggtttccatgttcgagctaatgccggacaacaacaaattcttgcgagacttaaatattcatgcctgtggtattggtgaaccgacagactttttagatgttaaaccgttcgatgtttttgaccgtgtagtaatgaaccctccattcagtcgtcaggctgacatcaagcatgttactcacgcactgaaattccttaagcctggcggcctgctggtatctgttatgtcttcatctgtgacgtttcgcagcaacaagctgacaaccgatttccgccagctcatcttggatcgcggcggccacatcgaagaactgcctgaaggtgcatttaaatcatctggaacgatggtgaacaccgtcatcgtggtcattccaggctga

SEQ ID NO: 106703 - DNA, 441 bp, Enterobacter aerogenes
atgaagggccgggaagccgccgctgtcgccgccgccgctaatgctgttggcctgcaatggccagagcatcttcgtttatggcaacgcgataaagaaatctggctgttcccgcaagaactggaagcgttaatcggcagggttcgtttttctcgcattgggattcgtctcgctgaaacacataacaaaggctaccgctggcaacatgaagcggtgatctcactggccacgccagaggctccttttgagctcaccttaacggaagcggaggagtggtaccgtggacgcgatgtgtatcccgaagcgccgccgcatcaggacgatgtcatcgtcactttccagggaatgccattagggctcgctaaacgcatagggtcacgtctgaaaaatagttatccccgcgaactggtgcgcgacggcaaactcttcgccggaaagtcgtga

SEQ ID NO: 106704 - DNA, 237 bp, Enterobacter aerogenes
atgagcactatcgaagaacgcgttaagaaaattatcggcgaacagctgggcgttaagcaggaagaagttaccaacaatgcttccttcgttgaagacctgggcgctgattctcttgacaccgttgagctggtaatggctctggaagaagagtttgatactgagattccggacgaagaagctgagaaaatcaccaccgttcagactgccattgattacatcaacggtcaccaggcgtaa

SEQ ID NO: 106705 - DNA, 1260 bp, Enterobacter aerogenes
atggttgcaccggggttgttgttgactgcaacccatgtacttgatgaactacgggcttcgggaaatcatccgatattcctgacattcttgcctacaggtgcaaggggatggcttgctaaagaaagtcggaacgcaatgcgcgagagtaagtttgaggaaggtgaagcaaacccatcagacctaactttagtgagctgcacgctaaactcggatgcattggctgattacccgcttaacctatggactttaagggttgggttgccactcgttggagagcgtttgtgggcatttggatttaggcatggtcatgttgaagatgatgtagcctccgtgagtccgatggtctcgtctgggctggtaactgccgcgtttcctcaaggacgtggtgagcgaatgcctgcaccatgtatcgaggtagaaatggacactatgggagggatgagcggaggcccggttgttgactcggatgggaacgtcattggtgtggtgtcatcttcatttgatggtggaccatcttacgttacgcttatttgggatgctctaaattatcgaattggagggacggttccagcgctaacgaagtatcaagatgttagtcttttaactgcaaaggcaatggggctttctagaattaaaggcagtattgagcgcaagccttggggggatatcgtcttcacgatgtctgaagatgagatggaattcatgaaattatcatcggatccatcgaccattacaacatccaataaattcctgaaagatgaacaattagaagaattcattgataaatggggagacgatctagagcatgcagcatctgaagctgcaattgaatgtctcgagagcgcatcagactctcctatccaaagatttttaggggcggttggggttcctctgaaatgtattaaaaccatccagaatttttcagctaccgactttgaaggtgttgaggatccggagatatactcaagcgagcaattaaatgatgaaaatatcaagctcggatattattttgagctactgagcgtagtgtgggggatccaggtcttaaaagaaaactatcatgctcacaaaatggacttcgatagccacttttataatcaagagttaaaagatgaaatggtacatatggaggctttccaacggtgcctttttaaagctgatgtgattttcaacccagaaaaagaagagtttactgatataaaaatcgtctggatgggtattcggataccaaacaagagagtacaaaataatactgaatga

SEQ ID NO: 106706 - DNA, 1179 bp, Enterobacter aerogenes
gtgagctggccgatggtaaaattaagcgatgtttgtgaaataaatatcggaaaaacccccagcaggagtaatagcagatattggggggaaggtcatagatggttatctatagctgatatgaatcaaggtaaatggatctcgaatacaaaagagcagattaccgatctcgctatccaggagtctggaataaaaaaaattccagcaaatacagtattatttagttttaaattatctattgggaaagtttgtttatctgagacggatatttatacaaatgaagcaattgcggcccttccaataaaaaacaaaaataaattagatactatctatctaagccatgtcatgaaatcattagcgttttcagatatgacagataatgctgtgatgggggccactcttaacaaaaagaaacttgctgaggttcgtattccccttccatcgattgaagaacaaaaacgtattgctgctatcctcgacaaagccgatggtatacgccaaaagtgcgagcaagccattaagctggcggataattttttacgtactacctttttggatatatttggcgatcccgttaaaaacccgaagaaatggggtgttacctctttattagaatatggttcatttaaaaatgggatgaatttctcgaagggtgaatctggaacgatgcttaaatgtctgggagtcggtgatttcaaatcactagcaacgattacctgtatggacaatatcggtgaaattgaattaaacacgcctccttccgctgagtatcttttgaaagatggtgatattgtctttgttcggtctaatggcaataaagccttagtcgggagatgtcttactatttatccggggaaagaggaagtcacatttagtggattttgtattcgatacaggatagaaaaacctgcaatcaccccagaatatcttaactttctcttccgtacaccttcaatgaaacagcaaatgttaagtggggggcaaggggcgaatattcaaaatattagccaaggtaccttatctgtactcaggatacctgtacctccaatggataaacaacttgcttttgccagattggttgatttccatgcatctattgttaaaaaacaatatgataaaacggctgaaaccgaaaaactcttcaatgccttgactggcggttttttcacatttaatgaatga

SEQ ID NO: 106707 - DNA, 549 bp, Enterobacter aerogenes
atgggtacatatatatcagataaaacagaaacatgttttgatgaatattctttaatcgaaaaagtcgaggatggctatgagattagtgtgtactcatttaagcttcatgcaggaaatccttaccaaccacatatatcagaaagttatagtggtgatatttttattagctatttgtactatggaaatgattcttactacgagcgtaggcgtcaggagtacagaaaatatttatcattaaaagaaatccatcttgctattctaacgatatttccagatgagcgaagaatcgcgataggtataaaaaaagaaagctatagcatcgttaaaatatcttatgtggcagcggatgaagtatatcttcttgatattgcaaataaagaaacgttattgttagataatatattgtgccttcaaaatattatttccaagcatgaaagtaatattaataaattggaaggtgaattagcaagtggtaaaaaagaattccaaagcatgaagttagatgtaaaagaaaaatgtaaatctattcttgatattgttgatcagtaa

SEQ ID NO: 106708 - DNA, 966 bp, Enterobacter aerogenes
atgcctttagatttaagtaacactttagttattggcatcagcgcaactgcgcttttcgacatgagcgaatccgatcgtatgtttcgcgaaacctacgcaaccgatcctgataacgccattgaaaagtatcgagcctacatgcttgagcacgaaaatcagcctttacaaccaggaacaggttatcctttagtcaaagcgcttctgggcctcaaccagtaccgccagccggatgataaatcaccgctggttgaggtcgtcgtaatgtcgcgtaacagtcctgatacaggtatccgcgttttgaataccattcgccatgacaaactcgatattacacgttcagcttttaccgcaggcgaaaccgttgccgattaccttgatgcctttgatgtggatctgtttttaacgaccaacgttgaagatgcgcaaaaggttattgattcccggttttgcgccgcagctatattgaaggatccgccttcagatgcctccgatatcccggaagggcaagtgcgcattgcatttgacggcgacgcggtacttttttccgatcaaagcgagttggtctataaaacccaaggaatggccgcttttcacgctctggaggatgcacagcaggatattcctatggaagaagggccatatgccactctgctaaaaaaaatagctaagcttcaggaacgactgccaacccgcgttgagtattcccccgtccgtattgcattggtgacggccagaaacagcccttcggaaatgcgcgtcattaaaacgctgagaagctggggggtatatgtcgatgaagcattttttctgggcggtgtagagaaaacaaaagtcctgaaggcgtttaagccacacattttctttgacgatcaggatgtgcatttgatcgcagcggcaaaggttgtcccttcaggaaaagtcccttatgccagtaactccgaacttgcagaacgtgaagcatcgtga

SEQ ID NO: 106709 - DNA, 144 bp, Enterobacter aerogenes
atgacgataagggaggaatttacgcgaataatacagttggttttggcgattgaaacagacagatccgagagcgaagggatcaaaacagcgcagctacagctggtaaaaagcctgtgccacgagatgggaggtgggcatgggtga

SEQ ID NO: 106710 - DNA, 1602 bp, Enterobacter aerogenes
atgggtgatttgccaaaggggtgggcacaagttgcattcaaagatgttgtggaggtgaatccgcgcaggtcttttgacttggaacctgatgacatggtgaccttcgttcctatggcagctgtcagcgaaatttcgggagccattgttgatgatgtttcgcgcccgctacgtgacgtcaccaaagggtttacgcaattttctgaaggggatgtcatcttcgcgaagattacgccatcgatggaaaatggaaaatctgctatcgccacagggcttgtaaacggcattggtttcggttcaaccgagttccacgtattgcgcagctatggtggagttattccagagtatatctggtatttcatccgacaaaaatcatttcgtgacgacgctcgaaaagtaatgacaggtgcggttggccaacagcgtgtgcctgcagcgtatttgaaagaacatcttcttccgctgccgccccttactgaacaaaaacggatcgttgccaaacttgacaatctgacctcccgtacagccaacgcccgcactgcgattaatcatatttcgccgctgattgagaaatataagcaggccatcctgcgcaaagcgttcagcggtgatttgaccgcggggtggaggagttgtaacggcgtatcaatgtccagaacagttcgtcttggcgatgttgtgtccgacattcggtatggcacagcaaagaaaagctatcctgaaaagcgcggaaccgcagttcttaggattcctaatgtgtcagacgggcacataaatctggttgatctcaaatacacaaattttgacgatcaagaactgaggaagctcgcattacaattaggcgatattcttgttgtgcgttcaaatggaagcccggaccttgtaggacgggttgcaatggtcacagaggcagaagcaggtctggcttatgccggttatttgattcgtctacgaccaaatataaataagattaagccagaatatctaaagtatattctcggaagtccgcagattaggaatacaataaaggcaattattcgctcctccaatgggattcataatatcaacagcggtgaactgtctagtcttgaatttccgtgcccagaactcgacgaacaaagcgaaatcgtccgacgtatcgaaactgacttcgtttggctgaaccgagtatccaacgagcacgctgcggcatcagatctgctctccgcacttgatccgtctcttcttcaggtagccttccaaggagagcttgtaccgcaaaatccgcatgatgaacccgcatccatcctgctcgaaaaggttaaggctgaaagagatacgttacagcaaaaaacaaaatcagggcgcgagacggcggcgcgtccccaaaagccaacgaagagtggggttaggatgacaaatttgatcgaagttctaaaatccagtgaaaattgggtttccgccagcaaggcggcacaagcacttggaattggaaacggcgcgacctctgatgcggttgaggagttctacaacgaactacgggcgcaccttcaaggtggtctcattgaggtcgagcgccggggagatgaagactggttgcgcctgatgccaataagtggggtgtga

SEQ ID NO: 106711 - DNA, 771 bp, Enterobacter aerogenes
atgagccaatggcaacatcaaccggatatcgccgccagccgccgccagcatcaggcgctgtataagactcaagggcgatatctgcgctacgtcgccctgctggcgctggcgagcgtactttattacgtctggttctttatgcagttcggtatcagcagcgaacaactggcgactggtctacagcagatggggcgctatctgctgcggatgtttgtctggcacgacttctggaactggccgtttgcctattacttcacgcaaatcgccattacgcttgccatcgtcttcgccgggacgattaccgcgacggtcatcgcgctgttgctgtcattcctggcggcgcgcaatattatgcgcggcgtgattcccggcattatcgccgtgttgatgcgccgcttgtttgacatgctgcgcggtatcgatatggctatctggggtctgattttcgtgcgcgccgtagggctcgggccgctggcgggggtactggcgattattatgcaggataccggcctgctgggccgcctgtatgctgaaggccacgaggcggtagaccgttcgccgggccgcggcctcaccgccgtcggcgctaatggtctgcagaaacaccgcttcggcattttcacccagtcgttcccgactttcctggcgctgagtttatatcagattgaatccaacacccgttccgccgcggtgttaggttttgtcggcgcgggggggggattggcctcatttacgcggaaaatatgcgtttgtggaactgggatgtggtga

SEQ ID NO: 106712 - DNA, 216 bp, Enterobacter aerogenes
atgtttcattttttccagaaggttttctttgtaaaggttgcatgcctcaaggagcgtaaatacaaatatcaaatgttcagctgtaatagtgttttggaaagcaatattataaagttctggatcatcccaaatttttgtttttttgtggtagctatctttaggatttccatgccaagataccaatgcttgtgcagctgtatgagcatctatacgtaa

SEQ ID NO: 106713 - DNA, 474 bp, Enterobacter aerogenes
atgcgactgccttacgtaatatttacattagctatgctggcttctgtatcaacagcacaggctattcccaatatgtggacgagtggttttgggatgggcgtgaccgaatatatcattaccagcccggagaaggtggtgtttaatctgaactgtactggcaatccggatgcgcagaatattctgcaacacggtgttgatctcaccctgcctgatggaacatcagtaagttctcatgacgacgggacggaaataacggtcgtcatggataacagtcagtatccgttaccttcttccctcggctggcgaaacggtgacaatgcctgggtgtcatttattgacgcgctgggtcagtcgtctaatttcgatgtttacgtcaacaataacaaagtcggctcctttagtccgggtctgaagaatacgcaaaaagagctgtctgacctcagtgaatgtcggaccacacactacagcgattaa

SEQ ID NO: 106714 - DNA, 453 bp, Enterobacter aerogenes
atgaaaaaattgaaattgttttctttactgccagtcatgttgttccccctgcttatcgcaggtaattctcacgcagcacgtccttatagcgggttcctgcctgcggcagtgaataataagagtgggaatatattctggtgtgatgcccaccgacaggtcagaaaactgtgcacagcgacggaagtggattcaatgggatggtttattgttgttcgctcgaaaccttccagagattgtccgggtggcatatgggggtggatcactcccagtaaagacgatgtggcaacaggctataccattacgcctggtaaagaattcaatctcaccatgaaggatatgtgcagtccggatatgaaagtaacgttccgcacgaataaaaaggaccctcgttatgacgatctcgtcgggatttatgccggaaaagaagcgtttcgctacaaacaaataaaataa

SEQ ID NO: 106715 - DNA, 723 bp, Enterobacter aerogenes
atgacgcttcaggagcggcgacatgaccggcttgccgtcaggttgtcgttgattatcagccgcctggtgtccggtgaaactctgttcattcgcaaactggcaactgaattcggggtgtcagagcgcacgctgcgtcgtgactttcgggaacgtctgatgtatctcgacctggattactaccaaggacaatgcagtctgcgttcagatattcacagtacgcggcaggaaatagatattctgacctttgctcaccgcacggggctggccggggttttcccgggctttgaccggcgactggtcagcagcctgctggactgtgatgatcgaccctgtctggtatggcatcaggacagacctcatcccccggcaggaaaactctgcttctacaggctggtcagagctatttcgggatgtcagcgcatcaccattctgactgaaggggatcgtcatgaggccgttgcaccttaccggctaatcgctctggacggttactggtatctggtcgctgaacataacaggcaattacgtgtcttccggctggatgagattcatctggtaaggccatcccgggaaacatttattcgcagtgagcttctctatcagctgtcggaagataaacattttatctctgccttacctcatttccgttttattcagcagtcgctgaattcattttctccatcagaaagtcgggggcaatccggacacactgataagagatag

SEQ ID NO: 106716 - DNA, 876 bp, Enterobacter aerogenes
atgaataaacctgatggccttcatgcccttgaacaaccgctcgcgtcgcttccgtacatgcttcgccagcttattcttgaacgtatccagaacctgacccactacgagccggtgattggcatcatgggcaaaagtggtgcaggtaaatcctctctctgcaacgaacttttccggggcgaggtgtccccggtgagtgacgtgaacgcctgtactcgcgacgtactgcgtttccggttgcgcagcggtcgtcacagtctggtgattgttgatttaccgggggtaggtgaaaacgggcgacgggatcatgaataccgggccctgtaccgtcgtatgctgccggagctggacctggtgctgtgggtcattaaggccgatgatcgggcactgatcgtggacgagcagttctggcacgaagtgatgcaatcttacaggcaaaaggtgctgtttgtgattaaccaggccgacaaaatcgaaccctgtcatgaatgggataccctcaccagcaaaccttcgccgcaccaacagggaaatcttaaagcgaagcaggctgcgattatggcgatgttcaaaccgcatcatccggtctgtgtggtgtccgccagcactggatggggcattgaggagatggtggcagccatgatgcgctgtctgcctgaccgcgccaccagcccggtagtgacacaactgcacgggagactctgcacagagccggtaaagtcgcaggcccgtgacagtttcggtgaagctgtgtgccgggttttcgattccgcagaatcatcttcgttcctgtctgcatcgctgaaaacggtgattcgtagcgtgcgtgatgcggtggtatcggtcgcacgggccgtctgggactggatattcttctga

SEQ ID NO: 106717 - DNA, 312 bp, Enterobacter aerogenes
atgcaacaaattgatttttacatgattgatgcctttaccaccaccacgtttgatggcaatgcggctgcggtatgtccacttaccgaatggttgcctgatgagacattattaaaatgtcgcagcaacataaccagtctgaaacagcattttttgtcgcaaatgataatggctttgagttgcgttggtttaccactctgggggaaattaacttatgcgggcatgccacgcttgctgctgcacacgtcatatttgaacatcttgactactcagacacaacaatccattttgctactcgatttgtcggcccattaa

SEQ ID NO: 106718 - DNA, 486 bp, Enterobacter aerogenes
atggtgacacgcagcggtgaatggatgacgcttgattttccctcctgggaaactgagccagtcataccacccgccttattgctggaagcgcttggcatcacagagtgcaaagaagtgcgtatggcacgcgactacatggtcgtgatggagaatcaacagcaggtagaagctgtacgcccgaatatcaatgcaatgctccccctgggaaaaatggtgtgtataaccgctgcgggcgaaggggaatatgattttgtcagccgttttttctgccctggggatgctgtagcagaagaccctgttacaggttcaacgcatagtatgctcattccttattggtctgaaaaattgaagaaaacacaaatgctggcgcatcagggagcggagcgtggcggggatttacgctgtcagctagagggcgatcgcgttttaatcagcggacaagcagcaacttatctgattggcaaagtactgttgcgccaggaatag

SEQ ID NO: 106719 - DNA, 279 bp, Enterobacter aerogenes
atgaaacgaagaacgcgtattaactacacgccagatcagaaagcgattatctgggacagatataagcaaggtgattccctgcaagatatcgccagaatgttcgacagatatcattcttctattatgcccactatccaccagactggtggatatcatccccctgtccgtaagcgacatccgttagctctttcactcgatgaaagagaggaaatatccagagcgctggcagaaaaaatcaccccagagcgttttaaccaatgtgttacatccatcggttaa

SEQ ID NO: 106720 - DNA, 891 bp, Enterobacter aerogenes
atgattgaatacctaaatattttcatacaggttgttgagcagggtagcttcacaaaggctgcagatgtactgcagatccatcgccccaccgtgagcaaagcgatacagcagatagagcatgatctgggtgtaaaactcattcaccgcacaaccagaaagctgagtgttactgctgaaggggatgagttctatcatcatgccaggcatgttctggccgaagttaatgacatgatggccagtttttcaccgactcttccaccgcgaggtcgcctgagacttgatgtgcccctggcgctggcgcattcaatattgatccctaatctcaggcattttcaggcactttatccggatattgaagttgtgctggtttcatcggataaaaaaacggatttgattacggaaggtgtagattgccttgtccgcctgggcgctcttcaggattcaagttttatatccagacgtcttggtgacatccggatgataacctgtgcagccccgtcttacctgcagcggcatgagcggccagaaacacttgccgatctggatgagcatcaggctattaacttttttagcgaccacagtcgtgacgtcatggaatggaagtttatcgaagacgggagcattgtttcgctacgtcctgcgggcagcctgctggttgataattccgatattctgctttcctgtgctctggctggtctgggcattatccaggccacctgtgatgccgttgctccgcatattgcttccggcgctcttgaagaaattctgccgcaatacccgtcggtgtcaaagcccgtgtcagtgatgtatccggacaggcgctatctttctccaaaagtgcgtgtctttatcgactggttcagtgatttgctggccacgcagatccagtaa

SEQ ID NO: 106721 - DNA, 1173 bp, Enterobacter aerogenes
atgagtataggaaaatcctcccaaccaaagtccagcgcgcctggccaatatttgggatttgcgcttcaacctgttcgcctctgctaccatcttctcaactgtcctgatgatgcttgtgtatcgctcgagtatcttgacgacgtagccgtacattattctgatggccggattatattggagcagactaaaagtgctttaacacataaccctttatcagactggtcggaggatttctggaagacaatttctaactggatcgacatagtgacagtaaatgatatatgtcttagcaaagtaagttttcgctactatgttacacctgcaaaaaatataggtacaatttgttcgctatttcataattccaaaaatgatgacgatattaaaaaactgatgttttttttgcagagtgaactgaaaaaattaaaatcagaacctgcatgtatgaaatatatttctcggtttcttaatgctacacaagaagaacaaaaagcaataattgcaaatttagttatagagaatgacagaatagatccacttgattcaattcgtaagtgtttaaaacctacaattgcagaagaactaattgagctaacttgccggtatgcgataggaatggcaaaagaaaaagcggatggacttatccgtaataaacaaaatgcagttatatctgtgcaggagtttagaagggtgtttataaattttgtacagaaaaataatattcctggataccttcagccactcagtacaaaaattaataattctgatgctgaagcattgctcaaacgggcccccacgtttataaaacaactaaaactgatagagcttcctcaagatcgtcagcttagggctgtcagtgacctattaaagacggatgctaacataaccatgtgggccgaaaatggactgatatttgaacaaaatatttctgaatggcataattcattgttaagacagtacgatgcaacatgcgatgatattgaggttttccactctgacaagcctgaaataagcagaggtaaagttatttatggccgttgttccgctacaaaagtatctttcgataatcagatagtccctgaatattttactaacggaggtttcaatcttctggctgacgatctccgtctaggatggcatccgaattatatagagcttctcgataaggatgaataa

SEQ ID NO: 106722 - DNA, 510 bp, Enterobacter aerogenes
atgagaatagaactgagaaagcctgaactgaatgatgcagctttagtacaaaatagtgctatgggagctttttttttatggcttttttgccgatattatcaacattacaagaaggagtgtcccactcttactatcgcttttctagttttaccgcttattttacataaatcaactgttaaactcatttgtagtacacaaaaggcttcaggtatacatctctttgcagggaaaatacaaaaaaagagagaagcgatatttacaattcatgaaagaactcttcaattacgctcacttacatttgaatctttaagtattgcagaggttgctggattattagaaattgacactaaaacagcaacgttaatagttagatgtgatgattcagagcttgatttaccattgctatcggatgatttgaaaaaaattcatgcatgctgtgataaattagcgtattggttcgctgaagtttcggaacaacaaattgcaaaaacattgatggtggatttctga

SEQ ID NO: 106723 - DNA, 1965 bp, Enterobacter aerogenes
atgtattttcaaataagaaaattgatactttggcctaaaacaaatcatcaaccacggattgtagaatttgaacccggaaaagtaaacattatcagtggtgcatcaaaaacaggtaagtcggctgttatccctattatcgattattgtctatgttctgataaatgtgcaattccagtaggcgtcattcgagaatcatgttcgtggtttggtgtattgattgatactgctgaaggaccaaaattgctggcacgtaaagaacctggtaatcagcagggaactagtgaaatgtatatagaagaaggtgatggaataattatacctgcattagctcctcagaaaaatagtaccataactcatgtgaaaggagttttggatcgtttggcaggtttatcagatttagcatttgaaccaactggacatgataattttcgcagccgtccaagtttccgtgacttaatggcatttatttttcagccacaaaacataatagcaaatccagatgttttattctttaaagcagatactacagagcatagagaaaagcttaagactatatttccgtatgtattgggggctattagccccttagttcttcaggcaagacatgagttagatagagttactcgtcaattacgtcgtaaagaaacagaacttaaaacacgtaaagcctcaggagatgcctggcaacgagaaagtcggatttggttgtcacttgctattgaatacgggcttttacccgtagaacaggctattcctgacgagtggcctgcaactttaaagcttttgaagtcaatccttaaaaaggatattaaagtttctcaaccttctttagattcaacacaatacgttatcaatgaattaaagaaattgagtgcaagagaagtaaataatattacacaaattaataagattcgaagccaacttgtagagcttgagaggcttaatgatagtagtgatttatataaaaaagggcttgaagtaaaaagagagcgtcttagtctatctacatggatccgtgaacaatgtactcgcgctgaaacaattgagccgttaaatgaaaaacgaagctacgaaaaaattaggcagctttgtctcgcacttgaaggtattgaactgcaattgcgttcttatccacaagtcaaccattctttggataaggagactttacatcttcgttcccaactacatgaatttacgaaagagttagcgtcaataaagcaagaaatacgagcgttagagaaacagtctgaagaagtaagaaaatacaacacgcaaggagaattgatctcccgttttattggtagactggaggaagcattacgcttgtatcaaagtacagatgtgttaactaatttgataaatgaaattaaagaattacagttagagcaaaataggttatcgaaattagtttcagagaaagaaattacacgcaaactcgatatagcgcttgataaaattcaacgagcaacagggaaattacttccttatttagatggagagtggccagattcgccagttaggttaattattaatgatttaactgtaaaagttagtagaggagagcgcgatgattatctctgggaaactggtagtggagcaaactggttagcttaccatattgctacaacactagctttgcaatggatatttacgcgaaaccctcagcatccagtaccaagtttgctcatttatgatcagccaagtcaagtatattttcctgtaaggcaagcgggatcttcaggtagtgaaaatagtgagcctgactggcagagtgaggatattattgcagtccgtaaagtttttgaggttttgaataaatttatagcgtcaaccaaaggtttattccagtttattgtattggatcacgctgatgaagaggtgtggaatagtctggataacgtccatttagtggaggagtggcgtggtgcggcattgattccatatgattggattgcttgtgattaa

SEQ ID NO: 106724 - DNA, 951 bp, Enterobacter aerogenes
atgaatcagcttgaacaactaaagcagcgaaccacaattgttgccgacagcggggatattgacagcattatggcttaccagcctgaagatgcgaccaccaacccttcgcttatttataaagcggcgcagcttccgcaataccagaaactggtgaaagatgccgtcgcggcggtgaagtcccgccagaatggaaagccggtacagcctgcggatattgccgattacctggcggtgagtatcggggtgctgatcctgaaaaacgttccgggtcgtatttcaactgaagtggatgctcgcctctcgtttgatacccaggccagtattgctaaagcgcgggaaattattgcactgtatgaagagaaaggtattggtaaagatcgggttttgattaagcttgctgccacctggcaagggatccgtgccgcagaaacgctggaaaaagagggtatccagtgtaacctcacgctactgttctcctttgcccaggccagagcctgtgccgatgccaatgttttcctgatttccccgtttgtgggccgtatctacgactggtacaagaaaaacaaccctgataccaccttcaccgtcgagaacgatccgggtgtcgaatcagtgcagaagatctatcgcttttataaaatgcacggctaccgcaccgtggtgatgggggccagtttccgtacgccggaacaggtgctggcgcttaacggatgcgatcgtctgaccgtttccccggcgttgctggcgcagttgcagcaaactcagggggcggtaccaatgccgctgacgtatgaaggtgaaatccaggcgaagcccacagcgatgaccgaggctgagttctactgggctcataatcaggatgcgatggcagtggaaaagctcgccgaaggtattcgcctgtttgccgtggaccagaacagtcttgaggcactgctgagtcaatatctgtaa

SEQ ID NO: 106725 - DNA, 1254 bp, Enterobacter aerogenes
atgaaaaacacaatgaaacagtacgtcgattatattgttaacggtggaaaatcaacaatgctgggaattggccccatgtctccggcattaattcaggcctgttttgagctgggtaaagaaaaagacctgccgctgatgtttattgccagccgcaaccaggttgatgcagatgagtttggcgcgggttacgttaacaactgggatcaatttcgctttgccgccgacctgaaagcgatggcggaaaaagtcggcttcgacggtgattacttcctctgtcgtgaccatggtggcccatggcagcgtgataaagaacgtaaagaccatattccggaagccgaagcgatggcgctagcgcgccgctcttatcaggtagatatggacgccggtttcgacctgttgcatatcgacccgacaaaagacccgtatgtcgtcggtaaagtcattgatatcgaactggtgctgagtcgtaccgttgagctgatccgcttctgcgaagagtaccgtaaggcaaataacctgaaggagttcttctatgaagtcggaactgaagagaccaatggcggcctgaccgacgtcagcgcctatgaagggtttattattgagctgaataagcgtcttgctgccgaatcgctaccgcagccgctgtttatcgttggtcagaccggtaccctgacccgcctgaccaaaaacgttggccattttaacgataagcagtccgcagagctttcggctatcagcacccgtcacggcgtcggtctgaaagagcataatggtgactatcttccggatgagatcctgttgaaacatccaggtctgggcatcacggcaatgaacgtcgccccagcctacggcaccattgaaacccgcgcttatctgaagctggcggaagtcgagaaagatctggcagcgaaaggctttatcaagtcagcatctgatttaaaaaccgtcctgacccgcgagtgcgtgctgagccacaaatgggaaaaatggatgaccgatgagcacaaaaataagtccgaggaacagatctttaacgagccggaattgttgaaagagattctcgaactcagcggccactacaactacgaaaaaccagcggtagtcaaagagatgcagaccatgtttgctaatctgaagtcgtttggtgtcgaacccgagcgttatgtggttaataaaattaaagatatgatccagaacgaagcagagtgcttcaatatgccaggcctgaccacccgcgtcgcgcaggcaaaataa

SEQ ID NO: 106726 - DNA, 1104 bp, Enterobacter aerogenes
atgtcggaaaaaatgaaagtcatcaaggatgatttagttaaagcattcagtaccggggtgtcatatatgatgccggtggtggtggtcggcggtatctgcctggcactatccctgattggtggtgagccggtcgcgggtaaaggcatggtggtgaccaacccattcttattaaacctcggcgctatcggcagcgcgggcctcggaatgatgatcccggtgctggcggcttatatctcctactctatcgccggtaaaccggggctgactccgggtttaatcaccggttttatggccagcacgccgctgggcgtagaccacgtggtaaccggttttctgggggcgatgctgctcggtattctcagcggctacgtggctaaatgggtaaaaggctggaaagtcggtaaggtgctgatgccggttatgccgatcatgattattcctatcgtctcaagcgtcatcgtcggcatgctctatctgtatgtactgattggacccatcggttttgccatgaaatggctggtttccatgctctcccatatgcagggaagcagtggactggtacttggtctgattgtcggggccatggcggcctttgatatgggtggcccggtaaataaaaccgcaacggcatttactctcgcattaatggctgaaggtatttatggtccgaacggcgcttaccgtgttgcctgcgctattccgccactgggcattgccctctctacttttatttcaccacgtaaatgggctgaagatgaaagacgaatgggaacctctgctgcctttatggggttaattggcattaccgagggcgccattcctttcgccgttaaaaacctgaagaccgttctgccatcaataattatcggcagcgctgtcggtgctggcctggcaatggttcacggcgttgaatcaatggttccacacggcgggttaattgctatcgcaggcgtcaataaagcacctgtatggtatgccatcgatatggttatcggcgttattgtcaccgcaatattcctatatattctgcgccccaacataagcgagccggtaaaaaaagagtcggttaaaaaaacaatcacttctgatatgaataaagtctga

SEQ ID NO: 106727 - DNA, 321 bp, Enterobacter aerogenes
atgaagattgtcggagtcgcagcatgcattaccggtgtcgcccacacctatatggcacaggaagctatcgagcaggagtgcaaaaaaagaggttatgacgtcaaggtcgaaactcagggcggcatgggaattgaaaatgaattaagcgaagatgagattgccgaagcggacgtggttattctggcgattgctattggtatagaaggcgtcgagcgttttgaagaaaaagaagacgccggactggttatttcgctgaacccggcagaagtggttcgcgatccagcagcgattattgaccgggctgaaaaactggtgcaataa

SEQ ID NO: 106728 - DNA, 2511 bp, Enterobacter aerogenes
atgtcacagataattacgtatcaatgtgagctgaaggatggtattcacgccagaccggcgggacatatcgaacgattgtgtaatacctttcaatctgaggtgtgctggaataatattcgcagcggcattcagggtaatggtaaaagcgctctctcgattgtcgccaccgataccttactcaacgacgcctgtgaaattaccatcagcggtaaagatgctgcaaacgcggctcagcagctgagtgcgctgcttaaaaaactgccctccttcgaggttagccatgcagatgaagccgcagtgcctgcgggctatctcccgcgttcgctgcgggagactcagctcagttttattcagggttcacgcatcagcggcggtgttgccattgccaaacccgttcgtattcagagtctgtctctggacgaaatgctggcgcgtaacccgggcggtgagtattccacggagcatcagcagcgtatttttctggcgggtttagaggcgcttaagcaagagaagcaggctgcgctggaaattaaaaaaggcgttgaacacgatattttacaggcgcatttttccattatcaccgatgcgacctttcaaagccatatctcctcggcgatttccggtggtgacaatacctgggatgcggtgattaaagctgcaatggaattctgtgaaattcttactcgctcatcaagcaaatacattaaagagcggaccctggatgttctcgatattaccggacaattactttctgcgatctatggcccgggtatattaccgcagaacagtcttgaattaacgcaaccatcgattattctggccaacagtctgacaccaagccagtttctcgggatcaataaagagtttcttgccgggatggtattatccgccacgggtaaaacgtcgcacaccgctatccttgcacgttcgctcggtatcccgactctgacagatattgatttttcgaccctacagctgaatgcagacatggacattattatcgatggcaatccgggtattttaattatcgcaccggatgagaaagttctgcgctattaccagaatgaaattgccgttcagcagagtatgcagcagcaaatgctggctaacgtctatcaggcagcaaccaccagcgatcatcatagcgttgagatagccgccaatattgccagcctggcggaagccgaggcagccttcagtaacggcgctgaaggcatcggactatttcgtaccgaaatgtcattcatggaccgcgaatccgcaccggactaccacgaactggctgagctctacagccaggtgatacaggttgcacaagggaagccggttatcttccgcaccttcgacattggcggtgataagcctgtcgactatatgagcatcggcgaagaagaaaacccgtttctcggcttccgggcggtgcgaacttatccgcgttatcgcgaccttttcgccatgcagctcaaggctatcctcagcgcctcggcttttggcgatgccaaaatcatgatcccgatgatcgccaacgttgatgaagttatctggtgccgtgaagtcctcgaagaggtcaaaagtacgatgcgtgatgaagggctggcattcaacgacagcatctcgctcggcgtgatgctggagatcccctccgttatcttcgcgattagtgaaatagcggaatacgcggatttcttcagcgtgggcagcaacgacctgacgcagtacttttttgccgccgaccgtggaaatacgcaggttgaggcggtatacgataactatgctccggcattcctgcgcgccatgcagtatgccgccgccgaagtccaccgcgcgggcaagtggataggtatctgcggagagctgggtgccagcaaagattttctgccgctgttcgttggcatgggctttgacgaactcagcatgagtggcacctctattccgggtgtaaaacatgcgctgcgggagctgagttttgccaaatgccaggggctggtacaggatattgtggcgttaaaacgttccgctgatgtcaaagtcgcgctgagttcaccggacgtaaaagcggtcagcaaaatgccgatcctcgctccagagtttattctctgcggactacaggccagcgataaaaacgaagttatcaaaaagatgaccgacaatctgtggctgcaccatcgcaccgataatagggatcaattaaccgatgatatctgggcccgcgaagactcattctccaccgccgtgggctatggcttcgccattccgcacaccaagtcagaccatattcactactccaccatcagtatggcaacccttgcgtcgcccattatgtggggcgatcaggaagtcgaaaccgtattcatgctgacggtgagtaaatccgccgaccctaatgagcatatgaaatatttctccacgcttgcccgaaagctaatgaaagaggatttccgcaatgaaataaaacaggccgaaaacgtcaacgtactctacaacctgatggccaatactttggccgtatga

SEQ ID NO: 106729 - DNA, 729 bp, Enterobacter aerogenes
atggtcatgggtaatggagtacaaaataatacacactctatttatttcgttgtggtaattacgatgcattttcgtggaatattactagatttagacgggacgctggtgaactcgctggatttcgttgaggcctcctggcgtttatgggccactacaaaagagctggatccgagggcggtatgccattatctccacggtaaacccgctttgagtacgctgcgccactttatgcccgatgccagcgaacagatcatcatcgacgaatttctcgcgctggaagagtttgaagcgagcaatactgacggcatcactgcggttaacggggctgttgattttctccgccagcttgagcagttgcaggtcccctgggccattgtgacttccgggtcgctgaaggttgcctcagcacggatccgacaagccggtttccccgttccgccggtgctggtgaccagcgaagatattcatcatggcaagccgcatccggagccgttcctgacgggtgcagcccgactcggtctttctcccgctaattgcctcgcttttgaagactccactgccggtctgctttctgccacccaggcagggtgcgtggtggttgaagtcctgacccgccagtctgtagttcacgatatcgatacctggaaaaccattgataactacctcgacctgcgcgtaacgcgcaagggcgaggcagattttttacttaagattcagagggagttttaa

SEQ ID NO: 106730 - DNA, 1995 bp, Enterobacter aerogenes
atgtcatcacgaaaaaccctggccaatgccatccgtatgctgagtgtcgatgccgttcagcgggcaaattccggtcatccgggcgcaccgatgggaatggcggatattgccgaagtcctgtggcgggattttctcaaccataacccgaataaccccgcgtgggccaaccgcgaccgttttgtactctccaacggtcacggctcaatgctgctctacagcctgctgcaccttaccggctacgatttgccgattgatgagctgaaaaacttccgtcagctgcattcgaaaacgccggggcacccggaagtgggttacaccgcgggcatcgaaaccaccaccgggccgctggggcaggggatagccaatgcggtcggcatggctatcgccgagaaaactctcgcggcgcaatttaaccgcccgggccacgacattgtcgatcacttcacatatacctttatgggcgacggttgcatgatggagggcatttctcatgaagtttgctccctggccgggacgctgaagctcggtaagctggtggcgttctacgacgataacggcatctctatcgatggtcacgtcgagggatggttcaccgacgacaccgccaaacgctttgaggcttacggctggcatgtggtacgcggagtcgatgggcatgatcctgaatccatccgtgccgcgattgatgttgcaaagtcgattaccaccatgccgacgttaattatctgcaaaacggtgattggttttggctctccgcataaagcgggtactcatgatgtccacggcgcgccgctgggcgaggctgaagtggcggcaacgcgtgaagcgctggactggccgtatccaccgtttgttatccccactgagatagcttcgcagtgggacgcccgcaaatcagggcaggctaaggaggctgcgtggaaccagcagtttgccacatacgcgaaagcgttccccgagctggcagatgaatttacccgtcgggtgaatgggcaactgcctgcagattttgccagcaaggcgcaggcgtttattgaaaaattgcaggccaaaccggcgaaaatcgccagccgtaaagcgtcgcagaatgcgattgaagcctttggtccgctgttgccggaattcctcggcggatctgcggatctggctccatcgaacctgaccttgtggtccggctctaaagcgattaacgaagacagcgccgggaactacattcactacggcgtgcgtgagttcggtatgaccgctatcgccaacggtattgcgctgcacggtggcttcctgccgtacacctcgacgttcctgatgtttgtcgaatacgcacgcaacgcggtgcgcatggcggcgctgatgaagcagcgtcaggtgatggtttatacccatgactccattggcctgggcgaagatggcccgacccatcagccggtcgagcagattgcctcactacgcatgacgccgaacctcagcacctggcgtccctgcgatcaggttgaatcggcggtggcgtggaaatatggtgttgagcgacaggacggtccgactgcgctcattttttcccggcaaaacctgacccagcaggaacggacctggcagcaggtgcaggatatcgcgcgcggcggctatgtactgaagaattgcgaggggcaaccgcagctgatccttatctcgaccggctcggaggtggagctggcggtagccgcatggcagcaactgacggctgaaggtgtgaaggcacgggtggtctccatgccgtccaccgatgtcttcgacaagcaggatgcggcgtatcgtgaagcggtgttgccgcaggcggtttctgcgcgtattgccgtggaagcggggatcgcggattactggtttaaatatgtcgggctgaatggcgcgattatcggtatgcagacctacggcgagtccgccccggcggaacagctttatcaggagtttggcattaccgttgaggtggtgttgcagcaggcaaaagcgcttctggcttaa

SEQ ID NO: 106731 - DNA, 741 bp, Enterobacter aerogenes
atgtatcccgttgaccttcatatgcataccctggccagcacccacgcctatagcacggttcatgactatatcgccgccgcggtgcgtaaacatattcgcctgatcgccattaccgaccatggcccggaaatggttgatgcgccgcatccgtttcactttaataatttgcgtgtgctgccgcgcgttgtcgatggtgtggggatcctgcgcggtattgaggccaatatcaaacttggtggtgagaccgactgtagtgacaaaatgcgtgcgtcgctggatttagtgattgctggattccataagcaggtgtttgcgccagcggacattaccaccaataccgatgcgctgattgcagtaatagcgagcggtaaggtgcatattatcagccaccccggtaacccggagtatccgattgatatcccggcggtggtggccgcggctaaggagtgtcatgtggcgttggaggtcaataacgcctctttcgtccattcacgtaagggcagtgaggggaactgtcgcaaaattgtagcagccgtgcgcgacagcggcggacttctctcattgggtagcgattcacacagcgcgttttctctgggggactttagcgcctgtcagcatctgctggtggaggctgattttccagcatcaagagtgctgaatatctctgtgcgacgagtgctgacgtttctggaacagcacggcggggggcggatagccgagctttatgcgcttcctggctaa

SEQ ID NO: 106732 - DNA, 390 bp, Enterobacter aerogenes
atgaccactcgtgcaacaagagatgagattcagcctttctccagcgaacgtcatctgcatattgtggcggtgaccgcgtgcgcgaccggcgtggcgcatacgtacatggccgcagagcagctggaaaaactggcgaagcagtatcactttgcgatcaaaattgagactcagggcgtactggggcttaagaatccaattaccgataaagatattttcgagtctgagctcaccatcatcgcatccgatattactatcgataatccttcacgctttgagggttgccgtattctgaatgtttgtattaattcgctgttactcaaaccaactgaggttatcgccgccattcgtaagtctttaaatctgccgcgaggcaacgttattgacctgtag

SEQ ID NO: 106733 - DNA, 855 bp, Enterobacter aerogenes
atggctacatttattcaatctattctcagtgaattcagcgctcagggctcgatagacaaaggcgtcatggtagctaacggcaatacgcaggctccggcgatggcctaccatctgcacgttccgcgcattgagttgacggtaaagggcacacttcgcatgctgctgccgaaaggcgtggaccgcatcgtgaaatatgaacgtccggtcggcaccatcacctatatccccgccaatagctggaactcgccgctgtgggaaagcccggttatttgcatgtcgatagtcttctggaagcaggacgtcggtttcagcatcagcaactgggatggcacgcagtttaaagaggtagagaagtacaatctgcaaaactccagcagtacggttcgcgatcggcttctcgacctggctgaatcgctggcgtggtcgcaagataccaccagcgagacctttgcccacgtggtctatgcgctgcttaacgacctgctatatcaaattaccgatggcctgaataaccagcgggctcccttctcactgctggacgaaattaagagccatatcgatagtcactaccacacggacattagccgggaaagcgtcgccgaaacgtttaatatttccccaggctatctgtcgcgtctgttttcgaaggagtcagacgtgaaatttaacgaatatctcaagttagcccgcatttcacgttcaaaaacgctgctgaccaataccaatctgaaaataaacgaagtttcagaaaagtgcggtttcacagatactaactatttctgcaaggtgtttcgcgatatcaacgactgtacgccgcttgaataccgccgcaaaaataaaggagcaagatcatga

SEQ ID NO: 106734 - DNA, 1020 bp, Enterobacter aerogenes
atgttaaaactattaaaaaatactaaacgacattttatgaccggcgtctcctacatgatcccgtttgtcgtcgctggtggtgttctgttggcgctcgcggtgatgtttaacggggaagccgccgtaccggaccatggtttcctgaaggccatgtcgcaaattggtatggctggcttaaccctgtttatccccatcctgtcaggatttatcgcgtattcgatggtcgataaaccgggcatcgcgccgggtgccatcggcggcctgatggcttatcagatgggcgccggatttttaggcggcatgctctccgggattattgccgggctggtcgtctatgttctgttgaacctgatcgcccggcttaaaatcccccacttcctgcgcatggtattaccgatatttattattccgctgatcgggaccttcctcaccggcatggcggtgtattacatcattggcgacccgattgccgggctgatgaagtggcttagcgtctggcttggcaatatgcagggcgcgtcgtttattatcctcggtaccatcctgggctgcatgatcgccgttgacatgggcggaccaatgaataaaaccgcttttttctttgctgttgcactgatctcaacgaacccgcagctgatggcggcagtcgctgccgccgactgtactccgcctctggggctggcgctggcaacctttctgtttaaagacatctttaatgatgtggagcgagaagccggtaagccagcgataattatgggctttatggggataacagaaggggcaattccgtttgcggcggcggatccggtacgggtgatcccggcaattatgcttggcagtgcggttgcggcgatcctctcactatggtttggcgcaaccaacgccgccccgtggggcggacttatcgtattaccggtagtcagcaaccattttggctacatcgtttcggtggtcgccgggagcatcaccaccgcctttgcggtgaaagtcctgaagacagttatcaaacctcgggcataa

SEQ ID NO: 106735 - DNA, 2502 bp, Enterobacter aerogenes
atggcggtggttataacctatgtatgtgagcttcacgaaggtgttcatgcccggcctgccggatacatcgcgcggctatgtaatctgttccgggcagatatcgactgggaaaacacccgtacgggactactggcaaatgcgaaaagcgccctctcgctgattgccagtgacacgctggtaaacgatacatgccgcatcaccctttgcggagaggatgaaacgcaggccgcagtccagttgcgcacgctgctttccgatctcccgacttttagccttgaaccggaaccaataaccacgcaggggtatctgccccgctgcctgcgcgagttgaacccacaggtgattcagggaactcgcataaataaaggcgcagccatcgccagaccacagataatgcagagcctgactttcaccgatattatcgcccgcaatccagggtatatcggcaatattgaaagtgaaaaagcccgctttcttaccggattagatgcgttacgcgtagagcaagaggccgcactcggaaaaaaccagggtattgaacacgatcttattgcggcacatctatctctgataaccgacatcgcatttcaggatagtgcgatcggttatctgaataacaacatgaatgcctggtcggccatcgcgcaggcgtcccttgacttttgccatcagcttgagcgctcgcctagccagtatctgcaggagcgcgccctggatattcttgatattgcgacgcagctcatcagtgcgatctatggcgaacaggctctggcttaccacccacctttgctaaatgaaccgacaattgttttcgccagtcatctgacccccaaccagtttctggcgctaaaccgcaaacaccttgcaggtctggtgctctcctctacggggaaaacctcccatacagccatactggctcgttcgtcaggtatcccaaccctggcggatatcgatttttcatcgctggatttcgatgtcgatcagctgataatcattgatggtgagccggggatcctgattacccatccggatgagaaagttctgcgctactaccgtcatgaaattgccgtccagcaggatatgcagcagcggctgcgggaaaatgctttagcacccgcaagaacccgcgatgggcatcgcgtagaggtagccgctaatattgcaagcctggccgaagcgcaggcggcctttgaaaacggcgcggaaagcatcggcctgtttcgcaccgagataacatatatgggccgcgattacccgccctcctgcgctgaactgacaaacctgtataaacaggttgttactctggcaggggggaagcccgttatctttcgcaccttcgatgtcggcggtgataaaccggttggatacctaagcgtcgacaatgaagaaaacccgtttcttggtttccgggcagtgcgtacttatccgcaatatcgcgaccttttttccacccaactgaaggctattctgagcgcctcaacatcaggtaaagccaaaattatgctgccgatgatttctcgggtggaagaacttatctggtgtcgtgaggtactggaatcggttaaacaggagatgcgccacgagggtctggcatttgatgaacagacagcgctcggaatcatgctggaagtaccttcggtactcttttctatggcagagatggcagaacatgcggatttcttcagcgtgggcagtaatgacctgacgcaatactttttcgccgcagaccgaggtaatgcacaggtaaaaacgctttatgacagttgcacgccaccgtttttacgcgccctgcaattcgcagtgaaagaggctcatcgcgccggtaagcctgtcgggttgtgcggtgaactcgctgctgacgaaaccattctcccactgcttatcggcattggctttgatgaattgagtatgaactgcaccgcgattccggggattaagcacgccctgggccaactcagtgccggagattgccggtcgctgacgcagaatcttttgcaaaatcacaacgcacaacagttcaaagccgcattacaaaactcgagcgttagtgcggcgcaaaagccgctactgtcgccggagatggttttatggggaattgacgccgctgataaaaacgaggctatcaaaatgatggttgataacctgtggcttcagcagcgcaccaatacacgtgacaggctctgcagtgatatctgggctcgcgaagtgccttttcctaccgtcgttggctcgggctttgctatcccccatgcccaaacggacgctgtcagggattcctccgtcagtattgccacgctcaggcaacctatcgcctggggcggcgtcatggtggataccctgttcatgctgacgattagcaaatccgcgcaggataacgagcatatgaagtacttctccagcctggcgcgcatgctcatgaatgatgaatttgtcagccagattaaagcggcaaaaagcccggaagcgctttacacgctgatatccagaactctggtcttctga

SEQ ID NO: 106736 - DNA, 1188 bp, Enterobacter aerogenes
atgaaaaaacatataattctcggctctgggttgctgttttcatcattgagtcacgccagtgctctctatttttatgaagtagcgacagaagatactgcacttgctggtgcaggtcaggcggcacgagctcaggatgcgtctacgctgttaacgaatcctgctgggatgactcgattaccagaccatatggtcaccggcggtctgcaggccatgggcggagacatctcctataagctggatgacgaatccggcgggcggaaaagtcccggcaatgtgatgaaacttttccccaacgccagcatgttttatacccagcgtctgagcgatacggtttccgccgggatcgggctttatggcaactatgggcttggcatcgattttggcaattgggctggtgaccgccttatcaagaaaagcacgatggtcgcgatgaccctgagtcctggtgttgcgtggaagctcagtgatagagtgtctattggtgcggcgaccggcctgaactatggctttctctcgttaacccgaaacgtcgatggcggtgacgagaatcaaagtgaccacgattgggccatgaactaccggctgggtctgctgatggcacttaccgatcaaactcgcgcgggcatcacctggaccagcaaaacggactaccactttaatattgacggtaaagcgcgattcccgaatctgccgaacgtggaatatgacctgcctatttctgcgcaagttcgcgctccacagcagttgatgatgagtctggtacacgatatcgacaaacgatggtcggtcatgggcgatcttgggtggcaggactggagccagtttggcagcccgcagattagcgtaaacggaaaaacgagcgaccggactaaccgcctgaaggatacctggcatacggctgtcggcgtacagtaccggccagatgaacaatggcgccttaacgcaggtgttgccttcgatagcactccctataaatcgcaaagcgatattgcgctttcattacctacaggcgatgaatggcgtttcgcgacgggcgcacaatatcagatgacgcaggctagcaatatcggatttgctgttgaatatctccacatgcagtcatccagagtcaaatctgccgcatttgaaggtgaatataacaacccctggttatggtttgcgagcgtgaattatagctaccagttctga

SEQ ID NO: 106737 - DNA, 681 bp, Enterobacter aerogenes
atgagttcgcaagagccaacatttagtgaggtagtaaaaaacagatactcggcaagagcctttcttccaactcctatccccagagagaacctcaaagacattttgctcgaagcgcaatgcgcaccatccaactgcaatactcaaccctggtccctgcatattgttgcaggagataaacttcgtgaattaagccacgcactgacggaagttctgagggcggggaactacagtcttgattttacctttgataaagaagcttatcccgagccattcaggcaacgggcttcggagcaggggcgctcgtactatcaggcactgggcgttgcgcggggggataacttaagtcgctcagaagtggtcgagcgtaatgtgagatttttcggcgcgcctcatgttgctctgctgttcattcctgctgtaggggacaacgttcgcgtagcctctgacgccggtatgtatgcgcagacattcctgctttccctggcagctcgcggttacgcaggcgttccacaggcagtgctgagttattttgcccaaacggtgcgtcgaatattaaatgttcctgagggtttcaggctgctttacggtatttcttttgggatcccagataaaacgcatccctccctgagttacagggaagggcgggtatctctggacgaaagtgtcgtctggcatcaataa

SEQ ID NO: 106738 - DNA, 222 bp, Enterobacter aerogenes
atgttttcttacattatgcctgggacgaatgacctgtcacgcgccattacattttacgatccgctgatggatatgctggcatatcctcgcggcggcacggacgagggagcactaggcctgcgtccgcatttcggcgagggtttctacagcgcttacgtcaaaggccacgatggcaacaagctagcattcgtaaattacaccgcacaattcttagaacgataa

SEQ ID NO: 106739 - DNA, 252 bp, Enterobacter aerogenes
atgtcacaacatgaacagttctgtcaggcttgcggaatgccgatgtccgcacccgatgcacacagtgccagtaatcaatattgcgcgtactgcagcgacagcaacggcaatcttaaaccctgggaagaggcggtatcaggcctggccagcttccttgattcctggcaaaaagtcggcccggaagaagcacagaagcgagcaaaacgttacctgacggcaatgccagcctgggctcataaagcagatgaatga

SEQ ID NO: 106740 - DNA, 1638 bp, Enterobacter aerogenes
atggatatcagcacccttatttccgcatcccgacacatccagctgtcggcggaggaaagcaaaatcccctgggacgaaccggccttcagccagcgcatgctggcgaaccatttgtcgcaggatcacgactgggccagccgcaggcaggaggtcattgagcagcaggtcgagtggatcgccagtcagttatcccctggcgcacatatcctcgatcttggctgcggccccgggttttatacccaccgcttagcggagcgtggatttcactgcaccggcgtggatttctcaccggcatctgtgagctgggcacgtcagcaggcgcaagatgctgatttgaacatcgactatgtacagcaggatgtccgcgcatactggccggataaatcgttcgatttcatcatgatgacgttcggggaactgaatgtgttcagcacggcagatgcgcgctcgctcgtcagccgctgcgcgctgtggctggagctgggtagcaggctgctcgctgaagtccatactttcgacgaagttaagcgtcagggaatggcggaagcgagctggcaacgctgtccggacgggctgtttctcggcgtccctcatctgctgctgacggaacatggctgggatgaagaagcacaaaccagctcaacgcagttctgggccatagaagcaaacggtcaaaccacccgtttcggcagccagatgacggcctggcgcgatgatgagtacgtcagcctgctcgacaatgccggatttaccctgcttcctcctcctgaaagccacgactggccagtcagcgagacatttgaaggaaagctgtttgctctgctagccgaaaaagcaaaaacctcagaggaacgtcctcttaatactcaacgcaataaaaggaattccacattggatatcccacgtatttttaccatcagtgaaagcgaacaccgcatccacaacccgttcaccgaagagaagtacgccacgctgggccgtgtgctgcgcatgaaaccggagacccgcattcttgacctcggcagcggctcgggcgagatgctctgcacctgggccagggatcatggcattacggggactggcatcgacatgagttcgctcttcaccgcgcaggcaaagcgacgcgcggaagaactcggcgtcagcgaacgcgtacattttattcataacgatgcggccggttacgtcgccaatgagaaatgtgacgtggcagcctgcgtcggcgcgacatggattgccggtggctttgccgggacggtcgaactgctggcgcagagccttaaaccgggtgggatcatgctcatcggtgaaccctattggcgtcagctccccgcaacggacgagatagccaaggcctgtggcgtcagctcgacgaccgattttctgacgctaccagggcttgtgagtgctttcgatgaactcggctacgacgtggtggaaatggtacttgcagaccaggaaggctgggaccggtatgaagccgcgaaatggctgaccatgcgccgctggctggaggccaatcctgacgacgacttcgccgccgaagtcagggccgagttaaacatcgcgccaaaacgccacgtaacttacgcgcgggaatactttggctggggcgtgttcgcgctcatcgccaggtaa

SEQ ID NO: 106741 - DNA, 258 bp, Enterobacter aerogenes
atgaatttatcccgtcaggaacaacgtaccttacacgttctcgccaaaggtggtcgtattgagtacgttcgtgatacgtctggccgcgtcaccgccgttgaatgctacacccgcgaagggctgttgctcaccgactgcaccctcgccaccttcaaaaaactcaaaaccaaaaaactgatcaagtccgtcaacggtcagccctaccgcatcaacaccaccgggctgaataacgttcgcgcacagcttgataaccgctaa

SEQ ID NO: 106742 - DNA, 477 bp, Enterobacter aerogenes
atgcaaataatatcgtcaagatgcatcattcgaccatttcagccacacgaaattgatagttttatggtgtatcgcaatgatgctgagtggatgaaatatcagggatttaaggggctaacaaaagaggactatgaatcagcattgctgggcgttcttacactgactcagggcattcaattggccattgtcaacaagcggacgcaggttttgatgggtgatatctatttacgtcagcaatgcgatgtattttggctcggctataccattagccccgcttatgctcgccagggatatgcatttgaagccattaccgccacgatcggctggataaaagagaacggtttttcactcatcaaagccggtgtggatccggaaaataccccttcaataaaattacttatcagggctggcttccatttttcaggcatcgaagagggggagcatatttatgctctggatttaacaaaaggagaataa

SEQ ID NO: 106743 - DNA, 393 bp, Enterobacter aerogenes
atgttttcttatgtgatgctgggtactaacgatctaccacgtgccatccgattctacgatccgttgatggaattgcttgggcatcctaaggcaggccggaatgaagaaggcgcatcctgggggacgttcagcaataaccataccatcggattgtgcgtcggcagaccctttaaccaacaacaagcgggcgttggtaatggcacgatggtcgcactgaatacccgctcgtttgaacacatccagcagttgtacgaacttgctatcagtctgggcgccagggatgaaggtacaccggggcacaggccacaatacggacagggattccatagtgcctatgtacgcgatccggacgggaataagctggcgtttgtgttctatgccgatgagggttga

SEQ ID NO: 106744 - DNA, 1257 bp, Enterobacter aerogenes
atgaagccattttcaggacgccttagcagatatggcagctttctattatttccactggcgatgatcatctacgatttttcagcctacctgacaacggaccttattcagccgggcatcattaacattataaatgagctacaggcggatgtgacgctggctccagcatcagtcagtttgtatatggcaggcggactggcgctacagtggctcctggggccactttccgatcggattggccgccgccctgtcctgctcactggcgcattgatcttttcccttgccagcctgagcatgctgtttgtcacctcgatcgaacaatacttcgtcgcccgctttattcagggcaccagcatctgttttatctcaaccgtgggttacgtctcaattcaggaggcgtttggtgaaatggattccatcaggatcatggctgcgctgacatctattgttctgctcgccccagttatcgggcctgtggccggcgctgcgctgatggcgttcattcactggaaactgctctttgccatcatcggtgtgtttggtctggtagcatggttcttactactgtacaaaatgccggaaacagttatatctcagggaagagaattcagaccgggtgaagtactgtcagatttcatcgcggcatttcgccatcccttggtgctgaccggctcactggcagtcgcttttggcaacctgcccatcatcacctgggtggcgctctcacccgtgatcctgattgagcatgggggtatgtctcccggaacctatgcctggacacaggtgcccgtgtttagtgggatcattatcgccagtgcgatcgtagcgaattttatcaaagacccgacttcaccgcgttttatctggggtactgtcccgatacagcttgctggcttgctgactttgctggtcggcaacctgctatggccacacgtctggctatggtcagtactgggaacgagcttttatgccctgggtattggactgctctatccggtgctgtttcgcttcacactcttttctcataacctgccaaaaggcaccgtttctgccacgctgaatattctggcgctcggcataattgcccttagcattgaaataacccgctgggtttacttccatgccggcggaaggattgctttccatggcgcggcgctgctggccggtatagccgtcatcatatcagttacccgcctgcttaaactgcgtgagcagcatcagagccagtcagaatcaccggtaggctgtcaggaacaataa

SEQ ID NO: 106745 - DNA, 573 bp, Enterobacter aerogenes
atgagttgcaagtttgaatggatcaatgagcccgccgtatggtgctacgaaaataacgccctgtcggtaatcacagatgagcatactgatttctggtgccgtacctggtacgggtttgagcgttttaccggccacatctacgctactgatgtaacaggtgattttacttttcaggtcaggatccgcgcaaacttcaccacactctatgaccaggccggaattatgattctctctgacgaacagcactggctcaaagctggcatcgaattcaacgatggcacacctgcaatcgggagtgtactcacgcagggatattccgactgggctacaggactctttcctggggatccgaaggaattctggctgcgtctgacccgtaagaaagatgcgttacgattgcagtattcctcagatggacagcactggccattacttcgcttatgtcattttcccacgggcccagtaaaaacgggcgtcatgtgttgtacacctcaacgccaggggttggaggtagaatttcttgatctcagactgactcctgcgatggataaagaactgcacgatctgagttga

SEQ ID NO: 106746 - DNA, 819 bp, Enterobacter aerogenes
atgaccgttattccggtatcagcccttgaatgcagcattactgagctgtgccgtattcttgcagacagctttaatgaatcattgacaccgtttgcgttgccaccggaaatgtttgcctcacgtttcatttcagaaggactcagccttgaagactcgtttgtctggctggtcaatgataacccggcggcaatagccatcgtaacccgcagaatggacaaagcgcgtctggcagcatttggtgtgttgcctgagtaccggagccaggaactagcaaaacagatgcttactcctctgtttacctccttaaaagagaaaaagttatccagcgtgaggctggaagtgatgcgcgaaaataccggggcaatcgctctctatcacgcgctcggttttcaggttcgccgacatctgtgcaaataccggggagatccacagtctcgtccggaaataccttcaggggatatggaatccaaggctgttgatgacttcctgcgtaccgtctggtctgcaccagatgatgatcttccctggctggccagccccctgcagctcttgtctattccctgcgacatcctcagggataacgaacatgcatggtgtgctgtcgcggagttcatgggacaacctcagctccgctgtttgtttgtggaaccggtgtatcgttaccagggacgggctaaaagaatgcttcagaaaatcaatgccagatggcctggcataggtacatcagccgcgatcccagaaacgctggcaccattatttactgcggcgggttatcaggctgaaccgttatgccagtttgaaatggaactgacattttaa

SEQ ID NO: 106747 - DNA, 435 bp, Enterobacter aerogenes
atggataactatacgctgcatcgtggcagacttatcgaccatatccagctcgtggtaaacaactttgccgcaagcaaagcgttttacactgctgttctggcggaacttacgatccccatggttattaccgatgacgattatatctgggctgacgaactggtcatttcgtcggttaaaagttcggagtctggcggagtgcctacaggacggcaccatctggcctttcaggccgcagaccgtgaatcggtgaacgcgttttaccacgcagcactaaatcatggcggacgtgataacggcgcacctgccgaacgaacctatcatcccggatactatgccgcttttgttctggatccggacggtaacaacatcgaagctgtttaccatggtgagggcgatcgcagtgcccgctctgtagaaatcagcttcactgtctga

SEQ ID NO: 106748 - DNA, 150 bp, Enterobacter aerogenes
atgccactcaataaaatgaagcgtcatgccatactccacacgctctctatacctgaacgtaaactacgccccgtaaaatggcttgctcttatctcatccctgctcgttatattacaactggcaattgagagcctggtcataagcgaataa

SEQ ID NO: 106749 - DNA, 609 bp, Enterobacter aerogenes
atgaaagttacatggaccgtcacgcctgtggggtatcagcgcatcgcgaaacgatgcccttcatgcaacattaaacgggacttcacgccgtcaggtgcatttcgggttaattcgcaaaagaaggtgctggacgtgtggagtatctataaatgcacacactgtgattacacctggaatatctccctgttttcgcgtctgcacgtcagcaaaattgaccgccagctttatcatcggctaatgacaaacgatgccgccacggttcaacattttgcctgtgatatcgcgacgctgaagcggaacaacgccgagctatcgggtcggcctgattttaccgttcaggagcgctggccgttaagcatcaccgcccaccagcgggttcgcgttagtgtcaggatctcccgttcatttcaggtaagtctgctgtcgattttgaagcaacagctcatgctgagcgctggtgaaattctgagagggttggagtcagggcagatcagcggcgttacgatgaagatgcttaaatcgagaaagctaaaggcagcggaatatgaattccagctgtctgcggaaacgttatatgccaggcgcaggattgttctgacgcatcgttaa

SEQ ID NO: 106750 - DNA, 225 bp, Enterobacter aerogenes
atggaagacagcattatgacagaacaaatttctttgcttgatgaccaactggtggatatgcggttcatcactaagcttacagggctgacggacaagtggttttacaagctgataaaagacggccagttcccgaagccaattaagctgggccgcagctcccgctggaagcaaagtgaagtcgaattatggttacagcaacggattgccgattcacgcggtcattga

SEQ ID NO: 106751 - DNA, 579 bp, Enterobacter aerogenes
atgcacacaccttacccctttaatcccagatacacgatgaactggtttctactgtctctactcaatgaccacctgaatcagctactgaaccgatactcccgaatacaggcactcagactcgacctgttctatcagaaaggtacagagcgttttaaacgtcattcatggaacgaaaccgagcgagaagtacgtgtactgattgaacgcaccctgcagcacacaaatctgacagggtatttctgggtactcgagaactctgtagaccacgggtgccatgcccatatcgtgttctatctcgacaggcaccttaaccaggctacctacccaatagctgagagagtcggaacaatatggcgggaaataacgcaacgagaaggctattacaaccgctgcgaatacaagtccacttatgacgtcagtattgataagccagtgaactacgatgataccgaagccatcgataacctgcgctacatcatcagctatctcaccaaagaagagcaaaaacacggtcactatcactacggagccagtgaagtaccaccgccaagcggactggggcgtcctcgcacgctgtaa

SEQ ID NO: 106752 - DNA, 918 bp, Enterobacter aerogenes
atgttgcattacgatatgatccgctgcgagataatgtacctaaaaatgttggatagctttttcaatacagatcactcgttactgtgcagtacttatgatacgccggatcagtttcgacatttgatctctcagatccttgaacgacatttcctaggcgatcaggacaggatcaaagttggccggaaaacgcttaaagaatgggctgagctgctactaattgataaagattattttgattgtttcaaaggtacaccaagagcatcgtggtttgctcaccattatatttttgaatatccagtattacctgtagggttgacacttggtgggctggggaatggcttcgattgttcagctggttttaattctcttttaatggacgataatatcttcacaaatcttgatttctctaatttgaatattgatttggacgatattgattgggatctgataactaatccacaggctactgcttcgaaaaaatcgaaacgtgttttctcccgattttatctgaacgcgggagcaagtacctatctgtacaaccccactccggtaactgagcgtgaactgatcaacggtataatgaggtacattgatgaagctccatgctcacttggagataagatctcttattttaaaaaactgcatgagcgctggcttgagcaatacaatttttttctgacagactttgattggatgtcgcgtgatgatgaaactcagttagtatatctctgggactatctgaaaggaaaaggacgaatagcgggctatcttcgcccttataatacgtctatgcgttatgacatgattattgcggctatagatgtgtggaacgtccagcctgaagagaagctggagtttattgagaaaatgaaacatgcctggcagtcatcaaaatcttatcggcgatctgctaaatag

SEQ ID NO: 106753 - DNA, 354 bp, Enterobacter aerogenes
atgaagccaaaagaaatactttgccaatgggttgacgcatttaataatgcagatgtagaaactatttcagaattatatgatgataatgcaataaaccatcaggtagccaatgagccagttattgggaaagaggctataaagaaaatgtttgaacaagatttttctattccagaaatggtttgtatcgttgaaaacattttcgaagatggacaatgggcaattttagaatggcgtgccccattaggtttgagaggttgcggtttttttcaaatagtaaataataaaattatatttcaaagaggctactgggataaactatctttcttaaaacagcacaatttacctattgaataa

SEQ ID NO: 106754 - DNA, 576 bp, Enterobacter aerogenes
atgtctgatggtcaaaacagtaacaacgatagaacagaagtcgtcaaagcatctttaagcgctggcagcacgctcttagtcgcgataatcgcagccattggcggaataattggttcatacttcactggttcaaagcttgtagaaagtacgagtgtgccagcattgataaatgccagaacaatttgtatcaacgcggttaatgaagatgagcaaaaatttcgcgaaagagcatctagcttattggctgccgtagctgcgtttgatgcggataaatctctcttatatcaacctaatcataatcaactttatcaaccagccaaatcagctattacgcaggcaatgtccatcagtacatattcttcagaacgtctttcagggcttgcgataaacattgcgacatctataaaaacacttgcaattgctgatatgaattatggtgcatcaggtgaagcttataaggtgctgtcatcctctatgggggaatggcctgaagcatatagtgaatttatgaaaacattcgatatcaaacgagcttcttgtaattttgatgagtcaatccataaatcagaaaaatga

SEQ ID NO: 106755 - DNA, 678 bp, Enterobacter aerogenes
atgaacagtacctccgtgaccagtaaaggcgaacaagccaaaagccagcttatcgccgccgccatcgcgcaattcggcgaatatggcctccatgcgacgacccgcgatatcgccgcgcaggccgggcaaaatatcgccgctatcacctattatttcggttcgaaagacgacctgtatctcgcctgcgcgcagtggatcgccgactgtatcggcgagaatttccgcccgcatgccgaggcggccgaagccctgctcgcccagacgaaacctgacaaaccggcgctgcgggaattgatcctgcgcagctgccgcgatatgagtctgctgctgacccaggacgacacggtcaacctcagcaagtttatctctcgcgagcagctctcccctaccgcggcttaccagctaatccaccagcaggttatcgccccgctacatagctatttgacccggcttatcgccgcctggaccgggcgcgatgccaacgatacgcagatgattctgcacacccacgccctacttggcgaggtgctggccttccggctcgggcgggaaaccattttactgcgtaccggctgggcgcagttcgatcaacaaaaggctgaacaaatttttcaggtgatcacctgtcatatcgatttcattctgcaagggttagcgcaaaggagcctgggatcatga

SEQ ID NO: 106756 - DNA, 450 bp, Enterobacter aerogenes
atgagcaatagcattctttcctggcgacgggttcgcgcgctgtgtgtcaaagagacccgacagatcgtccgcgatcccagcagttggctaattgcggtggtgatccccctgctcctgctgtttatcttcggctacggcataaacctcgactccagcaaactgcgggtcggcgtattgctggaacagcagagcgaagaggcgctggatttcgtccataccatgaccggctcgccctatatcgacgccaccgtcagcgataatcgccagcagttgattgagctgatgcaggccgggcgcatccgcgcgatggtcgtcattcccgtcgactttgaccgccagatggcccgcgccggcgccaatgcgccgattcagttaattaccgacggtagcgaaccgaataccgctaacttcgcgcaggggtacgtcgaaggtatctggcagatctggtaa

SEQ ID NO: 106757 - DNA, 375 bp, Enterobacter aerogenes
atgtcaaagaaaaatagtaagataccttccgcaattgttaatgaaataaagcatctattcaatgagttagctgcttttagcgttacggttcaacgtaagcaaagtagtacaaaagcctacatacaggttctggatgaatatcagggaaatgagaggattcacaccatttacctaaaggacgataaaatacgttatcgcggcctaaatgtagaaagcagcaatataacagaagtcgatatagaaaataacgaagtaaaatttgcgatgtattcgacattaattatgaaacttcctgtagcttttgaggcggtgaaccaacttctttcacttgttgataagcatggtcttgtagttgtcgcaactcctaaatactaa

SEQ ID NO: 106758 - DNA, 957 bp, Enterobacter aerogenes
atgaacaacgattactttgtcgatccagagaaagtgcaattgagcattcttggatggaaagatctcagtaagtatctcggattacctgttactttcatgggggcaaacttcgaaaattcattgatttataaggcaaatcaagggatgtttgaagaaatcagtctggatgatctgcaacaacgaaaagtacctttaactgaacgcctcaaagtatactatttctctgaaaatataaagttatcaaagacatggaaggaaaagaatcctggtcaactccagcgtgtttatgcttatctctctgaagtactcgaaggtcaggaatactactggacgaacaacaataccgacaagcagaagctgcacaaggcttacagaataagccctgatgcgagggggcataacgactacaaagatcgacatacatgcgtctggttagcctgtatgcgtccagacgatacagaagcgaagctgtgtgaattgctattaaagattacaggtgaagacatccatcaggcaagagagtacgaaaaccttcaccagttcgctttaagggggatatcacgtcagttcaacaatgatgcaacccagattgtctatgtgttcgataaatggcaggcagagtcattgagtacaaatattgaacatatccctgaagtacttgtaaacgtagcaccgggggcactaggaaggccaaaaggagccacaaacgttaagaggctgcctgcgttgagtgatacaaaatcgaagcgtttcagtcgctggaaaaaggataatccgaggcttgagttagtggcattcaaagcatttcttgcaagtactgtcaacgcggatctcagtactgacgatactacggctatgtggggcagatatcagaaagcagtacaaaaaaaagacgcaaattcagtccgaaacaccgacatgaaaagcagcagcatgtccaaaaataaccccttataa

SEQ ID NO: 106759 - DNA, 1191 bp, Enterobacter aerogenes
atgaccaaatctgttatcaccgaagcgctgcggccgatagaactgcatcaggtcgaccgcctggcgttgagccagaagctggaagacgcgctggcccgcgtgacgcgcaagctggacaaaaatatcgttgccttcggcgataagttccccggcgaagcttgtgaaaacggcatctggccgcgtaccgataacgtagagtggaccaccagtttttggccgggccagctgtggctggcgtgggagatgaccggtaaagcgcactaccgcgaagccgccgagcgctatttaccgtctttcgcccggcgtattgagcagcgtatcgacaccgcgacccacgacctcggcttcctttattcgctctcctgcatcagcgcctggcggctcaccggcaatgaagctgctcgccagtcggcgctgctggctgccgagcgcctgatggagcgttttaacccgacggccaaaattatccaggcgtggggcgacttaaacgatccggagcagcaggggcgaatgatcatcgactgcaatatgaacctgccgctgctgtactgggccagcgagcagactggcgacccgcgctacgcgcaggcggcaacggcgcacgccgggcaggcggcaaactatatcgtgcgtgaagacgcttcgacttatcacacctactatatggatgtgcagaccggcgagccgcgctttggtaacactcatcagggctacagcgatacttcatgctggtcgcgcggccaggcgtggggcatttacggtttcctgctgagctatcagcacaccggcgataagcagatggttgagctgtcgcgcagcctggcgcactacttcctcaaccgcctgccggaagatgatgtttgccattgggatctggcgctgctcggcaccgatgccgtgcgcgacagttcggcagcggcgattgccgcctgcggcctgctggagctggttaaggcgttgccaacgctcgacgccaatcgcgcgtattacgaagagatggcgctgcgcattgcgctgtcgctgaccgataactacctggcccacgacgatgaccttaccgaagggctgctgcaacactcggtttatcacatgggtagcggcaagggcgtcgatcaatgctgtagctggggggactatttctatcttgagctgctggcgcggctgcgacagatttggtacccgtactggtaa

SEQ ID NO: 106760 - DNA, 1479 bp, Enterobacter aerogenes
atgaacagacaaacttcacagccacgggcgatttattacgtcgttgcgctgcaaatttgggaatacttcagtttttacggcatgcgggcgctgttaatcctgtacctcaccaaccagctcaagtacgacgataaccacgcttataccctgtttagcgcctactgctccctggtctatgtcacccctattctcggcggcttcctcgccgacaaactgctcggcaaccgcatggcggtgatgctcggggcgctactcatggctatcggtcacctggtgctcggcgccagcgaaatcgcccccaccttcctctatttatcgctggcgattatcgtttgcggttacgggctgtttaaatccaacgtcagctgcctgcttggcgaactgtatgagccgaccgatccgcgccgcgatggcggcttctcgctgatgtacgccgcgggaaatattggttcgatcatcgcgcctatcgcctgcggctacgtgcaggaagagtacagctgggcgatgggttttgcgctggcggcagtcggtatgattgccggtctggtgatcttcctctgcggcggtcgccacttccgccataccaccggcgttaaccgcgaggcactgcgcgcgcggaccttcctcctgccgaactggggctggctgctggtattgctggtggcgacgccgctgttgattaccgtgctgttctggcaggagtggtcggtgtatgcgctgatcgtcgcgacggtgattggcctggcggtactggcgcgtatttacctgcgcgcggagaacgacaaacagcgtaaagagctgcgtctgattatcgtcctcaccggttttagcctgctgttctgggcctttgcccagcagggcggcagctccatcagcctgtatatcgaccgcttcgtgaaccgccacgtcatgagctatgaagtaccaaccgcgatgttccagtcggttaacgccttcgcggtaatgctctgcggtatggtgctggcatggctggtcaaagagaacatcaagggcaaccgcaccgtgcgtatctgggggaaattcgccctcggtctggggctaatgagcgccgggttctgcattctgactttaagcgcccgctggtcggccgcttatggccactcctccatgccgctaatggtactggggctggcggtgatgggtttcgccgaactgtttatcgacccggtagcgatgtcgcaaatcacccggatcgaaatccccggcgtcaccggagtgctgaccggtatctatatgctgctttccggggcgatcgccaactatctggccggcgtcatcgccgaccagacgtcgcaggcgtcgtttgatgccgccggcgcggttaactattcgattgaagcctatatcgacgtcttcagccagatcacctggggcgcgctggcctgcgtcggcctggtgctggtcatctggctgtatcactccgtgaaggtcaaaacccgccaactggcggtagagtag

SEQ ID NO: 106761 - DNA, 249 bp, Enterobacter aerogenes
atggcgattcagggtattgaaggcgtactgcaacagatgcaggcgatggcgattcaggcgggaaataacgggcagaatagcgtaccgcagggagtcagttttgccagtgaattgaccgccgcgctgggtatcagtctgaatgatgtgatggtcgatttacagaaatcttcagtttcgttgcagatgggcgtacaggtgcgcaataagctggtggcggcctatcaggatattatgaatatgccggtttag

SEQ ID NO: 106762 - DNA, 180 bp, Enterobacter aerogenes
atggtagtggcgatggcggcttcggcggctttcatgaccccggtctcttcaccggttaacacgctggtgctcggacccggtaaatattcgtttagtgattttgtcaaaatcggtgtgcccttcaccgtactggtgatggtggtctgcgtgctgctgatcccggtactctttccgttttaa

SEQ ID NO: 106763 - DNA, 3042 bp, Enterobacter aerogenes
gtgacaattagactttatccttcccgcctgcaaggggaaccgcttgaaacccatgagcacggggaaatgaccctgcatcagtggatgtcctgtaatgttaagagctacagtgagcgtgagagccatcccatcgttgctgaaattgacggtattacagcatcacctgaggcgtgggcacattgcacaattcatccggacagtgatgtccggctctatccggtaccatttgacccagtaacgctgggctggatcgctgttggtgttgctgtggcttctgctgcgtactccatctatatgatgtcaaccatggataaaggtggtgggtacgcctctgcaaatggtcttgggctcgatttaaacccggcaaaagcgaatacagcaaaacttggcgatcctattcgggaattgttcgggcgtgcgcgggtttatccggattatgttgttcagccggtcagtcgttttaaccctgatgacccaaccagaatgacagttgagatgttgatctgcgtgagtcgtggaaatgtggcatttgctaacggcgatatcaggattggttcgacgcctatttccgccctgggtgattcattctcctggacgctgtatccgccgggagcaaatgtttccggcgatcgccgcagtgaaaactggttcaattctactgaggtgggcggaacgtccagcggcagcggccttgatatggcgcagacagcgcctgattcatccgatattaccgccgacagcatgaccgtttcgggatcgtcggtttcgttcaccgggctgagcgatgatgatggcgatgattctctgcctgagtcctgggtggaaggtgcgctggtgactatcatcgcgccgaccaactacctgatttcgtcttcatcgggttacagcgtcctgttcagtgacacgctgactgagattaacccctatgccggcatgcccgttacgctggaaattaacggggcagaatatgatctcttcatcgctacgttcacgccaaagcaggatgctgttccgggagtggggggatcagctgcttcattgcgcggcagcgcagccccaacaacctatgatttttcgagcatcagccagacatttaccctgacctggcaggtaaccacctataccgtttcgctgatcgctaactacggcaatatgtctggcctgctggcggcaatcaatgaagcgatcgccgggtcgaacctggtcgctcaggatgatggcggggtagttcgcatcgttgagaagtccagtccgtggctgggtggaagtattaccgcctcatcacttccggtttccgtatttggggacagcccggtattcaccgatgggaccgcatccagcggcggcagtccggcaataaccgccaatgtcacccttgcttatggcagtggaagcggcgcggcattttccggcattcctgaaggggtgcagcgactgtcacttgcgcatcggggtaatgaataccgcattgcatctgcagacggcacgacagcgacagtacagcgaatggttaacggaaccgttgataatacctgggcaggctactcaccaaggacgatgattgattaccaggcgaccgggattaacgacaacaatagctggatgggaccgtttctcgcttgtccggataatgaagtcgtaaatgcttttgaggttaacttctcttttcccagcggcatttgcggtttcgggaaatccggcggcaagaattaccgtaacgttgattatgaaattcagtaccgcgtatatggttctggttccggctgggtgagcaaaaccggacggtaccggatgaaaaacattaatgctcttgggtttacggaaagagtggagctcagctcgcctggactggttgaggttcgttgccgacgtcgtaatgaacagggaagtaaaaactccagggactctatgtactggcaggcgctgcgcggcaggttactgacacgccctgcatcatatgccggtgtatcgttaatggccgtgacggtggaatctggcggcaaactggcggcgcagtctgatcggcgcgttaacgttgtggccacgcgtatttatgataccggcgccccacgtaagatatcgagtgcgctttatcatgttggtaattctctcgggctggcgatggacaccgaagccatcaacacccttgaggaaacctactggaccccgaaaaatgagtatttcgatcacgcgacaggagacagtatctccgcactggaaatgctgcagaagatcaccacggcggggaaatcgtacttcctgctgagtgacgggctcgcatctgtaggcagggaagggattaaaaactggtccggcattatcagcccgcatgaaatgacagaagagttacagaccaccttctcggcgccgtccgccgatgattacgatggtgtggatgtcacttatatcaatggcacgacgtggtcagaagaaacggtgcaatgccggactccggataaccccacaccgaggaaaattgagagttataccctcgatggggtgcttgacccgaaccgcgcctatcaaatcggcatgcgccgcctgatgaaataccgctatcagcggctggggcataacacgacaacagaactggatgcgctggtctatcagtatggcgatcgtattctgctgacggatgacattccgggaaataaaacggtaagtagcctggttatggatatggccacatctggcggtcaaacggtatttaccgtttccgagccgctggactggtcctttgaaaacccgcgcgcagttctgcgttaccaggatggttctgcctccgggctgctggtggccacctttgtcggggattatcagttgtctgttccgtggcaggctgcatttgatgaaattctgctggacgatccgagcattgagccaccacggctggtgttctgcagctcaacacgaagtgtttatgacgccatttttgaggagatagccccgcaggcggacggaacctgccaggtgacgaccagacagtatagcgacattttctaccagtacgacgacgcgccatacccaggcagcgtttcttaa

SEQ ID NO: 106764 - DNA, 498 bp, Enterobacter aerogenes
atgtctggaccaccgaaaaccccgacacatctacgtttggtgaggggtaacccatcaaaacgaccgatcaacgaaaacgaaccaaagcccgctgctggggtccccccaacgccgaagcatttcgacaagcaggggaaatactggttcaggcgtatggccgaagagctcgatgcgcttggcgttatgtcacagttagacgcgagagcacttgagttactggttgaggtttacaccgagtaccggcatcactgcgatacgctggaaagggaaggttatacctacgccgtatatagcgacgaagacccagacgaaggcaaagagcgagagattcgcatgatcaaggctcacccggcggccatcatgaaagctgatgcctggaaacgtctgcgcgcgatgcttggtgagttcggcatgacgccagccagccgctctaaagtgaatgcaaaaggtcctgatgcggttgacccgctggccgagtttatgaaagcgagggattaa

SEQ ID NO: 106765 - DNA, 1458 bp, Enterobacter aerogenes
atgcaggtcactattgatggtgtcccgtttgtacctgcctgcgcttcagcgtcacggattggcattgccattactacccacaaccggccagatgttttaaagcgcgccattgagcagcacattaaacatctgcccgccggcgcgctggtggttgtcatcgatgatggttccaaacctgctgcggtagtccccgatggtgtgcaggtgctccggcaagaaacatctctgggcattgttgcctcgaagaacgccagcttatctgcgctgatggctgccgggtgtgagcatcttttcctgtgggatgatgatgcctggcccatcgctgatggctggcatcttccctacatcgaatcaccagagccccatcttgcttaccagtttctggacctggccgggggcaataagctgaacgacatggcggtgctgtaccgtgatgataagcatgttgcttacaccgggcagcgtggagtcatgctttattaccaccgcagcgctatcgatatggttggtggatttgatccggtatacggccgcggtatgtacgaacacagcgacctcgccctgcggattcataatgctggccttacgacgtgggcttacgctgatgtcgccggttcagaaaagctgattcattctctcgatgagcatgaggccgtggagcgttcggtaccgcgtccagaccgacaggcgctggtggaacgtaacgtgaagatccacaacgaacggcgtgatgccggttttaccgggtacgttgagtatcgacagcagcgcgacgtcgttatcacaacgctgctcaccagtcagtctgacccgcagcgcggaaaaaagatgcagacagaccctaacatacttcagcattgggcctcatcgattgctggcgcgaaagcagtagtattggcagatgaacttacagcaccaccttttgatgcgttacttttcaaagttccttctgtgaacatgaacccatacttttcacgttggctgcatatctatcagcacctgcgagctcatcctgaataccggttcgtctggtgtactgatggaaccgatgtcgaaatgctccgcgcaccgtgggaagaaatgcagcccggtaatgtttatgttggttctgaaccgaaaacatacgctgacgcctgggcaaaacagaatcatcctgagcgcatctatcaggaattcatcgaacagcaccgcaacgatgtgatgcttaacgccgggctacttggcggcacgcgcgctgatgtgatggcgttcgctcacggcatcatccgtctttactaccggatcgagagttatcgtttctggaagaaagaacaggctggcgccgcggtgggtgacatgctggcgttcggtatcgtggcgaaatctttcggtaatcgaatagtaaccggcccgcgcatccacacagtgttcaagtctgaaggtatcggtaaggagtacgcctggtggaaacacaagtga

SEQ ID NO: 106766 - DNA, 258 bp, Enterobacter aerogenes
atgagcctactgaagacaattaaagacgtcgtgtctcctcccgttccggaagagtgcagagaagataattacgattcggtgctgaaaaaccttgataccctgtccaaagaatcatccgagctgaaagccctgatggctgagttcggtgaaggaaagataactcaggagcagtgcattgccactggcgtagcgattgtcaccaaagaattactcgagttccgctacgtccaaaacaagattgattctcaggcctggtaa

SEQ ID NO: 106767 - DNA, 240 bp, Enterobacter aerogenes
atgaacatcaataatgttaacgctgcttcaatcttatgcgaaaagcttaaggaacttgaagggcaatactcactcgtcgtacgtggtgagggtttaggcatcacgattcagagtcgttatcaggatgatgattttgttaatgcgattcgcagaagtgttactggtgagcttagccgacgcattggtgcggtaaagcatcagcttactgaactaggtgtaacgtcattcaccaaggactag

SEQ ID NO: 106768 - DNA, 276 bp, Enterobacter aerogenes
atgggcattgaaatgattattggcctggcaactgcatttcttgccattgttgctggcgcatttgggttaggccattcacgcggaaccagtaaggcagaagccaaagcagtgcaagagcgtaccgaagagaaagccgccgccagtgtcgctgccgcagagcacaaagttgaagttacagtaagggctgacaatgttcaggaaactgttaagcgtatgtctggtgacgatgttgatcgggagttgcgcgaacaatttacccgccccggtagtcgttga

SEQ ID NO: 106769 - DNA, 627 bp, Enterobacter aerogenes
atgaataaatcacaattccagaaggcggctggtatcagcgccgggttagctgcgcgctggtttccgcatattacggcagcgatgaaagaatttgatattactagcccggtagaccaggcgatgttcattgcacaatgtgggcacgaaagcaccgggtttacccaattggtggaaagcttcaactatagcgttaccgggctttctggtttcgtaaaagctaagcgtatcacgcaggaccaggcgaataccctagggcgtaaaacttacgaaaaggttttaccactcgagcgtcaacgagcgatcgcaaatctggtctacagcaatcgctacggcaataagtcggcaggtgatggctggaaatatcgcggtcgcggaatcatcgggattacattccttgataactacatgaaatgtggcactgcgctaaaggtcgatttagtcagcaaccctgaattgctggagaaggacattaacgcagtccgcagcgccgcatggttctatacctcaagcggttgtttgaaatattccggcgatttagtgcgcgtaactcagattatcaacggtggtcagaacggcattgatgaccgacgcgcccgattcctgaaagctaaatctgttctggtgtga

SEQ ID NO: 106770 - DNA, 174 bp, Enterobacter aerogenes
atgaaagctcaaaaagcaaccaagccagaagtaaaattcgacactatgaaagcattcgcaggaatgggtgctgctgttgaagtactgatgaaggctgcgcctaatgcgtttacccacgctattgtctcgggtaaagaacagcagggtaagccacgtcgtcgcaaggcagcatga

SEQ ID NO: 106771 - DNA, 540 bp, Enterobacter aerogenes
atgcttacaattgaagagattggccaatctgtccgtaacaatatacaactcgttttggataatttcggactgcctctagcggtaggccctatcagcgatgatgactacaaggtcttatcgggagggtttggtgagttagagtgggattacgttttatccacccacggaaattcgcctgatcgttatgaattttgcataaagttagtcaaccacggtgcgatggagaatgttccttctggagctgctttgtgcatctttggggttgaagaacatacatttaacatccatatgattgaaagctttgtaagagatgatcccgatcaccctcttaaagggcgcatggttcttataacgttaatgagtgcatatttgttttgcatggctgtagactgtcccgtcgttagagtcatcgaacctgttcatgagttacgtgctttttacgaaagctttggatttggcatgctaccatgcgggtatatcatggaagcagagacctctgatattgagggcgtgttcatcaaattcgcacaattaggctag

SEQ ID NO: 106772 - DNA, 981 bp, Enterobacter aerogenes
gtgagagccttgctaacacctgaaatagcccaccgtatgggtgtggttctttttcggcctggtagtgaactgatgccgctgttcagacgcggacgggtactgattgaaccagagccagaaaactactcagaacacccgacgggagctataccaccggcaggacagcccctggctgatgacccgtcgctgttaactgtttttgagaacccggaagttatcattcgcgctggtggtatcggcggcctggaggcggagcttgagcgcagttttaaatgccagtatccacatggcacctggcatagcgagaatttcacgctattccgccatgagcctggtagcatccgcctgtgctgggcctgcgataatctggttcgtgaccagtacaccgaaacactggcaggtattgcacggagaaacctggtatcctggatgatatccattatccgctcacagctgggcttcaatgaagaccatacgctgaccattcctgagttgtgctggtggatggttatcaacgatttggctcatgtgataccggaaggactggctcataaagcactgcgtttaccaccggttaagcatcagtcggtgatgaaggagagcgacattactcctgggccagcagctgctgaagtagtacagaaaaagattctggcgctgcgagtggatccggaaacgcctgaatcattcatgctgcggccaaagcggcgccgttgggtaaacgagcactggacacgctgggttaagtcccagttgtgtgtctgctgtaacaagcaggcagatgacccgcaccacctgataggccacggacaaggtggaatgggtacaaaagcgcatgacttattcgtgttgccgctttgcagagcgcaccacgacgagttgcacgctgacaccgtggcattcgaacagaaatacggctcacagctggagctgatgtttcgatttttggatcgttcgctggcaaccggcgtactggcgtaa

SEQ ID NO: 106773 - DNA, 693 bp, Enterobacter aerogenes
atgaactcattgatgaacactaatattaacatcgtcagaatgtccagccgtgatatcgctgatttggttgagtcaaggcatgatgatgttaagcggtccattgagcgcctggcagagcggggagtaatacaacttccgccaatggcggatgttaaaaatcaccttaatcagtcggtcacagtgtacatggtcggtaagcgcgacagttacgttgttgtcgctcaattgtccccggaatttaccgctcgtctcgttgaccgctggcaggaacttgaagaggccagtaattcagtgatacctcagtcattctctgacgcgcttcgactagctgctgaccttgaagaagaaaaacagcgtctggcactggagttggcatctgcggccccaaaagtggaatttgtcgaccgttattgcacggcgaacggttccctttcttttcggcaggttgcaaagctactgaaagcaaaagagcctgagctccgcttgttcctcatcgagagagaaatcatgtaccggctgggaggtacgttaactcctatggcccaacatattgacgctggtcgattcgaagtgaaaacagggacgtcgcaggcatcaaaccatgcgtttagccaggcacgatttacagccaaaggggtacgctggatcggtggtctatggactgaatacaaggccggagggaatacagcgtga

SEQ ID NO: 106774 - DNA, 198 bp, Enterobacter aerogenes
atgcataaatcagaagtcattgaacacttcggaggggtatcaaaaacagcaagtgttcttgggatttcccatccggcagtttgccgatggggtgaagtcatcccccaaaaacaagcattcgtcatcgagcgaattacgaaaggtaagcttaagtacgacgccagcctgtaccaaaagggtacagattcagctgcctga

SEQ ID NO: 106775 - DNA, 678 bp, Enterobacter aerogenes
atgaccaataaccagttaaccaaagaatggctacagcagactatcgccgaactggagtctgtacgcgatgaaattcctttcggaattgatacaaatagcgaattagaactggctgctttcaggctggcgctggccgcaatggacagtgaaccggtggcgtggactgatgaagaagaattgcgtgatgcgaatgaaagcggaagcggttatttgtttggtattgagcgtgatgcaaacaaattcgcagacccgcgacgccagataatgctctatcgtcatgcgcagccagcgccggtagtgctggatgaacgcgcagctttcaacgcatggaacaacgaggacaatctaccaatcgcaggggttggtgccaaaaatgccgcatggctggcatggcaagcccgtgccatgctccaggctgaacctgtaacgactgctaacaagttgggcaactctccggtaattcctgatggttacgtgatggtgccgaaggagccgactgagaaaatggttgttgaagggttcgagtcctggccagatgagttcttcagcgatgcagaggtgtgggaagcctatcaggaaatgagcggctgcgaacaagcagcgcaccgggcgaaattatgctgggccgcgatgctcgcagccgccccgcaggaggtgaaggcagaaagaaaaaagtag

SEQ ID NO: 106776 - DNA, 852 bp, Enterobacter aerogenes
atgttttatgattttttgaagtggtcagccggtgtactcacttctgcggggatagtggggtggtgtggttacatatttagagatgcttttggtaaaattttatcaaagactattgagcataattttgatagaaaacttgaggggttcaaatctgagttgaaggagggtgaaaaagatatagagcagattagaacatatctttcttctgctcgatctggaaggaacgctgcgttgcaatcgaaaaaatttgaagcagcagaaagaatgattcaggctcggcgtttcttatccagttttaatgtggttgttcaatatatgcaaatattaaagctcgatgaacttttaaaaagcaaaaacaacccaaatatacagatgttcattgaaggaatcaccaaacctttaaatttagaggagaaaagcaaagaatatcatgaactggataaagatacttcaaaactatacttaaacgaaaaaacgattcgtgtattcgagatttatgaaagcattattttacgtgctatagctcaattgcagatacttgctttaccgataacaaataagaaaggactccttattgaaggggaattaagtaaaaagattattgggtttattccaagctcaagggaaagttttgaaaaatatggtgaaaattatgtttattactgcgttgattattttcattcggagattttgaaacaactaagaagtgagttggttggagatgatagtttgactaaagatatggaaggggctgagaagttggccttagattttcaagaaacacaggttaaagtaaaaaccacacttaagcaatttgggttatcagaagaattaattaaatcaggaagctaa

SEQ ID NO: 106777 - DNA, 255 bp, Enterobacter aerogenes
atgcgtagcggtactgttctcaaaggtctctcgcagaaactgaaccatcgcatttgcagaatcacgctgttctcggtagcgctccgcctctctctgcagacgcaatatttccccattgcgctgattgataacggcgcgtgcctcttcgagctggcggataagcgacgcctcttccgaaatattcatgcggcctccgtttttactaccggcacggcgcagcctggcagcagttcaaccgccggcgctatgcactga

SEQ ID NO: 106778 - DNA, 867 bp, Enterobacter aerogenes
ttgaatgctatcgcctgtacgatgccgatattgccggaatataacgtagctatcgaccgctacggcgagtgggtagtggtgcaggagtacgcgccgccgaaaaccgtcgatgcgcacaaagcgcgccagcgtctgttcgatattatcgccgcgactatcgcggtgttagggattgcgccgaataaactggtgctgaagacccgcgagcggcagaagggtaaaaatcagtaccagaagatggcggagaagggcgactttatcgaggtacaggagtataacgcgcgtctgtgggttaaccttaccgactatctcgacaccggtctgttccttgaccaccgtatcgcccgtcgtatgctcggccagatgagcaagggtaaggatttccttaacctgttctcctataccggcagcgccagcgttcacgccggtctgggcggcgcgcgctcaactacgactgtcgatatgtcacgcacctatctggaatgggcggaacgcaacctgcgtctcaatggtttaaccggccgtgcgcatcgcctgatgcaggcggacgtgctgggttggctgcgggaaagcaccgagcagttcgatctgatctttatcgatccgccgaccttctccaactccaaacgaatggaagatgcctttgatgtgcagcgtgatcatatccgtctgatgaccgatctaaaacgtctgctgcgtaaaggcggcacgattatgttctcgaataacaaacgcggtttccgtatggatcatgacgggctggcggcgcttggcctgaaggcgcaagaaatttcgcaaaaaacgctgtcgcaggattttgcccgcaaccgtcagatccacaactgctggctgattaccgcggcctga

SEQ ID NO: 106779 - DNA, 993 bp, Enterobacter aerogenes
atgaaagcgtcagtaaattataattatgctgaagatatcttgcgcttgaatattaaaaacactaagcagcaactgcataataactttgccgcgaaaaaacagctgtgcattttaatgatcgatgccgcgatcgtcagatttcgtcagcaagaacaatcactgtatgcgcctctattggccagggaatatatcagagttcctgttgcgcctcgttatctgtcagcggagtttgaaccacgtttaattcccctcgatttgtccattgctgaggatgtgcttttgctggagatgagcgcagagctggcttgtaatgaaattcatccacaacgcattaatcaaggttatggccgattaatctgtggctggctttcttgttcgacttcgccggaggcattagcgcttcatttagcgaaaagcgcgctgcaggagcgtgcgggacaggatacgctgttacgcttttatgatcctgccgtcgcgctgcctttatggtcattattagataactggcagcagcaacgtttattcggaccattagcagcctggttttctattgatggagatggtcaatggattcagaggaagggcgcggaacaacagaatattagattatcttattctctgtcattgagtggcgataattggcgcgatattcagtttatcggcattgtaaatcgcattatgtgccaatatcgccattcccatattaatgagtcgagattttccgagcgccaggtttttaaccgaattattccggcgctccgccgcgcatgggcatttccatttcatcagccgcaagatttggccctttatggcactcatgctttaacaatatcccctgattttgatcgccatacacatctattgcaggtgcttcagaaaggccctatggagtgcaatcaaacatatcgtgaaagggtagcaattctcagtgagcagcagtggcagcgaataaaggatgagtacgcgcaatatccataccagggcgatcaataa

SEQ ID NO: 106780 - DNA, 1170 bp, Enterobacter aerogenes
atggcctggaatatacctgagaaacaaaagttaattgaggtgtcacctatctcctgggggaaaatggcactctcttttataatctctctaatatcgatcgcagttgcatgtgtctcatggtattattttacacatgatgcaaactctatcatgtatgcacttatactatgtgcaagcagtctggggatgtttttacttttcgccgggtggcgttcatttcaacttggtattagtcttgagaaaaatgaagtaattaaggctgagaatgctgcattggacaagatatactccgagtgggcgtcgcaatatatcagtattgtagattatcacttcatgttcccggagcaggcgcaggtagaaaatttgaaacaaggtggtgagataaacattatcgggcaacaaccggtaatgtttcctgttaatgttgattataatacattgttttacgaactgctttcaccactacgctccgttttaataacattagcaaaaaagaatataataaaagttgttttccctatggatatgccttttgatactgcagcatggcaggccttcacgctggcatggagaaaattaggaatgcaagaggagggcattcaaacacctgtctggatgattactcactatgcgcagcaaattgatgaatggcttaaccataccgataatgactttcgcttaattatttcttttgaccccctggtttcgctgctcggtaatgaggcgaagagcgccagcgatggtgtttgtgcgtggctttgtgcgccgcctgaaacagataaaaacgaacggctacaggaaaaaattagaatttatcgtgcgatggcgacaaacctcgatgagttaactcaagatctttctgatgttctgcactttcaatcaactacaggcattgttgaaaaattatgggttggtaagctaaagaatcaagaaacggtaggccaaactattaaaattctcagcgctaatcatagcgaagagaaaatcagacaccacttcgcggaatttatactgggtaggcaaggaaggaataatatgtgggcggcgctatctctatcattattatcatcgggtgatgatggttctgttaatcttattgtgtcagaggatgaggctgggatcgtgttatctaaagtaaaggtcctggggacgcgcgatgcaaaaatatag

SEQ ID NO: 106781 - DNA, 1368 bp, Enterobacter aerogenes
gtgctcactttggtgaaacctatgacgacatattctgaacgccacctcactatcgggggggacccgcgcacgcagacggattacgcgaagctgcgtgaagaaatgcaaaagctcagccacccggcgcgccccgacgttaactggcaatacgcggaacagttgtgcctgtcgctgtttgatcgcaacggcgtggatcttcaaactgcagcctggtatacgctggcccgcacgcatatagctggattatttggactcaatgaaggtctcgctatccttgaaacgttgattacacgccaatggagcggtttgtggccccagccggtccacgcgcggatggaaatcgtctgcgggttgagcaggcggttacagcaggtgctgcgtacgttaaccctggcttatgtcgaccttagcgagatatatcaagcggaagtgcatctaaaagcgcttgatacagccctgcaacggctggagcttaagtatgccagtcaattggatgtcctaatcgccctgattcataatgccgctgtgcgattggaaaatagcgatggcgtaacccgcgacgatcattcgcagcacgctggcgtgaccgtcccggggagcgcaatttttgacgttgataagacagttgaacggataaaacgggtttacattgccccagcggatacctctgcagagatggcgacagcaagtgtcttaccgccgacgataaagcgctggcgaccctttgccgccggtatgctgacaatgctgttgataacagtggcgtcggtgtggggatggcaggtaaaccattcaccagaccaggaagaggtgcaattcgccgccagcctggcgccattgccagtggcgctttcggctgaacagttgcgttcctttcagccacgctcgccgtcagccgaccggggaataatgcagacccagcagcagttagcccgactggctcagctcaagccggattgggctatcgatgagggagagcgattggtgcggcaggcgctaatactttggcctgagcaggcgcaaacgctctcccggcagtggcatcaacagctcaccggcgccgcgctgccggttgaagatcttaatggctggcatcacggtatgcggcagttgcagcaattggcacaacgccttgatgcgcttgatgaacaaaaggggaaatatctgaccgtaagcgagctaaaatcagcggtgttcgcgatgacccagtcatttaatcgtactattccggtcgaagagcaactgcgtcagctgacggaaatgccgcaagagcaggccaaaagttcagcgcagcaacaccaggcggaacagcatttgcagcagttgattacccgttatgccttgctgaaattaaacaagacggaatag

SEQ ID NO: 106782 - DNA, 618 bp, Enterobacter aerogenes
atggttttttgcacgaccggttgcaatactctgatgcttaatgaatatattagaggtcatgaatcgcaggaaaaaatatacgccagagataatgttgtcgctatcgcactcagtaaagatgaaaataagaaaaacgaggtgatatttattggtgagcgctttaattatccgataaagcaaggcggggataagattgataagatgtatgaattaaaagagagctatctgcctcagttgataattactgatatggaccgctttaatattggaaaaacccgcacggattttacagcagatatcagatttaaatatggcgagcgaaaaatagataaagcaacggagaatatcctcgtgaaaaatcaatttgattgctatgggttcggggaaaataccggtccttgttatcgatctgttaattctttaaaggggactattcagaaaaaggaaaaaatccaaggcaacatcgttatcagcaactttgataaaccctatgctgtgaacttttataaaaaaaatggcctttcagctgctcgcgctctgtatccacttgccgtggttgctgatattgtaacatcgcctgtacaactactcgtcgttgcatcccactactggagatag

SEQ ID NO: 106783 - DNA, 777 bp, Enterobacter aerogenes
atgaataaatctctcatggcggtgccaataatccttgttattgtagcgtgcaagccgttatctgaatcacctctctgtgatgagacacagcgggctatcaatgatgcaaacttttatattttgacgcatttagtcccttttaaaggggatgtacaaacggtacgcattattgagtcgccggataatatttccaccgtgattaattttgcccagtgcggaaggctggaaacttttgaacgagaaagtaaaagtagtacgtcgactgaagcaaaaacactcagaaataaagcccgctggcaaaaaggtaaagggtgggttacagaatggattagactcacccggagtgccactgggaaaatgtctaaattaattatgaccgagcgttatgataccgacaagctggggcgcattattagttccagtggggttatcaccggtattgagtccccgagagcgatgagctcgatcgtctatagctataacgatcaacatcaaatggtaagtagaatgattcgtgggggaatgatagcgagtctatcttttaattatgattataaaggaaagtacttaacccgtatttctacttctgattccacgtcgacgctgcgctgggatgagcaggggcgctggttatcaagtgagacgcagactgactattcagggaaaagagaatcccgatgtctggcctgggatcggggtggcaactgcgtagatgaatttggcgagagtcagtcaaaaaccgaaagggtgagctataagtttacgtattaccaataa

SEQ ID NO: 106784 - DNA, 219 bp, Enterobacter aerogenes
atgcatattccctatgacgacccggtgccggtggatatttcaaaccgattaatgaatacaagaatgaagtggataaattgccggaaaaataaaatccggcaattaaaaaaagcgatgaataaactaagacaaaagttgacgtataagttcgccgagccgtttgactccctgctcttctttttctccccagccccaggcggtattaaaacggaaaaatga

SEQ ID NO: 106785 - DNA, 726 bp, Enterobacter aerogenes
gtggaaaatgtgactatcaaagaaaacaaaaagacacaaacgatgattcgcatcgtattaatcctgataggtttgaccgctatcttcgcgggtctctctctccttagtggcgatatgtggcgcatcatacccgatgccgacccggaaaaaaccactactggaactcttgttcgtcttattatatattcacccagcaaattcttttttgcgttgttatatgtttttatcgccccactaatatggcttttgcttattcgtaaaattaatattcgtcgcctgcaccaccctgttatccctgcaattttgtttctctgcgcgggtgtcttcgtttttttgcatccgggagtaacaccgggcaaagacttaagcattcagtacagtcgtcacgatagctatcataccgctatattctggcggaaaagaatgattcgcatccatcaaaataatacagttaaatacgaaacagttatcgagactaaagattccagttgggattttagaaaatataatattaaaagcgcctggcgctgcaaagtcgaacaatattcaagtttttcaactctgggctccaatgaaacctggttcccaggtagcgatccccaactgctggccacgaactgtagccaaattaaggacattgaaggaatctctgaagaaacactctacagtgcccaccgtattgcaactcaaaatgacccgtctgcagtgcagaaaaaggaacgatga

SEQ ID NO: 106786 - DNA, 558 bp, Enterobacter aerogenes
gtgataggcattccgtcccagctcacttcaattccctgttgcgtcagggcgttacgctgcggcgactgctcgttaaggaagccgttaccgccgcaggcggaactgtcgtggtggtatcaattctactttgccaccccgcgcggcgaggcgggctaccggcaaaatacccatgactttgccaaatttatctggcatcaggcttcgccgcggtggacattcacggaggccacgttcgccaatagcgcgaaagcgctggataacccggatcacgttgccgtcaccatcagcaactaccgctggcgcctggggttggagcagggcgaagcgaaatatgcggcttacgaacagcgactcgcgaaactgccggcgattagcgtacccacaattaccatcgagggggaaaacaatggcgcgccgcatccggcgccggatacctatcgggcgaaattcaccggtaaatatgaacatcgggatttcaaaggcgcagtgggacataacccgccgcaggaggcgccagcagaatttgttcaggcggttattgacgccgatcgtttataa

SEQ ID NO: 106787 - DNA, 372 bp, Enterobacter aerogenes
gtgaactggaataagcaaacctctattacccatctccgctcgcatgcccataagcaatctcaatatgaatgtgcaaaatacatccgccaggctatagaagctggaggaattaaacttgagcgcacgcgcgacgcgaaagattatgggccaatattattgcgcgccggatttaaagaagtgccgccgggttcgacgctgctgagcggcgatgtcgcagtgattcagccttatgcgggaggtaaccctagcgggcacatgacgatgtatgacggcaagcagtggatatccgacttcacccaacgaagcatgtatccaggtcctggctatcgtcgtctgcaaccagcgttcaaggtatacaggatgaatcaatga

SEQ ID NO: 106788 - DNA, 498 bp, Enterobacter aerogenes
atgagaactcttcccttaatgataatatttttactctcagcgtgtgtgggtcatcctcaagagagtccggctaaccgtgttgcggcgttttactcttcctatctggaatttatgtcgggcagcgatgatagatatgatcagctgcaagaatatatttcgactgatactcttgccaggctaagtaatataggcgcaatcccggagcaagagattatcggctccgattattttacttatgttcaggattacgatgcatcctggataaaaaggctaaaaattggtcatgcccgcgctttaatggggggaaaagttattccggtatggctcggtattgaaaacggcaatgttttacaccttgaggtatatatgcgctgcgaaaatggcaagtggaaaatataccgcgtaaaggatataagtcatcattatgagcagccgatatttaatgccggagcaatagcccaggcaaaatctgccgcccaaaacaactttagcgagtag

SEQ ID NO: 106789 - DNA, 903 bp, Enterobacter aerogenes
atgaatcatgatgttaaaaaaccaagggtggcgataatcggccccgggagcatcgggctggacctgatgtataaaataaaaaagcataataaattcgatcttgcgtttgttgtagggcgagataacagtagtacaggattaaaattagctcgcagcgaaggatatgaagtatctgctgaggggattgagtttatcaatgaccatctcgaccattttgatttagtctttgatgccacatcagctatatcgcataactatcacaacaaaacttttgctgaaaaaaacaaaatcgccattgatctaacgccagctaaaattggcatattgtgcgtcccatcaattaatctaaaagaaactaaagaagcacagaatattaatcttatcacctgcggtgggcaatccagtctccccattgcctgggctatatcaaaagcatctcaatccattgaatatattgaggtagtctcaactatcgcagctaaaagcgcaggtctggcgacgcgccagaatattgatgaatacattacaacaactgagtcagcattaaaaaaattctctgcagcaaaaaatgtaaaagcaatattaaacatcaatccagcaaaaccagaaatatgcatgcagacaactctatacataaaagcaaaatacgaatgtttttctacgttaacaaacgcgatttcaagcatagtcacgaaagtccaatcttacgtgccaggctatcgccttgagtacgaaccgcgaatccgcaatggtgaggttgtagtcaatatcagcgtaaggggtagtggtgattatctgccttcttatgctggcaatctggacattatcaactgtgcggcaattgcagtggccgaatataaacttggaataaagaatgagtccacttatgaaaatattaattag

SEQ ID NO: 106790 - DNA, 999 bp, Enterobacter aerogenes
atgaaaatattaattagtgattcaacgcttcgtgatggtaatcatgccatacgccatcagctcactaccgaacaaattaaaatttatgccagaaaagctgaagacgcacatcttgatatcattgaagtaggccacggaaacggtttgggagcttcatcaagcctgcttggccatgccgcagtaagcgacatggagatgttaattactgcgcgcagtcagttacaaaagacaaaattaggagtccatttcattcccggttttggtaaatcagctgatatcgataatgccgttgctgctggagtggatattttccgtatcgccagccactgtactgagtcaaataccactttacgctatatcgaacaaggaaaaacacacgacaaaactgtattcggtgtattaatgatgtctcacatggcaagcacctctgaactcgttgaacaagcatcactgatggaaaaatatggtgccgatggcattatattaatggatagtgctggatattatgtccccgaaatgactcgtgaaagaattgcgaccctggtagataatttaaatattaaggttggttttcacgcacataacaatcttggcttagcagttgcaaattcattagtcgctgtggaagcaggtgcctcaattattgatgcctgtatcatgggcttcggtgctggcgcaggaaatactcaactagaaagcctggtagccgtccttgaacgatacggatttactatgaacacgtcatttgagcgggtatcagaaatgttgccagacctcattgacaccatcggtcacacaactccttacataaaactgccaaatattgccagtggcctttatggattgttttcaggttatgtaccacacgttcaacgtgccgcacaagaattcaaggtaaacgaatttgaattatataaaattttatccgcacgcaaactggttgccggccaggaagacatcattattgaagaagctgtgaaactttcacaattgcattaa

SEQ ID NO: 106791 - DNA, 1545 bp, Enterobacter aerogenes
atgaatctcggtgcattacaacctaagcttattcatttagcgcttgccgaatatgccacccggaccccgaataaaatcgctgttattcatggcaacagatcgctaacctatcaagagcttcaccaattatcaaatcaactggcgcattatctggtaagccgtggggttaaatctggtgatagcgtaggaatttgctttcagccatgccttaatactctggtgtgtattctggccattttaaaaacgggtgctgcctatatccccctggatccgatgaatccaccagaaaggctaaaagttattagcaatcaagtggataatctacagtttatttttaccactgtagaaaccagagataatttctcaatagataaacaagttattttaacagatacattccttaaggacttaaataatcatccggcaaccgcccctgaaattaccgtggaaagcgatcatctttgctatattgtatttacctctggaacaactggtataccaaaagctgtagccgtcagacatcgcggttgggcaaatctactgaactggttccagaatagatatcagcttaatgaactatcggtgaacttgttagtcagttcatttggctttgatatttcccagagaagcatgcttaccccaatctatactggttcgacattagtgattagtgaaagtaaatactttgaccctatccttattggcgaattaattaataaacataatgtgcaaacgctccatctggcgccaagttcattgtatgccattattgaatcatggcctgagattaaccgcttaccttctctgcgctatctgttcatcgggggggaagcgctatccgtgcctcgcattactggctgggcaatggcgacagaacgacagtgtgaatttatccatcagtatggagtggctgaatgtaccgatgttgctacttcctacaccatgcgacacttttcccgctatcttgaggagggtatacctttaggggaaacagtcgcaggttgtaatatacatgtagtcgatgaaaattttatcccggtagaaaacggtcattccggtgaattgataattacaggaactggagttggtgctggttatattaataacgaggagttaaataagcaaaggtttattcagttgccagttaacaatacctggatcagtgcctatcgcagcggagacttcgcgcgcaaaagagatgatggcgagtttgtttgcattggcagaaaagataaccaaattaaaataagaggtatacttactaacctttctgatattgagaatgttgtaaaagcaaacaatagtatagtaaaagaagcaatcgttatcccatataatgaaagtgaaactgacaccagactttgtatttttctgtattctgatattactgagcatttacgtccagagcttacagtaatcaagagcgaaataattaatcatttgcctatgcacatgattccaacaaaatatcagtggatagaatcatttccattaaccactaatggcaaagtaaatagaaacgcgttagctgaactaattatttaa

SEQ ID NO: 106792 - DNA, 927 bp, Enterobacter aerogenes
atgagtgattttgtcgctacaacgggtcttgcgaaaaacgctgaaatcccagaagatattaaagatgatattttaaaatttgaacgcgatggatttatcgggccaattaaattatatgagcccgaagaggctggtgaaattcttcgtgccctcagattagcaaaccacgatcgtgagcatatattgtatgacaacaatatgaattacgaccgtcattttgatatacctgaactatctaagcatattatgcatccgacaattaccaagtaccttaaagccattctcggcccggatttgctttgctggcgttcagaatggtttgcgaaattccctggtgcagcgggtaccgaatggcatcaagtacgcgattatagttacaccgacggaaatccccttattgtaccaacggaaactagctggaatgctttcattgatctcaccgtctggactgcattcacacctgcaaaaattaaaacagcctgcatgcgttttttaccaggttcacattacaaatattattatgatgagaagaaaaatgctcaaactggccgcgccggaagctatagccatatggaaaccaacaccggtttcttcggttatgacttctcagagttcaaggtagaccctgaatgggaccctgagggagccgaccctgtagacatggaattaaacgctggcgaatgcgttatttttactgcctcttgtgcccatgcttcacaccctaatattactgaaaaggaaacgcgtctcgcaatttcagggcggtatgtaccgacccatgtacgagtctatccaaatttgaaatcgtataacgcacatggtgaaaccttcgatcttgaaaattatgcgacggtgttagtgagtggtgaagataattatcaccataatagaatcagaaccaagaataatcgcggcgttaaattttga

SEQ ID NO: 106793 - DNA, 207 bp, Enterobacter aerogenes
atgaaatcacaaataataaaaatttatgctgaagaacttaatcacccaggccttactgaaaaagatgatttttatgatgttggtggccactctttaattatggctaagataagaaagcgtcttctgacggagcttaacctcaacgttcctatggatagcctatttagatatctaaccgtagaaagtctggcctcacatatactataa

SEQ ID NO: 106794 - DNA, 612 bp, Enterobacter aerogenes
atggaaatttttctttatacacttggtgtgatgtatagccctggcccagttaatttcatgggcatgaacgctggtttaactgggcaattcaaaaggacttttggttttttcatcggcgtaggctgcgcgatgtttactttatttatcattcttggttacgccggtgaggcagtaatctcgcataagtatttaccttatatctcattagtagggtcgatatatactttttatctggcattcaagatgctgacctcaaatattcaaataaatagcgacagccaagaacctgataccagtaaaatacttaccttttggaatggttttttaattcaagcgctaaatcctaaaggaatgctcgtggttttacctgttactaccgtaatgtatcccgcagcgcatattacaggatcaatgatatttttagtttccattttaatatctttcggtggtgctggcgccccgggattgtattcattttttggtgctgccattggtaagaaaataaaaaatgactcatggctaaacctgattaataaaacaatggggatcatgctggcagttgtggctgttttcatggcctatgatttttttattggtattaaccaaagctga

SEQ ID NO: 106795 - DNA, 399 bp, Enterobacter aerogenes
atgatttccataagtcagataggcaaactaaactgggatagtattccccgagaaaaagtgagccccctaatcgagcgccaggttattcacggtgacgaactcactatcgttaagctatttatgcaggctggcgctagcgttcaaaaacactcacacccaaacgaacagctgacctggatattggatggtcgaataaaatttaaatatggcatcgatttagaaaaaactgcgacgctgtgcgctggcgatgtactacatttaccggccaatattccacatacggcaatatgtctcgaggatactatcgatttcgatattttcacgcctacgcgttccgactgggacaaaccaaatggcaataactatttttcctcagcagatagtatagttggatcatga

SEQ ID NO: 106796 - DNA, 762 bp, Enterobacter aerogenes
atgcaaaagaaaaagtggttttcacagttagggaatataatatccccttccctgcaaataatttgttttccttatgggggcggcggcgcgtcgctctatcgtcattgggctgatatttttggctctgatgtccgggtatgcccaatccatcttcccggacgagaaggacgatacgctgaaaaaccgtatgtggatgcccagcaggtcaccgatgagctgctgcctgagctaattcccttactccacatcccgactatcttttttggctatagccttggcgcggcattagcttataaaactattactgaatgtttaaaaattggaagggcgcaaaatatctcatcgctgatttgttgcgccagaaccccgccgagcggggtagcaaatgatgatgccttaactcatcttactcatgatcaattcatgcagtatatttttactctcggtggtatatcttcccaaacgctgaacgatcctgaaatgcgcagtatggcaattaaacttttacgcagcgactttgctttgtctgccagtatattagagcccaaggaccgaatgctgaatattccaatatacgcgcttggtggtaatgatgatccttcggtatcgccagaaaaacttctgggttgggaaaggcttaccagtggtcagtttagctcttacattcttcccggcggccactttttcatgaatgaaaatagcgatgaattttatcgtttgttgaagaagattgtgtcatgtgaaaaattaaaattaaggtaa

SEQ ID NO: 106797 - DNA, 591 bp, Enterobacter aerogenes
atgattttatttaattcaataatgacaatggcaatggggattagcctaatcctacttgtacccggtccaacaaactcgcttttattagtctccgggcttaaaaaagggatcctcgaaacctctcctttaattattgccgaggcctgtggatatattacagcaatagtattttggacaatattattgtccaccattggcagaaacattcctttattcccagaaatacttaaaatattatgctcattgtatattttttatctcgcaataaaggtgtggtctttgggaggggttgcaaaaagcaatagcagcatatccttcaatcaaatggttattgcttcagcgcttaacccaaaagctttactattcgttactctctttatccctgcgaatcttctttctagtatcaatggctttgctttattttcagcactattccttggaatcatgattcctatcggttttctgtgggtttcgttaggtggagtgattaaaaaaatctcatcacaaaatgtactggggattatttataaaacaatttctttggtgttgatgatgctaagcagcattttattttatactaccttaaaataa

SEQ ID NO: 106798 - DNA, 822 bp, Enterobacter aerogenes
atgaccgaattattaaagccacgggattgggtttatcgtgccccagaaacaaggaaagttgaaaggatagaagcgtatttctctaatcatggttacgaccctcatcgacatgatacctacgcgattggacgtactttgtccggcgtacaaagctttcattatcgtggcgaaatgcagcatagcctaccgggtaatacaatggtattacatccggatgaaatacatgatggcgaagcgggtacgaatgccggttttcattaccggatggtgtatatcgaaccggcaatgattcaaagcattattaaaggtaagccgttgccctttattcgaagtggggttactaccgatgcgcgattatttcgtgcaacaagtacctttttacaaagtatggattgtaaaatagaaccaatggaagaggatgatgcgttatatgatttagcgatttccctggttgaggcaagtggagcgacggtaaaacggaagaaacattttgattatgttgcggcagaaaaagcgagagagtatatccacgccaatcttgataagaatattacattggatgaactcgaaaacaataccagtcgtgaccgctggagtttgtcacgggatttcagactgttgtttggcaccagccctcacagatatatgaccatgcgtagattagatattgcaaaatcttgtttgatggttggggaatcaattaccgatgctgcgcttatttctggtttttttgatcaaagccatatgtcacggcattttaccaaaacctttggattaacacccgcacactggcgagatattaatagagtcaaaaatttatag

SEQ ID NO: 106799 - DNA, 408 bp, Enterobacter aerogenes
atgttcgatacaaagattgcatttattgttcgcgatgacctgcaggcatggcagaagcttaacgttgtcgcctttctggcaaccggtatcgcctcatcggcgtcagagattattggcagcccctacattgatgcggcaggccaccattacggcagcatgtctggccaaccgatgctcatttttggcgccgatcgtgaagcgctgcaaaaagtgcgtaagaaaggcctggaacgcgaaatgttgctcatcccgtatgttcaggccatgttttcaaccggacgcgacgatgataatcgcgcagtttttctggctgaggatgccgacaatatggatctggttggcctggccgtccatggacaaaagaaagtggtcgacaaagtcataaaaggtttatcgctacataaataa

SEQ ID NO: 106800 - DNA, 501 bp, Enterobacter aerogenes
atgctgtacttagtcataagcttcgcgaaaaaagatctattcatcgataaaaaaaagcaatggaagatgtcacaaaacagcgaacagctggcgagatgtgcggggaaatgcgatttttgtgattctgacaaggttttcaccccggcttgcgctgcgcttagccgggctaccgggctggttatgcgctgtgcgaatgtagccctgataaggcgcttgcgccgcaatcagggaagcgctcgagtcgaacctctgcccccggaggttctcatcctcttcaggccgcagatgcaaaaaagcctgctcgttgagcaggcttttcaaatttggtcggtgatagaggatgactcgccacttcgtggctcgccctacgggccgttgctgacgcaacgttctctcgctacgctcgagtcgaacctctgcccccggaggttctcatcctcttcaggccgcagatgcaaaaaagcctgctcgttgagcaggcttttcgaatttggtcggtga

SEQ ID NO: 106801 - DNA, 513 bp, Enterobacter aerogenes
atggtggtttccctgcacgtcaggcaattaaaaacaggctggtattcaatgacgccttttgcgccattctggcgaagccagtttctggcattaaagaaatcagtaccggattgtgcagagacgacaattcgtgttgagtgggcggcagcgtataatactgctggcgtccatgttgtgtcgtggaaactatgtgtgctgactgataatgtccatttaccgttaactgtcggggacgggactgtaacgttattgtcacgccattgcggtaaacgggtgtttaatggctcagcggctttatcccacgctacaggaacgggaggcggcggcgatgaacatccggtaattattgccgccaggatgatgactgtcattttatttgtcatgctttcatctcctcaaaatattgattgcgatgggccgggcggaaataaatgtcattcatacggcggacatctccgtccaaatcaatgctcactatcacgtccagactgtccagaaccttacgcaacataa

SEQ ID NO: 106802 - DNA, 1446 bp, Enterobacter aerogenes
gtgtcacagtttatgtatgagcatgcttatagattcatgctattattttccattatcatttttatattgagcattgccacttggggattgctgagaaaaggacattcctctgaagtcgaagctaacattccatctaaaaaaataaaccttacttatttcattgcatttgcaattattctggcgctttatgttactttaatcccgatgtgggaggactttacctatcaggataatgatattttttttcgcacactttttaatggtgctcaatggtacagagcgccagtatggttaggcgccggtcgactattccctctagctcatcaggaatgggctctaatagctaaagttagcgccagcaactttgcttatcattttttcgcggtaatagaggtaatattcttttgcttcctgatggttaaattattcggcggaaaaatatcattatttgtatcattgttattattagcatcaccaccattcgttcagtccttttacggattaatatatccagaaagaaatatgataattcttttatcattaattattcttgccataaggtcacactcaagaacaggtaccttatccagtcttatcctgttatcagcagccacttgcgcatttttattttacaaagaaacttctttccttataatttatggcttagccgccagttcattgctctactatttcattactcgagagaaacaggttgtgacaattacagtcactttatttgtttctgcctcattgtggttagcgacttatgtttttttcatcatgcctgaaatccaggatgcatatggaaagggattggccaatgtcacacatgtactaatatgtatgtctatgtctcccgtaacatatatgtcaattgtatcaatgggtatatttgcatttaatttaaaaatgaaatcaatattctcattaatgcctgtaattgcaattggctactcatttacaatgtacatgctaagttttgacatgccatactatcatgcgccatcattactaatggccgtaatatctcttttcctggctacccgagaaatagtttgggtggcggtaattatattatcgttcagcacattggcaaccgctaataattcgatagaaataatcaagaccagaaaagaaatggtaagcgctaaggctgacgcagcaaaatacattgccacaatatcaaaaacaaatggaatgaacaatatttccatatcatttataaactctgacccatatgaaaatatgcttttctatggatacatagaaaataaatacaaaataaaagtttctccgttgctaaacgagaaatgctctactgatgtcaattttgtagtcagtttctccaatcaagttagcgaaaaagacctctatacatataaaacaagcgatataccaatgtggaaaaataaatatagcgtttacgttatcaattgtacaaaataa

SEQ ID NO: 106803 - DNA, 957 bp, Enterobacter aerogenes
atgaacgacacactagcaatagttgttccttgctttaatgaagaagaatgtctggaaacgtgcatcaactccttatccggcattttattaaaattaatagaaaaagaaaaaatatcaagtcaaagccatatcattttctccgatgatggcagcacggataaaacctgggaaataatacagcatcattcaacattaacctctatggttaaagggataaaattatcaagaaacaaaggccatcaaattgcattatttgccggtctatcgcaggctaacgcggatattactatcagcatcgatgctgatttacaggatgatattacagttatagagcaaatggttgatgcatatcatgctggatatgatattgtatacggagttagaaatgacagaacgacagacaccctattcaagagaaaaactgctgaaatattttacaacctaatgtccctgatgggagttgaacaagtaaaaaaccatgctgattttcgtttaatgagtcgcagagcggtcaaagcacttgttgaacataatgaacaaaatatgtatctccgtggtctggtaccacttgtaggttttaattcaacaaacgtatactactcgagacttgaaagatttgctggggaatctaaatatccctttaagaaaatgttatctcttgcgcttggtggcattacatctttcagcgttacaccactgagaataattaccgcagttggtttttcaataagtgtactttcttttattctagcactctacgccgtcatttcaaaactcaacggaaatacagtacaagggtggacatcggtaatcattgcaatttttttccttggcggcattcagatgctgtgcattggaatcattggtgagtatgtaggtaaaatttatatggaatctaaaaaacggccaaagtactttattgataaaaccacctccaaccagcaggagaacaaataa

SEQ ID NO: 106804 - DNA, 366 bp, Enterobacter aerogenes
atggcgttaaaacaaccattattttatgtgatggttggagggcttaacactctggttaccgcggtagttatatatactgctatgtataaccatgtgaatccatatatttcgaatgcgcttggttatgcctttggtattattttcagctttgtactgaattccacaatcacattcaagtcaaaaatcaccaccataaaattatttaaatttatcacgacatgtttaatatgttacttgataaatatatcaataatgcgttgggcgttaatctataccagtatcaatggctacatctgtcagctatttggcatggtagcatacattatttgtggctatttattaaataagtattggtctatgaaataa

SEQ ID NO: 106805 - DNA, 144 bp, Enterobacter aerogenes
atgagtaaaactgagattttcctgctgctggttatcctgcttattttaggcagtgccctgtggtttattttcagtgacgagatatgggtattggttagctatctggaaaccttactctaccccaccttaatcaccccagaataa

SEQ ID NO: 106806 - DNA, 183 bp, Enterobacter aerogenes
atgttcatcctggctcgtggcgtaaacgccttatccgggccgcgattcgtagccccggtaagcgcagcgcgaccggggggattacatcaacagcggagcgcgaagtcgttccttgcaaagccaagtgaacaggaggtggatattctggcaggcgcggaagccaacgataaaaaataccgttag

SEQ ID NO: 106807 - DNA, 558 bp, Enterobacter aerogenes
atgaagaaactatgtaccatgtttatccttttattactttctacggtgagttttgccgagaaagatatccagcttatcaaatcatgcgaactaaaacaaaaggaaagagtaggattgctttctcttaaaaccattgatggtaataccttatatttaaaattcaaaaatataattactggagcattcttagataatcatggcaaaagttatgattacacaggtgatatagttctttctcgatgtataaatgaatctttattttttgccttgaattatggttctccatatataaaaggatgcctggtgacaggctgggaaaatggcgaaaaaggtaagaattcccctgaaggtttatgctttgcggagcgaaatattccggaatcaatttggtttggagagcataatattttagttgttattcgcaatcagaagggagtaggttcatggggtggtgaatatattatttacgacaatgcaaagaacgctggtgaaagagcatattcatcagatactttaccttcagcgaaaggctatactattttttatataaacaagtaa

SEQ ID NO: 106808 - DNA, 399 bp, Enterobacter aerogenes
atgttaaaaaatgtagtgtctatcattctctgcgtttttgctgttagtatgtataaagattcggtatatctcgactataaagaaattgaaagactaattagctatggtgaagttgaagattatgtaactttacagttacatgatatgcaatatgcgtgtggtgaatgtaatcggttataccgtgtggataaaataattttctcagaaaacgctgaggataaatattatttgaataaagaaattaaattattgtatttaaataattatgttgagaaggagtttaattctgaagtttgtgcttcgaataagtattatttcgtttatacaggttacttccgtcggaactctctgggtgttggccgtttggatgttaccgatggatataaacagtgtgagtaa

SEQ ID NO: 106809 - DNA, 204 bp, Enterobacter aerogenes
atgcttaatattggatgggcggttggaggccgatatgcctataattcaagcggaagcggcggaattaacgttatactctctaacacaaaaggttcttgctcattacatctgataatccgtcaggggtataataattatgttatgcaaagtgaagatggaatattttgtctcaaaaaactcattcatgtcaattacatttattaa

SEQ ID NO: 106810 - DNA, 759 bp, Enterobacter aerogenes
atgggttacaaaattaccaacctgtggcatggaataaatcattttctagaaaaacgttcttgcttaaaaaaaagcttattgttttttatgattatatctttgtatggcatgtatcaaatacattcacaaaaatatcagatgtattttacttatcctaccggggattcaaatgatccgcactggcctaacaaacgaatatggtttgatgccagcgaatggttaaatacatcacgatatataaaaatcaatggaaactggttattaaatcttcaatatatacctatatccgatgaagaaatatctggcccttgcgtgctgtcgaaaattaaggatgaaattaagcatgtcacgtatcatattcctgaattagccaagctatcaagcatggatgatgcgagcttttatagattagtaaaaaacacggtttcttatgaatatttgatgacgaaatttgacaatgaaacattaaaacccacgtatgatttattcctggtctacttttcgtatcaaaatcaaaaatatgaaattgaaatgtatagggtgccattattacatgatgaaaaaatatttgcttttaagataacaggacattctatacggaaatcagcaggagtaaataacgcgaaggaacagtatttttatcgtgactatttaacagggcgaaaaataaaaacatcgattcgcactgatattgaacagctattggaccgctattatattaagttatacaacaaatttggcagcgacaatgaaaaatag

SEQ ID NO: 106811 - DNA, 294 bp, Enterobacter aerogenes
atgaagcagagcgaaaccctgaatgattttcaggtgctctcaaggcccgtcggcgcacgccggacccgctgtcgctacagcgccacgcgggatattaccctgcatccactggcgctgccggaagtgtcgttacagtacgaacaggacggacgttcggttatccgtctgcgctttgagcgcagcccgctggttggggactggtcgcagattgatttatcacggctgccattgtatctgaatgccgacagtccggtggcctgtgcgttacaccgggcgttgacgctgggagtatag

SEQ ID NO: 106812 - DNA, 1995 bp, Enterobacter aerogenes
atgacccaggtgcgcgctgaactacttgaacttaccccgcaggcgctgaccgcgctcagcaacgccggcttcgtcaaacgaagccttaaagaactggatgccggaaatattcccgaactgacgcagcaaagcgacggtacgttgagcgcccactttagcgacggcgtccatacccggctggcgcagggacaatcgctcaaacaggctagctgtagctgcggcgccaccggcatgtgtcgccatcgggtgatgctggtattgagctaccagcgcgctaatgccagcgcaggcgccgcagaagacgcacagcgttggagcccttcgctgtggctacctgaactcgcgatgctgcctgatgcgacgcggcggcgcgcgcagctgctggcggctcaggggttaacggtagaactgttctgcctgcccggcgaaccgccagcggcaaaattgcccatgagcgatatccgtttctattcccgcagcagcctacgctttgcgcgctgcgactgcgtggaaggcacgctgtgcgaacacgtcgcgctggcggtacaggcctttgccgatgctgaatcacggcaacccggttttcaccatctggtgtggcagttccacaatcggaagtcgccgcctgaccgtgggccattttctacgccacctggggaaacctgccgcgtggcgatacagcaacttatcgatactctctggcaaggcggcctcagccagccctcaatcagctacgaatccgcgtttatccgggcgcaaaaagcggcgcaaagcgccgactggcgttgggtggaaagcgcgctggcgcaactgcgccagggcgtcgacgcttttcagcagcgggctagcaactatcatccggcatcgcttctggcgcaactggcggcgctcgacggccgcctgcaaagtgcgggctggatggcgcaactcgatcgggatgacattgttcccccattgccatggcgcaatatcgtcggcttagatatcgctggcgaggtccagcttgattacctgaggctggtttcattaggcatgcgcagctggcaggatagccaacggtacgggctacgcatttggtattgcgacccggataccggcaacatcctgcagctgtcacgcagctggccgctggctgagcgggagcagcaccccgtctggcagcggagaatattcagttttcaggccggcgcgcttgccggcgggcaaatcatctctcaatcggcgcgccgtaccgctaatggcgaattgttgctcggtagccgccagcgtcttaatagccacgttccgctgacggcagaggcatggggcctgctcacgccgccgctgcgccagccgggagtgagcgcattacgtcaacatctgcaagcgcgcccgcccgcctgcgtgcgcccactcagccaggtggataatttgttcattttgccagtgggagaatgtctcgcgctgggctgggacgcttcgcggcaaacgctggatgcgcggatacaaagcggcgatgacgacaataatatcctgcagctgtcgctacgggcctccgccaccgcgcctttcgccatcgaacgcatggcctctctgctgcgacagcaggaagatcccgtctgtatggtctccggcctggtcaccatgtatgacgggacgttaacgctggaaccactaacgatgatcactcgtactcgcgcctgggtgctggacgtggaggaaaacgccgtcggctcgttaccgtcagccaatatcaggccggcccccgcggcggcgcaaagcctgctactgcgcggccaggcgctgcttattcagatcctgcataacggcctgcgctatcagcagcaaagtctgttttacgaggcacaaatacttagcgacgaactggcgaatagcggctttcatcagctcgcccgcctgtaccgtcaattgattgagaacggcacggcaaccaccagcgcaacgcttaatgcgctaatccaccttagcgaacaactggcgctgatgctcgattaa

SEQ ID NO: 106813 - DNA, 1137 bp, Enterobacter aerogenes
atgaatcgatttgccgatttattgaccaccaccgagctacagcgctggcggctggtgctgggcgaggccgccgaaaactgtcttggcggcctgagcgagcaggcgcgcaagattgaccacacgcttgagtggctctacggccgcgacccacaacgactggcgcgcggcgaacgctgtggtactctgcacgactcaagcctgaccacgccggagtggatcaacgccgtccataccctctttccacagcaggtcatcgagcgtctggagagcgatgccgtgctgcgctacggtattgacgatatagtgaccaatctggatgtactgcggcatatcactccttccgaaagcctactgcgcgcggtgctgcacactaagcatctgatgaacccggatgtgctgcatgttgctcgccaactggtacggcaggtcgttgagcaaattatggcccggctggcgaaagaggtccgccaggcattttccggagtacgcgatcgccgccgcccttcgcggcagccgctggcgcgaaactttgattttaaaaacacgctgcgcgccaatctcaaacattgggatccgcaacgcggcaagctatatattgaatcgccgcgctttatcagccgtattaaacggcacagcgaacgctggcagctcatcctgttggtggatcaaagcggatcgatgactgattcggtgattcattctgcggtaatggccgcctgcttgtggcaactgccagggatacgcacccatctggtggcctttgataccaaggttgtcgatctgaccgccgacgtagccgacccggtagaactgttgatgaaagtccagcttggcggcggcactaatattgcctgtgcaatcgagtacgcacgccagctcatcgaacagccggcaaaaagcgttatcgtgctggtaagcgatttgttcgagggcggcccccgttcgcaattggttcacctggtgaaacagtgcgtgaaagatggcagtaaagtactggggctggcggcgctcgatagtcatgcctcaccgtgttacgaccgagttaccgcccaggcgatggcggatgtcggggcgcggattgccgccatgacgcccggcgaactggcggcatggctggcggagaatctacaatcatga

SEQ ID NO: 106814 - DNA, 2280 bp, Enterobacter aerogenes
atgtctgagcagccgttaatcatcggtattcgccaccacagcccggcctgcgcaaggctggtcaaagagcggattgccgctgtgcgtccgcgctatgtcctgatagaaggccccgcggatttcaacagccgcatagaagaactttttctccctcatcagctacctgtggctatctatagctactaccaaatcgctgacgaccctacgccgggacgcggcgcatgggtgccttttgccgacttttctcccgaatggcaggcgctgcaagcggcgaagtctattggggcgcaaatccgttttatcgatctgccgctttgggcgcaaacggctgatgatcatgatggttcaaccgcccgaatgagtggggatcgcctgcgcctgcaacaggcctgcggcatggagaacagcgacgcgctatgggatcatctgttcgaagatgagtcccagcaagcttcgctggcgccggcactggaacactatttttcccgcctgcgcggcgacgaaccgggcggagagaacagccgtcagcgtgaagcgtatatggcacgctggctggcgtgggcgatgcaacaaaacaacgggccggtcgcggtaatttgcggcggttggcatgccccggcgctggccgcaggctggcgcgggtgcgcgacgcaggcgcaggagcccgcactcccacagccaggcgccgatgccgtcaccggctgttatctcaccccctacagcgaaaagcgccttgatgctttaaccggatatctttccggtatgcctgctccggtgtggcaaggctggtgctggcgattaggattgcagcaagccggagaaaagctattacaaaccattcttggcaatctccgccagcgccgtcagcctgcctccaccgccgatatggcggcggcgcacctacgcgcaatggcactggcgcagctacgtggtcatcgtctgccgcttcgcagcgactggctggatgcgcttgctggcgcattgataaaagaggcgcttaacgccccgctcccctggagttaccgcggcgtgattcaccccgataccgatccgctgctgctgacactagtcgatacgctggcgggaagcggttttggccagttggcgccgggtactccgcaaccgcccttagcgcaggatgtcagtcgggaactggcccgtcttgccattcccctgcccggccagctgcaccttgaccgccacgagcgctgcggcttggcgcaaagccaggtattgcaccgtcttgctatcctgaacattcccggcatttgcctcctgcagggtcactccacttcattatccggcgacggcgcggaaaactggtcactgacccagccgcttgaacagcatgccgcgctgattgaagccgcccgctttggcgccaccctgacggaagccgcacgtcactgtctggaagcggaaatgctggcatcggttggcattcgcggcctcgcagattgcctgaaccaggcggcgctagcggggctttccgccttcagccatcagctactcgaacaactcgctctattgattgcgcaagagaataacttcgccgaaatgggcccggcgctggaaatattatacgccctatggcggctggatgaggccagcggtatgcaaggttcagcggtactgcaaaccacgctctgcgcggcgctggaccgcgcgctgtggctctgtgaaaccagttatcagcccgatgaggcgcaattctatgcccatattcatagctggcagacgctgtgtcatattcttcgcgatcgccactgcgctaccgcgcttcctggcctggcattcgacgccgcgctcgccctgttccagcgccgtcttgccgacgtagatgcagccgccattgaccgcggcgcggcgctgggcgcgcttatcaggcttgaacacccctgcgccagcgcgcagacggcgctgaatctgctggcgcaactctccgcagtgcgactgggagaaatgctgcaaggcatgctggcgttagcacgccaccagttagcctgtcagcctacttttgtcgccggcttcagcgcgctattggcgcagcttgcggaggacgaatttattattgccctgcccgatcttcgcgccgcgatggcctggcttcctccacgtgaacgcggcgcgctggcgcagcaagtgctcgaacactatcacctgccagcgctgccggctcaagcgttacaaacgctaagtagctcgccagactgcatcgtccgccaccaacaacaagaacaacgggcgcgcgaaacgcttaaacactggggaatatattga

SEQ ID NO: 106815 - DNA, 2637 bp, Enterobacter aerogenes
atgaacacttttatctatcaagacgaaaaatcacataaattctgggcaatcgaacagcaagataatgaactgcatctgcactggggcaaggtcggcactaacggtcaacgccagattaagacttttaccgatgcggcggcagccagcaaagccggacagaaactgataaatgaaaaaacccgtaaaggctacgttgcagataccccggtttcacaacctgccacggttgaacaacttactgcgcccatagctcaagccgtcgagccacctcctgcgcccctgtccgcgcctgacgacacccctcacccatggctgcctgatgatgcagggtgcgttaacaacaaactgccatcggtactggtttccccgccgtgggcggtgaaaaagaaaaaatcaccgattccgcaactgaacttaacaccgcttgctttagcccccttatgtatgctgacggaagaggagagcaaagcgcttcttttgcgatataactggctctcgtatcaggaagagatggacggaaaggtggatgaaaaagagtatcttacgcacctgggtttcaggagctggtgccgtcaggataaacgctatgaaaatgcctcagcgcgggtggtgaaagcctggcggcagcaggattaccctacgcttatcgccgaattcaaagattaccactccccttatcatggggaatggaacgtttatttgctcaccgccttgcctgttgcagaggcagctcaggtctggaatgttctgagcaaagaaccgcataccggtgccgaccacgttatggaatacctgcggcttgccgggctgccgggttttattaatgccttgtcccgctatccgcaggagaatttaccggtcgccatctggtttgccgccagcgagctggcgccgataatcgcccgcgcctttaacaagcttaaaaccctgcgcgaagacgcccgcgagtggctcctggcctatccggaacatgccatcaccgggctattacccgcggcccttgggaaagcgtgtgaagcccaggatagcgcccgtctggccattcgtatgctggtggacaacggccaccagccgctgcttgaacagatagcgcaacgctatcacctgccggaagtgactcaagcggtgcgcgctctactcgcgatcgatccgctggataaccacccaaccaaaatcccgcccctcccggcgttttaccagcctgcgttgtggtcacggccgctgctgcgggaaaatggccaggccttgccggatacagctttaaaaaccctcggcgaaatgctgcgtttcccgactgaagaagggctttatcctggcctgcagcaggtaaaagaactctgcacccccgaatcgctcgccgccttcgcctgggatctattcagcgcgtggcaaaccgccggtgcgccatcgaaagagagttgggcttttagcgccctgggtttcctgggtaatgacaatactgcacgcgcattgacgccgctcatccgcagttggccgggcgaatctcagcataaacgcgcgacgacaggtctggatattcttgccgctatcgggacagatattgccctgatgcagcttaacggcatcgcccagaagctgaagtacaaggccttacaggagcgcgcgcgagagaaaatcgctgatattgcggatagccgtgggctgactgtcgacgagctggaagaccgactcgcgccagatctgggactgggcgaggatggaacgctagcgctcgatttcggcccacgccgcttcatcattagctttgatgaagcactccggccgtacgtacgagatgaaaacggcagccgtctaaaagagctgccaaaaccgaataagagcgatgataacgcgctttcaactgacgccgtgaatcgctacaaagccctgaaaaaagacgcccgcaccatcgccgcccagcaaattgcgcggatggaatccgccatgtgccagcgccgccgctggacgccggaaaactttcatttgttgctggtcaatcatccgctggttcgccacctcactcgtcgcctcgtctggggcgcctatagcgcggagaatatcctgctggcctgcttccgcgtagcggaagacaacagctacagcaccgctgacgatgacctcttcacgctgccagaaggtgatatccgtattgggcttccgcacgcgctggaaatatcgcaggaagacactgccgccttcggtcagctgttcgccgattatgaactgctgccgccgttccgtcagctcgatcgcaactgttacacgttgacaaccgcagaactggagtcatgcgaactgacccgctggacagggcgcaaatgtccaagcgcccgggtaatgggtctggcaaacaaaggctggttgcgcggcgatccgcaggattcaggctggattagctggatgcttaagcccgtgggggaatggacgctggtgatggagatcgacgaaggttttgtcgtcggcatgcgccctgacgaactgagtgccgagcagcttataagcaaaatatggctttgtgatgaaaatgcacaccatgacgggtgcggaagtcacggcgcaatgcaagccacgttttcggtactggacaacatcaccatcagtgagttgattaacgacatcgacgggttatttgagtaa

SEQ ID NO: 106816 - DNA, 627 bp, Enterobacter aerogenes
atgaacatctgcgtcactgattgcccggcggcgctacgcttgcgcgggcctacgggtgatgccagcgaaggggttgtaggccgggtaaggcgaagccgccacccggcgcaaaagcggctccgcgtccgctgccatgattgcccggcggcgctacgcttgcgcgggcctatgggttactccagcggggattttgtaggccgggtaaggcgaagccgccacccggcgcaaaagcggctccgcgtccgctgccatgattgcccggcggcgctacgcttgcgcgggcctatgggttactccagcggggattttgtaggccgggtaaggcgaagccgccacccggcgcgaaagcggctccgcgtccgctgccatgattgcccggcggcgctacgcttgcgcgggcctatgggtgatgccagcgaaggggttgtaggccgggtaaggcgaagccgccacccggcgcaaaagcgaatctatgcttcgctttcatcccagagctaccgatcagtatccttgttcgaaatagctttcgaggataaccacggcagaggcggaatcaacgctgcctttattgagcgcgcgaaaacctccgtgttcgaacagcccggcgcgggcttcgacggtgcttaa

SEQ ID NO: 106817 - DNA, 417 bp, Enterobacter aerogenes
atgaaattacaacgtaaaagcgtattactgttttggggatggatggatctgtttttcattctcgactttctgtggtggaatttttccttacgccgaatccctatctatgacgataccctggcatttttacaattgctggattccgtcgatcccacgctagcctgggtatttccgttcagggtcctgcttattatcagtattccgctgtcgatgatcctgttttttaaacaaagccgctatgccaccgcgatgatgtggatacaagcgccgttccgtttactcctaattaccccttcgctctttgtaggggtatggctaataaaccagctgcaaattggtaatgtcatattaaatttatcatttttattggtttctgaagcacttaaaatgtataccgtatggcggttcaggaaatag

SEQ ID NO: 106818 - DNA, 1917 bp, Enterobacter aerogenes
gtgtcttcatctcacgttgagtcatcttcgttggcccccgttcgcacgccttttgtgacgttaattcttattggattgaacgtggcctggttttgttatctatcccatttcttcacccgtactgatttcaaccatacgacgctggtgcatcaaggcgcaaacattgcgcaattaacgctgacgggtgagccctggcgtctggtcgccagtctttttctgcacggttctttttcccatctgctattgaacatggttgctctgggcgcaatcggggtatacgcggaaaagttgctgggccgctggcgtatggtcttcgtctattttttagccggcgtttttggctcgctggtgagtgccagctatgccctgggtggatatagcccagaggggcgttctcttatctataatatgttttctgcgctgcaggtggttatcagcctcggtgcgtccggcgccattatgggactcgcgggcgcggctatcgtggcgcacattatcgccccctcatacacgcaaagtaaaaacgatctgcgggcgctgtattctatccttggtatggttgtcctgacgctgttgtacggtacgcgggagggggtcgataatgccagtcatatcggtggcctgtgtgctggagtagcaattggttttgtgatggccctgctggggaggcgcaaaaagtggttgacggaggcattgcttctctgtggtggctgcctgttgttactggtggggacgtggatcgcgcaacagcaggtctctgagccggatctgaagatcagagagaacctgcgtaatgaattttaccctctgagcgttgaaaaagaacggcaacaaaagcggcaggctttagccgacgaacgcgttgcgcacatggaaaaatggcctgaaccagtaagctatgaagaggcaagggggacgatcctggctgaaatacccggtattcaagacatggtaataagccacgatggacgtacgctgtacgcggcggttgaagataaaaacaccattaccgtttacagtctcgagcagcataagactctgagaacgattaccgggcctgtgccggctaaaaatgaaaaaggacgcagtctttccggtgtcagagcactgaagcttagtccggatgaaacattgctttatgcaaccggatttgaggcggattcgctatcggttatccgggtcgccaccggggaaatcgttcagactattgcaacgggacgcgggcctgatgccttggttatttcccgcgatggtaaacgcgcatgggtaatgaaccgcattggtaatagtataacggctatcaacctggaaacctataaaccgacaggcaccaccccgcttgagcaatatgatggcttcaccagagataattacaaaatcagtccgcttgcgctctcctcagatgaaaaaacgcttttagcctccggtatgaacagaagtaaaattgttcgcatcgacgccgatacgttgcaaaaggttgattacccggcaggaaataccgatgggaatacgtatgtttttggctttcggccagaaactggcgatgttattttggctgatagtctgggtattgctcggattgagcgaaaatcgcagcaatcaaagcggctatcgcaatggtgcaactacgacaggtattccattgaggccattagcccggatagccgttatattgcgctctctggcaataggctgagtggaatcgtggtggttattaacgtggatgcgggccaggccgtgggggcttatccgaccgatggtataagacaaattcgcttttctgccgacggtaagaggatttatgtactcggggaaaatgcgctgacggagctcgatcgccaaaagtcgctgtcgcttcgggatagttcccggcgcgagatgtacggcgacgttacctgtcttcccaacgttgattaa

SEQ ID NO: 106819 - DNA, 195 bp, Enterobacter aerogenes
atgctaccaacgcctgaaatgtcgggcgtgagtctcaatctcctgctggcgatgaatgcgcttcgcgctcaacgccagcaggaatggctgacgtgttggcaatttccgtttattttcttgaggctggtgatgccgctgtcggatgcggttaaccaagttgaacaacgtattaatggttggttgagtcgtgattaa

SEQ ID NO: 106820 - DNA, 1029 bp, Enterobacter aerogenes
atgcatcccaccgttatattgtttattatcataaaacgtcaccagacatcggggaacttatttttaatgcgtaaatacattagcttcattacattaacgctatctattatttcttatacggctcatgccaatgatacagaatacggcgacgttaatggaacaattagattaatgaagcaaaatcatgtcagcatggtaaaagaacgtctgattatcagtcagcaacgcattaatgtcgattatatctttgttaaccacggtaagcaggatatcactatccccatcgcttttcccatgccgccagcgcaaccatcttattactctggcgggccggggattaccaactttaagctcagcgttaacgggaaacctcagaaaacgcaatcgcgctggatagctgtactagcagatagacagggaaaagtattcagggacgttactcgtcaacttgctgatcagggttggacgattgcacgcttacgcgaggtcttagagtccgatgactcattcggccggcaggaagatatgccagtgctggcgaaagagtggtttaaaaataaagatgacgataattattttcaccttaccgtgcagcaattgttcgtctggcagcaaacctttccctcaggtaaagaggttattattcatcatgcttatacgcccagcgtcactggcggtattcaacgtgaagtcgcggatgttgaggaagttctcgggaaatcatgccagacgaagaataatcgcaaccatctcaaccaaatgcgtcatttacttaaagaaagaggccaattgccgcaattcgaatggtcgataataagctatattttaacctcaggcgctaactggaaagatggaataattgacgactttactttacgaattcataaaaggacggcaaatgatgttgccgttgtatgttttaatcatccactgcagcccattgattcactcaccctggaatttaaacagaaaaattttaaacccgaacagaacctggatgtgacctactactcgatatcgccaaaatga

SEQ ID NO: 106821 - DNA, 1095 bp, Enterobacter aerogenes
atgcgctactttactctgttgttatttgttgtttgtagcttctcatttgctgatgttatgacttcgttaaatcctggcgattatcaacgtcaaagaattgtagaggatttacgtcgggaagaagcaatgccagaccggctttttagtattaaaagaatcgcgtcgaatggagacgtggcttatatatgtgccctggttcaagataaacaaaataattatatggtcgataaaaacaataaatatcatttatatgaccgtattatgctggaaacagataatggttggatcagcgcagtacggctcgatcgtaaggtcgatgggccagaggtagcgcgttgtttctatcaaccggggaaagatctgtattcagagatgttaaagctgcgggtggagaaggaagggagaaaaaatctctgtcagccagttcaccgtgatgatcctctgcgccaagagattttgaaaggaatacgtgccaactacattggggataccaatatactaacgctcaatggagccttaccgacggtgcggtttgtagtagaagatctctgcgccagcgaaacgcatgcttatttctacggcgggacccacggtgaacggcaaagtgaatacacggatcctgaacacggtgaaaaccttgaggttgtattacaaaaagcgagcgacggggcgtggtatccgttaccggaaaaccagcttttgacgcagcaatccagaatcctcagccggcagtatgaaagacgatttactgctgcaatgttagaggacattgcccagaatttaagccaacgctgtgctttagaaggcgattcaataatcgttacaggtgtcctacaggaagtaaaaaatgcaggtgctgtatattggattgttaaaacggataaactgccgcgttgtgtgcgtgatgcggatagccagaaggctggctggaattcgcagttacaactgctgttgactaccgaggaacaggaaaccttgaaagatttgcttggtaaacccgttatcgtcggcggtgatatcctattggcgctcagcgcgcagcatcatacgccgctactgctggataatatcttccttttgaaggaagctcgttag

SEQ ID NO: 106822 - DNA, 843 bp, Enterobacter aerogenes
atggcttcacaaatcctccgtggcgggctgcttacctctgccctgctcctgcttaccgcctgtaccgtagacgttggccgcagcgcctcttctgcctccactaccgatggacgctccccgccatgggctatcaccctccagcggcaaagctcgattgccggcagcgagctacatgaaatcaacgaaagcgacctccgttccggtgacctgctgttctcctccagcctgggcgtcacgtcgcttgggatccgcgccttcagcgcctcttctgtaagccacgtcgcattgtatctcggtgacggtcagattgcggaagccaccggcgccggcgttcagatcatttctgttcaacaggcgctggcgcacagcgataaactgtttgccctcagggtgcccgacctgacgccagatcaggtgatggcgatgaaaaactttgcctggcaggtcaaagacagcgggtataactatcgcggcattatgcagtttattccttatatggtcaccaagccgctctgctcgctcaaccccttctcacgagactttcgccagcagtgcgtcagcggcctggccaaagcgcagctgggcgatgcggcaagcgctgacaagaaagcgtggttttgctcggagtttgtcagcgaggcctttgtccgagccgggcatccgctgacgctcgcgcaggcggcgtggatcagcccctcagacctactgcacatgcgggaaggagacgtcgccacctttaaaccggaaacgcagctgcagtatgtcgggcatttgaagctgggagtttatcttcaggccggtcggctggtgggattaaacagagcaacagctggtatgaattaa

SEQ ID NO: 106823 - DNA, 813 bp, Enterobacter aerogenes
gtgaacatccggaagatgactttacgcctgttagtttcaacaacactattactggcatcgcagtgcatatttgccgccagcagctgtgatatcagcgccatcattaaaaaggcctggccagacgcacagacaacggcagaaggcgttctgaccacaaataaacaatttatcaaaacacaaaatgactcgccttttagcgctatttgtcgcatctggcctgctcatcccgagctcacgctagccgccgtgccgctattaaatgataaaccaggtatgtttaatcaggcgggcgatttggaactactggtactcgattccatcactcttgatatcagacaacgattgcaactatcggacaaaatgagcgcggatgtttttgagataacaggacttgctctggataccgcccgttggaaaatagcgcccgatcaaaccgcttttggtctacgtattgagcggacattatccggctcgcggagtaagaaatatgagaatacattatggctgtatgctattgaaaaaaatcaactacgcgtcgtaataaatggccttgtactgattaaaaatcacggtaatggagacatgacgtgccagggaggatacgatgataccacccggactgttactgtggagaatacgactcatcatggctacgctgatattcgcgttcacgagaaaaatattcacgcctcgcagcaacttgatgctaacggcgagtgtggaactacagagaaacagagcaaaaggacgtggtctctgcgctacgatggcaagcagtatcccgttccgaccgcgctaagcccgttgcagtag

SEQ ID NO: 106824 - DNA, 546 bp, Enterobacter aerogenes
atgaggtggagacgcgctggagagaagtcaactgcattcagggggcaaagcttttatggatggccaatgaagccgaagatctttagaacagggtttaatatttatgaaaatgaagggcaagcgataagagatgttatttctttacatccaaaagagtttgatgatgataaaacaatgtttgttcgtttagtaaggatgcagcattttggcctacctactaggttattagatgtgaccattaatcctttagttgcactatggtttgcatcagaaaaatatatttacgacggcgacaataccaacatcagacgagtagctcagggtggcagattaacagcatattttgttcctgtggctaggcaaaagtattatgatagtgatactgtaagttgtctatcaaatcttgctaacttacgtattgatcataaagatgaaatatttaaaattgcgacctcaccttccgaggtagatttatttaataagcaagttgtagttgattatcttttcgatcatatagggatggaaaaaccacactttagaaaatga

SEQ ID NO: 106825 - DNA, 267 bp, Enterobacter aerogenes
atgcgtaaagcccgattcaccgaacaccagatcattgccgttctgaagtccgtcgtagccggacgtaccgttaaggatgtctgccgtgaagccggtatttctgaagccagctattacaactggaaagcgaagtttggcggtatggaagcgtctgatatcaagaagatgaaagacctggaggatgaaaaccggcgattaaaacaaatgtttgctgatctcagccttgaatgccgggcactgaaagacgttatcgaaaaaaaactttaa

SEQ ID NO: 106826 - DNA, 279 bp, Enterobacter aerogenes
atgaagtctaaatattttatactcttactttcattattgttattttttaatttttattcttttgctcaacaatccaaggacaaaatgacgattactcagcttaaagcccaaaatgctatcctgcttcaagctctgactcctgcgcagaaaaaattacttatgcagtcacctgaagtcatgcaatgctcaccacctaatgattgtaactgccgtgccggtggatatggatattgtactacaaaaaaggaatgtgattatgttcagggtacgtgctactga

SEQ ID NO: 106827 - DNA, 273 bp, Enterobacter aerogenes
atgaaagaactcgaaaatacaaaaattgaatccgaagttaactcctttgttgaacaaggaaatgcgttgcataatgacaaaaaatatgctcaggctttagagcgatgtgaaaagcctggaatattttgcctgaaccaaaaccagaatggcaagttgctaactggattaccgcaaatatattcagcgcttattttgaccttggtgattacaatgaggcaaaaaaaggggcgaaatgacgttgcaaacgagagtaagaaatatttctttaaatga

SEQ ID NO: 106828 - DNA, 192 bp, Enterobacter aerogenes
atgacgtcaggcgaaccggcgcgccgttcgggtcacaatgagacgggaattaataccggaaccggcgtcaccgtaaaaatatcgggcggctgtctggtactgatggctgacagcaacaagatgcaggtgtttcgggaggaactttatcaaattaaacaggcggttaaaggaatgatggatatactgatttag

SEQ ID NO: 106829 - DNA, 225 bp, Enterobacter aerogenes
atggcgttggaataccataacgaagagtcttttttcatcactgaggaagtggaggccggactgatcgcggccgggcatttgtttgagctacagccgattgtctgcgctgaccgacttcacgatgtgctggagcgcatgactgatgcgatgttgtcactgcagccgggcgagatcgctgacgaagatcgcaagcaacggcagaacaagccatgttcagctagctaa

SEQ ID NO: 106830 - DNA, 234 bp, Enterobacter aerogenes
atgtcgaaagaagctgttttcacgatgaaactggagcctgagttgcgtgccgagtttatggctgaagccgccagtgaggatcggccagcatctcagatcatgcgcgagctgatgcggggctatatcgctcagcgccgccgagcccgcgaatataacaatcattcgcgccaccgaattgaagatcgccgccactcaacgtactccgatccaggccagtcgaatgggcgcaaatag

SEQ ID NO: 106831 - DNA, 258 bp, Enterobacter aerogenes
atggccaaaaccatcgtattttgtgatgaccaagaccacgccgagcgtatgcgccaagaagcgctactcgataaattcgccgaccacggcgtgcaggatattgaagatgccaaagcgctggaactaccactgtttgaccagttcggcggtaaaacccaaatccggcgcggcttattcggcaacgtcgagcaatacaccgaagccctgcaagagcaggaacaagcactctacgaccaaaaagaattgaaacaggcctga

SEQ ID NO: 106832 - DNA, 1779 bp, Enterobacter aerogenes
atgaatctcagcagtaccatcaaatccattcaggacatcatgcgcaaggacgacggcgtcgacggcgacgcccaacgccttggccaactcacctggatgctcttcctcaaagtattcgatcaacgagaagaagagtgggaagatgataaccagcaatatcaatcaccgctgcccgagcgctaccgctggcgtaactgggctgcttatattgttgacgctgacggcaaaaagaagccgcagatcgccgcgagcgacttggtgcccttcgttaacaacgaactttttcctgctctgaaagaacaaatcgacgccagccagagcccacagcacaaggtcctcaaacaggtttttgaagacgccaacaacttcatgaaatccggcccgcaaatgctggccgtgatcgaaaaattggaagacgccatcaacttccacgatttcaaaacccgcgccaacctaggcgatgtttacgaacagatgctcaacgacttgcgcggtgcaggcaatgccggtgagttctacaccccgcgcgccatcaccgccttcatggccgatcgcgttaatccacgtctggataaacgcgaaagcgtgatggacccggcatgtggcaccggcggcttcttgaccgccgccatcgaccatttccgccatcagctcagtaccaagtccagcgccgaagacaagcacgccattgaaaacttgatccacggcatcgagaaaaaacagctgccccatctgctgtgcaccaccaatatgctgctgcacggcatcgacgtacccagccagatcgaacacaaaaacaccttggccatcggctggaacgaatggagcgctaacgacaaggtcgattgcatcatcaccaacccaccttttggcggctatgaagacgatggagtgggcagcgattaccctgctgatctgcgcacccgcgaaaccgccgacatgttcatggcgctcatcatcaaaaaactgctgaaagaaaatggccgcgccgccgtggtgctacccgatggctttttgtttggcgatggcatcaaaggcacactgaaaaaaatgctgctgcgtgattgcaaactacacactatcatccgcctgcccaaaggcgtgttcgcaccctacactaccatcaagaccaacctgttgttcttcaccaaaggcagcaccgtggatgacggcaccgagcacttccacaccgacaccatctggttctacgagcacccttaccctgcaggctacaaaagctattccaaaactaagcccatcaggcttgaagaattcaagcctgagcaggaatggtggggcaacgagtccaatgattttgccgaacgtgtggagaacgaattcgcctggaaggtggatttcaaaaccaagcgcgaacaagccgaagccgccgcacaaccgcactggcaacgcgcggaagatctgaataaccaggttgccgccttggaaggtaaggcacgcgacctgcgcaacagtttggtaggcagcaccaatgccgttcaccgcgaaaaaatcgacgcccagattgccgaactgcgcgcccaggccgaaccgttgcgcctgcaagcgcgggatgcgcaggcggcgggggatcgcctctactggccgatcttcaaccttgatttgaaaaatcccaacgtacaggaagaagaaacacacgacccagttctgctgctggaaaagtacaaaaaactactgggcgagattgaagaaactgaaaaccagctcaagagcgaactggcagcagcactggcgcatcactttgtgggtgaggacgcctga

SEQ ID NO: 106833 - DNA, 1974 bp, Enterobacter aerogenes
atggatgcgcagcagtttttggcagagtttgggcatattgcgaatgcgccaggtggtgtggagcggttgcgggaattggtactccaccttgctgtatctggcaatctgatagttacggaatcaccagttgatgctgcacccttactcgactctattgtgaagcagaaacaagttcatactgaaaagaaaagaatcattgcgaagcagccttctatttcgcgtaccgttgtcaaagccccgccccactgggctatttgccgcttaggtgatttggcactgactatcactggtggtggaacaccgtcaaaaaatcacacagcttattggggaggcaaaatcccttgggcaagcgtgaaggacatgaaggatcataagttcctggatgagacagaggatcacatcacagaagaaggactaaagaacagctcttcaaatctgattccaccaggacgagttattgtttgcacacgcatgggacttggtaaggttgcgatcaaccgtgttgcaatcgctattaatcaagacctgaaagcattggaattgccgaaagaagtgaacgccgatttcttcttgatcttgtatcgaacccgtgaggtaaagggcacaggaacgacagtttctggtatcaagcagaatcagttgttggcgttgcccgctgcgttgccaccactccaagagcaatcccgtatcgtcgccaaagtcaatgaactgatggccttgtgcgacaaactggaggaacaacagcaagcccgccgcaaactgcaaaacgccctgcgccaatccaccctccaagccatcgccagcgccaccagtccgcacgaactgcaagccacgtggacacgcctggccgacaacttcgcgaggctgtttcatgcaccggaggatgtagctgatttcaagggtttggttctcgatttggctgtgagtggcgagttgctgaatattaagaatcgccatgcttctaccggagcggagttgcttgattcaatttctgctaagcgcatcgaatggtcaaaaaaatcagacgggcaagagaaaaaagaagcgttggcaatgctaaggaagctacgtacccagcagatctccatccccgaagctgccttaccagaacattgggaatgggcatcgctccttcaagtgtcgcaagcagtcgttgattgccacaacaagaccgctccatatgtcagcgaaggcattcacctcattcgaacgacagacattcgtaacggccggatgcatttatcgaacacacggaagatttcggaagaaacttatgcctattgggcaaggcgcatgccaccaaagagtggcgatattttcttcacgcgcgaggccccaatgggtgaagcggcaattgttcctgaaggggaaagagtatgtctcggccagcgttcaatgctgattcggcttttcccagtgctattcagcaatcgatttcttctgtacgtgattcaaagcccgagttttcaaacacgcatgaccgaagccgctattggcatgacggtcaagcatctgcgagttggtgacgttgaggatctccctattccggtaccgccaaaggctgagcaggatcaaattgttgccattgtcgatgctctttttagtatgtgtgatctttacgcggagcagcttgctcgaaagcagcgtattgcaaccaatcttgcgaccagcgcgatttccagcctcactggcatcgccatcgaacaaggagaggaacccatgaaagccccgcaaaccgaattgattgccccgctgtgcttgggcacagcgcctgaccttaaagcgcaagcgccgctggccacaattctggcccggcacagcggcaaaatgagagccaaggatttgtggcaacgcttcggcggcgagatcgatgctttttatgcgcaactgaaaatcgaggtggcgcacggctggattctggagccagcccctgccgaaatgcgcgagaagcctaccaacatagtgagagcctga

SEQ ID NO: 106834 - DNA, 1752 bp, Enterobacter aerogenes
atgcaactgttgcgcatctgcatccccaactttcgcaatctacgtggtctcgatattgccttcgcgacgcatttgtcagccgctttaggcgcgccagctgatgctcaaccaaagccgatccgcagccacgccctgattggccagaacgggaccggcaagtccaacttgatcgaagcgctgatcaccatattccgtgatgtcgacctggatcgtgaagctgcgttcgattacacactggaatacagcattcgtgatcatgttgtacgcattgaagcggatacggtcacacaaaagcgcccttacgtgtgggtcgacggcaaagctgaaacgcagggctatttgctgaaaaatcgcgagctgctacccacacatatctttgcttattactcgggccgcaacgagcgcattgaggccttgtttcaagagcatcaacgccgcttcaacctacgacaggaaatcaccaccgacgaggtgctttcagagcagctgttggaaaactttaccggatctgaggcggatatccgcgcggtggaggaagccaaacgccgccgagaatcacgactgaaacaagcaggcgacgaccgcctgcgccgtctgttctactgccgtggtggccatagccagttggtgctgctggcctgcttgctctccgatgaccaggtgtttcagaaagtactgaaaaacttgcacattgaatcactggaatcggctttatttgtactgaaagagccacatcgtctgcgcgaaaaacgccgcagcggcaagttcgacgagcaggaactgatcgagggcgatccacgcttctggtattcccgtggcaatgtggtaagcgagttcctcgacaagctctggcaagtatcttgggctccgattgaacaggaggcaactaagcaaattgacttccgtggccgtagcgaaaaacaaaagcagctgtatctgttcgtgccgaatcaggacaagctcaaacagttgggcgagcttgtcggcagcactgatagtttcttccgctatgccgagggcgcttacatcggtgacttgatcgacgaggtgcgcattacggtcaagaaacgcgatgaatatggcggcaaggtgagtttcacccagctctctgaaggcgagctacagatactcaccgtgctgggcctgatgcgcataacccgagaggaccactgtcttttcctgctcgatgagccggatacccacttgaaccctatctggaagctgcgctacttcgacgatatcgaaggtgtgttggcctctgatgaaggtgcactggtacagggcgagtcgcaaatcctcatcaccactcacgacccgatgatgattggcagcctcaagcgcgagcaggtgcatattctgcgacgcgacaagggacgctctatcgtggatacgcctgatgaacatccgcaaggtatgggagtaaccgggctgctcaagagcgagttgtttggcctctcgtccacgctggatattgaaactgagcgacgcctgttccggcgcaatgagctgttcgtaaaatcaccacgctccccagaggaagatgcagagctatcacgactttccactgaattggccgatttgggtttttctactgccgattttcgcgatccagactacgcgctattcgtgcgcaaaatggcgcagcatcgtcgtttccgcaagcctacgctcacgcccgaggagcaagccgagcaggacgccattgccgattcgattattgatgaaattttgcgtgaggaagaggaccaatga

SEQ ID NO: 106835 - DNA, 858 bp, Enterobacter aerogenes
atgatttggattgaccttgagcacaagcaacccaccgataccgacattccgaattggacaccgtggacacaagtgcgatgggaggcctggttggcgaaatcagctcaactggtggcagatttggcagctctagatgaggcgggaaagcgtgatgaacgcaacgcaatgattgacgccaatagtgctcactggggagctttgaaggaatggctgctagccttgtcggccggtaaatgttggttctcagaggtacgcgagctttactcgcattacgacgtagagcattttcgacctaagaaggaagctaaggctctggataccaccctacgtgatggttattggtggctagctttcgattacatgaattttcgcgcctgtggcaatgttggtaaccgcaaaaaagggggctggtttccactcaaggatggttctctttgttctacttattcagcaccctgtgaagaatctgaaacacgctatctgcttgacccgattgatgacaatgacgttgcgctgatcgccttcgacgaagaaggcaaggtcattcccataccgggctcttctgagtgggagcaggagcgtgtcaacgagacggtaaagcgccttaaactcaatgaacatgcaccattagcagaagcacgtcgcaaagtatggcaacaagtggatcggctgattgacgattttgccaaggccaaagcccgctgctgtgctggtaataacccagccgctaaggcgaaactaaccgagattcgagcgcgtgcccgcgaaatgaccaaccctacagcagagctatctgcggtcgctcgttggtgcttgttaatgcgcaacgatccacagctttccagattagtggggtaa

SEQ ID NO: 106836 - DNA, 795 bp, Enterobacter aerogenes
atgaatttaaatttccgagtggtttcatcacaaagagggattttagccgctaaaaaagtagttactgcttctcttctggcgtcagtcctcactttaccggcgcaagccggtattcccgtgtttgatgggacgaatgtggctcagtcaaccattagtgcaattaataatgtcgcagcagttcagaaacaaattgagcaatatgcgacacagctacagcagtatcagaatatgctgcaaaattcacttgccccagctgcatatatctgggaccaggcaaatacaactattaataaattgatgcaagcacaagatacgctgaattattacaagaatcaggccggtagtcttgattcgtatctcaagcgctaccaagatgtgaattactatcgttcttcaccttgcttcaatagcacaggcacatgtaccagtgccgatctcaaagccctgcgtaaacaggatatggatagctcagaagcccgtaaaaaagccaatgatgcggtcctgaaagcggtcgatcaacagcaggagtcccttcggactgacgctcagaacctggtacaattgcagtctcaagccactggagccgtgggacagatgcaagcaattcaggctgctaaccagcttgccagtgcttcaaacaaccaacttctgcaaattcgtagtttgttagtcgctcaaaacaatgctgcagcaacgcttgctcaagcccaggctgataaagaatcacaacagatagccgctgatgaaaaagcgttagctggagagaatacaccaagcccgaagcgaatttggtga

SEQ ID NO: 106837 - DNA, 972 bp, Enterobacter aerogenes
atggttgacatgaaaattactatctgggaaggctgtgacctcacagttgcagctgcaattaaattatttgtagagcgtagttctccgtactccatattttcacggaggtatccaatactgcgtctcatacaggaagttattgatccagcagtagctgcttatgtaaattccctgccaccaagtcataaagactacatttctggagtaaatctaggatttagtgaagtacttaaaaaagtgggtttaaacgtcttagtacaggcacaaagacttcttttgcgtaatttcgttctgactttagatcaacaaacttctcttgataaatgctttaccgctacgattgagtctcttattgaattagtcagtgagtgcgcatcaaagcgaccgaagaaatcctcacctgcaaaaggggtgactataaactcacagcgtaaactcggtttttgcgagttctgcggtaaccagactgaatactctcaatttattagtgaaatatcagaatatactgctaacgataacgagtttcccgaacatgaaaaactggtccttagccatcgatattgttctaaccatagacctagattgaccaatggccattggaatcctctttacagacaaggaaagcgctccattgaacaattcaatcaagaactattaagactaaggcggcaatgtgctaagccaagcaaagctaacgctaactccggtaataaattaattgattattattttttagagtggataccaggtcaaaatttaaccccagcagatataggtgaacttagaaatattgcacggttcatgactgattctaaactttccgacactaagaaaataatacttgcattaaaaaatcaaggatttaaccaatctgagatcggaaaaattttagaattaaattatcgcttaccaatgacacgtcaggctgtgtccaaggcattgaattctgtgagagaagaattttatatttag

SEQ ID NO: 106838 - DNA, 1296 bp, Enterobacter aerogenes
atgtggactgaacgttttgaaaaagcaaatgatagtggttttgagcgcgatcaatacggtagagatcgcgctcgaattattcactcagcatttttccgcagattacagggaaaaactcaggtgctagggttaggcgaaagcgatttttacagaactcgtttaacgcattctttagaagttgcacaaatagcaggtgggatttcagaatttttaaaggctcaatacaaagataatgaaataattgttggcctattgcctgagcaaaatttaattgaatcgataggtttagtacatgatattggccacccaccatttggacacggtggtgaggttgcattgaattatgcaatgagaaacaattcgggttttgaaggtaatgcacaaacattaagaatatgtacaaaattaggtgaatactctgatgataatggtttaaaccttacaagaagaactttacttgggataataaaatacccatgtttttatagcgatgtagttaactcacaaatatacaatgactcgaacggtttaaacttagactcatacaaaccgccaaaatgtatttttgattgtgataaggagcacgttaattggattcttcagccatttactaatgatagaaaaattttcatgtcagcttcagatgctatcgaaggaaaacacaaaaaaccattatataagtcttttgatgcaagtataatggaaatcgcagatgatattgcgtatggagttcatgatttagaagatgccatcgctcttggattagttagtgagagaacatggcaaactgaagttgtttccagacttcaagacccattaaaaacatcacctatatcagtcaagatagatgaatacaccaaattacttttttctggtgaaaataaaacaaggaaaaaagcaataagcttgctagttaactacttcgtgaccaatgttgaagtaaataaaaaagataagttaagtcacaacctattagattatcaggcgggattcccgagtattgttggagaagaactggatatccttaaggagtttgttgtaaataatgttatcaaaacgccggaggtacaaactctagaatacaaaggacaacaaatggtcttaaaattgtttgatacaatagcaaacaatccatcgcgactcctaccaaaaaaatatttcgaaaaatataaaaaagaaggatgtaacttaagggttgtttgtgattatcttgcaggcactacagatgattacgcaactagactctatcacaagatattcacaccatcctctggatccatctttgataagctataa

SEQ ID NO: 106839 - DNA, 1323 bp, Enterobacter aerogenes
atgctcgaatttcgtctcaacgcttttaaggcgtggcaggagatggaagagccgcactggctgaaagcgcattacgataagctcaattatcaggattacagctactactcggcgccatcctgcggtaactgcgatgatacctgcgcctcggaacccggcgcggtacagcaaaccggggcgaataccttcctgacgaatgaagtcgaggaagcctttaacctgcttggcgtaccggtgcgtgaaggcaaagaagtggcggtggacgccattttcgactcggtatccgtggcgaccacctaccgcgagaagctggcggagcaggggatcatcttctgctcctttggcgaagcgattcacgatcatccggaactggtgaaaaagtaccttggtaccgtagtgccgggcaacgacaacttttttgccgcgctgaacgccgcggtcgcctctgatggcacctttatctacgtgccgaaaggcgtgcgctgcccgatggaactgtcgacctatttccgtattaacgctgagaaaaccggccagtttgaacgtacgattctggtcgctgacgaaggtagctatgtgagctatatcgaaggctgctcggcgccggtacgcgacagctatcagctgcacgcggcggtggtggaagtcatcattcataaagatgcggaagtgaagtactccaccgtgcagaactggttccccggcgataacaataccggcggcatccttaacttcgtcaccaagcgcgcgctgtgcgaaggcgaaaacagcaagatgtcgtggacccagtcggaaaccggttcggccattacctggaaatacccgagctgcatcctgcgcggcgataactcgattggcgaattcttctcggtggcgctgaccagcggccatcagcaggcggataccgggaccaaaatgattcatatcggcaagaacacccgctcgaccattatctcaaaagggatctccgccggacacagccagaacagctatcgcgggctggtcaaaattatgccgaccgccactaacgcccgtaacttcacccagtgcgattcgatgctgatcggcccggactgcggggcgcataccttcccctatgtcgaatgccgcaataacagcgcccagctggaacacgaagccaccacctcgcgtattggcgaagatcagctgttctactgtctgcagcgcggcattagcgaagatgatgcgatctcgatgatcgtcaatggattctgtaaagacgtgttctcagaattgcccctggagttcgccgtcgaagcgcaaaaattgctggctattagccttgaacatagcgtcggctga

SEQ ID NO: 106840 - DNA, 630 bp, Enterobacter aerogenes
atggctaagggaaatattaaagtagataataaaatgtatattttctgtgagggtgagaaaaccgagccatattatctttctgcttatgtggaggatagggtaagccataaaactaaggttatcaatattcccaatacaaagaaaaatactccattgcagttagtcgatgaagctattgcgaaaaaaaacagtaaaagtacgatatctggtgatgtattttgggttgtatatgatcgtgaggctgtaaataaaataacaaaagaaaaacatcaacaagcatgggacaaagcaatccgaaatggcattaacgttgccatttcaaatgtctgctttgaattttggattttacttcatttcgaatatacatgttcaacctttacatcctttttgaatttgtataatacatctaatcttaaaaagcatctaagcaaagaaggaatcgatgattacgataagggtaatgatgagctttattttacgatttcatccaagattaaaactgcacgcaaaaatgcagtcaaagtgaatgctcaggttctttctactgcaccaaaaggagttgataaaccatacgagttatttccttttactaatgtgcatgaattattagatagtatagatagcttttag

SEQ ID NO: 106841 - DNA, 1326 bp, Enterobacter aerogenes
atgattttatcttttaccattgaaaattttaggtcattcaaagaacgaagtgtgctcacttttgaagcatctgggaataaaagccataatgcttcccatattttcactagccccagcggacaacaagttcttaagagtgcgggtttgtatggggcaaatgcttctggtaaatcaaatttcttattagcatttgatgctcttaaatatttggtagttaaaacaggtgctttaacagaaggcaaaaaaatcgcttgttatgaaccttacagattatgcgaagatacaaagcatgctccaatcaaattcgagttggaatttctgaatagagataatgtgaaatttatttataagatttcatatttagctaacaagattttgagcgaatctctcgatttttatccgtcacgtgcaaaagcaaatatctttactcgagaagaggggcaaacctgggaagatattaagttcggctctctttataagggaggacttagaaagatacctttcttcgacaataactcttatctttcaaaagctgggaacaacgcagcaggctctgaacttatgcgtggtctctttaaatttttcgaagaacagatatgttatcttccaactttccatcaacttattctgtcatctaaaaatgatgactcacaagaaatattatctcgcgcagctagtatattaaagtatgtggatacaggtatcaatgatgtcaaaatggttcaacaagaagtcaaaatacctgagttcatgaatgcgtttcctgaggaaattaagcagaactatattgattctaatacagatcagtttcagtttactcacgtaggcgaaactggatttgaagaggtattcgaggataaattcgaatcagatggtactttgaaaatattcaatatgcttcctctattattaggggcctttgaaaaaaggatggtctttgttatagatgaattagataatggtctacatgcccatatggctgattttgtgatcagattatttaatgataaaactattaataaagtaggctcccaacttattttcactactcataatttgaacataatgtctcatgagaaaatgagacgagatcaaatatggtttgttgaaaaagaaaaaggggcatcgcgatgcttttctcttgatgattttgataaaaagagagttactgcttcttcgccgtttggactttggtatgatgaagggcgatttggcggagttccattgataaattatactcaaatcaaacgattgataattgattacaataaaggtaagagtttagaaaacaatgagttaaatcttgatgatgacagtaaggagtaa

SEQ ID NO: 106842 - DNA, 771 bp, Enterobacter aerogenes
ttgtgcagtcgaaagcctcataacttcaatggaatagagtcagctcttataattaaagaattatcacagtacaaagcaggccatccgcgcctgtttaactacggcctggagatccacgagccactcacccgccagctaaaagaatttggtcccaagcgacgcaccgactatcccaaaatgccgttctggcggctgcgaacagacggcttctgggagatcgctcacgcagaaggctgcaaaccgcgtaagggcaatactcagccgacaaagaaagaactgattgataaccaggtggcgggcggcttcgatgaagcggcttatcaacaattgctggcacaccctgcgatgatcgaccagttgacccagaagatcctcaccgatcgctccaggaaccgcgatccgcgtttcagggatatcgttcttcgtgcttaccactcacggtgcgcgttctgcggttacgacctcagactcgatggcgcgctggttggtattgaagcggcgcatattcactggaaagcatatggtggtccgtgcgtggtaaataatggcctggcgctctgtacattacaccatgacgcgtttgatatgggggcgtttgggctggatgagagtatgaccatccgcatctccggcggcgtccgtcgtagtccggtggtagaccatctgttctggcagcgggacggccagcagttattcctcccttataacaaaacgcagtggcctgctgaacagtatgtcggctggcaccgtaaaaagattttcaaagcctga

SEQ ID NO: 106843 - DNA, 270 bp, Enterobacter aerogenes
atgtacagtattgcgcagtttgcccgtgctggcagggcatgccataacgatctaacagccttcgatttcgaaattaacgatccgcagtctattgaaacgctaattgatcagcaaagtagcggctggcgactgtttaaatgcgaaaagttggttcagatgaaagtggcttaccatcatgcgtttgagcgggaaaccattgatatcaggcggcaatatgagtatgtggtgctgtatggtcgggtaactcctcctgagtttataaaaaagtga

SEQ ID NO: 106844 - DNA, 552 bp, Enterobacter aerogenes
atggtgccacttaagaagaaagatccggatggttccgttatgttgcagaataaacaaggacagttttcgttcggtactccatcgctggatacaattctggcgagccggattgtctttatcggtgaatcaattcacggcattgcagaattcagtcagtttaaaaaagaatttataaaacacattaatgggcaaaactggattgtgttgttcgaagcggatgcgctgggaatgaagctatcgcaactacgcggggatactgaggaacaatttcttgataattttccccgcattatgcagacgttcgagataagagaattgattgcactggctcagaaacagggttttccctgcttgggcattgatgttattcctcgccgtagtgatgctgattttccacagaactggaaagccgacagatcgtcgtttatccatcacttcattacggcgcgtgagtctgataattggctatcgtggcggtcggcaaaaatggcgcaaaatatcagatatagcctgtcacaatccttcctcacagctactggttttcctgcataa

SEQ ID NO: 106845 - DNA, 321 bp, Enterobacter aerogenes
atgtggagtatacccacttggagtctggcagttgatggcttagtaacggcattttcaatggcagaggggaaagataaaaaactctctaaaacttactctctgagtggtaaacgaagcagatcagataaactgttaagcagaattctgggctctcttgcgggtgaaaacccgcaactaaatctgctaataaacctgtatcttgacgtgattcagacaggattgcgagagctccatacccagcaactgtatccagtcgtatcagacaaagtgtgtaacctagcattctatgaagtctgggttgtaccattttgttgtccatga

SEQ ID NO: 106846 - DNA, 645 bp, Enterobacter aerogenes
atggcccagggcgaacgttctctgatcgttccgccggatgcgccgatgcgtccgcgtcgtgaattccgcgatcgtgatgaccgtttcgaacgccgtggcgaccgtaatgaccgcggtccgcgtggcgatcgtgaagatcgtccgaagcgtgagcgccgtgacgtgggtgagatggaactgtaccgcattgaagtgggccgtgatgacggcgttgaagttcgtcatatcgttggcgcgatcgctaacgaaggcgacatcagcagccgttacatcggtaacatcaagctgttcggttctcactccaccatcgaactgccgaaaggtatgccgggcgaagtgctgcagcactttactcgtacccgcattctgaacaagccgatgaacatgcagctgctgggcgatgcgcagccgcgcaccgaacgtcgtggcggcggcgagcgtcgtgaaggcggtcgtggcttcggcggcgagcgtcgtgaaggcggtcgtagcttcggtggcgaacgtcgtgaaggcggacgtggtgaaggtcgtcgtttcagcggcgaacgtcgtgaaggcggccgcgcgccgcgtcgtgacgatgcttccgcgccgcgccgtgatgattccgcgggtcgtcgtcgtttcggtggcgatgcgtaa

SEQ ID NO: 106847 - DNA, 1008 bp, Enterobacter aerogenes
atgactgataaaaccattccgttctcggtgctcgatctggcgccgatcccgcagggatcttcggctaaagaagccttttcccactctctcgccctcgcccggctggcggaatcccgcggctaccaccgttactggctggctgagcaccataatatggtgggcattgccagcgcggcgacttcggtgttgattggctatcttgccgccaataccaccaccctgcatctgggctccggaggcgtgatgttgccaaaccattcgccgctggtgatcgccgaacagttcggcaccctgaatacgctgtatcccggacgtatcgatctcggccttggccgcgcgccgggcagcgatcagccgaccatgcgcgcgctgcgtcgccatatgagcggcgatgtcgataatttcccgcgcgatgtggcggagctggtggactggtttgacgcccgcgatgctcatccgcaggtgcgcccggttcccggctatggcgaacgaattccggtgtggctactgggctcaagcctgtacagcgcgcagctggcggcgcagcttggtctgccgtttgccttcgcctctcacttcgcgccggacatgctattccaggcgctgcatctgtaccgcagcaacttcataccttcggcgcggctcgaaaaaccgtacgcgatggtatgtatcaatattatcgccgccgatagtaatcgcgatgcggagttcctctttacctcgatgcagcaggccttcgttaagctgcgccgcggcgaaaccgggcagttgccgccgccggtggaaaatatgcatcagctgtggtcagcgtccgagcagtatggtgtacagcaggcattgagcatgtcgctggttggcgataagaccaaagttcgccatgggttagcgtcgattcttcgcgaaacggaagcggacgaaatcatggtcaacggccagatcttcgaccaccaggcacgcctgcattcctttgatttagcgatgcaggtgaaagaggagttgttaggttag

SEQ ID NO: 106848 - DNA, 543 bp, Enterobacter aerogenes
atgcatggagtgaagcttgtgttggatgaactgcgttcccggctggtccgttttggcccgtctttaatgagcgtgccggttaagctggcgccttttgccctcaagcgccaggtgctggaacaagtattgagctggcaatttcgccaggcgctggcggatggagaactggagtttctcgaaggtcgctggttaagtattaatgtgcgcgatattggcctgctgtggtatacctcggtagtcgacggtcgcctggtggtcagccagcaggctgacgccgacgtcagctttagcgccgatgccagcgatctgctgatgattgccgcgcgtaaacaggatccggatacgctattcttccagcgtcgtctggtgattgaaggtgatactgagctgggtctatacgtgaagaacctgatggatgccatcgagctggagcagatgccgaaagcactgcgggtcatgctgctgcagatggcggattttgtcgaagcaggcctgaagagcccgcagaaacctgaacagacatcggtaggtgaggcatgctga

SEQ ID NO: 106849 - DNA, 1059 bp, Enterobacter aerogenes
atgaaaactcacacttacttatacggggcactcgttgccctggctttttgcgcccctgcggcggccgctgaggccgtccatccggccgagcacgacgataccaaaacgccggaattaaccaccacctcctatcgcttttacggcgaattgggggttggcggatatatggatttagaaggcgaggataaacataaatatagcgatggcacctatatcgagggcgggctggaggtcaaaaacggtcactggttcgggctgatttacggcgaagcctggacggtacaggccgatagccagggcaatgcctggacgcccggccacagctggggcggcgtggaaggcggccttaaccgcctctatggcggctataaaaccgataacaacaccgagatcatgctcagcctgcgccaggactcgtcgctggacgacctgcagtggtggggcgactttacccccgatctgggttatgtgatccccaatacccgcgacatcatgtacgcgctgaaggtacaaaaccgcagcggcgatttccgctatagcgtcaccgccacgccggccggtcatcacgatgaaagcaaggcctggctgcacttcggcaaatatgatcgctatgacgataagtacacctatccggcgatgatcaacggctacgtgcagtacgacatcgtcaaagatgtcacctggatgaacggccttgaagtgaccgacggcaccggacagctattcctgaccggcgttctgtcgcccaatctggccttccgcgcctggcatcataccggtcgcgccaaagggctggatgttcccggcagtgaaaccggctttatggccagcgccatgtatgaagcattaagcgggctctacttctccaccgcatacagctacgccaaacaccgcccggaccacgccgctgatgaaaccaccgcgtttatgcaatttggcatctggtacgaatacggcggcgggcgtttcgccaccgccgccgacagccgtttctataccagcaacgccagcggcgacccgagcgacaaaattttcctgatgcaatacttctactggtaa

SEQ ID NO: 106850 - DNA, 1434 bp, Enterobacter aerogenes
atgtctgatactaaacgtaataccatcggcaagttcggcctgttatcgctgacctttgccgccgtttacagtttcaataacgtcatcaacaacaatatcgaactggggctggcgtcggcgccgatgttcttcctcgctaccctgttctacttcattccgttttgcctgattatcgccgagttcgtgtcgctgaataaaaactccgaggccggggtttacgcctgggtgaagagttcgctcggcggccgttgggcgtttatcaccgcctatacctactggttcgtaaacctgtttttcttcacctcgctgctgccgcgcgtgatcgcctatgcctcttacgccttcctcggctacgaatacattctgacgccgttcgccaccaccgtgttgagcatggcgctgttcgctttctccacctggatctccaccaacggcgcgaaaatgctggggcctatcacctccgtcacctcatcgctgatgctgctgctgacgctctcttatattctgctggccggtaccgcgctggtgggcggcgtgcagccagcggatccgatcaccgtcgaggcgatgatccctaacttcaactgggcgttcctcggtattaccacgtggatctttatggcggcgggcggcgcggaatcggtggcggtgtacgtcaacgatgtgaaaggcggctcgaaatccttcgtcaaagtgatcatcctcgccgggatcttcatcggcgtgctgtactcgatctcctccgtgctgatcaacgtcttcgtcagcagcaaagagctgaagtttaccggcggatcggtgcaggtcttccacggcctggcggcttactttggcctgccggaaattctgatgaaccgcttcgtcggcctcgtttcgtttaccgcgatgtttggctcgctgctgatgtggaccgccaccccggttaaaattttcttctcggaaattccctccggcatctttggtaaaaaaaccgtcgagctcaatgagaacggcgtcccggcgcgcgcagcctggatccagtatctgatcgtcattccgctgatgatcatcccgacgttgggatcaaacaccgtgcaggatctgatgaacaccatcatcaacatgaccgccgccgcttcaatgctgccgccgctgttcatcatgctggcctacctcaacctgcgacgcaaactcgaccatctgccgcgcgatttccgcatgggctcgcgtaccaccggcatcgtggtggtatccatgctgattgtgattttcgccatcggcttcgtcgcctcaaccttcccaaccggcggcaacatcctgaccattattttctacaacgttggcgggatcgtgattttccttggcttcgcgtggtggaaatacagcagatacgtcaaaggattaacccaggaacaacaacaaatagaagcggctccggcttcccatacctcttaa

SEQ ID NO: 106851 - DNA, 648 bp, Enterobacter aerogenes
atgaaatatcagctaaccgcgcatgaagcgcgcattattggttgcctgctggagaagcaagtgaccacacccgaacaatatccgctgtcggtgaatgcggtggtcaccgcctgtaaccagaaaaccaaccgcgagccggtgatgtcgctggcggaaaacgatgttcaggatttgctggatgaactggttaaacgccactatctgcgtacggtaagcggttttggcaatcgagtgaccaaatatgaacagcgcttctgtaattccgaatttggcgacctcaagttaacagcggcggaagtcgccatcgtcacgacgctgctgctgcgcggcgcgcaaacgccaggcgagctgcgcagccgcgcgcagcggatgtatgaattccgcgatatggccgaggtggaaagcacgctcgacaatttggccagtcgcgaagacggcccgtacgtcgcgcgccttccgcgcgaaccgggtaaacgcgaaagccgctatatgcacctgttctgtgatgacatggattcactcattaccgtcgtggaagccgtgtcgccgccgaatgacgatctacagacgcgagtcgaggcgctggaggcggaagtggctgagctcaaagtacgtcttgattcactgctggctcacttaggagagtaa

SEQ ID NO: 106852 - DNA, 180 bp, Enterobacter aerogenes
atgatcgtgtatatcgcggggccgatgaccaatgtgccccagttcaaccgcccggcgtttttcgccgcggctgagcggcttagcgccgccggtgacatacctctcaacccgcagttcttccgaatgccttaccgaaatgagaccaggagagttatgcgcattggcttgggaggatgttga

SEQ ID NO: 106853 - DNA, 321 bp, Enterobacter aerogenes
gtgctgctgttagccgcattcgttggcgctatcgtgtttaattggcaattcgcaatagggcggtggccccgcttaagcttttttaaggctacatgtgttggatgggcaattgatgctgcaagtatatgcgtgatcgttagctattttgctgacaaatatgcaatgagctttaatgatgtagctgtatattttgcggataaatcccctggtttctatgtaacacctattatcattgccccgatcacagttctattctggcggtgggtatttaaagaggtgcgtgaagaaaaaaagttagaatccagcatcgcaagccaataa

SEQ ID NO: 106854 - DNA, 303 bp, Enterobacter aerogenes
atgttctggtcctctggggccgtgatgcatattgtggcccttaacgaagcgccagaacgttatttttcaggcagtgaaataagagcgttaacgctcaatatcaatcaacacaacagcctgatgcgctacgttggtcgcagttttgctcgtaacgaagccggtgatcttattatgttgaaaaagggcatcgatggcgatagccagttttatgctgcaaatggccgctacgacatacttaacacttgcaataaatggacagcaaaggggctggaaagcgcgggtatgtcagttaatcctgcttaa

SEQ ID NO: 106855 - DNA, 609 bp, Enterobacter aerogenes
atgagactatttctactggctttagggttggttgcttcttgctcgactctcgcctggacgccacaaaccggcgatatcatcttccagacctcgccgtctgcgcaaagcaaagctattcaattggcaacccattcagactacagtcataccggcatgcttgtaatacgtaatcagcagcctttcgtatttgaagctgttggtcccgtagtctatacgccgctgcaaaaatggatcaaccgcggagaggggggtaagtatattgtccgacgtatacgcgggggattatcaattcagcagcagcagaaactcgcacaagccactaaaacctatcttggcaaaccctatgatctgactttttcctggagcgatacgcgccagtattgttcagaggtggtgtggaaagtttatgaccgcgcgctagggatacagcccggcaagctgcaaaagctgcgcgaattcgatttcagttcttcggtggttcgcaacaaactggaagaacgctatggcaaaaacctgccgttaaatgaaacggtgatttctccacaagcgttgtttgatgcgtcgcagctggaaactgtcgcgaaaaaatggcctctgatttcctggtaa

SEQ ID NO: 106856 - DNA, 486 bp, Enterobacter aerogenes
atgacttctatcactgtatcggccgctgaattattactgcaccggcttcaggccctcgacgtggcctatatttttattaattcgggtaccgattatcccccggttattgaagcgtgggccaaaatgcgcgccacgggacaacaggtaccggagctggtgatatgtccccatgagaacgccgccatcggcatggcccacggctattatctcgggagcgggaaagtgcaggccgtcatggttcacaccaacgtaggcctggccaatgccgcctgcggcgtcatcaatctggccaacagcaatattccggtgctgatttttggcggacgcacgccgattagcgagcattcacactttggttgtcgcaacacgccgattggctacggccaggagatgcgcgatcaggcggcgctcattcgtgagtcggtgaaatgggacttcgaattacgcattgccgatcaggtcggcgagcatgttgacagagcatag

SEQ ID NO: 106857 - DNA, 135 bp, Enterobacter aerogenes
atgcagaatatacccgtcagactgcaagttgcatgtgcgttggcttcctcgctcaccccagtcacttacttgagtaagctcctggggattctctgcgtcgccgcctgcctgcaactcgaattatttagggtatag

SEQ ID NO: 106858 - DNA, 2043 bp, Enterobacter aerogenes
atgtctttacgcaaattgtctctggctgtatttctgatcgccgcgcttggagcagccagcggccacgcctgcgattctccattgtcggaatgcctggactatttttttctgactaaccgcgaggctcgcctgctcgaaatgccacctgggaactttgcttttgccagcagccacctattaccgcccgacccgctcctgccgcaatggcgcgacaccgctaatgataagcgcgccacttccgctcagggcgcccagttgaaagcgatcctcgagaggggctcagtagtggcagccgagaagatgaccgctgaccttgccaccgccgagcgcctgtacgcgctcggcgccgttgcgtatgacagcgatcgtgaactagcgcgtgaatatttccgccagctgcttgcgctaccggcggaccggcaaggcgaatggggattaaaagcgctttttgcgctggggcaggatttaatccaggagaatccactagccagcttaagcgatctggaagccttgcccgatactaaagatattgagggtagccgtgatgaatcagcagaggcctttgctctctttcagcaaattatcgatgctgtacgtaacggccaggacgatccgcagttactttcactggcaggtttagtacaacaggcgcgtatcgccaggcaaaacgaaacggacggctttgttgcagaagcccattttaatgcccggctggcggcacagggctcgctgcccagcagcgtacggttatatcaagttgccgagaatatcaatcatccggaaaatgatgttttcctgcaaaagcatattgctgacccgcttgtccggcggttgcttattgcccatttgaacgctacccccgttgatgcttcagccaatgacggcacctttcagattggcgcttactaccctaaagtggtggcagcgctgttaaaaacggccaatgatgatttgccttcggatgttcatcttatcgccctggcctaccgttacgggcaatattctacggttacgcagctattaccgcatgcggaagagaatatgctgacctcatggctgagagctaaaatggcattgcgggaaggtgatgtaaaaaaagcgatagtctggtacgaaaaaacggccagttcacttcctgttgaaggcgagagatgggtaaatccattgctcagtcgggacatcgaagggtacttctatcaggttccgagtgagcgaattagcgccgagcgggcattactggcgttaaaaaataataactatgctcaagcgatggagctgatgtatcgctctggttactcctggcgagatcagatctggatcggcgagcggctgctcagcgtaaaagagctaacggcatttgtagacaaacattttccgccatcagactcgtcacaagcgcaaaatccacagcccggtaaagaagatataaacgatatcaaatttcgtactctcctcgcccgtcgtctgatgcgcgatggccagtatcaaaaagccttaccctattttgataatcagcaggaccgccagcttgcacagtcatttgttgattcgcttcccgaaagcggctctaaaataaccctggccgagggctggtggcaggcagcggtcattctacgcgagcatggcaacaacctgatgagctatttatgggatccagacctcacatcttttgctgacactagtacgtacttgttttgcgcagacgccaccaacaatatctctggagtacaatcatgggttggtagcgaggagcaatatcgcatacagcaatcacgacccaaaccattcaacaatgttgagcattatcgctggagggcggcaaaactcgctgaaaaagcagccagtttgctaccgcgcaaatctcaggcttatgccgctatactttgcaatgccagcaattgggtctcgagcgaccaacaatcggttaagcggctgtaccagctttacgtaaaaaacggggcgccattcccctgggctgagaaatttggccgacaatgcccatctccggatttttctgagcgaaaggttagtggagaaagctaa

SEQ ID NO: 106859 - DNA, 651 bp, Enterobacter aerogenes
gtgtacctctcaagaataacgttgcataccgcgcagctatcgccattacgtctcttgcacctggtggaccgcggtgaatatgtcatgcatcagtggttgtggcagctttttcccgcagaacaacagcggcagtttttatatcggcgcgaagagctacagggggcgtttcgtttcttcgtactgtcagcgcagctgcctgccgagagcgaaatttttgagatccaaagccgcgcgttcaacccgcaactccgtgtcgggcagaaattgcggtttagcctgcgggcaaacccaacgatttgcaaatcaggcaaacgccacgatttgctaatggatgccaaacggcaggttaaagggctcgttgagtctaaggatatctgggcgcatcaacggcaggccgcgctggactggttaacccggcagggcgagcaaagcggattcgctttagcggaggccgacgtggatgcttatcgtcagcagctgatacgccgcgaaaaatcacgccaggcgatccagttcagcagcgtggactataccggcacgctggtgattaacgatcctgcgttatttttgcagcggctggcgtcgggatacggtaaaagccgggcttttggctgtgggatgatgatgatcaaacccggagatgacgagtga

SEQ ID NO: 106860 - DNA, 747 bp, Enterobacter aerogenes
atgagccaatatctggtttttcagcttcatgggccgatggcgtcgtggggcgtggacgcccccggcgaagtccgtcacagccatgagctgccatcccggtctgcgctgctggggctgttagcggcgtcgttagggatccgccgtgaagaagagcagcggttaagggcctttaaccagcactatacctttttgctctgcgccagcagcgaaccgcgctgggcgcgagactatcacaccgtacaggtgccgaaagaggtgcgtaacgcgcgctatttcagtcgccgtgaagagttgcaggatcctgaactactcagcgcgctgatctcccggcgcgattattataccgatgcctggtggatggttgccgttgcggttacgccggatgcgccttacacgctggagcagttgcatgaggcgctgcgccatccggtatttccgctgtatctggggcgcaaaagccatccgttggcgctgccgttaatgccgctgttgcttgcgggccacgctgcggatgtacttcgccaggcttatcgccagtatcaggagaaatttagcctattgaggctttctctgaggcagttacaggatcaatgctggtgggagggcgagcacgccggtttagtcgcgaacaaaatactgcggcgtcgcgattgtccgctgaaccgccagcagtggctgtttggcgagcgtaccgttaatcagggatcctggcttagcaaggaggaaacgtgtacctctcaagaataa

SEQ ID NO: 106861 - DNA, 1056 bp, Enterobacter aerogenes
atgacgacttttattcagcttcacttactgaccgcttatcctgccgctaacttgaaccgcgacgacaccggtgcgccgaaaacggttgtgcttggcggcgcgacccgcttgcgcatctcatcgcagagcctgaaacgcgcatggcgtacttccgagctttttgagcaagcgctggccggtcatattggcatccgtagcggccgcatcgcccgtgaagccgcggaaattctggtaaaaagcgggattgagccaaagaaagcggtggattacgtcaaagctatcgctgaatgctttggcaaagtgaaaactaaagcggatcaaaacgatccgctgaagtgttctgaaactgaacagctggcgcatatcagccccgcagagtttgacgcagtgaaagcgctggcgcatcgcctggcggaagaaaaacgtgcagcaaccaaagaggaagcggcgctgctgcgccacgaccgcatggcggtggatattgctatgtttggccgcatgttggcggatcaaccaacctataacgttgaggctgcctgccaggtggcgcacgcttttggcgttagcgaaaccattgttgaggacgatttctttaccgcggtggatgatttacgcgcggcctctgaagatgctggcgcaggccacttaggcgaaacgggttttggctcggcgctgttttatacctatatctgcattgataaagatttgctggtaaaaaacctcaatggtaatgaagaactggcgaacaaaacgctacgcgctttcaccgaagcggcgctaaaagtctctccaaccggcaaacagaacagcttcgccagccgcgcctacgcgtcctgggcgctggcggaaaaaggcaccgatcaaccgcgctcactggcggcggcattttatcagcccattaatggcggcgatcagctggatgtcgcggtgcagcgcattacgaccctgcaggaaaatatgaatacggtctacgggcagcagacggcatttcagcgcttcgatgtaatgaataagcagggaagcatgaacgacgtgcttgatttcatctgcgcgtaa

SEQ ID NO: 106862 - DNA, 543 bp, Enterobacter aerogenes
atgaatgttgtaagtgatgaacataaggccacgctgcgtcaatggcatgaagagctgcaggagaagcgtgggctgcgggccagcctgcggcgtagcgcgacgctgaacgatgtttgcctgtcggaaggcttccgctccctgatgatgcaaacgcattctctgtggaataccgaggggaaggagtggcgctttaccgcgttggcgctggtggcggcgctggcggcccaggtgaaaacaattgatgaacgccagacgttcgccgctcaactgggacagaaaacgggtgataacccggtgatgtcgaggctgcggttcgctcggctttcggcggtcaaaaccccggacgagctacttcgccaactgcgccgcgcggtaagtctgctgcacggctcagtcaatttattgtcgctggcagatgatgtctttcgctggtgccgggaacaaaacgatttactgaatcaccgccgccgtcagcagcggccaatcgaatttatccgtatccgctgggcgctggactattaccaggccggcgatgccgaatga

SEQ ID NO: 106863 - DNA, 1557 bp, Enterobacter aerogenes
atgaataatttctctcttttaacaacttcctggcttccggtccgttatcgcgatggcaccacgggtaagctggcgccgatcgggttggcggatgaaaacgtggtggatatcgccgccacgcgagcggatttacaaggcgctgcttggcaattcctggtggggctgttgcagagcgcgatggcgcccaaaaaccgccatggttgggaagatatctgggaagatgggttatgcgcggagacgctcgccgcggcattagcgccgctggaggctgccttccagtttggcccggatgcgcccgcatttatgcaggatttcgattcgttagcggggggcgagataccgattgcttctctgttgccggatgttcctggcgcgcagaccaccaaattcaataaagatcattttatcaaacgtggtgtgaccacatccttttgcccgcactgcgcggcgctggcgttattctcactgcagcttaatgcgcccgctggcggcaaaggctaccgcaccgggctgcgcggcggcgggccgctgaccacgctgattgaactgcaggagtatgaaggtgagcgtctcaccccactgtggcgcaagttgtggctcaacgtgctgccgcaggatgccgcggatatgccgttacctgcctcctgggatgagtccattttcccatggcttgccccgacgcgcaccagtgagcaggccagtgccatcaccacccctgagcaggttaataagttgcaggcgtactggggaatgccgcgccgtatccgtctggatttcgtcgccacccggcgagggacctgtgatatctgcgccagcgaaagcgatacgctactcagtcagatggcggtcaaaaactacggcgtaaactacgatggctggcgccacccgctcacgccgtatcgcctggcgctgaaaggcgacggcggcttcttttccgtcaaaccacagcccggcgggcttatctggcgcgactggctgggactaagccaggacaatcaaacggaaaacaacagcgaattcccggccctggtcgtcaaggcgttcaacgcgcgtggcctcaacaatataaaagccggcttgtggggattcggcgccgacttcgacaacatgaagattcgctgctggtacgaacaccatttcccgctgttgatggacgaaagcacgatcccgcatttacgcaaagccacgcaaaccgccatacgcctgctaagcctgctgcgcagtgcgctcaaagaggcgtggtttgacgaccccaaaggcgcgcgcggcgacttcagctttatcgatatcgatttctggaaccagacccagccgcgctttttgaatctcatcaacgaactggaggatggccaatccgtacaggagcggctggatagatggcaaagcgagttgtggttattcgttcgtcgctgctttgacgatcgcgtctttaccaatccgtatgaaaacaacgatctggcgcgttgcatgaccgcgcgaaaaaaatatttcgctacttcggacgaaaagaagagtgcaaaagccgccaggactaaaaagcaggaggctgcgcaatga

SEQ ID NO: 106864 - DNA, 2664 bp, Enterobacter aerogenes
gtgtcaatttataagtactgggggaaaacccgacggggagatgccggcggcggcgacgattatcacctgctatgctggcattctctggatgtagccgcgatgggctactggatggtaaagaataacatttatggcctcgcggattattttcgccgtctgggcctcaccgatattgaggctgccgctcaattctttgcctggttattatgctggcatgactgtggaaagtttgctcgttccttccagcaactttataccaatgaccatcttgccgcggctgtcgaaagccgtcgggactatgaaacaataccgcattcaacgctgggttactggttatggaacacccgtctaagcgaatgccctgaactattccctaactcccggctccctacgcgtaagcttaaacgcgttattgcaatgtggatgccgttaaccaccgggcaccatgggcgtccaccggtggggatgcgcgatctgaataattttcttcccgctgatattgaagcggcgcacgactttctgttggccattaaggcgctgtttccgcgcgttaatattccgccgtactgggatgacgatgaaggtattgaacagttcaaccagctgtcgtggtttatttccgctgcggtcgtgctggccgactggacgggctcatcgacccgctttttcccgcgagtttcccaacccatgccgctggagatttactggcggaaggcatactcgcaggcggaacaggcgatgaacgtttttccgcctgcagcggcggttgcgccatttacgggaatagacgcgttatttccttttattcagcatcccacaccgctgcaacaggcggtacttgaactggacatcagcccgccggggccgcagttgtttatccttgaggatgttaccggcgcaggtaaaacggaggcggcgttaattctgacccaccgtctgatgtctgccggaaaggcgcaggggctgtttttcggtctgccgaccatggctacggccaatgccatgtttgagcgtttggctcaatcgtggctggcgctctatcaacccggcgcgcttccaagcctgatgctggcgcacagcgcacgcggcttgatggatagctttaatcagaccatctggtccggcgatttctccggttcggaagagcctgatgatgctcaaccttttagccagggctgcgctgcatggtttgccgatagcaataaaaaagcgctgctggcggaggtcggcgtcggcacgctcgaccaggccatgatggcggtaatgccttttaaacataataatctgcggttgctggggcttgataataaagtgctgctggccgacgagattcacgcctacgatgcttatatgtcgcggatcctggaaagcctgcttgaacaacaggcgcgcagcggcaattgcgtcattctgctttccgctacgctatcgcaacagcagcgcaataagcttgtgaccgcctttagtcgcggcagcggctataccgctgacgcaccgttattgggttatgaagactacccctggctgacgcaagtcgcaggtcaggagattatttcccgccatgttgcgacccgcaaagaggtcgagcgcagcgtagatatcggctggctggataacgaagaggcatgccttgcccgcatcgagcaatccgccagcgaaggtcgctgtatcgcctggatacgcaattcaatcgacgacgccgtgcgtatctatcgtcaactgctggcgagaggcgtgattcccgccgaaaaaatctctttatttcatagccgattcgccttttatgaccgccaacgaattgagacggaaacgctatcgcaatttggtaagcgcggttgctcgctgcgggcgggaagggtgctcattgccacccaggtcatagagcagagcctggatatcgatatggacgaaatgatctctgatatcgcgcctatcgatttactgattcagcgtgccggccgcctacagcgccacattcgcgatcgtcacggtcgactgaaagacggcggagaggacgaacgtgcggcgccgcagttaatgatcctcgccccggaatgggatgatgcgccgcaggaagagtggctgaccagcacgatgcgcaacagcgcttatatctatcccgatcatggccgtctgtggctgacgcagcgcgttttgcgacagcagggggccattcggatgccgcaatctgcccgattgttgattgaatccgtttacggggaagatatcgccattccggacggattagcgaaagcagagcaaacgcaagaggcgaaatattattgcgatcgcgcgtttgcccatcaaatgctcctgaactttaagccgggatatagccccgatagcagtgatttcctggctgacaaactctcgacccgcctggcggaagaatcagtcacgctgtggctggcgaaaagcgaaggtgggcgattgctgccatacgcctgcggcgcgcatccgtgggaaatgagcatgttgcgggtaagcgaaagctggtggcgtaaacataaaccagaattcgcgcttctggatggtgaaccgctacagcggtggtgcgtagagcagcatcagaacccggatttcgccatcgtgattatggtaacggattctcccgcctgcggttattcggccagtgaaggattaatcggaataatggaggtatag

SEQ ID NO: 106865 - DNA, 1137 bp, Enterobacter aerogenes
atgcaaatgtatgcctgcgctgatctctacgtaaatgctcaattctacggcggaacatgtaaaaaccgaacgtcgagcatgactcttgtacaaaaaattaagataacaaaaattgcacatttaaagttaattaatacaaactccattgatgaagtatttgttaatagtgacggcaaacctacacctgcagaagataacatgaactgtaaaatacaaaaaattggcaaccagtcaggtctcgcctgcaaaatggttagctatagtctgcagagtaatggcctggatttgtcatcagtacagttttatccttttatgataaattcatcgctaggaaccacaataagcaccagcgatatgcaggttagtcttgacggtagttcctggaaaccaatccctgctaataaagcctcatacgcaaatacttccaatagttacacgcttgaggaaatgaagtcttcagaatcgctctatgtttttttctcagagaatttttttaaacagatagttaccttaggactcggaaacgttaacagccgggatttatttagttttagaacttattctggtccatctaataccctttatacaagttatgcctttaccacctccaactcactggaaatcaaaccccgtgaattcagtatcaatatctcctctgaagactacagcgacgccccgtcgcgcgaaggctacgttggccgtgatgaaccctcgctggactttaactacattgtcaccaccagcggcaaaaccgccgccgacgaggtgctgattaaagccaccggaccgacgcagcaaattaacggccgcgcctactgtatcttcagcgccgacgacggcagcattaaagtgcccttcccggccacgctttccttcaccaaacaggatggcagcatcaacacctacgacgtcggctgcgacggcagctggcgcgatatgaccgatgccctgtggcttacatcggcgtggaccgatatctccggcgaacccggcgtcatgaacaaagcaactgtgaagttttcggttcccatgaatgacgatatttcgcagaaaacgctggataagagcgggtggtacggcgacgtcagcgcctcaggagaaattcacgttcaggccacgtggcgcgatattaattaa

SEQ ID NO: 106866 - DNA, 1959 bp, Enterobacter aerogenes
atgaaaggaaatttattcacatcaagcggcagtaaggcgacgcttggacgggaattaggtaagggtggggaaggcgcggtatttgatgttgtggagtttcgcgatagcgttgccaaaatttatcacgcgccgccggatcaactaaaacaggccaagctgagttttatggcggcgacggttgacgagcggttattagattatatcgcctggccgcaggcgaccttgcacgacgggtgcggcggtaacgttgttggctttctgatgccgaaggttgcggataaagagccaatccatatggtgtatagccctgcgcatcgtcggcagtattatcccgacgccgcttgggattttttgctgtacgtcgctcgtaatatcgccgcatcctttgagactgttcacgatcatggacatattgtcggcgacgtcaatcagaacagcttcatggtaggaaaagatagtaaggttgtgctgatagatagcgattcgttacagattaacgaaaatggcaggcagcatctttgtgaggttggtgtagggcattttaccccgccggagctgcaatcattatcctcattctccggatttcaacgaacggcaaaccacgataattttggtctggcgctgctcatttttcatgtgttatttggtggtcggcacccttattccggcattcctttgtcaaaagaggctggtaatgcgctggaatcggatattgcgcattttcgttatgcgtacgccaacgataatcagcagcgcggttttcgtccgcctccacgttcaattcctgtttcaatacttcctgattttctgacctcaatgtttcatttggcgtttaccgaaaagggggttgccgaaggacgcccaacggctaagcagtgggttagcgcgcttgatgaggtacgccagaaattaacaaaatgcgccgtttccgcgatgcatatcttccccgcgcatttagctcgctgtccctggtgcgaactggaaaatcagggggtgagctatttcatcgatctgaatatctccgtcagaacgtcgatggggaattttgttatggcgaaagtcgttgggacgatcgccgcagcatcgcctccgcggccgttaaacctcccatctcctgtgcattatcagatgtcgccgcgtccgttaccgaaaaatataccgggaaagacggtaattactgtcgcccagtttgcggtaggcattattgccattgtggtgatggtcattacgatgaaaatatattatttgtcgcagggatggctttggtcattgcctggcggcgcggcggcgctgtggggagtaaaaccccttggtatgaggctacgtaaagcagaaatgctgcagcgccgtacggcaatggagttggctacaaatgagtaccaacagcttgtcttaagggcgcaactggcgtgtggacctgaaggttttatggctaaacgcgcggcgctgatgcagcgcaaagaagaactggttgggctgccggcggcggaaaagaaagagcttgatgggctgtatacggtggcgctggaacatcaacggaataaatttcttgcaacgtgcttgattgcctccgcgtcgattcccggcgtcggagcttcgcgtaaggcggtgctgctttcagccggtattaaaaccgcggccgatgtcagcaaacgaagggtgaaaaaggttaaaggctttggcaatcatctggcgcaaacggtgatggagtggaaggcaagctgtgaaaggcgctttgttttcaatgcggccgaagcggtaccgaccagcgatataaatgcggttaaagcaaaatatgccgtccggcgggtggcgctggaggcggcattgactgaaggcgcggtagagctgcagcgttttagtctggagtccgagcggcgaatggccgcgatgcgcgagccattacaggaggctgcgaaaaaactggcgcaggcgcaggccgattttagcctgtgctaa

SEQ ID NO: 106867 - DNA, 669 bp, Enterobacter aerogenes
atgctcagcaacgggcagccgttgctttcattttttatctccgatggcgcgggtagcgcgctgcgaggcggcgaaggggcggcgctggccgtgagcgcggctgcagccttaatgacagaaagattgcaccaggaagcttttgagctgaatgacgctttagcggtagatatcatactggcaataaaggaaaaaatagcggccgccgcatccgcaagttcgctgacggcgcgcgactacgcttgtacttttctgggcgtattatcgatggaaaacggtacgttcataatgcagattggcgatggcggcgtagtcgtggattgtggcgagggaatgcaggttccgctcgtaccgatgaccggtgaatatgccaatatgacctggttcgtgacggatgaagatgcggttaatgtactggctacgcacttcatatcttcgcgagcgcataaagtggcggcgtttaccgacggcatccagcggctggcgcttaacctggcggagaataccccctatgagccgttttttacgccattttttaccgtcatggccagcgcttctccgcagcagttggcgcagttacccgatttgctggttaaatttttggcaagcccggcggtaaacgaacgtacggatgacgataaaaccttagcgctggcgttgtggatgcgatga

SEQ ID NO: 106868 - DNA, 660 bp, Enterobacter aerogenes
atgagcgaacaaattacctttggaaccagcgattttgccagtaatcccgagccgcgctgcccttgtgtactattactcgatgtctcaggttcgatgaacggccgcccaatcaatgagctgaatgcgggtctgatgacctttcgtgatgaactgcttgcggatgcgctggcgatgaaacgcgtagatttgagcattgtgactttcgggccggtaaaagtagaacagccgttcaccagtgcggaaagcttcttcccgcctattctttacgcgcaaggggataccccaatgggggcggctattactcaggcgcttaatatggttgaagaacgtaaacgcgagtatcgcgctaacggtatttcatattatcgcccgtgggtatttttgataactgacggtgggccaacggatagctggcagtctgcggcggcgatggtcagtgaaggcgaagctgctaaaaaatttgcgttcttctcgattggcgtacagagcgcggatatggctacgcttgccaaaatcagcgtgcgacagccgctttcattgcagggactacagtttcgcgaactgtttagttggctctccagctcactgcgttccgtttcccgatccacgccgggaacagaagtcgtacttgaatcgccaaaaggttgggcgtcggtgtga

SEQ ID NO: 106869 - DNA, 279 bp, Enterobacter aerogenes
atgggtgatgcattggggcttatcgaaaccaaaggtctggtggcctgtattgaagcagcggacgcgatgtgtaaagccgccaacgtcgaactgatcggctatgaaaacgtcggctctggccttgtcaccgtgatggtgaaaggcgacgtcggcgcggtgaaagcggcggtggattccggtgtggaatccgcgcagcgcatcggcgaagtggtgacctcgctggtcatcgcgcgtccgcataacgacatcaacaaaatcgtcattaaacacaaggcctga

SEQ ID NO: 106870 - DNA, 285 bp, Enterobacter aerogenes
atgggtgatgcattaggtctgattgaaaccaaaggtctggtggcctgcattgaagcggcggatgcgatgtgtaaagccgccaacgtcgagcttatcggctatgaaaacgtcggctctggccttgtcaccgcgatggtgaaaggcgacgtcggcgcggtgaaagcggcggtggattccggtgtggaatcggcgcagcgcatcggcgaagtggtgacctcgctggttatcgcccgtccgcataacgacatcaacaaaatcgtctcgcattacaagattgcggactaa

SEQ ID NO: 106871 - DNA, 387 bp, Enterobacter aerogenes
atggtctacttagatagaataaagtatttagattttgacgatattgatttaaataaagagatgctttgggaaaataacagagccattgctagcattctttttaaaagaaaagaatatgagcatgaaaaagaagttagactttatcataaacctgacgaatatgatttattagaccctcagcatacaatgcttactgattactgggaaagatacaccataaaaccatacttcattaacattaatattaatgaaatgattcaagatgtagttatatctccttttgtatctgagccttatgaaagcagtgtaaaagctatatgttctaagtatgaattaaataattgtaaggtttataagtctgccctattagataaatatgatttttaa

SEQ ID NO: 106872 - DNA, 1662 bp, Enterobacter aerogenes
atgttggcgcaactcaccatcagcaatttcgctatcgttcgtgaactggaaattgattttcacagcggcatgaccgccatcaccggggaaaccggcgccgggaaatccattgccatcgacgcgctggggctgtgcctcggcggccgagccgaagctgacatggtgcgccgcggcgccagccgtgccgacctgtgcgcgcgcttcgcgctgaaagatacccctgccgcccagcgctggctggaagagaaccaactggagagcgggcgtgagtgtttacttcgccgcgtgatcagcgctgacggtcgctcccgcggttttatcaacggtaccgccgtgcctctttctcagcttcgcgagctgggccagttgcttatccagatccatggccagcatgcccatcagttactcaccaaagccgaacatcagaaaaccctgctcgatggttataccggtgagtatgcgcttactcagcgcatggcggaacgctaccgccagtggcaccagagctgccgggagctggcgcagcatcagcagcagagccaggagcgcgccgcccgcgcagacctgctgcaataccagctcaaagaactgaacgaatttaatcctctgccgggcgagttcgaacagattgacgaagagtacaaacgtttggccaacagcggccagctgctcagtacctgtcagcatgcgttaacggtactggccgacggcgaagaggccaatttgcaaagccagctttataccgctaaacagctggttggcgagctggtcggtatggatagcaaactctccagcgtgctcgatatgctggaggaagcctctattcagctcagcgaggcgaccgatgaactgcgccactacaatgaccgtctcgatctcgaccctaaccgcctgttcgagctggagcagcgcatttcacggcagattgcgctggcgcgtaagcatcagattgcgccggaagagctgccggcgttctatcaggccatgctggatgagcaacgtctgctggacgatagcgccggttcgctggaatcactgagccagctggtcgttgagcatcaccgcctggcgctggaaacggcgcaagaactgcacgccctgcgtcagcgcagcgccgatgaactcacccagttgataaccgaaagtatgcactcactttctatgccgcacggggtgtttgccattgatgtcgcctttgatgaacgccatctgaccgccgaaggcgccgaccatattgagttccgcgtcaccaccaacccggggcaaccgctgcagccgatcgctaaagtggcctccggcggcgagctgtcgcgtatcgcactggctattcaggttattaccgcccgtaaaatggaaaccccggcgctgattttcgatgaggtcgatgtcggcatcagcggcccgacggcggcggttgtcggcaaactgctccgccagttgggagaatccacgcaggtcatgtgcgtgactcacctgccgcaggttgctggctgtggtcaccatcatttctttgtctgcaaagagaccgatggcgagatgaccgagacccacatgcatgcgctggataaacgcgccagactgcaggaactggcccgtctgctgggcggtagcgaggtgacccgcaacaccctggcgaacgcgaaagagttgcttgcggcgtaa

SEQ ID NO: 106873 - DNA, 597 bp, Enterobacter aerogenes
atggactttgaaatcatttgggatgatgatgagatgaaacaactggatgcaatggccagtatactattgtcagcgtcttattctgaatggctgtcatttaaagaaaaattagccaatccacactgtttagccgatgagggtaatgattatttcgagatcgctgaatccacaatcgaagtatatgaaggcgatctcaccgaagggactttaagccttatatttcttaatattttggagtatgaagatcttattgtgaccattgactggaaagaagaaatggagagcggtcaactcgcttctttcgctgccgagcgctatcacgccttattagacatcgacgatgcggctgaacttaaagagcgactcatcaagctaaccagcgagcgggaattagcaaaggtatgtgatataaataaggtccatctcgatatcatttttgaacggattcaggcccaactagatcaatataacctaatactcgctcatctgtttgatggttccgattgctatcatatctttgtaacaacgaaagcagatttcataaaacttcagaatatagatagcgaatacttaacagccatggtttgttcacactaa

SEQ ID NO: 106874 - DNA, 1365 bp, Enterobacter aerogenes
atgcataaattaaaattcggaattatccttactttattgttatttattaatacttcagcatgctatgcgaaatttcattcatgcaaggaatattgggacgaagatggcaaagttgaaaaaatgtcatgcggcaacagttacaaaccaataccagatagcccttatgtattaaaaaataacaaagtctggtatgctacttatgatagcaagacatataatcggcactctggttgtgctggtgtcacctgcatggcaccaaacttcaatatccttccagaaattgaacgtgaaaaaaaatatttttactctctcaaccttgatatcaatagtgcacatgtaataaatcaaccaaataaaaattgtggatatagtagtacaaattacatagcagataacaacagcgtttactatgataaaacaaaaataaaaaacgccgatcctcaatcattcaaaatatatgaaatgaaatataatgacatagcatctttgggatgtaatctggcatgggacaagaacagtatatatcaatttggtaaacccctgagtattcaggtaaccggtgaagtcaatctgatcaatgaatcattaataagcattggaaaacaaatttttgaaatagaaaagcaacaggacaaattaatattcacgcctcgtaacgacatctctcccaatctctatgcgctgccaagtggccggggtttatccacagataaccagcaccttttttactatggaaaggctattgaaacgctagcgggtatcccaccgacgctcgtaacacctgtgtgcccggttcctggctttcctcatctggaatgtcaccttcctgataacaatctttctggtctcatgaaaaatgaaggtaatactgtcattcgaaccggaaacagcatttgggtacaatcaattaggcagttgcagaaaggagtatataaaataagtataagaccgcaagataaaatctatttttttattaaaggagatgattacggaaacgctcatctcattattaatcatacattatacgacctcggaaagtataatataagcgataaatattataaccgtgaccccgtcgtattttcggatttcctgatgtcttataatttcatgtttgttgatagctacggatttattgataatgaagcgaatcaaagcatcgataatcgtaggacattgtttaaatgtgataaaaaaaacaagaaaagattacattgggagaaagataaaaacacaaccccaggaacattcgttctaagcgataaggaataccgttactttatagttaagggtaaattagctaaagttcaggataaaaaaacaaagcagttcatcgacgataacaaaggtgattgttctaaatga

SEQ ID NO: 106875 - DNA, 180 bp, Enterobacter aerogenes
atgctgaattataagtttgatgactacattattgccttgatggttatgatgttagtggtaccggtagttatggtgtgtttgatgttgttctcgttaaagtccaataaccaaagaaaattttttatttttgtctgtatggcgatggcgctattggttacgatggctttccattatggatga

SEQ ID NO: 106876 - DNA, 237 bp, Enterobacter aerogenes
atgtttataatgttgcaagtgagaccccgtagcctgtttggctttatttttgttgtgttccataaccaacgcgtcaagaagaagaacctgacggtatttgtttatattgccacactgatgttaactggcggttgtttttttgttgttgtgatcggtttcgcgatagtggatttaacattatatttgcttaagtatatgaaattaagcctggagcgcagttttcattatgccgtataa

SEQ ID NO: 106877 - DNA, 393 bp, Enterobacter aerogenes
atgtgccgatacattctgcgttgtgttgaaaatttgaaatatctaacccctaccgaaatggttgagtccttaattaatagccataataaaacacagtggtacgttttatattttcctctagaagatgccattgaaattggcgttaatttattcgctgaaaaccctattattggcaaaagattatacattagaactatgacaaaccgccaaatgtactttatccctgagaacatctccagtactatagatttacaatctaatatagcttgtacgttatatgaattttataccctcaccccgcaaactaagagtttaattgaagattattttaccagaattaaaaatggtcatttgcagccatggcggctaaatgcagaacccgatgaaaaataa

SEQ ID NO: 106878 - DNA, 207 bp, Enterobacter aerogenes
gtgcatcatttgtttctgcattttcccgtcgcttacaagatattgaatttttatcggattttacgtcatcttattttgaagggactggaaaatataataagaaaattcgagttgatggttattcatatgatgaatttgataaaactatgcatcttgttattgctgactatgatggttccacaagtgaagcatatttatcaaaaataa

SEQ ID NO: 106879 - DNA, 180 bp, Enterobacter aerogenes
atgtacctcctgaacagtaaaaagaatattcaaaaagttcatgtcttgtgggcagtgttccttacccgctttctatatgaggttactgcacaatatttcaactcaccgaagcgcagttttgtgattgaaatcacatgttttccgcccggcctgtcacggaaattattcagccaccggtaa

SEQ ID NO: 106880 - DNA, 633 bp, Enterobacter aerogenes
atgagtgaacaacgaccgtctccttcgcgtccgacacagggaccaataggctggctactgtcgctggccggacggcttatcggattggtgatcggcgcgctggttctacggttcttactggagctggcagggctatatttctggtggccgcaggaggggagcaggcacgcttttcaggtgatgaagcaggagcaggctgaactggttattgcgttgcagccgcaccctctggggaatgaaattctggtgctgctggaaaaagggggaaatcgcgtacttatggccaacaggctcctgcagaaaccgttcaccgccctggcttatacgctggtgagttttatgcttcgcctggtatggctttccgccatgctcccactgatttgcctgtgtgttgtaatcgggctgaccgatggtctggtgcaacgggatttgaggcggtttggctctgggctggaatctgtttttctacatctttatattatcagattcgctaaatcagttacctgtgtgctttggtggttttacttggttcagacgttctattcacaatctgtaagtattttactgcctacaatagtatttttcggagcaataatatatatagctgtaggcagtttccaaaagtggttataa

SEQ ID NO: 106881 - DNA, 792 bp, Enterobacter aerogenes
atgttaaaaacacacatgaatgcaaccgagaatcatttggtttctatctcacagattcctgctaatgctggacatacattacatagaggtacaccgagagaagcgtttattaaagagtttctttccgggcacttaagctctaatgtggcaattggttcaggggaaattatagattctaactcccaaccaagagtacaaagaaatcagtatgatattgtcatctataaaaacaattatccaaaattagattttggcggtggagttaatggttttttaattgagtcagtaattgctacaatagaagtaaaatcattattagatcaatctgcaattgaccagtcggttaaggcggctcacaacgcgaaagttttaaccccaagcataaataaaagtttcagcactggatgggtgccacctaaaattataaattatgttgtggcatatgatgggccagcacaaatgaatactgtgtataactggatattaaatagtcatcaaacgaataggatcccgttgccatcatggaatcagcaaacgaaatatcaaacaccaggtacagcacttgatggtgtggttttattaaataaaggatttataaagcttgataatacaccattatcgttaaactcttctcagcaatcaggaactcatatagttgttgacagtaatgatggtaatctattaatgatgtttttggctttacaggaagcgtgtgacaatatccaaggcgcttggttgaatgcaggaccatatgtaagaaatgtcggatttaacaatgtaagaataatataa

SEQ ID NO: 106882 - DNA, 315 bp, Enterobacter aerogenes
atgttatacaaattaacactactattatccataacgttatataacattctggattttgcaatcgcttccccagaatccacccagctcgcccttgcgcagaaacaactcgacggcgtaaaaacctcgctggagcgcgcccaaacgagtgccagcaccgatccgcagtcacgctacttcttcgactacttacaggcgcagcaggacatctctgccattgaacagggcatccgccgctaccttagcccggcaagggcacagccgcgcgccgttcagcccctgagtgccagctaccagcgggagaaccccaatgactga

SEQ ID NO: 106883 - DNA, 861 bp, Enterobacter aerogenes
atgactaagcataaacaatttgaagagtatctttttcatgatacttattatttttgccattgtgtgaaaaatatactttgtgatcaaacttcatatatcggaggtttgaatgattttcatggcgatggaagggtaacatccttttcaatagcatttccaaaatattcacatttccatgcgtttatagaatttatagtatctaatatatattatgaagaattggaatggagcaatatccaaaagctacataaaagattcaaagagcttacccagtttgaactcgcaatgttatctaacagtgaaaatggcggtgtgttttctttctttaataagtatcaggaatatatggcttttttgtctggtgaaggtgttgctttaagccaaagcgatgagtattcattgcaagcattcttagagcatttcatgtcaaatgaggtttttgttaatcatttagaaaagactgtagatgaagtgttttatgtcttattcgctaatagattagtcgtccagctgttcaatgaaatgattgccagcgttagggaatatgataaagatgtatttgaagatgatagttgctgtaagcctaatggggtattgaaaaggaaaaatataccatcatgggtgaagaatgctgtttttcatagggataaaggagtttgtgttatatgtaaaaaagatttaacccatctaataaataattttaatgaagctaattatgatcatatcgttcctttatcaaaatatggaataaatgatatatccaatattcaactgttatgtaagaagtgcaatcagattgataaaaattcaaaaggaaatgatagctcgtatgattatttcccttggtatcgcatgaattga

SEQ ID NO: 106884 - DNA, 249 bp, Enterobacter aerogenes
atggcttgcgctttatccgggcgaccggcggtgccgtttttttgtcgggtgcggctaacgctttacccgatctacggtccgtgcggcctgccgttaatttcttcaccacgctggctgacactactggtgctggtgatctcaaaacccccggtggcgctgccgcttaccggggctacagcgctgtccgatttggtagcccggagaaggcgcaacgcgccgcctccgggaaaaacccctggcagcgattag

SEQ ID NO: 106885 - DNA, 627 bp, Enterobacter aerogenes
atgaaatcactgtttaaagtaacgctgctggcgaccacgatggccgttgccctgaatgcaccgctgacctttgctgccgataccgcagcaaaagccgcaccggcggcggacagcaaatcggcatttaaaaatgacgatcaaaaatccgcttatgcgctgggtgcatccctcggccgttacatggaaaactccctgaaagaacaagagaagctgggtatcaaactggataaagaccagctgatcgccggcgtgcaggatgcgtttgccgataagagcaaactgtccgacaaagaaattgaaaccactctgcagtcctttgagacccgcgtgaaaaccgccgctcagcagaagatggaaaaagatgcgaccgagaacgatgccaaaggcaaagcgttccgtgacgccttcgctaaagagaagggcgtgaaaacttctaaatccggcctgatgtataaagtcgagaaagccggtaccggcgatgcgccgaaagacagcgataccgtcgtggtgaactacaaaggtacgctgatcgatggtaaagagttcgacaacacaactcttacacccgcggcgagccgctctctttccgtcttgatggcgttatcccgggctggaccgaaggcctga

SEQ ID NO: 106886 - DNA, 153 bp, Enterobacter aerogenes
atgtgtccttttttttgtttttgcgtgccttgttcattgttcaaaaataactatcccttacatccatcggtgattatttgtaggataacgaaccgctttaatattcattatttcttcgcagattcgccgccctatccggcccgtaatctataa

SEQ ID NO: 106887 - DNA, 447 bp, Enterobacter aerogenes
atgcaactgaaacggatatttcaccacgctttctggtacacgttgctgggcccttttgtcggcataccggtggcaattattttctgcgcattctatggcggaggcgacatggctgagttcttcctcattattaccagagggctaatgatcatcatggtcttcggctggtttttgggcgccattcccgcactgttaaccggcatcgccgttgcctgtctacccgctgctatttacaattgccgctggcggcgaattgtatgtagcggaataattggaatggcgatcgctcttattattggcgccccattgattgaatatttcctgaccgatgaaatgctatggtctgctcccagcgcggggttagtttccgggctggtaatggggtgggtggtgattcgtcttttcggttttacacgcttgtccgctcatgcggacctggcacaataa

SEQ ID NO: 106888 - DNA, 2154 bp, Enterobacter aerogenes
atggcatcattaaataacaatacttcgcaagatagtaacgacattgatttcgggcggctgattggtgagttgattgaccataaaaaactcatcattgctgttactgctggttttacagtactggcggtattgtactcactgttagctactccaatatatcaagcaaatgctttaatccaagttgaacaaaaacaaggaaatgcacttttagatagtctcagtcagatgttgcccgatagtcaacctcagtctgcacctgaaatagcattactacaatcacgaatgattcttggcaaatcagttgatgatttaaatcttcaggctcagacagaacagatttactttcccgtgtttgggaaaggtttatcgagaatactaggtgaaaaacgaggcaaaataaatgtatccaggctgtatttgccaaaaagcctgaagggtgatacacctgaaatcatactgacagttaaggataaaaataattaccaaattgaaagtggtgatttggtcattaatggagtcgtgggtaaattgattgaagataaaggaatatcattgttagttcaatcaattgatgcagaaccgggaacacaatttaaaataagatatttgccaaggctattagcaataagtaaccttcaagactcatttagtgttgtcgatcaaggcaaagataccgggatgcttaatttgacattaaccggagatgatcctgagcttattgctcatatgttagataatattagtcaaaattatctatcccagaatgtcgatcggcaagcagcacaagatgcaaagagtttagagtttttgagcaatcagttaccgactgttcgctctgatttagatgctgcagaagataaattgaatgcttataggaaacaaaaagattcagttgatttgtctatggaggcaaaatcagtacttgatcaaattgtaaatgtcgataaccaattgaatacgttgacattcaaagaggctgaaatttcgcagttatatacgaaagaacatcctacatataaagcgttaatggaaaaacgtaaaactctgcaacaagaaaaaggaaaactaagtaagcgcgtaagcgcgatgccatcaacgcagcaagaagtacttcgattaagccgtgatgttgagtcaggtcgagccgtgtatatgcagttgctcaaccggcaacaagagttaagcattgctaagtcgagtgctattggtaatgtccgtataattgatcaggcaataacagaaccaagtccggtgaaacctaaaaaaatccttgttatcgtaatcggaataatattgggattatttatttcggtaggactcgtattggttcgtgtcgtactgcgtagaggaatcgaatctcctgaacaattagaagagctcggtgtaaatgtttatgcaagtgttccggtgtctgaatggttaacaaaacaaaataccggaaaaatcaaacgcaataaaaatcaatctagtactttacttgctgtagagaatccagctgatttggctgtggaagctatccgaagtttacgcaccagccttcactttgcaatgatggaagcaaagaataatgttcttatgatttcaggtgctagccataatgcaggtaaaactttcattagtactaacttagctgcaataattgctttgacaggaaaaaaagttctttttgtggatgccgatttacgtaaggggtatgtacacaaaatgttgggcaaacagcatgccaagggactatctgagatattatctggtcaagaatcaattgaaaaagtcatcgaacgagttcccggtggtgaatttgattatattggccgtggacaaattcctccgaaccctgctgaattgctaatgcatactcgcttctctgacatgatcgaatgggcatcaagtaattatgaccttgtaattgtcgatacaccaccaatccttgcggttaccgatgctgctatcattgggcgctatgcaggaacaacattgcttgttgctcgtttcgaggctaatactacgaaagaaatctcagtaagtgttaagcgctttgaacaaagtggtgtaaatgttaaaggttgtatattgaatggtgtattaaagaaagcaagtagctattatggttatggatataatcattatggctattcatgttcaaacaaagaataa

SEQ ID NO: 106889 - DNA, 1080 bp, Enterobacter aerogenes
atgagtattaataatgttatgcgttatttagataaaaggttttatttattactgccagtgatggtgatgatattgctgtcgtctggtttttatggctataaaaaggtcattcagacggattattcaataaagtccgccctgttgccacaggatgagttgtggaccgttgagcattcatggcagatggttgaagccatcacgccggaaattccacagattgataatgaggaaaagctgctggagttaattcggcacgcatggctgtgggataaaaatgccatgatccagtatgccagaattcagaagctgctttttggtgacccaatccttgatgactttatcagcagacaggcccaccggctgaccggccgggacggccagcgcctccggcggcctgatatatttgatatggattacagcgagtttatcaaccggctggctgatatgcagtaccctctcgcggcacggctcagggcttctggattactgtggagcgccggggaatcagggttaatccataattcactgacgcctgagagccgcgctcagctgattcattacacccggtatgccatacagggtggataccgcatccattcttttctggccgactatattctgtttgatacagggtttgcttacaaagacagtaacagtaagcagctaaataccctgccggacagaattcgggatttatcacaaaaagagctgaaagagagcgttgcagcttataaggtgagtgcgttacatggctcacagtacgcgcaaatcagaatgagcgagttttatttatatggtgtgggcgttcagcaggatctcgaaatggccagcgcctggtcacagattgccagagagagttttgaaaaccgggggcgttattcttcactgacctacagaaggaaggaaaacgtgctgaacacctataacagcacggtgctgtttccccttatgcggcagcatatgacccaaaagcaaagtgagaaaagcgtacaacgggcatcgcagattaagcgcgatatcacggagacggattattatacctgggcggcaggtatggatgcgatcccaccaaaaccctga

SEQ ID NO: 106890 - DNA, 600 bp, Enterobacter aerogenes
atgaaaacacagcatttactatatgcatttatttttcttaatgctccagcctgtttatcggctgagattgatggtgcactcataagtaatcatattaatgataggcaacaggttgtaattaatgcgattgtcatagcggaaaatttaattggtggaaagactactgtagaagaagtaaagcgctcacaattttttgatagaatgttaacgattagtccaaaaacaaaacagcaagtagaaagagtaacatttgagaaaaaacatgtgttgtcgctgactattgaaagggaatataaaaatacctatgtaaatggagcggggggatggtatgaagccgttgtctttatacataatgagggtgatcgttttttatttaaaaattgcaattttattatggatttaaatctttctttgatgaatttttataaaaagaggtttaacttcgggcctaataatgatgagtcttcatattatgcatatgattatgagaaaaaatctgctggcaacatggtttttcattttatggtttcgccagatttctttgttagtgatagtttttgtccggataaatttcacatggtgaggctgtttttacgataa

SEQ ID NO: 106891 - DNA, 669 bp, Enterobacter aerogenes
atgcattgccgtaatcccaccaggcaaaaacaaaacccggtcgctgtaccgggtttatttttgcccgatgacgggaatagatttacggtcgagaaattctgcgacatcaatcggttagatactgttatcggttggcaactttttggcttgagaaaaagcgtttatctcgtttcgctccatagcatattgcgctcccggttaatttttctgcaatatgttttctgtggtgctgagagcgcacagggggcggccaatcaccgccgccccctgtacccccgggctctggccgccaaaatcgccacttcgtggtaccttcgacttatccctacaggcttcgggtcgggccgaggcagcgtccgtgcaaaacacggccctcagcccgcatccatgcgggctgccccggccttccgggaacgtctcagcgattttgaggccaccaacggcggctgtttcagtcgctattggcacagaagtagcccggataagacgcggcgcgtcgccatccgggactctcctataaactcaataagctggcgctggcgatcgttctctgtttctgcagcgccgccagcgcctcaccggtcatcagcgatattgccgccgttgggcataccgatacgcatgccgggccgccgtctcgctgctcgcagagatcgcacttcacgataa

SEQ ID NO: 106892 - DNA, 621 bp, Enterobacter aerogenes
atgaacgctaacctcgcggtgatcgccgacaaccttgattatctgctgtggggacggctggcggaaggccaacccggcggcgtggcgctcaccttactgatggccatcggcgcgaccgcgctggcgctaccgggcggtattctgctggcctgcgccgcctggcgctacggcggagcggtccgtcgtctgctgttcctgtgggcggaaattattcgcggtatcccgctgatcttcgttattttctggctgtggtatctgctgccgatgctgaccggcggcgatctgccgggcgcggtgacggtcacgctggcgctgacgcagggattcgcccccggccagacgctacgcttaatcctgctaccgcaggcgctgcgcaacgtccagccgtcgctggtcggcatttttatcggcttgctgaaagacacctcgctggcgtttatcgtcaacgtgcctgaactcaccaccgtcgccgggcaggtcaataaccgggtgcaaatctacccgctggcgatattcgtctttaccggcgcggtttactatttactgtgctgcgccctcagccagctggcgagccgccgttttaccaggcgtagcgctgacaggcgcttcgcagccgattga

SEQ ID NO: 106893 - DNA, 369 bp, Enterobacter aerogenes
atgcgtattggtacagatattgttgaagtggcaagaatagaaaaagccattgccaatgataaggcagggtttcttcatcgagtatttacggataatgagatcaaagatattgattttcctttccctaattatgagagggcatcaggattttgggctgctaaggagtctctggtaaaagccatagggtatggatttagtcacgggatccgtttccatgacattgaggtcgttcatgatgaacatggaaaacctgaattcatattgtcagggagtgttaaggagattctaaataatcaacaaattatgaatatatcattgagtatttcacactgccggacatatgcgatagccgcaaccataatctattaa

SEQ ID NO: 106894 - DNA, 1161 bp, Enterobacter aerogenes
atgtcaatcttccgcagaggtgaaatatggtacgcctcgtactcgctcccgggcgggaagcgaattaaggaatctcttggtacagaggacaagcggcaagcgcaggagctccacgacaagagaaaggctgaactctggcgagtagacaggcttggagactttcctgatgtgactttcgaagaagcctgtttgcgctggcttgaagagaaagcagataagaagtctctcgatactgataaaggtcggatcggattctggcttgagctttttgaagggatgaagattaaggatatcacagaggcaaagatttacgccgcagtgagcaggatgcagaacaggaaggcaaaggagatatggcagcagagagttgatgccgcagcaagaaagggaaaggatgccccggcgtttgaagcaaaaccggttactacgtcaaccaaagcaaaacatcttgcattgatgaaagccatactacgcgccgcagagcgtgactggaagtggctggagaaagctccagtcatcaagataccgtcggtgagaaataagcgcgttcggtggcttgagcatgaagaggcgaaaaggctgattgatgaatgtcctgaaccattgaagtcggttgttaagtttgcgctggcaaccggcctacggaggtcgaacatcatcaatcttgaatggcagcaaatagatatgcagagacgtgttgcatgggttaacccggaagacagcaaatcaaaccgagctattggtgtagcgcttaatgatactgcctgtaaggttctgagcgatcaaataggaaaccatcataaatgggtgttcgtccataccagagcgtggcacagacctgatagctcgctaactccagcaataaggaagatgcgagttgatgataacagagcatggaactctgcatgcaaacgcgccggcatagaagactttcgctttcatgacctgagacacacgtgggcaagctggctaattcagtcaggcgttccactttctgttttgcaggaaatgggcggatgggaaagcatcgaaatggttcgtcgatatgctcacctggcacctaaccatttaacggaacatgcgaggcaaattgactcaatttttgaggaagatgtcccaaatatgtcccacaaggaaaaatcagcgattggagaaagttga

SEQ ID NO: 106895 - DNA, 264 bp, Enterobacter aerogenes
atggattacagcaagctatcagattttgaaatagataagtcagtagcagatgcattgggtttcgattacgacatcgcaataatgtttgtaagtccggtagataaaattaatgggaatcatgttgaggagtacgttaggaaaaagataaccagtaatgaaaagtactggaagcggttttcgccaacaagaatacctaatgatgcatggtcgattatcgttggaaacgaaatatcgctaatctctcgatgcgctaatggtgaatag

SEQ ID NO: 106896 - DNA, 468 bp, Enterobacter aerogenes
atgatttcttgcagaaaatgcggagaggataagccgcttgatggattctatccaagaaacaaagtgtgcaaggagtgcaccaaaaaacgagtgtctgaatatcaaaaaggagcaggaaagctcatacataacaaagcatgtagggaatacaacaaaagcgaaaaggggaagatcgcattaggcaaagccagagacaactaccttgagtcccatcgccaaaggcagcgtgcacgatgggccgttaaacgggctattaaatcaggaaagctctgcagaccgaaatcatgtcaggaatgcggtagtaattgtcacccagatgcccatcactgcgactacggaaagccaacagatgtgatgtggctctgcaaagcatgtcatgtcgaatggcacaagcataacaagccaatctacccggaagaggcaccggtaacccttcccttccctcgccacaccattcacgccatttaa

SEQ ID NO: 106897 - DNA, 1005 bp, Enterobacter aerogenes
atgagtgaaataacggatttagtcgttatcgagaaatcaagcgcgatgtctgtatttactaataatgaccaactcgatccaatcattgaaaaaatcgagaaagaggctcgcagcctggtgccggatgtatccaccaagaaaggtcgtgatgctatcgcgtcaatggctcacagggttgcgcgttcaaagacatacatcgacaacgctggcaaagacctggtagctgaactgaaagctctaccaaagcagattgatgagagtcgccgtattgttcgtgaacggctggacgcgctgaaagatgaagtgcgtcgaccactaactgagtgggaggctgagcaggagcggattgcagcagagaaagctgctgaagaagagcgcctgagaattgaagctgaggaaaaggcagcgatagaagcactcaaaaagcagatagaagccgatcacgaaatggcgctactgatgaacgatgcattcgaccgcgaagtggctgagaaggaagcagaagcagaacgtcagcgcatcgctcgtgaagaagagttaaagcatcaggcagcagagcaggctaagcgagaagcagaagaaaaggcggctgctgaactggcggcagcgaagaaacgcgaagaagatgcgattgcagcaaaagctcaggctgaattactggctaagcaagcacaagaacgcgcagagcaggaggctaaagacgccgctgaaaaagctgaagcagagaagaaagcagccattgaagaggagcggagaaaagcccaggaagaagcatatcgcatcaagtgtgaagctgaagcgaaagaagcggcccgcctggcagaagagaagcgcgtcgctgacgaaaaggaaaagcgtgaggctgacgttaagcatcgcaaggctgttggcaccgaaatcgtaaatgcactcactgccaataccagtatctcgcgagaacaggctattgaagttctgaaggcgctgatggatggcctggtaccgagaacacaaattaactactga

SEQ ID NO: 106898 - DNA, 315 bp, Enterobacter aerogenes
atgcaagactttaaaggtacgcctggcccatgggagtggtggacaagtaatagcttcctgcgcttaagcagtcgggctacaggtaaggatggtgatgttatcgactcattcagtatgagtgatggcgctacttctctttctgttaaggttgcagatatgcatctgatagcatccgctccagaattgctggaagcgttgcagggattggttagaagttatgaagatttcaggaagagaaaagataaagaaggaagccctgaagcgagtgagattataaaggctagatccgcaatttataaagcgctaggcaaataa

SEQ ID NO: 106899 - DNA, 252 bp, Enterobacter aerogenes
atgagtaaagataatggcggaccagctttccctttctctggggtccataagggtgaaaaagaaaacatgatagtcgatagccatggaatgacgctgcgagattacttcgcggcaaatgcgatggcggcaattgtacgtagatgggacggattctcatttggtggagggccaaactctccgcagtacaaagaattatcagaagatgcatatctaattgctgaggcaatgctgaaggctctggaggttgaatga

SEQ ID NO: 106900 - DNA, 165 bp, Enterobacter aerogenes
atgaatgttcgggcgccattacaaccaaatgaaatgatgattcaagctggaattaatgaactttttgacagctttccaagccttgaagattctggcctggatgatgatgagttaagcgatgcaataacattcatctggcaagccatgttcgcagaaattaaatag

SEQ ID NO: 106901 - DNA, 408 bp, Enterobacter aerogenes
atgaagaaaataatcatctccataataatgctatcaattccagccttctcttatgcaaattgctggattgtctccggcctccaggggaaatcctccttcaatgatgacaactataaatttatagatgatggaatgactggcgttgctattaagttaagcattaacggcaacgcggcatctgtaacaaacttggatgggtccagcatttctgacgtaacctacgtgcccttatctagcaacaccataatcggaagctatcaagcaggcggcggaattacagttgaaacatggtctatcacagatgataaaaaggtaatgtattcaaaggtaatgaacatacctaaaatgcaaaaactaacatctacaaaagcctttgtaggcaatgttgctggctcctgcgacaactaa

SEQ ID NO: 106902 - DNA, 633 bp, Enterobacter aerogenes
atgagcatttcttccaaggtaaaaagtaagcgagtgcagctgggattgaaccaagctgatctggctcagatggttgggacttcccagcaatcaatagaacaactcgaaaatggcaagacgaaacgccctcgttttttgccagagcttgcatctgcgcttggtgtaagtgttgattggcttattaatgatgcatctgattctaatgtcacctatgttggtccaaacgaaccaaagagagcatatccactgattagcctggttagcgctggagcatggtgcgaggcatatgagccatataaccttaaagaaattgatgagtggtatggaagcgacactcacattcttggtgatggattctggcttagagtagaaggcgactccatgacttctccggtaggtcaaagcatcccggaggggcacatagtgcttgttgatacaggaaggaacgcaactaacggcagtctggttgtagctaagttaacggacgccaatgaagccacattcaagaagcttgttattgatggtgggcagaagtacttgaaagggctcaatccatcctggccgatgataccgatcaatggaaactgtaagatcattggcgttgtcgttgaagcgagggtgaaattcatatga

SEQ ID NO: 106903 - DNA, 216 bp, Enterobacter aerogenes
atgcaaactctgtcagaccgcctcaaaaataaacgactagcaatgaaaatgactcagactgagctggcaaccaaggcgggtgttaagcagcagtcaatccagctgatagaggctggagtcactaagcgacctcgttttttatttgagatagcgattgcccttaattgtgatcctgtttggttgcaatacggcacaaaaagcggaaaagccgcttaa

SEQ ID NO: 106904 - DNA, 147 bp, Enterobacter aerogenes
atgcctaagaaaactcgattttaccaggcgtcagtacacaaaaatattgcccgtgaccgattcattaagtcgtgcaacccagaggttgggataaagctaagggccatcctggaacaattcaaacgcaaggagaacggtcatgagtaa

SEQ ID NO: 106905 - DNA, 897 bp, Enterobacter aerogenes
atgagtaacgtatccaacttagccgaagccagagaggccagaaggctccagcagccgcatacacttggcggtaaggggtttgccttgctgcaccgtaaaatcatggatgtgccgttctacaaagaccctgaggcggcgcatttgtggattcacttaatactcaaggccaagcatgcgccagaagtcgtgctgacagatattggtgagaagctagttaatcgcggtcagctgcttagcggtcgtaactctctggcattcgagacgggattaaagccggatcgcgtccaatacctgctgaggaagttccagaaacttggaatggtgagctggatttcacacgggaaattctctgttttttccatcgtgaaatatgacgattatcagtcaaattatgtaccagcagattaccagcagattaccagcgcaaacccttgcgcaccaatggctggaaatgaatctgtaccagaagattaccagagaattaccacagataaagaatttaataatatctcttctactaacgtagaagagagtgcatcagcagcagaaaaattaaagcctaaaaaaccgtctctcagttgtgagcaggtaatcgatatttaccaccgagtactccctgaggctggaggcatcagaaccctgactgacaaacgccgtaacctgatccgcagcttctggcaaaaggccagcaaggtaacacgagatctggacggtcatgggttcaccctgaacgactgggagtcgtatctcgggtatatcgcaacaaactgccgctggatgctggagaaccgtcctgaccagcgcaccgggcgaacatggcggcgcaagtctctcgagtacttcctgaacgtcgacgtgtacgtcaagacgcgagagggggcatgtgatgacctctga

SEQ ID NO: 106906 - DNA, 1434 bp, Enterobacter aerogenes
atgacctctgagattattaccatcccgcacaacccggaagcagagcagagcgttatcggcggtattctgcttgacgacgataacagcgagcgagtccagaaggttctggcaatgctcaagccagagtcgttctacggcagggttcaccagataatcttttctgaaatacggcagatgttccgggaaaacaaaccagttgatggtcttaccttattcgactcactggagagcaaaggacttgccgagcaggccggcggattcgcctacatcggtcaacttgccaagaacactccaagcgctgccaacatcgttgcctacgccgcatcagttcgtgaagctgcaatggagcgatatggcattcagcgcatgaccgaggcgacagagttgctgtatgccagaaacggtatgagcgcagtggagaagtacgaagccattcagagcatcttcacacaacttacagaccactcaaagaccggtagtcgccgtgggcttagatcgtttggagaagttatggatgactgggtaaacgatctggaaaaacgctttgacccggctggagagcagcgaggaatgagcaccggaataccatcgcttgatcgactgctggctccgaagggtctggttaaaggctctcttttcgtgattggcgcaaggccaaagatggggaaaacaaccctgtacgggcagatggctatcaactgcgcggttcgcgagaaaaagccagcactgatgttcagcctggaaatgccaagtgaccagatcctcgagaaactggtagggcagaagtccggcatcaacccgagcattttttacatgccagcaactgatgacgccgatgagcagtaccagggcgattatgacggcgactttaagaaggcgatcgcaacggccggcagactgagcgaaatagacatgctgtacatcgacgataccccaggactttcactggcacatattgttagtgaatgccgcagaattaagcgtgagaagggctgcgtaggaatgattctggttgactacctcacactgatgacagcagaaaaagcagaccgcaatgaccttgcgtacgggatgatcaccaaagggttgaagaacctagccaaagagcttgggtgcgtcgtagttcttctgactcagctcaaccgagaactggagaaacgaattaataaacgcccgttaccgagtgattcccgcgatacaggacagattgagcaggactgtgattactgggttggcatccatcgtgaaggtgctttcgatgacaatgtgccaccgagtgaaacggagttaatcctgcgacttaatcgccatggcagtaccggtacggtgtattgcaatcagcttaacggggcaatttacgacgctgaccagcagagcgccgccgcagagcgtcgcagccgcgaacaacagccgaaaaagaaagggggattttaa

SEQ ID NO: 106907 - DNA, 555 bp, Enterobacter aerogenes
atggtaactgatatcaccgaactggcgcagagagagaaattcgaagcgtggtgggagcgcacccagcataacggcaatccgccgcgttttggctggtcgcactggcgcgatggagaaggctataaggttgacgatgatgactccgagcttgatggaatgtggaaggtatggaaagcggccagcgctgagctggtagaggcgctggagtcagagaaaaggatttgtgcaacgtggagaaaaacagctaccgctgtcagtgaaaagctggagaaggcgcagcagtgcatcaccgagctgaagtccggtaaagttggcaacgcacttctggaacgggaaaaccatcatgttgaggtggttgggaagttgactgagcgcatcgccgagctggagtcccgcaccgtcaccgtgaagctgccgaaagaccatgttgacgacgccgacctctttggctggggagttgtcgttgttccactggaggctctcaaagaagcctgtgctgatgctggtgttgctgtggagattaccgccgatggcatcaagtgggaggctgagtga

SEQ ID NO: 106908 - DNA, 549 bp, Enterobacter aerogenes
gtgactgacagatcaaatacccccacagaaataaaagacctctggcgcactccgcctgagatattccatgcattaaacgcagagttttgttttgtgcttgatgcggcggcgagcgcaagtaatgccctttgcaaaaactacatcacagaagatcagaacactttccacaccccatggaaatccatgattccagatataccaggatatgcatggatgaatcctccttatagccgtccaatgccatttgttcaggtggcggcgcaggaaaatgaggataacggtattggatgtgtgatgcttcttccggcagatacttcggttatgtggttcagggaggcaattaaaaccgctcacgaagtcagattcatcactggcggcaggttatctttcctgaatgcagatacagggatgccagttaatggcaacaacaaaggctcgatgctcattatctggcatccataccctcgttgcggagaatgccggatgactactgtagaccgggatgtgcttatggagtttggcaagcgcagaattaaggtggcggcatga

SEQ ID NO: 106909 - DNA, 291 bp, Enterobacter aerogenes
atgaatgaattacgtgcgggtggtttggcgattattgtcatgagccatagccctgaaaatatcggcgaggttgtcgagctggtatgtttcctgggaagagtcgacgattgcccccatcaaaagagagagaatatatggagaataagtcccgttagctcgtctattgttggtcgcaaaggaattattaagcctgggtataaggcgcggtgtcccggtgagtggctcatgccgatcgacggagaagacttctctcacgaagatgagcgactgaaggagctgactaatggttaa

SEQ ID NO: 106910 - DNA, 606 bp, Enterobacter aerogenes
atggttaaagctccccgcagaaaatgcaaagtctgcaatgaatggttccacccggccttctcaaatcagtggtggtgtagcccagaacacggaactgaattagcgctggagcgacgaagcaaggagagagaaaaagcagagaaagcagcagataagaaacgacgacgagaatatcagcagcagaaagacaagttaaagattcgaaagctcgcactacaacccctcagctacttccacaaacttacccagcaagcctttaacgaatacatccgcaccagagatgcaggagatccctgcataagctgcgggaggcttaccggcgcaaaaattaacgcaggtcatttccgtactgtcggcgcatcaccagaaaccagatacgacgaaaccaactgccatgctcaatgtgagcattgtaattcgtatctgtcggggaatatcggcgcataccgaccaaggctaatcgaaaaaatcggacaggcagcctacggcaggttaatgggcccacacgagcggaagaaatggacgcgagaagagttacaagaactggcgaggcattacaggcagaaaacgagagagctgcgcaatagcagaagtgaggcgacatga

SEQ ID NO: 106911 - DNA, 675 bp, Enterobacter aerogenes
atgaatatctacgaaaagattgatggcagcaaatatcgaaacatctgggtggttggcgatctgcatggttgctacacaaacctgatgggaaaacttgatgaactcaagttcgacccggcgcatgatctgctggtttctgttggtgacctggttgaccgcggggctgagaatgtcgagtgcttggacctgattaatcagccgtggttccgggctgtgcgcggcaaccacgagcagatgatgctggatgccataaccggcactggtagctttgggcactggatgtcgaatggtggtggctggtggcacaatctggactacgagcaggatatgcgtctgaaatcgctgctcccaagggtagcagagcttccgctcatcatcgaggtggataagggcggcaagaagttcgtcatctgccacgccgactaccagcacggcgaatatgagttcggcaaaccggtagacgccgagcatgtgctctggaaccgggagcgcgtcagctcttcaatggatggcgtgcgcttcgatatccacggagctgacctgttcattttcggtcataccccagtgcgtaacccattgaaatactccaatcagatgtatatcgacaccggcgccgttttctgtggaaacctaactcttgttcagttgcaaggagataactcatgtgctcaataa

SEQ ID NO: 106912 - DNA, 183 bp, Enterobacter aerogenes
atgtgctcaataactaacatccagcaagccaaatggcagcgccagcgtgatatgcataacgagcaggtgttgatcggcaaagagcaagagcttgagcgcagtcttgcttatgtgcgcgagcaactgcaggaagtgcgtaaccgactgggcactaataagcctgaaggtccggaggttgcatga

SEQ ID NO: 106913 - DNA, 615 bp, Enterobacter aerogenes
atgaggcatacgccaatattcagcatggttaacttcattgatgatgctcatttccgccgcgtatggaaacacccaaagaaaaccatcaactcacgccagaaggcatgggttcattacatgcttgcggtatggggaagggttaaccgtggagatgattctcctccaggagccgttaatgtcattggtcgtttaatgattcgcagtcagtggagcgacgacaaggccaagcagattgagtctgtcgtcatgcggctgtacgaagaggatgggctacgtggagatgccctctatcagaaagctcgcgaactggtcatcccgcaatcatcgttcagcaacatcatcgctctcgccaaagaatccgatgatgcttctttcgttgaacgcgtgatggtcaagacgtttcaccgtgaaagccccgtccgcgatgtagctattaagcgatattgcaatcgcaattgcacgcaagacatcgccaggctgatgaatgctgtcactggaatggatatccagtcatgtaggcgcagggttgtatggtgcgagaacgtgctcgattcagaaatcttttatgcgatgaagcgagagatagaggaggagcctccacaaattgcagcttag

SEQ ID NO: 106914 - DNA, 207 bp, Enterobacter aerogenes
atgcggaaaaacaaacgagagcgagaaataactctgctctatggaatgtctctcatacgtgacgacgttctcaaccatccagtctacaagccaacattcaaagacaagctaatcgagtttatctatcacgctctacacatcatcgctgcggtgattgttgctgtcgtgtctataggcttcctgattatctcgtctaattacctctaa

SEQ ID NO: 106915 - DNA, 240 bp, Enterobacter aerogenes
atggcagagattaccgcattgacagaattacagcagatgaacctagatatccttcgtctggttcagagtgataccgctgcagcggaaaaggccattgcgtttgtcgccggcagtcgactcaatttcgaactgttcaaagaccaactcaatctggccggagcagaaacgaccgctctagctcgtgcagagaaggctattcgcgaagcaaaagaggctctcgacttgtttagcggggtgtaa

SEQ ID NO: 106916 - DNA, 1299 bp, Enterobacter aerogenes
atggcactttccgaaggtcaactgattacctacgctatcgacgaggtaatcgaaacagttcaaaacctgaccccaatggcaggaaaaaccaccacctacacccctccagcagattctatgcagcgttcaaacaacaccgtgtggatgcctgtagagcaggaggctccaacccaaacaggttgggacttaaccaacaaagccacaggtctgctggagttatccgttaagtgcaacatgggcgacccggacaacgacttcttccagattcgcgctgacgatattcgtgatgagcgtacctggcgtcgtcgcgtaaaagcttcaggaatgaagatcgctaacaacattgaatccactatcgcaaagcaagcgacagatatgggctctcttgttatccatgattcccgttctatcggtccggcgactgggctttcagggtgggatttcatctctgacgcagagcgcctgatgtttgctcgcgagctaaaccgcgatatgggcatcagctacttcctgaacccggatgattaccgcaaatcaggccgtgaccttaccgctggtgacatctttggccgcgttcctgaagaggcgtatcgcaacggcactatccagcgtcaggttgcaggatttgatgaggttctgcgctcacctaaactgccgtcagtggttgcctctacagctactggtatcactgtatctggcgcgcagaagttcaagcctcaggcgtgggtagcagatgcggacggcaaccgtgagaacgtggataaccgtgtcgcaaccgtaaccgtttcttcctctaccggattgaaacgtggcgataaaatcagctttactggcgtgaagttcctttcacagatggctaagaacgtgctcaccgatgacgctactttctccatcactcgtgtaatcgatggcacccacatcgaaatcacgccgaagcctgtagcgctggatgacacctcacttctgccggaagaaaaggcatacgctaacgtgaatacttcactggctgcgtcaacgcctgtcaacctgattaacgttgccactaccacggcgaacgtgttctgggctgacgactctatccgcttgctgtctcagcctattcctaccacgcaccagttgttcgctggcatgaagacgcagacctttaccattcctggcgtcggaatcaacggcatcatggcaatgcagggtgatatcaacaccttctctgcgaagtgccgtattgcagtgtggtatgcagcgtgcgctgttcgaccggaagcaattggtgttggcctgccaaatcaggtagcaccataa

SEQ ID NO: 106917 - DNA, 240 bp, Enterobacter aerogenes
atgaaaagaaaactcatagcaatattatctttttcatttgtcctggctatctctggatgtacctcaacaacacagataaaccgtggtggcgataaaaaacaattcgttattgcatgtggtgcatcttcctcgtggggagtttgttatgaaaaagccaacgagctatgcaagaacggctacaatgatattatgaaagatcagggattcaatagaaaagaacttaccgttgaatgcaagtag

SEQ ID NO: 106918 - DNA, 255 bp, Enterobacter aerogenes
atgggaagagaagatccgcagttcaacctaagactcccttatgagcttaaggaaaaggtcaaacaacgagccaaagcaaatgggcgctctttgaatgctgaactgatacaaataattagtgattacatgtcaaaaccaccaaaattggttggctataaagatgatgttgaggtgcttgctgatcaacagtctgatgttgttaaaaagatggtatttgacacgcttaaagatatctacagcaggggtaataaatga

SEQ ID NO: 106919 - DNA, 2115 bp, Enterobacter aerogenes
atgtcagatatcaccgctaatgtcgtcgttagtatgccgaatcagcttttcacgctggctcgatcgtttaaagctgcgtcaggtggcaaaatctatatcggtcagatagatactgaccctgtcaacccagccaaccaaatccaggtgtatctggagaatgaagatggttcccatgttccggttgcgcagcctatcataatcaatgccgccggctatcccgtttacaatggtcagattgccaagtttgtgactattcagggtcacagcatggctgtgtacgacatgtacggtacgcagcagttttactttccaaatatcctgaaatatgacccagaccagtttcgacagtttctggcgacatcggcaggtgccgcagctatcggcgcattaccatcaggaacggtacaagatttcataaaccaacagaataagaaggtcacttgggttactccacagtctcagggagctccttgtaatggagtggatgatgatactaccgttttcaccaccatggtgcagaattacagaaacatagaagtacctgcaggaaactatgttcttgatattaacaaaataaacgtaccatctaacacgacaattagatttaaccagtatgctgttgtgaagcttaaaacccaaaaagtaagcggtgggtctgggattaactactggcttttcaagttggctggcacagcttcatcaccagtaacaaatgtaaacatcactggcggtagattccttggtggcgatgattcaattgtttgtatcgcaattggtagctatgttaatgatgtaaggctgagggatacatattgcgagaacatgcgatattttatggccagggatggggatgggacatacgcaaatagcacttccgcaacaagacctaaaaacatcagaattaacaatataaatggaacgttattgtttacccctgtaaccaccaatgcttttatacagtttaactacgctgaaatgttctcagttactgattgctacagttatggatattggttcggtggaatgtgctggggtggtgattctaatccatctgtaaacggagatcctacaaacttccgcaaatgcaggactgggcgttttgagaactgctatttttatgtaaaacaagctggaatatgggcatcaatgggatatgacttggatatcaagtcatgttacacagaggcaatcaccccactatcaagcgatgtagggtttgatcttgaaggatgccagcaatcaaacgtaatctcatgttctgtaaaggatttccttaacggaaacctggcaactttcttctattgccggcaggttaatttcactcaaaacaagtcatggattacagatgtaaactgtcgacatgcaagattcaacaactcaggacaaaactcaggcgctagagaaatacttgtatctcaaaatgagttctatagcgaaggggtagtagctgctattagtcagaacggtgcagcacaaaacctggtgatagaaaacaacacgctaatgaatacagtaatatccctgatagccaacaacaatggagttatcaaggttcttaataacaaacttcatttctctctagcaccaactcagatgttcaactcctatggttattatgcagcgatagcaataggtgctcatcatggcttcgataacggcgcatgtggcgcatatgtagaaaacaatacattctcatcagatgtagcatgggatgccactaattcagcagcaatttttattgttcacacatctggatcgcgtagcacatttgcatctataaaaggaggcggtgtattgacatcagggtggaagtacgattttggaatagtcaatacaggaacagcagcaaacatagggcctcgatatgctgtagaggactttagggtatttggcggcttgtattttacgactcctaattcagcggcaaaatatccggaaggaatagtaaatgccagagatcagtttggtcgaccatggcctactgcgcaggttgatggtgcttacatgtttgttggtcagacattcccgctcttaaccccgactgcaaccaaacgaggtacatatgtttatgtgtctggggttggccctgcagcaactgttgcagactatcagtag

SEQ ID NO: 106920 - DNA, 876 bp, Enterobacter aerogenes
atgagtaaaaaatgccttgttatttcaactcttgctgcggcattgctgccatggatactgttttccgaaccgctgcatgacaacgtgaaccgattgttgtcagatgtgacttctatattcttagcaaaaaaccccgacagtctggttgctaaaactcaaagcgatctgattgaagttaaaggtggctcgttttatttcgggaaatttgatacgcagtatggcgatcaacattatgccgatccgagttatagtaatactcttccagtaaagcatatttctattgaagatttcgccataacgaagtttcaaattacctatgctgattatgatatttacactcaggttaacgataaagtccccatagaaattaccgatacgcaacaaaaagagcttaaggaaccgctcatcccggttaaattaacctggcaggaagcacgagattattgcctgtggttgggaaaagtatcaggtacgcaaatggatcttcctaccgagcagcagtgggaatacgcagcccgcagcaggggtcagttcatcctctacccaacggatacaggaattgtggaaccaggtagaaacgtaccgctgcaaattgataaagagcgcatccgtttttcgattggggagtataaattaatgccagtaggtatattcccccctaatgccctcgggatctatgatttagccagcaacgggctggaatggacgagagataagtacaatgaacccggttattgggagaatcatgagttatacaaagacgatatcgttgttcgctcacaaattatgcttgcccgcggtggcgcaccaacgatttatcgctttagcgataataaaaacaatagaaacacggctcgctgcgtggtgagcagataa

SEQ ID NO: 106921 - DNA, 1029 bp, Enterobacter aerogenes
gtgaaaaagctcagcttcgctcgctttcttaggggatgttgtatcgcatttttattgctttttatatttctctcgcaaatgtattacagcaatggtttatataaaagtgcaatctggatcgagaaaacctatcaggatcatacaacaaaatcggctgcctccgtcaccgcattaatgacgccagacatcatcaaaaaaaataaagagctcattaagaaaaataccctcgagaacgccgtttttattgaaggtggcgaatttactatgggggcggaaaactgcgataactatgcgccgacgcttagccagtgcgcagcttctccggtctacccggttaagctgaccagctattcgatgctgaagtttaaaatcaccaaccgtgattttgatacgttccaggcagatatcggtaaatatatcaatccataccgggatagcaatgataaagaacgatgggaaaatgtgcatcgacacggagaacttcccgccatcatcaattggacaatggccaatgattactgccagtggttaggaaaattaactggtttacccgtttctttgcccacagaagcacagtgggaatttgccgcacgaaatcgtggacaatacatagggttcatgactaataataataaaatcgaaccgggtgtgaacgttccctcctatcaaatgaggcgagcaataaagggcagttatttcacccctgttggtcaattccctccgtcatcattagggctctatgacctttccggcaatggtctggagtgggttaacgactggtattcaagcgaaaaaccttcaggccaaagcccttttgtcgatccccaagggccaacccaagggtatctaagtaatgaaggcccggcaaaagttttacgtccctataatgatgacgctgaggagaatggtattggcgtcaccgttcacgaccgcaattatgcagccgtttccgcatcagttgatttctctagcccatataccgctcgctgcgcggttaatcttgcgcaaaggatagcgacacatgagtaa

SEQ ID NO: 106922 - DNA, 1689 bp, Enterobacter aerogenes
atgaataattcagggaaatacctcatctggacactgctctccgtgatcggagcctttgccctcggctatatcgccttaaaccggggtgagcagataaacgcgctgtggattgtcgtcgcggcggtctgcgtttatctgatcgcatatcgtttctacggcctgtatatcgccaaaaccgtcctcggcgttgacccaacgcgaatgaccccggcggtgcgtcataatgacggcctcgactatgttccgactgacaaaaaagtgctgttcggtcaccattttgccgcgattgccggcgcagggccgctggtggggccggtgcttgccgcgcagatgggctacctgccggggatgatctggatcctcgccggcgtggtgctggccggcgccgtgcaggactttatggtgctgtttgtttcgacccgtcgcgatggccgttcgcttggcgaactggttaaagaggagatggggccaaccgctggcgtactggcgctggtggcctgttttatgatcatggtgatcatcctcgcggtactggcgatgatcgtggtgaaagcattgacccacagtccgtgggggacatacaccgtcgcctttaccatcccgctggcgatttttatgggcatctatattcgctacctgcgcccggggcgcatcggcgaggtgtcggtgataggcctggtgatgctggtgttcgcgatcatttccggcggctgggtggcggaaagcccgacctgggcaccgtggtttgattacaccggcgtacagctaacgtggattctggtgggttacggctttgttgctgcggtactgccggtctggctgctgctggcgccgcgcgactatctctccacgttcctgaaaatcggcaccatcgttggtctggcgattggcatcctgattatgcgcccgacgctgaccatgccggcgctgacgaagttcgtcgacggtaccggcccggtgtggaccggcaacctgttcccgttcctgtttatcaccatcgcctgcggcgcggtttctggcttccacgcgctgatctcctccggcaccacgccgaaaatgttggccaacgaagggcaggcctgctttatcggttacggcggcatgttgatggaatccttcgtcgcgattatggcgctggtggcggcctgtattatcgatccgggcgtctacttcgcgatgaacagcccgatggcggtgctggcgccggcggggacgactgacgtcgtggcctcggcggcgcaggtagtgagcggctggggctttagcattaccccggatacgctgaatcaaatagccagtgaggtcggcgaacagtcgatcatttcacgcgccggcggcgcgccgacgctggcggtggggatggcttacattctgcacggctcgttgggcgggttgatggatgtctctttctggtaccacttcgccattctgtttgaggcgctgtttatcctgacggcggttgatgccggcacccgcgcggcgcgattcatgctgcaggatctgctgggcgtgattagccccgggttgaaaaaaccagctcgcttccggctaacctgctggcgaccgcgctgtgcgtcctggcgtggggctacttcctgcatcagggggtggttgacccgctgggcggtattaataccctgtggccgctgttcggtatcgccaaccagatgctggcggggatggcgctaa

SEQ ID NO: 106923 - DNA, 417 bp, Enterobacter aerogenes
atgctgtgcgcggtggtactgttcaagatgaaacgccagcgctatgcgtgggtggcgctgctgccgacaagctggctgctgatttgtacgctgaccgccggctggcagaaatcgtttagtccggataccaaagtcggcttcctggccatcgccaataaattccaggcgatgatcgacagcggtaccattccgccgcagtatacggaatcgcagctggcgcagctggtgtttaataaccgtctcgatgccgggctgactatcttctttatgattgtggtggtggttctggcgttgttctcgattaaaaccgcgctggcggcgctgaaagaggataaaccgacggcgaaagagacgccgtatgaagcgatgcccgcggatgcgcagaccttaacggcgcaggcgaagcgcgcgcattaa

SEQ ID NO: 106924 - DNA, 417 bp, Enterobacter aerogenes
atgaaattacaacgtaaaagcgtattactgttttggggatggatggatctgtgtttcattctcaactttctgtggtggcacttttccatacgccgaatccccatctatgacgatatcctgttagttatgcaattgctgggctctatccaccccgcgctagcctggcaattcccggtaaggatcttgcttgttattagtattccgctgtcgatggtcctgttttttaaacaaagccgctttgccaccgcaatgatgtggatacaagcgccgctccggttgctctttatgatgccttcgctcttcgtgggggtatggataataaacgaactgcgaattgaaagtgttattttaaatctgtcatttctactgatttctgaagcacttaaaatgtataccgtatggcggttcaggaaatag

SEQ ID NO: 106925 - DNA, 648 bp, Enterobacter aerogenes
atgccagcactaaaagctaatgaagcgccgcgccgccccggtcggccacgcggtaaaaagccgggaaccgctaaccgcgagcagttaatcgatatcgccctggcgctgtttgctcgtcacggcgcggcccgcgtgtcgctaaatgccattgccaaagaggccggggtgacgccggcgatgctgaattactattttacgtcgcgggaagcgctgattgagaatttgctggaagagcgctttatgccgctgcgcaacgatatcagccgcatatttgtcgaccatccgcaggatccggtgacggcgttgacgatgatggttgagacgctggcggacatggcggagcacaatgcctggttcgcgccgctgtggatgcaggagatcatcggcgagatgccgatgctacgccagcacatggatgcgcgcttcggcgaggagcgttttcaggtgatgctggagacggttcgccgctggcagctggaagggaaaattaacccggcgctggcgccggagctgctgtttaccacggtcattagcctggtgctggtgccgttctcgcgcatccatagcgatccgcgtttacaggcggtaacccggcagaccattgtgagccacgcgctggcgttaatgggccacggggtcggcggttaa

SEQ ID NO: 106926 - DNA, 897 bp, Enterobacter aerogenes
atgaagtttcttcccaccgctacgctggcgttactgactttcatggcgccagcttttgcagttaccgtaaataatctcgatgccgtcccgaatgccattcattcttcagaagggaaactgatttacgctgagcaaatgacaggaacagctccagaaaatggatttggctccctacccaaagggttagaagaaaaagagtggatacaatgggttgctcctgaagagagtatcgatcggttgatcataacgggcgctaaaccctggggaaaagatggcgcatatattggtatcgcttgttttgccgatacgccggaaaatgtccaaaaagtaaaaaaatacggtagtaccggctgccctgaaaatgacaacagcagacgcgtcaataagctgtacctcggggtttttcgctggcaaaaccagcagctccagccgattgcacgcaccgaagaaccgctggacaagctgtcactgtggccgaaaatggtggaacgcgaagacgatgacgaaacgctacaacccttacaatattacagcaaactggatctcgcgccttaccagattgcgccagataccatggcattcggcatccgcggtggctattcaaacgcctactccggcggcggcgccttttatgaagtactggagctatacataattaaagacgataagatagtgaatatcttttccgctttggtctaccagtatgcggatatcgctggcgaatggaatgacgacggcacccgaaaacacgatatcagcgagagtaaatttatcctgaaaatcttgccaaccacatccgatggttttcatgatttgcagcttgttaatgtcctcgataagcgtaaaacgatttttcgctggtccacggccgatcggcagtattctccgcagccctaa

SEQ ID NO: 106927 - DNA, 240 bp, Enterobacter aerogenes
atggcactggtaaaagtgattagcgataaccttttctccggtgccaatctccagaaactggaggttggtgctcaggtttcggtaaacggcgatgtcgctaagcgttgggtagccgctggtctggttgaaatcattagtgatgacgatcaggtgctggaagtggccacacctggcaatgatgctgaagagcaggcagagcagaaggaagaatctgccagcaaatcgaagaaggcgaaataa

SEQ ID NO: 106928 - DNA, 1452 bp, Enterobacter aerogenes
gtgaacgaaagcgaaatgaacaaacaatttgccgcaaatgccagcctcgatcatgaccgtatgcgctacgttaacgctctgttcaatggcaccagtaataccaagcgacagcgtctgtatcaggagtttggctatccactgaacctgacgttcgacgactttttccgggcctacagccgtaatgcaattgccaatgctgcggttaaccggatggttgatggctgctgggaggacttcccggatgtctacgaaggagaccagacgaaggatgccaccaagcaaacggaatgggataagcgcgtaaataaactgctcaagcgttgctggaaacagattaaaggagctgacaagcgaaacctagtggggcgctactctgcgctgctgatccaggtaaaggataaccggacctgggataagccggtcgataagatagttactgccaggcagaaggaaaaggcgttagttaagttgatcccggtgtgggaggcacagattgagcctgtaacttacaacgaagatcagagcagcgagaactacggtgacgtcaccatgtactcgtttactgaaatcccggtacaacagcaagcaggggggcagcccgggcgtatcatcaacgtccaccctgaccgcgtgattatccttgctgaaggatcagatgatggccgcctctactctggcgaatcaatgcttgctgccggtttccataaaatcatggacagcgagaaggtctccggcggtgccgccgaggggttctttaaaaacgccagccgccagctcaacttcaactttagcgccaaaacaaacttctcagcgctggctaaagctcttggagtttccgaatctcagctatccgaagcccttgatgggcaggtgcgacgccttaacgacagctctgatagcgctgtgatgatgcaggagggcgatgtcagcgtgctttcggttgcagcggcagatcctgaacccacgtggcgaaccattctgaatgagttttgcgccaccgtgccgatcccggtcaaagtcctggtaggaatgcagacgggcgagcgggccagtaccgaggatgcgaaggactgggccaagaccagaatgagcaggcgaacaggattcctgacagacctgataacggacatcgttacccgattctggatgtttggctttatccctccagcggcaggtgaggaaattaccgtcggatggtctgatctgctggcgccgagccaggcagagaagattgccaacatggataaactcgccgacgtagctgtgaagtcgacgaacgcctttggccgctctgctatcacagaaaatgagatacgcgcagcgggcgaactgcaagccctgcctgaacttgatgacgaggtgccgccagatggcaacaagccaaaacctgacccactggccgacccagaatcagaagccgaaaagtccggtgataccacggtcgaaagttga

SEQ ID NO: 106929 - DNA, 699 bp, Enterobacter aerogenes
atgaatacccagtaccttgagtatgttcgccagcagctgatagtggccaccgccgatctgagcggggcaacgaaagggcaactggttgcctttgctgagaacgcaatgtttgaagcgacggcacgcagcaataagcggatgaaggtagccgacccggcgaccgggagaatggtcaagccgagtaatcctccagttcccggtaagcagtcccgcgccaaaggttcagccatagccctggtgcagcctgttgagttttctactgccagctggcgccgcgccctcctgtcgctggaggagcatcaaaaagcctggctgctctggaactacagcgacaatatccgctggtcgcaccaggagacaatcacccggtgggcgtgggaacaattcagcgagaagctggccggcattcgcattgcaaagaaaacagttgatcgcctgcgacagcttatctggctggcagctcaaaataaaaaggctgaggtaaccggcaggggagacctctattccccggcctctatggtgggaatcaagccagataactggtgccacaattactcagattactggcaggctatgatggacatctaccaagaacttgataaccagtcgttactctctgcttctcgattacgttcacaacaaaaagcgactttttcacagcaatgtcttgcaaaagtcaacaaaatgcgtcatatttga

SEQ ID NO: 106930 - DNA, 210 bp, Enterobacter aerogenes
atgttatttcaacagatatatttatttataggtgggatttttgcggtgcttgcccttatggctggaagtgttggcagggttagggtacgaaatgacggtagccagtttgcgctagtcattttagttttcttactttggccaatttgtatccttctgtttgttgccgatcttctcgctgataagttaaagaataaatctggcaaacattag

SEQ ID NO: 106931 - DNA, 804 bp, Enterobacter aerogenes
atgaccaaaagccagttaacagacttacgcacgctgattctttcggaagtcggggatttctttgctgtgttcggtagtcccggcgagccggaaactccggaggaaatgcaacgagaactgtccatgcgactggggcgcattctcaataaccacattgttaactatccgcgctgcgaggtgcaagttgaaattctgcgtgaatgtcgaacggcccgtgacgaagcgcaggcagagctacaggaacgccgcaaggccgacagcgagccggtggcgtggctggcgaattatcacggcgaggtttacgacgacgcgatcggcatcactcgctccatcgttgaggctcaggcggagcgttttggctgggaaccggcattgacggaaattacaccgctctatcgccacgcgcagccagcgccggtagtgctggatgaacgcgcagctttcaacgcatggaacaacgaggacaatctaccaatcgcaggggttggtgccaaaaatgccgcatggctggcatggcaagcccgtgccatgctccaggctgaacctgtaacgacggctaacaagttgggcaactctccggcaattccgggggcatggattccggtaagcgagcggatgccggaagatgagcaggaggtgctcaccataaacagaatggggcatcgctttgtatcattcttcgataagcactcagggttgtttttcgacaggattgatgcgccagcagcatgctgcatagagcacgtgctggtaacccactggcagccactgccagccgccccgcaggaggttggcgatgcctaa

SEQ ID NO: 106932 - DNA, 1227 bp, Enterobacter aerogenes
atgagcaatgcagcaatgataattgtcccaaccgatatcagcgaaaaagtccgtgagattgaaaccgcatatgctcgttatatggcggagtttcacattcctgaagaccatagaatcgtcgttaacttctctgctggtaaagacagcacgacaaccgcaacggtagctcatcacctgttcggcgacagggtgcagaacgtgatggctgacactgacaatgagcatgatttaacggtcgacttcgcgcgcaatatccacctgcaaatcggctgcaagcctgtgcagattgttaagaggatttatacagatgctgagtttgatcgccgccggaaatctctgatgaagcgctggccaaagaaacaggccattcggatgggggcataccgtggcgtaatcatgccatctctggcgaggtcagacacaaaattcgggcaggcgtggcttcgaaccgctgagcgttggggtattgagtttgaaacagctctggaagccgctctgtcagttatgcatccatctggaaacagcttcctggatgcggcgcttctgcacggcaaatttccgatgatgcgtgaccgtttttgcactgatgagctaaaaattcagatcgcctttgatgcagcaattaagccacttcttgatgatggtgaggttgtcgttcagtggtctggtgttcgtgctgatgagtcagacaaacgcgccggatatgaccgcttttcatgtgatgagcgtgaccgcgattttctctataacttcctgcccatccacaaatggacggcgactgatgttttcgccttacataaatattttggtatcaagccaaatccactgtacttgcagggggctgaccgtgttggctgcatgaactgtgttttatgcacaaaagaggagatagcccagacggcagcccgttggcctgagcacattgagaagcatcatgcatgggagaaaaaggttcggttaacctcccgctgggtccactggatgagcgttggcactgaaagccagtcatggatgcgctctcagcttggttttagagaagtcgtctgggatgagtttgagttttcagaagacgttgacgctcctggtatcgttcagaggaaaaaaagatatccagtaaatctgggcaaagatgtgctgctctatggccttgagccagacgttcagtgcatcgaatggtctggcttctacggacctcgcgggaatatggggggcaccttcagctcttga

SEQ ID NO: 106933 - DNA, 531 bp, Enterobacter aerogenes
atgaatatcgacacagtaaacgaactcattcagtcgctggaatcggctggcgagttgtcaatgaaagagcgtaagtatctggaactggcgaaggcgtatgcggacaaggaagcggagagcgtggctcaggcgctaacgttcgagaaatgccgagaactttcagactgcccggctggcgtagacctgcaggactgggttaagcagctggcggcggagaatgtgcaggtaagagaacgtcaccgttttattcgcgcactggcagtttcaattcttgagcatagcggcggccgtcatgattggcgcggagctatggaagacgcctctgatttagtgaagacggtcgatgaggtttactccaatacccccgccaccgatcgcatcgtagccgggattaaggctgatggggtggaggagttcgtatccaacaccgtgcataagatttttgatgaaagcgaagcagtatcagctttggcttacctttccttggctaattcacacgtgaggcagctgcgcgagggggccgacaaatga

SEQ ID NO: 106934 - DNA, 897 bp, Enterobacter aerogenes
gtgggtaacgtatccaatttagccgaagccagagaggccagaaggctccatcaaccgcgtacacaaggcggtaaggggtttgccttgctgcaccgtaaaattatggatgtgccgttttacaaggacgctgaagcgtcacacttgtgggttcacctgatcctgaaagccaagcacgcgccagagacagttctcactgatctcggagagatgctcgttagccgtggccagttgttaagtggtagaaatgccctgtcattcgagaccggactgaaagcggatcgtgttcagtacctgctgagaaagttccagaagttggggatggtgagctgggtttcacacggtaaattctctgtttttaccatcgtaaaatatgacgattaccagtcaaattatgtaccagcagattaccagcaaattaccatcgcaaagccagatgtggtgcagcctgtagcgaatagtgtaccagcagattaccagcaaattaccacagataaagaagttattaataactctcttactaacgtaagagagagtgcatcagcgacagaaaatcaggacaagaaaaaatcgtctctcagttgtgagcaggtggttgaggtttatcaccgtgtactgcctgaagcccagggaatacgagtcctgactgacaagcgtcgcaatctgatccgcagcttctggaaaaaagccggagcagcgaaccgccagctcggcggcgcagggttcaccctggcagactgggaagcgtacctgaactacatcgctaccaactgccgctggatgctggagaatcgcccggacaaccgcaccggtcgcacatggcgccgcaaatcgcttgaatacttcctgaacgttgacgtttacgtaaagacgcgcgagggggcctgcgatgacctctga

SEQ ID NO: 106935 - DNA, 594 bp, Enterobacter aerogenes
atgtataacgcagaagaatacaccatttcagtacgcaaagagcgtgtggatgatgatttctactgggttgctagagtagaagagctcccagacattttggagtttggtgaaactcgtgatgaagcatatgatcttgccatagatacaattaatgttgggcaagaaatgtgtttcgaacaaggaactaatttccctgctccgaagattttttcagaatccaacgcctcagggcgagtgacactccgactacctaaatctgtacatgcgaactgcataaagtatgcagaggaagaaggtgtaagtttgaattcataccttcttacttgcattacatcttatagatcgcagcaagagactgtcgttaaaacatcattcttcgaagacataaggcaaagcttatttgctttagcaaaccttcgaatgcagggtacgatatttgaacaatcaaattatgcatactctcgcaaaggccagatcagagttgctcttgatcaaatcaataatgatgattcatttgattcaagggtgataagtcaaaaaacaacctttgaagacatcaatgagcaaggatggagtatagtttcaacatgttaa

SEQ ID NO: 106936 - DNA, 171 bp, Enterobacter aerogenes
atggataaattctatgtgggttacaacgacgtgtgtcaggctgtgggaagggctgcgcttaaccttatctcgcatggagacgcgccaactacggaggcgagcatatcaatgctagaatcgctgggtgagatttctggcggccagtgtttaggttttctgctgaggaagtaa

SEQ ID NO: 106937 - DNA, 216 bp, Enterobacter aerogenes
atggataaccagcctgatgctgtccataacccggagctgcgtgaaaagctgtttacgtttgaggtggatattttgcacaatgatatctgcgatatcagcctgaacctgcaactgacagagcgcgtgatcgtcaatgctgatggtgacgcatccagcatcgaagcggtgccggaaccggacgatccggatgaaatgtgggcggtgcgccgtggctaa

SEQ ID NO: 106938 - DNA, 750 bp, Enterobacter aerogenes
atgcactctgctccctatacctccttggataaaatttcatcatcatattttattaaagccgatacactttttagaactattatcttccaaaacgttgctatctctcatgctaacgaaaagatgaacccagaacttcatgctgcatatatacaacttgagtcttttttagaagaaaactcacctgaaatctcagacaagggtattcgtcacgatttagtatcaaaacacatgccatcgttgtgctttagttcactagtatcagcatttgaggattatataatcgaaatagcgaaactgatatttaaactccgacctgaaaatcttgataaagttaaatgtgattatggagccattaaggctttatcagaagatgaactttttgactaccttgtcaatgaaggcgttgcaagtcttacctttggctcacctaaagaatacatcaataaattttgcaaactcatacaaatagataaaaaagctatcgagccatatctaaaggaatatattgaaataaaagcaagacgtgacacaggcgttcataataactggataaaagactctcgttacgaaagaagattagcagagattgggctgcaaccagatgcaaaaaactatttaacacctgacctagactattttagatattcctttaacttatgtggggggcttgtgaggttaataagcaacaatatttcaacagagctactaaatgaacacaaaattttcaaatacgagaagtcccagccttaa

SEQ ID NO: 106939 - DNA, 180 bp, Enterobacter aerogenes
atgatacaaagcatgaacgcacaactcacaggaatcatacgccttgtcaccaatctgatccgcaccggcattgtgaccaaagtggaccgggacggctggctgtgccgggtgaaaacagatgacctcgaaaccaactggattaactggccgacctaccgtgcctggaagccgcgcacgtga

SEQ ID NO: 106940 - DNA, 741 bp, Enterobacter aerogenes
atgataaaattcatcaataaacctggtcatgtcccaatccacgactttggctttaatatcatgttattacatggctttatcaaccaaacggaagcttcaattagagatagtataactaaatatgaagtcgaggggcctgagacgtttgtaatagaagattatcccgaagatgatatttatatatccatcgatagctacatggggattgatgaccaatctgtaaatcttgatgacatattcaaaagatactatccaagcatcatgagacgttctgcattattaacaattattggtctgttagagcatgaaatcgaaaagttctgtatcagttactcgaaaagacatacaacgaacatcaaccttaacgacttaaaaggaatgggctttgaaagaggacatcggtttattaaaaaggttgttggtttacgtaattctaaatcctttcctaaaataactaaaattataaaactaaggaactcttgtgcgcataatgatgctcgtttagttagcaatgataaccaagagattccagaaatcgtaagacttctcgatcagcatcctgatattcttgagagagatgggaaccaggtgcttttcaatgaaggtgctctggtgacatttttgaacgttttcgaagattacatcaaagaaatagaagctcatattagtccaccccgccaggcaccaaagcttttccatagtggcgacaaagtggcggcagcggttggcaataccccgtaa

SEQ ID NO: 106941 - DNA, 189 bp, Enterobacter aerogenes
atgacctggaacgaagtggtaatagctcttgacgagggtaagtcaataagaatgggttactggccagaaggcgtgtatgtcacaaaggaaaatggagtaatgacataccactctcctgatggtgatctatgggattgggttccatctctgtcagaaaaaattaatgataactgggaggttatctcctga

SEQ ID NO: 106942 - DNA, 2421 bp, Enterobacter aerogenes
atgacggtctcaaccgaagtcgaccataacgactacacaggtaacggcgttaccacgtcattcccatatacgttcaggattttccagaagagtgatctgatggtgcaggtagccgacctgaacgaaaacatcacagtacttacgcttgatactgactacacagttactggcgctggtggctattctggcggcgcggtagtgctggcttcaccgctggccaatggatggcaaatttctatttcacgcgaattgcccgtaacccaggaaacggatctacgcaaccaggggaagttctttgcggaagtccatgaagatgctttcgacaagctgacgatgctgatacagcagtgtttcggattccttcgcctggcgctgcgcaagccatcatttatcgctaactattacgatgcgctgaacaacagaattcgaaacctgcgcgacccgtcacaggctcaggatgcagcaacaaaaaaatatgttgataccagcgtagcaggatctacatcacatgctgatgatttgtttaaacgaacgatcagagtgcctgaaaactatgtagatatggtttcttctgttgacgccaggaaaaattcattatttggttgggatacatcaggcaacccagttccgatattttcaatgaccgacacggcagaccttgctataaaattagcttctaccacacctggtcttggtgactctctcgttgctcatgtcgatggaggtaaagtacgagattatatttattacgtaactcctcagtcgcagggatgcccatgcaatggcgtggatgatgatacgtctaagtttaatgcgatggttcagaagtttagaaatatctatgttcctcaaggtaactacatacttgatataaatacaataacaattccatccaataccacgataacattccatcaaaatgctatcgtaacccttaagacacagagcgttccaggcggttctggaataaattactggctatttaaagtggctggtacttcttccaacctgatcgaaagggtacgaattagcggcggtgtctttatcggtgccaatgattcaattacatttcttgctgttgggagctatgttgatgatcttattgcgcaagatgttaaatgtaaaaatataagaggggtgatggcgcgtgatggtgatggtacatatgataacagtacgacagcatcaaggccaaaacaccttaaatttatcaatgtaattggtaatttgtctgtgactccagtgactaccaatgctcatattcaacttaattatgttgagcaagttgttgtagagagatgcgatagctatggttactggttcggatgcatgggttgggggggcgattcagctatatcagctaacggcggtgcaacaaactacagaaaatgcagaagtgtaagatttgaaaattgcttttgttttgttaaagaggctggtatttgggtatcaatggggtatgacattgatatcatttcaaactttgctgagactataacacctacatcaagcgatgttggttttgatcttgaaggttcacagcagtgcaatgtgagatcaaacactgcgcgaaacttcctgaatggtaaccttgcgacattcttttattgtcgtcaggttactttcacaaataataagtcttggattactaacgcatcatgtcgacatatgagattcaacaatgcctctcaggatactggagcgcgtgagataagagtctcgcaaaatatgttttacagtgagggtaatgtttctgctattactcagaatggcgctgctcataatcttgttgttgaaaaaaacacgctaatgaatacagttgtatcattaattgctaacaacaatggtgttataaagattattggcaatgaatcacatttttccttggcgccaacacagacatttaatggctatggttactatactgcctttgcaataggagcccatcatggtttttctggtgggccatgtggtgcttattttgaaggcaatactgtaacttcagatgtggcatgggatgcttcaatgtcctgcgcttttcttgttgtacacacttcagatgttagaagtacatgggcaaatatttctggcggaggtgtactatcatcaggctggaagtatgattttggtttacttaattcgaatacttcaaatagttttggagcccgctatgcagtaagtgatttccgggtttattctgagagtttcttgacaggacaaaatacgtcatccagatatccagagggcctggtgaatgcaagaaaccggtttgggcagcggtggccaacatcaccagttgctggcgcgtatatggcagccgggcaagagtttcctcttcttgctccgacagccactaaaagaggcacatacgtgtatgttgccggtgtaggaagtgcggcggttacagctgattatcaatag

SEQ ID NO: 106943 - DNA, 507 bp, Enterobacter aerogenes
atgctgaatgagtatcagggattgatacataccggggcgtttaagaaagatcccgatttatgtaagtttatagaaccattcaaagcacactacaggtatggccatcacccagagtttgggaaggatactcttttcggaagacctccagaggtatggccatatcatttacggaaagtgcatgttgacctgaagttctacacaaaccagtttggcgacagtggtacggaagcttgctggaaaaactgggcaaccggtcaattagataaaaccacaaaaaaatttaaagtcattccaaccagcgatgtttatcttatctatttagtttcatcagagcgtcactgtttccttattgatttctggggcccaccaagtagcgctcatagggaggcagaagaagagaagcaaatggataaattaatccaggaatgcgataggattctgcgtctgaagggcttgcagtccatgcctagagaagcagaaatatggcgcccagaatttcttgtataa

SEQ ID NO: 106944 - DNA, 459 bp, Enterobacter aerogenes
atgtcaatcaaaaaatctctggcaccacctttatttattaatcttcgtaatgaggaagatagaatcagagcggtgcttgatgaatacgcttacaggcaactatcacctgaagatgagcatgatcgcttgtataaaaaaattattgctactgccaaagtaagagcaaccaagagatcagggcgtagtgctattgtaggtgagtatgctgcccggaagtacagttaccgaactaagcttcttgaacagatgattagagatcaactgtctgttgaagagcaagactatgcttctgagataagccgccttgcagcatctggcagtttagtatcaggtatacaagcacatactgttcatcaactgccttctatgagcagagaacaggtcatttctctttctgaccgtatgtattcaagaacccttgaagagatgcagggggagatgtacgacgatgctgaatga

SEQ ID NO: 106945 - DNA, 312 bp, Enterobacter aerogenes
atggaattagagaaaattgttgagcttcagagtaaatactatgagcataagcgtagtgcaactatcgggctgtatataatcctcgttggtgtaatcataatagtggtgaatatacttgggtggtcacatgaaactcaaattatacaaggcgttgttttggggggcggacttgtatattgggggatgcacttcgaaaaatattcaaagttgtataagcaactagatatcctatgcctacaaaggtatgggaaaggctatgaaaattctctatcagagatcgtctctgatagatatggaaagaaagataggtga

SEQ ID NO: 106946 - DNA, 522 bp, Enterobacter aerogenes
atgactgatatcaccgaactggcgcagagcctgaaagcggcagcagagaaagcgactcccggccaatggatgcgatcaagcgtgcaatttaacagcattaccgatatcgctgatccaatggagcagggtaacaaacctcacatagctaatacctctgagaagcgtgacgctgaattcattgctatggctaaccctgccaacgttctcgcgcttgtagaggcgctggagaaggcgcagcaggcagacgaagaactttgcaaactcttgcctcccggcgttgagtacatggacccaccagacggcggtgatgtcacgccgcttgaaggagtgcgtcgaatggtggctgattaccgccagcgcatagccgctccagagtcccgcaccgtcaccgtgaagcagttcgatgaatttcagatttgccactacggcgctactgaggactacgcgaaaggatatatcgactgtcagaacaactttttcaaatggctgacagccgctggcctcaagtgggaggctgagtga

SEQ ID NO: 106947 - DNA, 321 bp, Enterobacter aerogenes
atgaaacggttgccagatcatctatcgcgagaatgcatcatcgaagccatccgcgcgtacgacgagggtatagcgcatcagtttaaagatgcgcgtttgtatgaagtcgaattcgaaggacgtcgttatccctctaaagctatcgttgggatagcggccaccatggcgacgaaaacggagttcacgccggcggatttcagcggtgggatcaaatccaaatgcgtccgtctgttgctggaacaaggattcaagatcgttcaggagcgagtagatgatgccggcattacacttttttcccgacgagctacagacgaaaagtga

SEQ ID NO: 106948 - DNA, 609 bp, Enterobacter aerogenes
atgacgatgaaaaacgacaaggcatggattggagacctgctaggcgggccgctgatgagcagggaaagtcgaatcatcgctgagctcatacttaccaatcccgatgaacagacctggcaagagcagatagtcggtcataacattctccaggcttcctctgccaatactgcaaagcgctatgccacaacgataaaactacgtctgaatacgcttgataaagccgcgtggtcacttattgcggaagggagcgaacgcgagcgtcagcaattgctatttgtcgctctggtactccattcaccggttgttaaagacttcctggctgaagtggtaaacgatctgcgccgacaatttaaagaaaagctccctatagatagctgggatgagttcgtgaccagccatcttcgtcagcagcccgtactcactagttactcagattcatccatcaaaaaaatgggtaacaacctgattaaagcactggctgaggcgggttatctggatacgccacgccgacgtaatctccagtcagtctttcttttaccagaaacccaggcaaccttgcagcgcctcgggcaacaagaattggtttctattctggaggggcaacggtga

SEQ ID NO: 106949 - DNA, 603 bp, Enterobacter aerogenes
gtgatcgatcccgtgcttgaataccgcctgtcacaggttcagagccgcattagcgaagagcgctttctcaaaaacaacggctcaggtaatgagattgggttctggatttttgattatcctgctcagaatgagctacaggtacgtgaacacctgaagtatcttttccgtaatctggaaaaggaccacaagttcacgcacctcaacatctttcagatcattatcgacatgctcaccgaacgtgggttatttgagcgcgtctgtcagcaggaagtgaaagtcggtaccgaagcgctgaaaaaacaactcgttggcttattgaatcagaaaaagatcgcggattacatagcaaaaaaagtcgatcttcagaatcaagaatttgtcatcctgacaggcatgggtaatgcctggccgctggttcgtggccatgagctgatgagcgccttgcaggacgtaatgggttttacccctctgttgatgttttatccgggaacctatagcggacacgatctctcccccctggcgggtattgattcccgaaattattatcgcgccttcaggctggtacccgaaagcgggcctgcggcgacattgaatcctcgttaa

SEQ ID NO: 106950 - DNA, 3642 bp, Enterobacter aerogenes
atgaatattgaacagatctttgagaaacgtctggaccgaaatattaatggcgttgtgaaagccgaacagacggacgatgccagtgcctggattgagcttgatgaatacgtcatcacccgggaactggaaggacatcttcgccatttcttcgaatcttatgttccggcaaccggtccggagcgcatacgcatggaaaacaaaattggcgtatgggtttcagggttctttggctcaggtaaatcacactttatcaagattctgtcgtatctattgtctaaccgcaaagtcagccataacggtacagaacgtaatgcatactccttctttgaagacaaaatcaaagatgctctgttcctcgctgatatcaacaaagcggtccatcatccgacggaagtgattctgttcaatattgattctcgtgctaacgtcgatgacaaagaagacgccatccttaaagtcttcctgaaggtgtttaacgaacgggttggctactgcgctgattttccgcacatcgcccatctggagcgtgagctggctaaacgcggccaatacgacgcatttaagaccgcattctccactatcactggttcaagctgggaaaaagagcgcgattcctactatttcatcagcgatgaaatggcagaagccctaagccaggccacaggtcaaagcgttgatgcctcgcgtcaatgggtggaacagttggataagaacttcccattagatatcaataatttttgccagtgggttaaagagtggctggatgaaaacggcaaaaacatcctcttcatggtggatgaagtcggccagttcatcggtaaaaatacgcagatgatgctgaagctgcaaactatcactgaaaatctcggtgtaatctgcggtgggcgcgcatgggttattgtcacttcacaagcggatatcgatgctgccatcggtgggatgagcagccgcgacgggcaagacttctctaaaatcgtaggtcgtttctctacccgtttgcagctttcaagctccaacacatccgaagttatccaaaaacgtttgctggtgaaaaccgatgccgcaaaaccagctctggctaaagtctggcaggaaaaaggcgacattctgcgtaaccagctggcctttgatcccaccacaacggcttctttacgcacctacaccagtgaagaagaatttattgataactacccgtttgttccgtggcactatcagattttgcagaaagtctttgaatctattcgcaccaaaggtgccgctggtaaacagttagccatgggcgaacgttcacagctggaagccttccagactgcggctaagcaaatcgctccacaagggttagattctctggttcccttctggcgtttctatgcggcaattgaaagtttcttggaaccggcagtgagtcgcaccattacccaggcctgtcagaacggtatcctggacgagttcgatggtaacttactgaaaacgctgttcctgatccgctatgtcgatttgctgaaaagcacacccgataacctggtcaccctttctatcgataaaatcgatactgataaagttgagctacgccgtcgtgttgaaaaaagcctgaatacgctcgaacgcttaatgttgatcgcacgcgttgaagataaatacgtattcctgaccaatgaagaaaaagagatcgagaacgaaatccgcaacgttgaagtcgatttctctgcaatcaataaaaaactggcatcgatcatctttgatgacattttgaaaaatcggaagtatcgctacccggcgaataagcaggactttgatatcagccgcttcctgaacgggcacccgttagacggcgcaatgcttaacgatcttgtggtgaaaattattacccccaaagatccgacctatgatttctatgataacgatgctgcgtgccgcccatacacctctgagggggatggctgcattttaattcgtttacctgccgatgcccgtacctggaccgacattgatttagtcgtccagactgaaaaattcctcagggacaacgccggtcagcgcccggaacaagccagcctgctttcagaaaaagcccgtgagaatagcgttcgcgagaaactgctccgcgtccagctggatacgcttattgcagaagcggacatctgggcaattggcgagcgcttaccaaagaaatcttcgacgccatccagcatcgtggatgaagcctgccgctatgtgattgaaaacacgtttgccaagctaaaaatgctgaagccgttcaacggcgatatcgcacgtgaaatccatgcgctacttacggtggaaaatgatacggagctggatctgggcgaactggaggaatccaatcctgacgcgatgcgcgaagtggaaacctgggtcagcatgaatatcgagttcaataagccggtctatttacgcgatattctaaaccactttgcccgccgcccttatggatggccagaagaagaagtgaagcttctggttgctcgtctggcacgcaaaggcaaattcagctttagccagcagaataacaatatagagcgtaagcaggtgtgggagctctttaataacagccgtcgccacagcgaactgcgtctgcacaaaattcgtcgtcacgacgaattacaaattcgcaaggccgcgcaaaccatggcgaagattgcccagcagccatttagcgaacgtgaagaacctgccctggttgaacatatccgtcaggtcttcgacgactggaagcaagagctgaatgtcttcagagcgaaagcggaaggtggaaacaatcctggtaaagatgagattgattcaggcctgcgcctgctgaattccattctgagtgaaaaagaagattttgctctgattgagaaggtcaccagcctggccaatgaactgatggatttcagtgaagaccgcgaagacttcgtcgatttctaccgcaagcagttcgccacctggcaaaaactgggcgcggcgctgaatggcagctttaaatccaaccgcagcgcgctggaaaaagacgccgtggcggtaaaagcgttaggtgagctggaaaacatctggcagatgccggagccttacaagcatctcaatcgtatcacgccgctgattgaacaggttcagaacgttaaccatcagttagttgaacagcaccgccagcacgccctggaacgtattgacgcccgcatcgaagagagtcgtcaacgcttgcaggaagcgcatgccacatcggagctgcaaaacagcgttctgctgccgatgcaaaaagccagaaagcgcgctgaggtcagccattcgattccggaaattctggcggaacagcaagagacgaaagcgctgcaaacggatgctgagaagaaaataaatcagtggattgacgagctgcgtaaaaagcaggaagcccagctacgagcagcgaatgaagctacacgcgcagcagaatcacaacagacctatgttgtggtagaaaaacccgttatccaaccggtaccgaaaaaaacgcatctgctgaatgtcgccagcgagatgcgtaaagccaccggtggtgaagtgctggaaaccgccgaacaggtggagaaagcgctggatacactccgtactgcgctgctggcagccattgaggcaggtgaccggattcgtcttcagtaa

SEQ ID NO: 106951 - DNA, 3657 bp, Enterobacter aerogenes
atgaataccaataacatcaaaaaatatgctccacaggctcgtaaccagttccgcgatgcagtgatccagaagctgaccacgttggggatttccgtcgataaaaaaggcactctgcaaattgcagatgccgagatcgttggcgagaccgtgcgctatggccagttcgactaccctaagtctacccttacccgccgcgatcgtctggtaaaacgcgcccgcgagcagggctttgacgtgctggttgagcactgtgcctacacctggttcaaccgcttgtgtgccattcgttatatggaaatccacggttaccttgaccacggcttccgtatgctctcacacccggataacccaaccggctttgaagtgctggaccatgtgccggaagtggcggaagtgctgctgccggagaaaaaggcgcaactggtcgaaatgaagctgtccggtaatcaggacgaagccatctaccgtgaactgctgctggcccagtgccacgccctgcaccgcgcgatgccgttcctgtttgaagcagtcgatgatgaagctgaactgctgctgccggataacctgacccgtactgactccattctgcgcggtctggtggacggtattccacctgaagactgggatgacgttgaggttatcggctggctgtatcagttctatatctctgagaaaaaagatgccgttatcggcaaggtggtaaagagcgaagatattcctgccgccacccagttgttcaccccaaattggatagtgcagtatttggtgcagaactccgtcggtcgccagtggttgcagacctacccggactcgccgctgaaaggcaaaatggactactacattgagccagccgaacagacgccagaagtgcaggcgcaactagcagccattacgcctgccagcattgaaccggaaagcatcaaggtgctcgacccggcctgcggctccgggcacattttaattgaagcctataatgtgctgaaaaatatctacgaagagcgcggctatcgcgcccgtgatattccacagctgattctggaaaataatatttttggtctcgacattgacgaccgtgcagcccagctttccggctttgcattattaatgatggcccgtcaggatgaccgccggatattcacccgcgacgtgcgcctgaatattgtttccctgcaggaaagcctgcatctggatattgctaagctgtggcagcagctgaacttccaccagcagaaccagaccggcagcatgggagatatgtttgccgaaaatactgcattaactcataccgacagcgcagaatatcagctactgatgcgtacgctgaaacgctttgtgaatgccaaaacgctgggctcgctaattcaggtgccgcaggaagaagaagcggaactgaaggcgtttctcgacgcgctgtatcgcctggaacaggaaggcgatttccagcagaagactgctgcgaaagcgtttattccgtatattcaacaggcatggatcctggcgcagcggtatgatgcggtagtggcgaatccgccgtatatgggcgcaaaagggatgaatggtgaactgaaagagtttgccaaaactaatttcccggacagtaaatccgatttattttcgatatttatgcaacacgcattctctttgcttaaaaaaaatggatttaatgcacaaattaatatgcagtcatggatgtttttgtcgagttatgaagcactacgcaactggttgttggacaaaaaaacatttattacgatggcacatttgggggctcgggcttttggagaaatttccggggaagttgttcagacaacagcctggataattaaaaaccatcataccgagtgctatcaacctgtatttttccgtttagttgagggtagtgaacatcaaaagaaaaaggctctagtcaagcgtgaaaactgctttactaataacttgcaaaattattttaaaatagtccctggctcaccaatagcttattggataagcgaaacatttaaaaatatattttcatcatctaagccactaggttccgttgctgatgttaaacacggtttatcaacaggtaaaaacgatgctgtagttaggctgtggagcgaaatctcatatccaagctttaatcaacactgtttaaatagagaggatgctctttcagaaaattataaatggttcccttataataaaggtggtgattatcggaagtggtatggaaattgtgaatatgttctacgatatgatcaatatggcaatgatcttatgcaaacattttcaggacatcgccatgatggtaaaagccattatttcaaagagggggtaacttggacgtttatatccagctcgaatttttctgcgagatatagctctcctggttttgtatttgatgttagcggctcaaccttttttgttaattcacctcgcgcatttactgcatttctatgcagtaaaatcagtgaaaccgtactaaaaatgttaaacccaactttgaactttcaagtcgggaatattaaatctctacctatattagatgggagtaatatattttccgattccgaatatttattagcatcagaaataattgaaatttttgaaaatgattggaataattacgaaacgtcatgggctttttcaaaagataaattattagttaacaagattgataattcattatcaaagtcaatgaagatctacctgctaaatacagaaagtctcataaaaaaaaccaaattcaaagaagaggaaaacaatagtaattttataaatgcatatagactaaataatgaattgacttctgatgttccatataatgaaattactcttacatgtaatccatgttatcgatatgccagtaatgaggagaatatatctgagcgatttatttctgataccatctgtgagcatatatcctactccataggctgcatgatgggccgctactccctcgatcgcgaaggtcttgtctacgctcacgaaggtagtaaaggcttcaccgaactggtcgctgaaggcgcatacaaaaccttccctgccgataaagacggcatcctgccgctgatggatgacgagtggtttgacgatgacgtcacctctcgcgtcaaagagtttgtgcgcaccgtctggggcgaagagcatttgcaggaaaatctcgattttatcgctgaaagtctctgtttatacgcgatcaagccgaaaaaaggcgaatctgcgctggataccatccgccgctatctttccacccagttctggaaagatcatatgaagatgtataaaaagcgcccgatctactggctatttagctccggtaaagaaaaagcgttcgagtgcctggtctatctgcatcgctacaacgatgcgacgctggcgagaatgcgtaccgaatatgtggttccactgctggcgcgctaccaggccaatatcgatcgcctgaatgaacaggtcgatggagcctccggcggcgaagccacccgtctgaaacgtgaacgtgatagcctgagcaagaaattcaacgaactgcgcagcttcgacgatcgcctgcgccactatgctgatatgagaatcagtattgatctcgacgacggcgttaaggttaactacggtaagtttggcgatctgctggcggatgtgaaagccattaccggcaatgtgcctgaggtgatttaa

SEQ ID NO: 106952 - DNA, 2598 bp, Enterobacter aerogenes
ttgcaaaatcaggaatttattgccggccttaaagcaaaattcgccgaacatcgcatcgttttctggcacgatcccgataagcgtttcctcgaagatctgggtaatctcgaactggagaacgtcacgctgctcgatatgaccgaccagtcgcagctggcggttaaaaagcgcattgaaatcgacgagccggaacagcagtttttgctgtggttcccccacgacgtgccccccaaagagttcgactggttgctggatattcgtctttatagtacggagttccacgccgatttcgccgccatcacgctgaatacattaggtattcctcagcttggtctacgcgagcatatccaacgcaggaaggcatttttcagcactaaacgtctttctgccctaaaaggcctggtcactgagcaggaaaacgaagccacccttgataagaagatggttgcggtcatcgctggcgtaaaaaccgcaaaaacggaagaaattctattcagcctgattatccaatacgttaatcagcaaaaagatgacgacagcgacctggaaaacacgttggcaatgctgaaacgccacgatctggaaggcgtgctgtgggacattctgaatcaggaaatgggctaccaggccgaacagccttctctggagaacctgatcctcaagctgttctgtaccgatctctccgcacaggctgatccgcagaaacgcgaatggcttgaaaaaaacatactgaccacgccgtcaggcagagcctccgcgctggcctttatggtcacctggcgtgccgaccgtcgctacaaagacgcttatgattattgcgcgcaacagatgcaggatgcgctgcgaccagaagaccagtaccgtctcagctcgccgtatgatctgcacgagtgcgaaaccacgttgagcattgaacaaaccgttattcatgcgctggtgacgcagcttctggaggagagcaccacgcttgaccgtgaagccttcaagaagcttctgtccgaacgtcagagcaaatactggtgccagacgcgacaggaatactacgctatttacgatgcgctgcgtcaggccgaacggttgctgaatctacgtaatcgtcatattgatggtttccactatcaggacagcgcaacgttctggaaagcgtactgcgaagagctgttccgctttgaccaggcctaccgcctgtttaacgaatacgcgctgttggttcacagcaaaggcgcaatgatcctgaaaagcttggatgactatatcgaagcgctgtattccaactggtatctggcagaattaagccggagctggaataaggttctggaagccgaaaaccgtatgcaggagtggcgtattgcgggcgttccacgacagcagaacttctacaatgaggtggttaagccgcagtttaataatccacaaatcaagcgcgtgttcgtgattatctccgatgcgttacgttatgaagtggcagaagagctgggcaaccagatcaatactgagaaacgttttactgccgaactgcgttcccagttgggcgtgttacccagctatacccagttgggaatggcggcattgctgccacatgacgagatatgctaccaaccgggtaatggtgacatcgtttatgcggacgggttgtctacctcaggtacgcctaaccgcgataccattcttaagaaatataaagggatggcagtaaaatcggacgatcttctgaaatggaaaaatcagcaaggacgggatcttattcgcgattacgaagtcgtttatatctggcataacaccattgatgccatgggcgacagcgcatctacggaggagaagaccttcgaagcgtgccgtaacgcggtggttgaactgaaggatttagtgacacgggtgataaaccgtctccacggtacacgcattatcgtcacggcggaccacggtttcctgttccagcagcagcccctttccgggcaagataaaaccacgctgcagatcaagccagacaatacgattaaaaaccacaaacgctttattatcggccaccagcttcctgccgatgatttttgttggaaaggaaaagtggcggataccgcaggcgtcagcgataacagcgagtttctgattccgaaagggatccagcgtttccatttctctggcggcgcacggtttgtgcacggtggagccatgctacaggaagtctgcgttcccgtcttgcaggtgaaagcgctgcaaaaaaccgcagcggagaagcaaccacagcgtcgtccggtagacatcgtcaagcatcatccgctgatcaaactcgtcaataacattgataaagtcagcctgctccaaaccgatccggtaggcgaactgttcgaaccgcgaaccctgaatatctttattgtcgataacgccaataacgtggtttctggtaaagagcgcatctgttttgatagtgacaacgatgccatggaaaaacgcatacgcgacgtgacactgaagctgattggggcgaatttcaatcgccgtaatgaatactggctgatactggaagatgcgcaaacggaaacgggttaccagaagtaccctgtgattatcgatctggcatttcaggatgatttcttttaa

SEQ ID NO: 106953 - DNA, 1014 bp, Enterobacter aerogenes
atggatataaaatatatcgaaagctggctgccggaagccacggtgaattacaaggagggcggcccggcggtagggttgggattgattattacggtatttttccgcgacggacaccggccggaagtccgccgcaggatggtggaatgtgtagaccggttttacgccgaattcggtactcacctgaagaagcagatgaccgaacgctggagcggcatcaccgagaagaactacctgaaaaaccgtcagagaattatcgactcgacgccggaagagattttttcatgggatctaatgagcgcgccggaagattacctggcatcggactgctcgattttgatcatgggaaagcgggtatttcacaacgataataaccgctccgtgattaagctgacctttccgctgaattttttacagcagccggacggcgcggcgcgctatcaggcgtggctgctgtggctttgcgacacctttgcggtggagagcggctatgcggggctggcgtttgtgttgccgcaggattttaatcgcctgttcccgtacgagtttgcgctggcgcagcgtttttccggggtaatggtggactcgctgggttttctggatggggccaatgcagtggagggtatcaaaggagcctgctggtacacgatactgggtacgccctggctggagaaactgggtggcgaggcgcggctaatggctcgcctgagcgatacgccggaaattgacgtgctgctctatcgtcacggggtggttatcaaggctggggaaacgccgccgccgctgggtgaggtaaggctagaagggccgccgctattgttggtgaaggtcaatcagctgattaagcccgttcgtcaggatggccataacggcctgcatttctactcgatggaagacgctcatcagtttgataaagagtcgtcgatggcatggtacgcacgttttgacgaggcgggagcgttgctggaaacgccggacgataacgatgtatcgtcagcgaaaatgtataccgaataa

SEQ ID NO: 106954 - DNA, 678 bp, Enterobacter aerogenes
atgctgtccagagttatcttatcaattagtttttatttttctttgatgtcatcaagctacgcagatgtaagatttcgcagtcactacgtcaggcattctcattatgaactatcagatttgatatctgggattgttattcttctgttgatatacgcattaattaccattctaaaaactttaaaaacaaaatcctttaaggatggtgaattaaagtttactccgccccctgcaatacagcaattactccagcctgacgacctggtattaatggtaagcaaaaataaagtggaaattgacattggcgatgagaacaaaaattcgctgacacacaaaatgtacagaataaatattacggtaacggctcggcatattatgctctgcatatatgattgctataaacctgaacgaacccttttagagtttgatcacctgatctcaccgtacctcatttcatttagattagaagatattagcgaattcagtctcggcagacactcgtggctaatggttaatcgcatgttactgctggaaaatgattcccggcgcgaagttgaatttacccaagcgcggcgactgcaatttcgcttcgactccagtctggacgcaactctgtttcgtctggcgttacaagaaaaaagtgcgcgcagcagctatttctctgacggctgtaacggctaa

SEQ ID NO: 106955 - DNA, 1632 bp, Enterobacter aerogenes
atgaaaatcaataggttgctcttactcgtcattttattgggatgtgtgccatcagcaatggctattcagaagacaactaccagccctgaaagtggagagtttgtgctaattgaaaacaatatagacaacaactactacgtcatcagcgatacctttgaaccaatgatggtaggcgtcaaccaaatgctgagcaccgaagacttgtcttctgacggcgggctgggagcgatatctaacccaggcctgaacggcctaacaatagatagaggaagaatgtacgatatgtggctagaaaactcaccagtatcattccccctactaggccagtcctgtaatgtcagacgctcaacgagctattgtagcaacggcatatcgataactaccacgacggatgcgaaaggtttttatggtttggcttccagtaacggaaatgggggggaactacaatacctgtctggagtcatgtcggatgctttttatcagtatttgctgcaaatgccaacgggcagtaatttcacaacaacgctgaatgaatgttactcatcaatcgcctacgatgccagcaacggagaacgctgccagaatgtaggaactacatggctagcaacggacatcactttcactaaaggcgcacatctgaagctaattaataccagctccgtggatgaagtttttattaacagcgatggtctgccaactcctgctgacggcaatactaattgccatatacagaccgtcgacggtctctccggcctggtctgcaaaatggttaattatacgttgcaatccaatggcatgagctaccctggaatgcatatttatccgtcgctcaacaatctcacgctggctgcaggtatcgtcgacaaggatatgcagttcagcctgaccggcaacgactggaaaccggtaaacggtcagtcctcttattatactttcgacgaaatgaaatcagcggatgcaatttatatttttttatcggataatttttttaaacaaatggtcgctgctggtattagcgatattgatagccgggaattatttaatttccgcatttacaccctcatagcggacacttcaaactctttgtataactttacctcttccaacatattggaaatcaagccccgcgaattcagcatcaatatctcctctgaagactacagcgacgccccgtcgcgcgaaggctacgttggccgtgatgaaccctcgctggactttaactacattgtcaccaccagcggtaaaaccgccgccgacgaagtgctgattaaagccaccggaccgacgcagcaaattaacggccgcgcctactgtatcttcagcgccgacgacggcagcattaaggtccccttcccggctacgctttccttcaccaaacaggatggcagcatcaacacctacgatgtcggctgcgacggcagctggcgcgatatgaccgatgcgctgtggctcacttccgcatggaccgatatctccggcgaacccggcgtcatgaacaaagcaactgtgaagttttcgattcccatgaatgatgatatttcgcagaaaacgctggataacaacgagtggtatggcgacgtcagcgcctcaggagaaattcacgtccaggccacgtggcgcgatattaattaa

SEQ ID NO: 106956 - DNA, 1095 bp, Enterobacter aerogenes
atgggcactaaatctgaaggggccacctgccgagataaaaataatacagttcatgttaccaacattaccatgactaaaactgcacaccttacgttaaagaacagtagtaatgtagacgaaatcttcattaacagtgatggcgtaccgacaattgctgaaggtaataccgactgtaaattgcaaacaatcggtagcgtttctggagtcgcatgtaaaatgctaaattatagcatacagacgaatggtggtaattccattatacacgtataccctattatttttcaacgcacacggctacgcgatgcaataaccaaagaagatatgcaattcagcttggatggcaatcagtggatatattttaatggcaagtatgagccttacctagactacgacaatgagccatattattacacattagaggatctggcctcctctgatgctatgtacatatttttctcagagaacttttttaaacagatgctggcactaaagatgagcgataccaacgcttgggatttagttaaaattctattgtcacgttccttaacatatcagtttacctcatctaattcgttgttaattaaaccccgtgaattcagcatcaatatctcttctgaagactacagcgacgtcccatcgcgcgaaggttacgtcggcagcaaccagccttcgctggactttaactatatcgtcaccaccacgggaaaaacctcagctgacgaggtactgataaaggccaccggcccgacacagcaaatcaacggtcgcgcccactgcattttcagcgccgacgacggcagcattaaggtccccttcccggccacgctttccttcaccaaacaggatggcagcatcaacatctacgatgtcggctgcgacggcagctggcgcgatatgaccgatgccctgtggcttacatcggcgtggaccgatatctcccaaagagctggagtaatggacaaagccacggtgaaattttcgattcccatgaatgatgatatttcgcagaaaacgctggataacaacgagtggtacggcgacgtcagcgcctcaggagaaatacatgtacaagcaacgtggcgcgacattaattaa

SEQ ID NO: 106957 - DNA, 591 bp, Enterobacter aerogenes
atgattgcccccctgattccattatcgctggcctcctctgatgaagaaccggctttatttgccgttgtacgccagacaggggtgatacgggaaacaccccgtcatcaccatgctcgtggacagttacttggagccgaacatgggctgctaacagtcgatgcgggtgattatcgttgggtggtaccggcaacgcatgcagtctggataccgccagccataccgcacggcttatattcgcatggcccttactcaggctggaatgtctatgtcagcgcctccgcgtgcaaagaattacctgatacaccctgtattctttccattacaggcctactgcgcgaggccgtcacccgggcaccggcctggaaagaaaaggttcttactgcatcgcaggaacggttggtaggggtcatcctcgacgagatccagtcgcttcccctggcgaacctcggcctgccaatgccgcaggatgcccggcttctcaggattgcgcgtgcgctcttagaacggccagacgatgaccgcaggcttgaggcatgggcagcgtgggccggaacatcgccacgcacggtcacggcggcgattcagcgctga

SEQ ID NO: 106958 - DNA, 393 bp, Enterobacter aerogenes
atgcaagccattagtattgatactgttctggatgaaataatcaaccagcaagaactgccactggaaaaggttcttgatcggcattttagccccaactatcggcagcgtaccaatgatagctgggaagatcgtgaagggttcgctcatcatgcacgtaagctccgagaaatctgcgttttcgcgcggatcgatgtgcttgacgaacttcgccatagaaatctttacgctacccgacatcgcgttcaatgcactaagcgcgacggaacagaggttgtgatggaagtgtatatgttcgcggaaacagatgagtcaggacgtttcctgcgcattgaagaaacgacgcttatgcttaaaggtacagagagcgatcgcgatttaggcaacgccaaataa

SEQ ID NO: 106959 - DNA, 2376 bp, Enterobacter aerogenes
atgtctgaaaccctaaacggcccgcgttctgcgggccgcttcatccatctgttacaaaacgtgctgatggcgttctttcttctggggttgttttgcgtcggcttccggttatggccccatccacgtttatcagatggggtgctctactcgacggcgtattacgatcgtgaaggtaaattactgcgcctgacgctaactggtgacgatcgctatcggctgtggacgccgctgaatgagatatcgccgctggtggttgaaggcgttatgcgccatgaggatcgctggttttattatcatccggggtttaatccctacagcctgatacgcggcttttgggtaagttatctgcgcggtggccatccacaggggggatccacgctgacgatgcagctggcgcggatgtactggaagctcaatacccgaacgttgcaggggaaagcgacacagattctgcgcgctgttcaactggagctaagttattccaaacgcgacattctggaggcttatctgaactatgccccatacgggcgcaatattgaaagtatcggcgccgccagcctgatttattttaataaatcgccgcaggggctgaccttgccggaagccttaacgcttgccgtgctgccgcaatcgcccagttttcgtagcgattcgcgtaccggcatcgttggaccggcgttaacaagggcgcgtaaccggctttatcggcgttggctgtcttcacaccctcatgacgctagctataccgcgttgtttcagctgccattggtgctgcgtcagccagagcagatgccgtatatcgcaccacactttgttgagcaacttcagcgccagcagcggttgaatatggataagccacagaaggtcgtcaccacgctggatgtccgcctgcaaactttactggagcggcagataaatgcctggatcgtgcgcgggcaggatcgcggtattcgcaacgccgccgcgctgctggttgatacccgcgatatgggagtgcgggcgctggtgggatcggccgactactataatcgccagatccaggggcaggttaacggcacgaatgctaaacgttcgccgggttcgacgttaaagccctttatttacgctctcggacttgagcagggtattttacatccactcactatcctgaaagatgtgcctgtggcgtttggcgcttatgctccggaaaattttgaccaccgctttcttggcccgatttccgccaccgatgccctgaattacagtcgaaatattcccgcagtcgctattgcctcacgcctgcgccagccgacgctgtatcagttaatgcaaatggcaggggtagcgaatatggccagtgaaaagcattacgggctttcgttggcgctgggcggaggcgaggtgaccgcccaggagttggcgcgcatgtacgcgatactggcgaacaggggagaaatgcggccgctgcgcatgaatgacgttactccgcagggaaatgcggtgcgtctgttaagccaggagtccagctttatcacgctgaatatgctcagccagcatcgtcgaccaggcgatacgctggcgcagcgctcacaatcgctgccggtttactggaaaaccgggacctcatggggctttcgcgacgcgtggagcagcggtattttcggtccatatgtgttagtcgtctggcttggaaactttgatggcaaagggaataacgcgtttgtgggcgtagatgccgctgcgccgctgtttttcaatattattgataacgtgatcgcagagtatccggggttaaaagagcccgtgcgcccgcgtccgcagaacctgcgtcaggtggacgtctgccttgccagcgggaatttgccgacgccgtggtgccagcgtaaaggcaagagctggttcattcccggcaaatcgccgattagcgtggatacggtttatcgccccgtggctattgataaagtgacgggcgaagtggcctgtccgccttacaatccggagacggttacaactgaggtgtttgaattctggccatcagatttagcccgcgttttcacccaggctggattacccaaacgcaaacccccttccagcgccaggtgcgcaaatacgggcgcggtgaatggttcgccaccgcgtattacttcgccgttacgcaatacgacttatactttgcgtcgtggctcgctgaagcgttcgcctatcgtttttaacgccatcacggataatgatagcaacgtggtttactggtttgtggaagatgtttacctgggaaacagcgccagccacaagacgattgagtggtttccagagcaaagcggacgctatcgcgtgcgggcgattgacgatcgcgggcgggcggatacgcgactggtggcggtagaaattagttcgtaa

SEQ ID NO: 106960 - DNA, 5949 bp, Enterobacter aerogenes
atggacgtcttgcgctttttgttccgttctccctttgcgttattacgcgccattggcgggttgttgtccgcctttttgcgcttgctggcactaattatcgcaccgttggtcggccgaatcggctggcgaacgccgccttgggcgccggccataaaacgtgcgctgtgccgggcggaaaatagcgttgatcgtcatcctaaaatagtggcgacggtactggttgttgcgctggcggccgcgggtggcggctattacggctggcactggtatctgaatcgtccacagccgattgaacccgctccgcttattgttaagcagacagagatatatctggacaagccgaaagcgccggatatcaatagcgctgagccgcagaagctggtactcaatttttcccgttcctcggcgccggtagaactgagcggcaaggttatcagcgccggggcctcgctgtcacccgcggtacctggcgaatggaaatggcaggacgatcgcacgctggtttttaccgccagtaaaatgctgccgatgggagaagagtacaaactgaccctggacgctaaacagcttcttgcgccaacggtatcccttgcacgcaatgaataccactttacgatcgaaccgttcgactttcgcataacggcagcggagttttatcaggatccgcaggcaccgttgaaaaagagcgccatttttaccgtgcggtttaatgccccggtggatgcgcaaagctttgaacagcatctctcattgagtacccagtcttcccgtagccccctgaagtttaatgtggtttatgacgagaaaaaacttcaggcgtgggttcattcttctcagctatcgctaccggataatcgcgatagcgtggtgctgtcggtaagcaaaggcgtgaaatcaacgttggcggctaacgcgacgacgcaagagaaaatacgcagccagaacattcccggtttatatagtctgagcgtgcagaatgtagatagccaactggtggaatccgacggcagcgatggcgtgcgcacgctgattatcacgaccagcgacgcagtgaatgaaaaagaactaaataaaaacgtcaaggtctgggtgttgccgcagcactcgctggatccgcaaaagcggaagggggagcagagtatttatgactggagcctgagcgaaattgatgaaaaggtgctggcgcactcttccatactgccgttaaagatggccgataacgacgaagaaaaccaggtggcctttagctttaattataaaaatattcccgccgggcgtcttttgctggtgaaagtggccgctggtctcacttccgtcggcgggttccgtctgcgtgaggacgattataacatcgtgagcgtcccggattatcctaatgtgctgcgttttacctcagaaggggcgctgctgtcgatgaagggcgacaagcgtatcaccgtggcggcgcgcaacgaaccgggcctgcagatggacatcaaacgcgtcattcccagccagttgcagcatatcgtatcgtttaaatcgtcggactttacctcaacggagtttaattactggcggctgaatgatgagtattttaccgagcgcttccactatcagatgccgcttaaaaaggataatacgggcgcgcttcagtatcagggggtggatctggggcgttatctgtccaatagcgggaagtcccggcgcggtattttcctgctgaatttaagacgctgggatccacaggcagagcaaaaaagagaagagtgggccgaagaagaggcgcgttattatgatgaggaacaggccagagtggtggattcccgtttcgtcgtcgtgaccgatcttggcatcatagcgaagcggtcggccgatcgttcgcgggatatttttgtccagtcaattcacaacggttctccggtgagcggtgcgaaggtttccgtggtggcccgaaatggcacgacattgtttagtcataccactggagcagacggccatgtggcgttcccttcactcgatgatttccgcgccgagaggacgccggtgatgttcctggtcgaaaaggagggcgatgtctccttcctaccgaccgagagccgcggcgatcgcgatctgagtttctcccgtttcgatattgacggcgcatatacaccgcgggatccgcgcacgcttgacagctacctgttctctgaccgcggcgtttatcgccccggcgatcggtttaacatcggcattatcacccgcaccaacgattggaaaactgcggtcgccggtattccagtgcaggcggaaatctacgatccgcgtgagacattaatggagtccattccgctcacgcttgatgcttctggttttagcgagctcaattacaccacatcagaaaactcgccaaccggtgactggacggtacatctctatttgctcggaaaagatggggacgataaccgtttattaggcaataccactgtgcaggttaaagagttcgaaccggatcgactgaaagtggcgctgaggctgttgccagaacgtcagctggggtgggtaaagcctggggatgtaagcgcgagcgtcgatgtgcagaatctgttcggcacgccggcccaggggcggcgcgtgaagtcgaagttgacgctgcgtccggtttatccgcactttagccagtttaatggctatcagttctatgaaaatcgccgtagtaatgatgatttcgtgacgcatctggaagatcgaatcaccaacgatagcggtaaagcggatatcgcgctggaacttaagggttacgaagatgccacctatcagcttcagctcatttccgaagcctttgaagcgggcggcggacgctcggtgacggcggcggcacgagtgatggtttctccgcacgattggctggtgggggtgaaggcggatggcgatcttgactacatcaataagaatgcggaacgtcgtctgaacctgattgccgtcgatccgctgctgaagaaaatcgagctctctggcctgaaggcgaatctgcttgaacagaagtatctgtcggtactgacgaagcaggattcaggggtttacaagtatcagtcgaagctcaaggaagttcctgtttccagcgcgccgctggctatcggcgcgcagggcagcgattttctcctggcgacggataagcctggcacctttgtgctggagataacagacagcaaagataaggttctgaaccgtgtggtctatacggtagcaggcaatgccaacatctcccgctcgttagatcgcgatgcagagctcaaactggcgttgaacaaaggcacatacaagcctggcgaggagattgaagtcgccgtcaacgcaccgtataccggcagcggtattattaccattgagcgcgataaagtgtatcagtggaagtggttccatgctgataccaccagctcggtgcaaactatccgcgtaccgaaagagatggagggtaatggctatatcaatgtgcagttcattcgcgatccgaattcggatgaaatatttaccagtccgctcagctatgccgttaaaccgttcgctatcagccacgatgcgcgccaggcgcagatgacgattgatgcgccggaggtagtgaagccgggcgagctcctgaagatgaaggtgaaaaccaactcgccgcagcgggtggtggtgttcgccgtcgatgaggggattttacaggttgcgcgctatcgccttaaggatccgctggattacttcttccgcaagcgtgcgttggaggtaggcagctcgcaaattcttgacctgatcttgccatcgttcaacaaactcatgtcgcttgcttccgcgccgggcggtgatgacagcgaagggctggatttgcatctcaacccgttcaaacggaaaaaagatgcgccggtggcctactggtcgggaattaccgatgtgaacggcgaagcggagtttagctatccggtgccggattacttcaacggtaaaatccgggtgatggcgatgtcggtcacgccgaacagaatcggccacgcgcagcgctatactacggtaggcgacgatttcgttctgagcccgaacgtaccgaccacggtcgcgcctggggatcagtttgcggtgacgctgggcgtggccaacaatctcaacggactaaacggcgcgaaaacgccgttgacggtgacgctgagtttgccgccgcagctggagattgtcggggaagcgcagcaacagttacagcttgctgaaaagcaagagggagtactgactttccatctcaaggcaacaaataagctgggcaatgcgacgctgctatttaaggctgaatcaggcgacaaatcaacgcagcgggcggtgagtctgtcgctgcggcccgcagcgatgtaccgtacgcagacggtgatggggcgtatggacggccacgaacagcaggtaagcgatattcgtcagatgtttaacccctttgcccgccgcgaagcgcaggtttcctggtcgccgctggtgttgaccaatggcctgacccagtatctggcggactacccaaatgcctgctcggaacaaattgtcagccaggcgataccgctgctgttcctgcatcgtcatccgcaaataaaggcggcctacagcgatgagcaggtacgcacgcagattaagcgaaccctaaccacgttgctatcacggcaaaataacgaaggggctataggcttatggcgttcctcgccgcaggccgatccgtttattaccccttatgtggttcagttcctgcttgaggcgcagcaggcgcaatatcctgtagatgaggcactgctgaattccgcgaatagctatctgaaaacgctggcggctaacgaaggcatgaccctgctggaagatctgcgcctacgtgcattcgctgcatatctgctgacgcgtcaagggatcatcaccaccaatatgctggcggaggtgcagacgcgtctgcaaaaaaattacccgaatgcgtggcagaccgaccttagcgcgctgtatctggcggcttcttatcagatgttgaagatggataagcaggcggagctgctattgcagccggtctggaaggaactcaacgcagcgtacgatcgcagctggtggtcacggaactatttcgatccgctggtgcaggacagcactcggctgtatttgatcactcgccacttcccggaaaaaattgatcagatcccgccacaattgctggaaaatatagtgatgcgcctgaaagcgaaccgctataccacgttctcttcggcgatgagcatcctggcgctggagtactactcttcgccacaggcgattgcgcaaggcgctcagttaagcatcagcgcgaaaacccgtgatggaaaccagcaggcgattgcatcgctgaatggcattgccgcctatgggaaattcagcgccgatgcgcagaatattctgttcaacaatacctcggatcatcctgcctggtatgtcgttacccaggccggctatgaccagcaggtgccgcaaaaagcggtaacgcgagggctggagataagccgcgactacactaacgaaaaaggtgaggtcgttacgcaggtgacgctgggtgaaaagatctgggtccatgtgaagattcgcgctaatgcagtacaggggattgataatattgcgattgtcgatctgttaccgggcggctttgaggtggtacagcaaacgccggagagtgcaggagccgccagtgatgatgatacggaagccgaatggcagtcgccgctgggggctagcggctcctggcagccagagtacagcgatatccgcgaagaccgggtgcttatgtacggtagtgcctcagagaagattcaggagtttgtgtatcaaattaaagccaccaatgccggcgtctttaccgtaccgccagcctacggcgaggcgatgtacgatcgcgaaatccaggcgcaaagcgaaggcggcgggatcttaacggtcgtctccgagccggaggcggtgtcccggtaa

SEQ ID NO: 106961 - DNA, 708 bp, Enterobacter aerogenes
atgactaaaaaccgtatcccctttatcttgctgctgaacgtcgcgggcgtagccttattttgttcctggtatctaccggcaaatcacggtttctggttcccgcttgactcggctatttttcacttctttaaccagggcgtcagcaccaaccgcgcgtatgcctggctgttagccattatcaacaatcgcgcgttcgacgcctgctcgctgctggcgatgggctgtctgatgctcagtttctggatcaaagcgcagagcactgaacgccgtcgtattatccttttggggctggtgatgttgctcgcggcggtgattatcaatcaacttgcccagcatctgatgccggtacagcgcgccagcccttcgttgttctttacggatattacgaaagtcagcgacgtggtttcactgccaactaaagacgcttcaaaagatagcttcccgggcgaccacggcatgatgttgctcattttcgcctcgtttatgtggcgatatttcggccgccgggcatttatcattgcactggttatttttgtggtttttgctttcccgcgagtgatgatcggcgcccattggttcaccgatattgccgtagggtcgctcagcgcggtgctgataggcgcgccgtgggtattaatgacctcgctttccgataagttgatcgcctggtttgaccgttcgcttccgggtggaatagcaaaaaaataa

SEQ ID NO: 106962 - DNA, 306 bp, Enterobacter aerogenes
atgctctatgcggttcctcagcaaacttctgattctttgaagctcataaaaacggtgcttcaacttatagcttctcagcaagaagtttcacagcagctaaaatcaagggtttatgaagtaattagagaagcttcaactttgactgtagatagaggtgatcagctacagattcctaatcatagagaatccatctcgctagcagttgaaatacaacatactcaggctctcgcccaggtgctaaccagagtaactagcgaagatatgttagaaccaacaatggcccgaaatgtattagagcacatttaa

SEQ ID NO: 106963 - DNA, 1095 bp, Enterobacter aerogenes
atgctagcattcacacagcttatattagttcggaataaactaagggagatatcagaatctccctacttttctaaagatatgcataagtatctttctgttcttcaagaagcagtagataagttatatgaaaaacatgggacaattgctgacgaaataattacagaatgtacttttttcatcactaatgcagttaactttttcactggtagcaccacaaaaaaaataccctatgagattgtttattgcttaaatgacgcctgtaaaaagtggataagtgaagaaacacttattactacagccctatcgccagatatgcatggattttatttcagatctgtaagcaaacaatcatatgatttacttgaacagactttaggtattagtttcgaagccgaattaattcagatttcattacctgaaatgtacagaagacgaccgctatgctctacacctttatatcacgaactaggtcattttgttgattttagtaaaggtatttctgaactggccattctcaactatcgttcagttaatcaaggtacactcccgatcccgaagggaccccagggaattgttgaatgggctacattacctgatattatttggctgaatcattgtaaagaattctttgcagatcttttcagtgcacaattcgttggaaaaagtggggtggagttcttatacaaattagcaggttctcatcctgcaagtgacactcatccatcaacagaaaaccgaattaaaattgtaaacgattttttaaacaatgttaaaaacccagttgttgatatgtttaatgcggtaatttcagccttacataaacaagggaagattatttcccccagcttaacattacctttaaatttacttgatgtaaaaaccacttttgataatgtacgaccctttgtaattaataaccacaatgaaatgcatgcatttattaatagtagctggcagtatttatgtaccgaatgggaaaatccgacaggcatatggaagggattatcaaaagaatccatagaaaaaaccataaatgatttggttgaaaaatcaattcgaaacgtaatgatacttgagaaatggagtgcgcagtga

SEQ ID NO: 106964 - DNA, 633 bp, Enterobacter aerogenes
gtgaatctcctaagcaaagctgaattgatgcaatattatgaatcagcagaacctgaatcattgttcattgaacctcttctaaatataaaccaaattggtaacttcactatagatcttagacttggctacgattttttagtatccatcatgaccaggaaaccttcaatagaattatttccttctaaaaaccatgaaattcatcaaccaatcagaacattttttcaagaaacaagacgagatcttggagataggttcattgtttatccacaccaagtagttttagcaacaacattagaatatgttagcttacccccaaattgctatgctgatgtattatcacgaagtagttatacaaggcttggcctttcattaaataccatgatacaaccaggatatagaggctgtatatctttagagttatttaatcatggcaatacccctgttgaacttattgtcggttctcgcatatgccagattcgtatattccaaaacgaaactggtggtgaatatataagcaatgaatctcaaagaaaatatttcggtaatgttagaccgactgtctcagcagcagaaagtgataatgaattaactatacttgaacaaattcgagaaaatgaaatcgctaaaaaataa

SEQ ID NO: 106965 - DNA, 123 bp, Enterobacter aerogenes
atgagtttgggctggaaagtgattaatgagatgaataaaaagcaaaaaggccaccttcaggtgaccttttttcagcggtttcacatcgcatatgttgtcgttttgatgagcgatagtacgtga

SEQ ID NO: 106966 - DNA, 588 bp, Enterobacter aerogenes
gtgaaagacgactcttcaaaaattaacaactcgttcgaaaaaagtttatatgaaattggagaaagaagctcttcatacagtaaactacagcaaatactattaatttatgccgtattcggatgtattatcggtgtaatagcatttgtatatttcatcataataaaattccaaatagatctaactcagcaggaaagaattcttttattagtttctggcagtggattttctctatcacttatctcacttgttattttatttttccgccgtcagcaatataaaacaaaaactgaacgaaatagatatattaatgccatcggggagtttttatttcaatggggaagatttgaaagaattggaaaaaataaacttgaacaaaaaaacatggatttcaataaagtatctataaaatcaataatatatggcttattggaaacatccttaataacagaggatgatataattatccttgaggaatgcttacgttcacggaatgctctagtccatgcagaacaaccttttataacagaagatttaataagaatgacaaatgccatatctgaaataaataatagactagctaatagttaa

SEQ ID NO: 106967 - DNA, 327 bp, Enterobacter aerogenes
atgactaaaaatactcgtttttcccccgaagtccgtcaacgggcagtccgtatggttctggaaagtcagagcgaatatgactcacaatgggcgacaatttgttccattgctccaaagattggctgtacgccggagactctgcgtgtctgggttcgccagcatgagcgggataccgggggtggtgatggagggctcaccaccgctgaacgtcagcgtctgaaagagctggaacgtgaaaatcgtgaactgcgccgcagtaacgatatccttcgccaggcttccgcttattttgcgaaggcggagttcgaccgcctctggaaaaaatga

SEQ ID NO: 106968 - DNA, 1416 bp, Enterobacter aerogenes
atgccaacagttccaatttctatgagaaaacttaaagaaattcttaggcttaaatacggtgttggactcagccatcgacaaattggtcgtagtcttgcaatctccccttccgttgtatccagatatgctaatcgggcggctcaacttggcataaagcagtggcccttacctacaggatgggatgatacaaaactaaaacatgcgttccttcagacccaggttaagatgaagaagcactctctgcctgactgggctacagtacaccgggaactgcgtaataaatgcgtgacgctgcagctactctgggaagaatactgtgagcgtaatccaggcggtttttacagctataaccattactgccggatgtaccgtgaatggctcaaaaccacttcaccatcaatgcgtcaggtacataaagctggcgaaaaacttttcgttgattactgtggacctaccgttggcgttaccgaccctgagaccggagaaataagaactgctcaggtcatcgtagctgttctcggggcatcaagttacacatgggcagaggccacctggtctcagcagcttgaagactgggtgatgagtcatgttcgctgcttccagtggttgggtggcgttcctgaacttgttgttccggacaatctgaaaagcgccacatccagggcatgtaagtatgatcctgacgttaaccctacctaccagcagatgcttgagcattataatgtcgcagttttgcctgcgcggccacgtaaaccgaaagataaagccaaagctgaagttggcgttcaggttgttgaacgctggatcatggcccgaatcaggcatgagatcttctacagccttgcatcgcttaatcagcgcattcgggagttgctggaaagactgaataacaaaataatgcagaagttgggttattcacgtgcagaactcttcatccagcttgataaacccgcactgaagcctcttcctgaagccagttacagttacaccctggtgaagaaagtcagagttcatgccgattaccacgtggaaatcgacaaacattactactcggttccatgttcgctgttaggccagcaactggaagcatggatctccggagaactggtaagactcttcaatcaggggcaggaggttgctgtgcacccgcgcaagcgtacttatggctacagtacccgcaacgagcacatgcctgaagctcatcgacagcatgccacctggacgccagagcgtcttctggaatgggcggggcacataggcagtgaaactcatagttatgtgcttcatatactgaactctcgtccacatccggaacaaagctatcgcttctgccttggactcctgaaccttcataaaaaatacagtaatgaaccgccccgggaatcctggagactaaacttcctgagaaagaggtaa

SEQ ID NO: 106969 - DNA, 483 bp, Enterobacter aerogenes; identical to SEQ ID NO: 9805

SEQ ID NO: 106970 - DNA, 258 bp, Enterobacter aerogenes; identical to SEQ ID NO: 9804

SEQ ID NO: 106971 - DNA, 207 bp, Enterobacter aerogenes; identical to SEQ ID NO: 9803

SEQ ID NO: 106972 - DNA, 747 bp, Enterobacter aerogenes
atgacaacggataacacgaacacaacacgtaatgattcactggctgcccggaccgatacctggttgcagtcgttgctggtctggtcacccggacagcgggatatcatcaaaacggtggcactggtgctgatggttctggaccatgcaaaccgcattctgcatctggaccagtcgtggatgtttctggtcgggcgtggggcctttccgctgtttgccctggtgtgggggctgaatctgtcccgtcatacgcatatccggcaggaggccattaaccggctgtggggatgggcggtgattgcccagttcgcatattatctggccggctttccctggtatgaggggaatatcctgtttgcctttgcagttgcggcacaggtgctgacatggtgtgaaacgcgcacctggtggcgttccgcagagaccatgttgcttctggcaatgtggttgcctttctccggcaccagttacggcattgccgggctgctgatgctggcagtcagccacaggctgtaccgggcggaagacagaatggaacgtctggcgctggtcgcctgcctgctggctgttattccggcgcttaaccttgccaccagtgatgcagcggcggtggccggccttgtgatgacggtgctgactgttggtctggtgtcctgtacagggaaatcactaccccgtttctggtacggggattttttcccgacgttctatgcctgtcatcttactgtgctgggcgttctggctgtgtga

SEQ ID NO: 106973 - DNA, 228 bp, Enterobacter aerogenes; identical to SEQ ID NO: 9799

SEQ ID NO: 106974 - DNA, 399 bp, Enterobacter aerogenes
atgctgaagtttatgctcgataccaacatctgcattttcacgataaagaacaaacccgccagcgtcagggagcgttttaacctgaaccaggggagaatgtgtatcagttcggtcaccctgatggagctgatatatggtgcagaaaaaagccagatgcctgaacgtaatctcgctgtgatcgagggatttgtttcccgcattgatgttctggattacgacgctgccgcagccacacacagcggccagataagagcagaacttgcccgtcagggacgccctgtcgggccatttgatcaaatgatcgcaggtcatgcccgcagtcggggactgattattgtgactaataacacccgggaatttgaacgtgtggacggtctgagaattgaagactggagctga

SEQ ID NO: 106975 - DNA, 492 bp, Enterobacter aerogenes
atgagatgtttagcccatattgctctggtaacagtgatacagtttatcgcctgttatctggctgattgggggaatgccgaaacagtttttatgctgttcttcatagtgctatggcagggactgtttatctggttgttctctcaaatacgaaaaaaacgggatgtgtcggatgagtttaagtttagtaaaggcgtttggtatataacgatgccagtatcttccttactctctccgttattaagcctgatggtttttatcattggtacactatacgaattaaggcaagttagtggttgcataagcataaaaaaatgggggcaaaatcaactcaaagaccaatatgatgggagtgaaaagttagacttcgggggcattgaacagaccccaacgatctactataacccttcaaccggatatcctatgcatggaggctttgattcagcgggaaatacttttgggactcgttggcaggactattatgacaggcaataa

SEQ ID NO: 106976 - DNA, 1374 bp, Enterobacter aerogenes
atgccacgcattaaacctcttctggttctttgtgccgccttactgacggtgacgcctgcagcgtcagcggatgtgaacagcgacatgaatcagttctttaataagctgggatttgcttccaataccacacagccgggcgtctggcaggggcaggccgccggctatgcttacggtggctccctgtatgcccgtactcaggtcaaaaatgttcagctaatttccatgacgctgccggatatcaatgctggatgtggcggcatcgacgcctatctcggctcgttcagttttattaatggtgagcagttgcagcgttttgttaagcagattatgagcaatgctgccggttacttttttgaccttgccctgcagacaacggtgccggaaataaaaaccgcaaaagacttcgtgcagaaaatggcaagcgacattaacagtatgaacctcagttcctgccaggctgcacaggggattatcggcgggcttttcccccggacgcaggtgtcccagcagaaagtctgtcaggacattgccggtgagagcaatatttttgctgactgggcggcttcccggcagggatgtaccgttggcgggaaatctgacagtgtcagggataaagccagcgacaaggataaggagcgggtgaccaaaaacatcaacatcatgtggaatgcgctttccaaaaacagaatgtttgacggcaacaaagagctgaaagaatttgtgatgacgctgaccggctcactggtgtttggtcccaacggcgaaatcacaccgctgtcagccagaaccactgaccgctcaattatccgggccatgatggaaggcggcacagcaaaaatttatcactgcaacgattctgataaatgcctgaaagtggtggcagacacaccggtgactatcagccgggataatgcactgaagtctcagattactaaacttctggccagcattcagaacaaggcggtcagtgacacgcctctggatgacaaggaaaaaggctttatttccagtaccaccatccccgtcttcaaatacctggttgacccgcagatgctcggagtttccaacagcatgatttaccagctgacggactatatcggttacgacatcctgctgcagtacattcaggagctgatacagcaggcccgggcgatggtggccacgggaaattatgacgaagcggttatcggacatattaacgacaacatgaatgatgccacccggcagattgcggcgtttcagtcacaggtgcaggtacagcaggatgcgctgctggttgtcgatcgtcagatgagctacatgcgtcagcagctttccgcccgcatgctcagtcgttaccaaaacaactatcacttcggagggagcacgcggtga

SEQ ID NO: 106977 - DNA, 381 bp, Enterobacter aerogenes
atgagagaaaataaaagtaatcctgagctcaaaatcagaagtacagaacgagattataaatacatttccagaattactggcaggtatgctgggttgtctctggtattcctgactgccggaattgttttatggacagttatggatattatttttgatgcctgtattgattcgtggaaagcggacccggaattaaataattcgagttatatgtggaatatcctgatatatgccattccgtatgcgttatatgcgcttgcagccgggtttcttgttacatttttttctgtccccaatgtacgaattaatatacggaaatatcgagatattcctgctgaaatgtcgtatgcaccgggagaacacattaagggagggcaagaatga

SEQ ID NO: 106978 - DNA, 315 bp, Enterobacter aerogenes
atggaaaagcgatcttttaaagaaaaactggaaataatcagaaacataataagagagtcgttaccgggaaatgcggcaattattgcgctgatatatgcagcatcacattcattaccggtcaatgccttccctgactatcttgtaataagtttattaagtatcgcagcaggcatcgttgtattatggttattttcaattatctatatttatttttgtgagctattcagaagccactggattgcggtatggtttatcatatggtcttcagtaatcaacctcattattttgtatggtttttatgaccgttttatatga

SEQ ID NO: 106979 - DNA, 348 bp, Enterobacter aerogenes
atgagtgaagattatttgaaaatgtttacaggtgttgttctgttaatatttgtcattattgccggttatttcttttctgagcgtaatgacaggaaaatgtttctcctgagctcactggttttccttgttattaatatcgcgtgtttatatgtgcttaccgccagtctctggtttctgtgtggtgcaattatgagtcagggcgcagcactggttgtttcaatagttgcggccgcattaccggacgttacgagcttcgacaggttcagaagaatatttatctgtattgtgttgtcatcggtatggtccggagtgatgtggttttttataagggggcttatgacaggctaa

SEQ ID NO: 106980 - DNA, 1809 bp, Enterobacter aerogenes
atgaaacgtattttacctctgatactggctctggttgccggcatggcacaggctgacagcaacagtgattaccgggccggttctgattttgctcaccagatcaaagggcagggaagcagcagtattcagggctttaagccacaggagagtatccccggctataacgcgaatccggacgagacaaaatattacggtggcgtgactgccggcggggatggcggcctgaaaaatgacggcaccacggaatgggcgaccggtgaaaccggaaaaaccattacagagtcattcatgaacaagccgaaagacattctttcaccggatgcaccgtttatccagaccggcagggatgtggtgaaccgggctgacagcattgtgggaaacaccgggcagcagtgcagtgcgcaggagattagcaggagtgaatacacgaattacacctgtgagcgggatttacaggtggagcagtactgcacacgaactgcccgtatggagctgcaggggagtaccacatgggaaacccggacgctggagtatgaaatgagtcagctacctgcacgtgaagtgaatggtcagtatgttgtctccattacctctcccgttaccggtgaaattgtcgatgcgcattacagctggagtcgtacttacttgcagaagagtgtacctatgacaattacagtactgggaaccccactgagctggaatgccaaatactcagcagatgcctcatttacaccagtacagaaaacactgactgccggtgtggcttttacgtcatctcaccccgtccgggtcgggaatacaaaattcaaacgtcatacggcaatgaagctgcgtctggttgtcagggtaaaaaaagcctcgtacaccccgtatgttgtctggtctgaaagctgcccgttcagcaaggagcaggggaaactgacaaaaacagaatgtacggaggctggcgggaacaggacgctggtgaaagacggtcagtcatacagcatgtaccagagctgctgggcataccgggacacgtatgtcacgcagtcagcagacaagggaacctgtcagacctacaccgacaatcctgcctgtaccctggtgtcacaccagtgtgccttttactccgaagaaggtgcctgtctgcatgaatatgccacgtactcctgtgagtcaaaaacatccgggaaagtgatggtctgtgggggagacgtattctgtctcgatggcgaatgcgataaggctcagagcgggcagagtaatgattttgccgaagccgtttctcagctggcggcactggccgcagcaggtaaggatgttgcggcgctgaacgggggggatgtccgtgctttcaccggtcaggcgaaattttgtaagaaggctgcagccggatacagcaactgctgtaaggacagcggctggggacaggatatcgggctggccaaatgcagcagtgatgaaaaggccctggctaaagcaaaatcaaacaaactgaccgtcagcgtcggggagttctgttcgaagaaagtgctgggtgtctgtctggagaaaaaacgcagctactgtcagtttgattcgaagctggcgcagatagtccagcagcaggggcgcaacggtcagttgcgtatcagttttggtagtgcgaagcatcctgactgtcgggggattacggttgatgagctgcagaaaattcagttcaacagactggatttcactaacttctacgaagacctgatgaataaccagaaaatcccggacagtggcgttctgacgcagaaagtgaaagagcagattgctgaccagctgaaacaggcaggacagtaa

SEQ ID NO: 106981 - DNA, 252 bp, Enterobacter aerogenes; identical to SEQ ID NO: 5331

SEQ ID NO: 106982 - DNA, 198 bp, Enterobacter aerogenes; identical to SEQ ID NO: 5330

SEQ ID NO: 106983 - DNA, 366 bp, Enterobacter aerogenes
atgaatgctgttttaagtgttcagggtgcttctgcgcccgtcaaaaagaagtcgtttttttctaaattcactcgtctgaatatgcttcgcctggctcgcgcagtgatcccggctgctgttctgatgatgttcttcccgcagctggcgatggccgccggcagcagtggtcaggacctgatggcaagcggtaacaccacggttaaggcgaccttcggtaaggactccagtgttgttaaatgggttgttctggctgaagttctggtcggtgctgtcatgtacatgatgaccaaaaacgtcaagttcctggccggttttgccatcatctctgtatttattgctgtgggtatggccgtcgttggcctctga

SEQ ID NO: 106984 - DNA, 690 bp, Enterobacter aerogenes
atgtatccgatggatcgtattcaacaaaaacatgctcgtcaaatagatctgctggaaaatctgacggcagttattcaggattatccaaatccagcctgtatcagggacgaaactggaaaatttattttttgcaatacgctgtttcatgagtcatttcttacacaagatcaaagtgctgaaaaatggcttctgtcgcagagagatttttgtgaattgatctctgtcacagagatggaagcatacaggaatgagcatacgcatcttaatcttgtagaggatgtttttattcagaacagattctggacaatatctgtccagtcatttcttaatggacacagaaatattattctgtggcaattttatgatgctgctcatgttcgtcataaagacagttataatcaaaaaacgattgtcagtgatgatatcagaaatataatcagaagaatgagtgatgattcttctgtatcatcatatgtaaatgatgtcttttacttatatagcaccggaatcagtcataatgctatagcaagaatattaaatatatccatctccacatcaaagaaacacgcatctctgatatgcgactacttctctgtttctaataaagatgagttaattatcttactctacaataaaaagtttatttattatttatacgagaaggctatgtgtatcataaatacgcgttaa

SEQ ID NO: 106985 - DNA, 384 bp, Enterobacter aerogenes; identical to SEQ ID NO: 5266

SEQ ID NO: 106986 - DNA, 981 bp, Enterobacter aerogenes
atgaatattgcaatcatcggcgcgggtcctgccggcatcatttctgcccgtaatgcgattaaagcaggtcactccgtggttctgtttgagaagaatacccgaattggggagatctggaacccctggagtggtggcgcttaccgtaatgcctgtatgcagaactctcgttatacatttcattatactggctttccccctggcgatatcgatgaatttctaggagtggaacaggtattcagatatctttcggccgtggccggagaggatgccctccgtgagtcgatccgactgaatactgaagttgtttcactcagaaaagacgccggacaccgggtgatccgctgcgcttctgaaggaaaagacacggaagacatttttgaccgggtcatcattgcaacaggtgaactctggcaaccccgccggccccccctgccaggtgaggaaaacttctccggaacgttgatcacgtcgagagattatcaggagccagaggcatttaaaggaaaaaatatcctcatcattggcggcggtgtcagcggtgcggatattgcctcagaccttgttccctttgccagaagcgtaagtctgtccgtcaaaaagatgggactttatctgccgagacaattcccgactggcccgaatgacatgatgcactcctatctgggcaggtgtctgctgagccaaatgaattatgaagattttatcggttatctcgacaccatgatgcctgactacatgcaggcctaccgagcatccagtctgttgcccgacatggcgaacaataacgcggtgcatgttaacgaaaaaatcataccgaatgtggccgccggtctgataaaagttaaaccccaggcagagcgtttcaccggagaaggcgctattaagttcgtcgacgcatctcaggaaaaatatgatgtaataataacctgtacaggctatgaaatgcctgattactcgttcattcgtaagcgtacagcctga

SEQ ID NO: 106987 - DNA, 270 bp, Enterobacter aerogenes; identical to SEQ ID NO: 5016

SEQ ID NO: 106988 - DNA, 2097 bp, Enterobacter aerogenes
atgactaacaggaatttcagacaaattataaatctgcttgatttgcgctggcaacgtcgtgttccggttattcatcagacggagaccgctgaatgtggactggcctgcctagcaatgatatgcggtcattttggtaagaatattgacctgatatatcttcgccggaagtttaatctctctgcccgtggagcaacccttgcaggaatcaatggaatagcggagcaactggggatggccacccgggctctttcactggagttggatgaacttcgagtcctcaaaacgccgtgtattctccactgggatttcagtcacttcgtcgttctggtcagcgtaaagcgtaaccgttatgtactgcatgatccggccaggggcataagatatatcagccgggaggaaatgagccgatattttacaggcgttgcacttgaggtctggcccggaagtgaattccagtcggaaaccctgcagacccacataagtcttcgttcactgattaacagtatttacggtattaaaagaacgctggcgaaaattttctgtctgtcagttgtaattgaagcaatcaatctgctaatgccggtggggacacagctggttatggatcatgctattcctgcgggggacagagggctactgacgctaatttctgctgctcttatgttttttatattactcaaagctgcaacgagtacgctgcgcgcatggtcttcactggttatgagcacgctcatcaatgtacagtggcagtcggggctgttcgatcatcttctcagactaccgctggcgttttttgaacgccgaaaattaggtgatatccagtcacgttttgactcccttgacacattgagggccacatttaccaccagtgtgatcgggttcataatggacagcattatggttgtcggtgtttgtgtgatgatgctgttatacggaggatatctcacctggatagttctctgctttaccacaatttacatttttattcgactggtgacatacggcaattaccgacagatatcagaagaatgtcttgtcagggaggcccgtgccgcctcctattttatggaaacattatatggtattgccacggtaaaaatccaggggatggtcggaattcggggagcacactggcttaatatgaaaatagatgcgataaattcgggtattaagctaaccaggatggatttgctcttcggaggaataaatacctttgttaccgcctgtgatcagattgtaattttatggctgggagcaggccttgtgatcgataatcagatgacaataggaatgtttgtagcgtttagttcttttcgtgggcagttttcggaaagagttgcctctctgaccagttttcttcttcagctaagaataatgagtctgcacaatgagcgcattgcagatattgcattacatgaaaaggaggaaaagaaacctgaaattgaaatcgttgctgatatggggccaatatccctggaaaccaatggtttaagctatcgttatgacagtcagtcagcaccgatattcagtgctctgagtttatctgtagctccgggggaaagtgtggctataactggtgcttccggtgcgggaaaaaccacattaatgaaagtactatgtggactatttgaacctgatagcgggagggtactgataaatggtatagatatacgccaaattggaataaataattatcaccggatgatagcctgtgttatgcaggatgaccggctattttcaggctcaattcgtgaaaatatctgtggttttgcagaggaaatggatgaagagtggatggtagaatgtgccagagcaagtcatattcatgatgttataatgaatatgccaatgggatatgaaacattaataggtgaacttggggaaggtctttctggcggtcaaaaacagcgtatatttattgcacgagccttataccggaaaccaggaatattatttatggatgaggcaaccagtgctcttgattcagagagtgaacatttcgtgaatgttgccataaaaaacatgaatatcaccagggtaattattgcacacagagaaacaacgttgagaactgttgatagagttatttctatttaa

SEQ ID NO: 106989 - DNA, 1275 bp, Enterobacter aerogenes
ttgtttcgccaggatgctttagaaaacagaaaaatgaagtggcagggacgggcaatattacttcccggaataccactgtggttaatcatgctgggaagcattgtgtttattacggcatttctgatgttcattattgttggtacctatagccgccgtgttaatgtcagtggtgaggtcacaacctggccaagagctgtcaatatatattcaggtgtacagggatttgttgtcaggcagtttgttcatgaagggcagttgataaaaaaaggggatcctgtttatctgattgacatcagtaaaagtacacgcaatggtattgtcactgataatcatcgccgggatatagaaaaccagctggttcgtgtgaacaacattatttcccgtctggaagaaagtaaaaaaataacgctagataccctggaaaaacaacgtctgcaatacacagatgcgttccgtcgctcatcagacattatacagcgtgcagaggaagggataaaaataatgaaaaataatatggagaattacagatactatcagtcaaaaggactgattaataaagatcaattaactaaccaagttgcattatattatcaacaacaaaacaaccttctcagtctgagcggacaaaatgaacaaaatgccctgcagataaccactctggagagtcagattcagactcaggcagcagattttgataatcgtatctatcagatggaactgcaacgactcgaattgcagaaagaactggttaacactgatgtggaaggcgaaatcattatccgggcgttgtctgacgggaaagttgactccctgagtgtcactgtagggcaaatggtcaataccggagacagccttctgcaggttattcctgagaacattgaaaactattatcttattctctgggtcccgaatgatgctgttccttatatttcggctggtgacaaagtgaatattcgttatgaagccttcccctcagaaaaatttgggcagttctctgctacggttaaaactatatccaggactcctgcgtcaacacaggaaatgttgacctataagggcgcacctcaaaatacgccgggtgcctctgttccctggtataaagtcattgcgacgcctgaaaagcagataatcaggtatgacgaaaaatacctccctctggaaaatggaatgaaagccgaaagtacactatttctggaaaaaaggcgtatttaccagtggatgctttctcctttctatgacatgaaacacagtgcaacaggaccgatcaatgactaa

SEQ ID NO: 106990 - DNA, 183 bp, Enterobacter aerogenes
atgatggagatattctggaccatgctggccagccaggacaggaagcgcattcgtgagtacattgcggagcagaacctgatagccgccattgaactggacgaacggattggttgttcagccagcctcctgttctccctttcttttatcagtgtacaggtgcatgacaacataatcacggtatga

SEQ ID NO: 106991 - DNA, 1035 bp, Enterobacter aerogenes
atgcagtcagctagtaaattaatctaccgcgggaagttgcttggcagtttacccactgtgggcgagattcataaagaaatcgcagtatcggaagaaaccgtaacatggatctctctgcaacgagatattatagcgaatattttgctgggaaaagatcctcgcttacttgtgattgttggtccatgctcaatccatgacgttcaggccgcagttgattatgcgaagcgattgttcgtattacagaataagtacttatcgaaaatgtacattgtaatgcgcacttattttgagaaacctcgaacccgtaaaggctggaagggaataatgcacgatcctgatctaaatggaagttatgatgttgagaaagggatacgatatgctcgccagtgtttgtcttcaatcacaacgatgcgtgtcgcaaccgctacagaattcctcgatccttttcttactccctatattgctgatttaatatgttggggtgctattggtgccagaaccactgaatcacaaacgcatcgtcaacttgcgtctggtttacattgtccagttggatttaaaaacagtactgatggaaatattaacttagctattgacgctattattgcagcccgtgaacaacatattgtatatatgacatctttaacaaatagtatatctacactattaaccgatggcaatccacatggacatctaatattacgtggaggtagagaacctaactatggtttgtctgatataactaaggcagtgaaattaatgcatgatgagggcattaaccatcgtctgataattgattgtagccatggtaatagcggtaaagtggctaaacggcaaatttccgttgcacgtcaagttatagataatcggaaaaaaataccaggatatgtagctggcattatggtggaaagctttttacaagatggaaaacaatccgatagttttccgctagagtatggtcagtctgttactgatgaatgcatatcatggcaacagacagaacaattattatcaactctggcagcacagctttaa

SEQ ID NO: 106992 - DNA, 957 bp, Enterobacter aerogenes
atgtatgcccgcgagtatcgctcaacacgcccgcataaagcgattttctttcatctttcttgcctcacccttatctgtagtgcgcaagtttatgcgaagccggatatgcggccactggggccgaatatagccgataaaggctccgtgttttaccatttcagcaccacctctttcgactctgtcgatggcacacgccattatcgggtatggacggccgtgccgaatacaaccgcaccggcatcgggttacccgattttatatatgcttgacggtaacgcagttatggaccgcctggatgacgaactgctcaaacaattgtcagaaaaaacaccgccagtgatcgtggctgtcgggtatcagaccaacctccctttcgatctcaacagcagggcttacgactatacgccagcagcagaaagcagaaaaacagatctccactcagggcgttttagccgtaagagtggtggcagcaacaacttccgccagttactggaaacgcgtattgccccaaaagtggaacagggactgaatatcgatcggcaacgccgcggcttatgggggcactcctacggcggcctcttcgtgctggattcctggctgtcctcctcttacttccggtcgtactacagtgccagcccgtcgttgggcagaggttatgatgctttgctaagccgcgttacggcggttgagcctctgcaattctgcgccaaacacctggcgataatggaaggctcggcgacacagggtgataaccgggaaacgcatgctgtcggggtgctgtcgaaaattcataccaccctcactatactgaaagataaaggcgtcaatgtcgtattttgggatttccccaacttgggacacgggccgatgttcaatgcctcctttcgccaggcactgttagatatcagtggtgaaaacgcaaattacacagcaggttgtcatgagttaagccactaa

SEQ ID NO: 106993 - DNA, 1230 bp, Enterobacter aerogenes
atgctgaacatgcaacaacatccctctgctatcgccagcctgcgcaaccaactggcagcgggccacattgctaaccttactgacttctggcgcgaagctgagtcgctgaatgttcctcttgtgacgccagtcgaaggagcggaagatgagcgagaagttacctttctgtggcgcgcccgacatcctctgcagggcgtttatctgcgtctgaaccgggtgacggataaagagcacgtagaaaaaggaatgatgagcgcccttcccgaaacggatatctggacactgacactgcgtttacccgcaagttactgcggctcctattcgctgctggaaatcccccccggcactacggctgagacgattgcactgtccggaggccgtttttccaccctcgccggaaaagccgatccgctaaacaaaatgccggagatcaacgttcgggggaacgcaaaggaatcagtgctgacacttgataaagctcccgccctgtcggaatggaacggcggcttccacaccggacaactgcttacctccatgcgcattatcgccgggaaatctcgccagattcggctctatattccggatgttgatatttctcagcccctcgggctggtcgtgctgcccgatggtgaaacctggtttgatcaccttggcgtatgcgcggcaattgacgccgccataaataacgggcgcatcgtgcccgtggctgtactgggcattgacaacattaatgaacatgaacgcactgagatactcggcgggcgcagcaaactgataaaggatatcgccggacatctgctgccgatgattcgcgctgaacaaccgcagcgtcagtgggcagaccgttcgcgcacagtgctggccgggcagagcctcggcgggatcagtgcgctaatgggggctcgttacgcaccggaaacgttcggtctggtgctcagccactctccttcaatgtggtggacgccagaaagaaccagtcgaccaggcttgttcagcgaaaccgatacctcatgggtgagtgagcatctgctttctgccccaccgcagggcgtacgtatcagcctgtgcgtgggatcgctggaaggttcgacagtgcctcacgttcagcagcttcaccagcggctgattaccgctggcgtcgaaagccattgcgcaatttacaccggtggtcacgattacgcatggtggcgcggtgcactgattgacgggattggtttactacagggttga

SEQ ID NO: 106994 - DNA, 3660 bp, Enterobacter aerogenes
atgcctgcgaatcacactcccacaccggctcagtcatggatagttcgcctagcgcgcgtgtgctgggaacgtaagaaacttagtgtcatcgtggtggtagcgtcagtatcgactattttgctggctgcgctgacgccactgctgacaagacaggctgtgaatgacgcactggcgggcaatccggcccgcctgccgtggctggcctgcgggttactgttgatcgctttttttgatttcatcggtaactatgtgcgccgtggttatgccgggatgctctcactctgggtgcagcataccctcagaggacgggtattcgacagtattcagaaacttgacggcgcaggccaggatgcgctgcgcaccgggcaggtgatttcacggaccaacagcgatctgcagcaggtgcataccctgctgcagatgtgcccggtgccgctggcagtgttcacttattacattgccggcattgccgtgatgctgtggatgtcccctgccatgacgcttatcgtcgtgtgcgtactggtatgcctggcgatcaccgcgcttcgtgcgcgtcgtagggtcttcgcgcaaaccgggctggcctcggaccaactggcgaatctcaccgaacatatacgcgaggtgctggcacagatctcagtggtaaaatcctgtgtggcagagatgcgtgaaacgcactggctcgataggcagtcgcggcagattgtgcgtgtacgcatcggtgcggttatctcgcaggcgatgcctggggccaccatgctggcgctaccggtgctcgggcaaatcgtcctgctgtgctacggcgggtggtcggtcatgcacgggcggatcgatctcggtaccttcgttgcattcgccagcttcctcgcgatgctgaccgggccaacccgcgtactggcatcgtttctggttatcgcacagcgcactcaggcgtccgtggagcgggtgtttgcactgatcgacacccgttcacagatggaggacgggacggagtcgattaacagtcaggttgtcggactggaactggagaatatgagctttgactaccaccatggcgacagacatatcctcagcgatatctccttttccctgcgcgccggtgaaaccgtggcggtggtgggcgcatcgggttcaggaaaatcgaccctgttgatgctgctggcgcgtttttatgatccctgctccggaaagatatggctcaacaccagcgaaggccgacaaaatcttcgcgatatcagactggaggcgcttcgtcgccgggtaggcatcgtatttgaagatgcttttctgtttgccggtacggtggcggaaaatatcgcctatggccaccctcaggcaacggcggacgacattcgccgtgcggcagctgctgcaggagccagcgattttatcaacgccctgccgaaaggcttcgatagcctgttaaccgaacggggtacgaatctttccggcgggcagaggcagcgaatagcgctggcgcgggcgctcattactgcaccggacgtgttaatcctggatgataccacctcagcggttgatgctgttacggaagcggagattaataccgcgctgggtcgctatgctgacgaagggcatatgctgctggtgattgcccgacggcgttcaacacttcagctagccagccgggttgtggtgctggataagggccgtatggtggataccggaaccccggcagaacttgaagcgcgctgtccggcgttccgcgcactgatgaccggcgacagcgattttctggccacgtcccacaatagccacaacgaattgtggccggctgaaccagcgacacaagacgatgtaacggatacgggggataaaggttttgtcgcccgtatgacccgcgtaccggaaaatgcagtacagcaggcgctggccggtaaaggccgcaaagtcacgtcactactgaagcctgtggcgtggatgttcgtcatcgccgctctgctgatcgcactcgattctgcggcaggcgtaggggtgctgatactgttgcagcacggcattgactccggtgtcgccgcaggcgatatgtcgaccatcggcctctgtgccctgctcgccctgagcctggtcattgtgggctggtgcagttattctctgcagacggtcttcgccgccagagcggcggaatcagttcagcattcggtgcgcttgcgcagcttcggccatatgctgcgtcttggactcccctggcatgaaaagcatgccgattcgcgtcttacccgcatgaccgttgatgtggactctctcgcccgctttctgcaaaacggccttgccggtgcggccaccagtctggtgacgatgttcgcaatcgccgccaccatgttctggctcgacccgttcctggcgctgacggcattaagcgcagtgccagtggccgcactggcaaccatgatttatcgccgcctcagtacccctgcttatgcacaggcacggctggaaataggcaaagtcaacagcaccctgcaggaaaaagtctctggcatgcgtgtcgtgcaatcgcatggtcagcaggaactggagggcgcccggctgcgcgcgttatcggagcgtttccgcgcaacccgtgtgcgagcacaaaaataccttgcagtctattttccgttcctgacattctgcaccgaggcctcctatgccgctgttctgttagtgggagcttcgcaggtcgccgctggagaaatgactgccggggtactggcggctttcttcctgttgctggggcaattctatgggccagtgcagcagttatcagggattgtcgacgcctggcagcaggcgacagccagcggcaaacatattgatgaactactggcgacagaaggcactgagaacctcggctcctcttcggtcctccctgtcaccggtgcactgcatcttgatgaggtcacgttcagttatcccgacagtcacgagccagctctgaacaaacttaccctgacgatcccagagggaatggttgttgcggtcgtcggtcgcagcggtgcgggtaagtcgacgctgattaagctgattgccgggttgtatttccccacgcacggcaacatcagaatcggtgtgcaaatgctcgatgatgcctcgctcgctgagtatcgtcgccagattgggcttgtcgatcaggatgtagcactgtttagtagtgatattgcagaaaacattcgttattcacggccatccgccaccaatgaagacgttgaaattgcctcacagcgggcagggctgtatgagatggtgtgcaatctgccgcagggattccggacaccagtgaataacggcggagccgatctgtccgcaggtcagcgccagttgattgcgctgtcccgcgcgcaactggctaatgctcacatcctgctgctcgacgaagccacgtcatgtctggatcgcacatccgaagaacgactgatgtcatcgttaacagatgtcgtgcatgccgggaagcactcggcgctgattgttgcacatcgtctgaccaccgcgcaacgctgcgatctgattgccgttattgataaggggttacttgcggaatacggaacccacgaacagctgttatctgcgggcggcctctatacccgcttatggcatgacagcgtcagcagtactgcgctccatcgccagcacaacatgaaggaggaaaccccgggatag

SEQ ID NO: 106995 - DNA, 561 bp, Enterobacter aerogenes
atggacgccattgagctcagaatgggtgaaatgcgtcgctatatcattaccatgatcgacgaacacagcgattacgtactggcgctggctgtgccgtcgctcaacagtgatatcgtcaatcactttttcagccgtgcagcccggctgttccctgtcggtatcagccagatcatcacagataacgggaaagagttcctgggaagctttgacaaaacgctgcaggaagccgccatcaaacacctctggacctatccctacacgccaaaaatgaacgctatctgtgaacgttttaaccgggcattaagagagcaattcattgaatttaatgaaattttactctttgaggatctggcgttgtttaacctgaaactggcggaatatctggcgctgtataacagcaaaagactccacaaggcgctcgcactaacgacgcccgtggaatatattttaaaagagaacaaaaattgcaatatgtggtggacccatacacagcaaacgcacaggccgccccggttgggtagatatgtgggatggctggttcagacttcaggatatggttga

SEQ ID NO: 106996 - DNA, 291 bp, Enterobacter aerogenes; identical to SEQ ID NO: 22960

SEQ ID NO: 106997 - DNA, 300 bp, Enterobacter aerogenes; identical to SEQ ID NO: 84330

SEQ ID NO: 106998 - DNA, 1194 bp, Enterobacter aerogenes; identical to SEQ ID NO: 5196

SEQ ID NO: 106999 - DNA, 867 bp, Enterobacter aerogenes
atggctataaatgacgccggaatgttcaccgtgaaagaaatcaatcgcctcaaaatccttcaggatgtcatcgatcgcaatatccgtcctggacaggctgccgaaatgctgggcatcacgccacgtcattgcagccgtctgctcaaacgttatcgccagtatgggccgcttggcatgaacaaccagagtcgtggccgcactggtaaccgtctgttgccagcgtcactgacagatcaggcactcagtataatccgggagcactaccgtgattttggccccacgctagcgcgggaaaagctggaggaagttcacggtctggtccttggaaaggaaaccatccgacgtctcatgataaaggccggactctggattccccgcagacaacgcgcaccgaaaattcatcagcctcgttaccggcgtccttgtactggcgagctgatacaaattgatggctgcgaccaccactggtttgaaaaccgggggcgaccctgttctgccctggtctatgttgacgatgccaccagtcgcctgatgcacctgctgtttgtgaaatctgagtccacatttacctattttgaagctacacgtggctatatcgagaaatacggtaaaccgatgatcctctacagcgataaagccagcgtattcagagtcaataataagcacgccaccaccggccccggcgaaacccagtttgccagggccatgcgctgccttaatattactcctttgtgtgctgaaaccagccaggcaaaaggccgcgttgaacgtgctcatttgacacttcaggaccgactcgttaaggagctcaggcttaaggggatctgtacaatagaagcggccaatgcatttgcagaaggattataa

SEQ ID NO: 107000 - DNA, 387 bp, Enterobacter aerogenes; identical to SEQ ID NO: 12817

SEQ ID NO: 107001 - DNA, 942 bp, Enterobacter aerogenes
atggcaattattaatatttattctaagagacaaagaaaaattcgtggcgaagtaaatgacgtatatcaatataacaatattccacatgcactcagggtgcaaattattaaaataataactgattctatcggcttcccctcttctaatgaacgctacacatcgtatagaaatgaagctgacaaagtatatgcatatatccatgagatactttctaaggaatatggtgttttttctttgaaggaatttgcaaagaatgactttgacgctcttgtcgactttttccttaaagagagaaatacagagaaatgcctagatttcatagaaatatgcttccagatactagtgagccacgttgcgaaaaaccattatgaattcaaagacataacaagtcaaagtcctggagatgcagttattgaactaaatgaaaggtttagagaacatggggttggttatcagtttgaatctgaagagataataaggatagactctcaattgattcatgctgatgtcgtaaagccaaccctgattcttttaagtggagaacccttgtttgaaggcgccaatgatgaattccttgctgcgcatgagcattacaggcataagcgttataaagaatgtctaaatgattgtctgaaatcatttgaaagtataatgaaagcaatacatgataagaataactggaaatatagtcctaatgatacagcatcaaaactaataaatagctgtttaagtcaaaatttaattccggcatatttacaaagccagttcacaagtctgaaaacaatgctggaaacaggaattccaaccatcagaaacaaaaatgcaggtcatgggcaaggagctgatattaaagaggttccggaagaattggtaagctatatgcttcatcttactgctacaaatttactatttctcttaaaatgcgagaagaacattaagtga

SEQ ID NO: 107002 - DNA, 1308 bp, Enterobacter aerogenes; identical to SEQ ID NO: 5199

SEQ ID NO: 107003 - DNA, 1941 bp, Enterobacter aerogenes
gtgaaaaaacttattgagttaaaaggggttagccgaacttatggcaacggagatcaaacgcggaccgtcctgaaaaatgtcgatttgacaatcgttgctggagaaatggtggcaatcattggagcctctggctcaggcaaatcaaccttaatgaacataatgggttgccttgacgtacccaatagaggtgattactacatcgacggacaaaatgccgcctgtctttcacccgatgagctggctagagtgcgccgggaacacattggctttatattccagcgctaccatttgatacctgatcttagcgcacttggtaacgtggagatcccggccatttacgccaacagcgaacgcgacagccgtcggcaacgtgcaacggcgttgctgggcagactgggactggaaggacgtgagcatcataaaccttgcgaactttcaggcggtcagcagcaacgcgtcagtattgcccgagcactgatcaacggtggaaagataattttggcggatgagccaactggtgctctggattcgcaatccgggcaagaagtgttagccattctgaatgaacttaatcgacgtggtcatactgtagtaatggtgacccacgatatgaaggtcgcccggcacgcaaagcgaatcattgagctgtgtgatggcgaaatcatcgctgatagtggaggttgcgtatctgcgacggaaacactaccaaaaaccaacagaatccggcaaagctattggaaaacactgctcgatcgaacgcgtgaatcgatgcaaatggcgctaaaagcgatgaagacgcatcgcttacgcaccacgcttaccatgatcgggattgtttttggtatcgcctccgttgtcactgttgtggcattgggtgaaggagccaggcaagaaacactggaagagattaaaagtctggggacaaacgtggtcagcatttatcccgggcaggatttgttcgatgacagcattgagagtattagaacattggtacctgctgacgcaaatgcactggcgaagcaagggtttatcgatagcgtcagcccggaagttagcgcttcagacaacattcgttttctgggtaaatctgcgatagcgtccattaacggcgttgggcgggaacatttccgggtaaaaggtattgagttgttgcaagggactacttttagagacgatcgcaacgctctacaggaagttattatcgatgagaatactcgtaaggccattttcgacaacacagggttacaggctctggggcaaatagtctttcttggttctgtaccagcacgagtggttggcatcgctaaaagtaacaaccgtagtgatgcatcaaatcgcattactgtgtggatgccttacagcacggtgatgtaccgtattgtgggtaaaccagttctgaccggtattagcgtcaggctaaaagacaatgtggataacgaggctgcaatcagcgctatctcccaactattaacccggcgtcacggcataaaagacttccagctttataactttgaacaaataagaaagtctatcgaacacacctcaatgaccttcagtattttaattcttatggtcgcatgtatctcactaatgatcggcagtatcggggtgatgaacatcatgttgatttctgtaacggaacgaactcatgaaattggcgtacgaatggcggttggcgcgagacgcagcgacattatgcaacagtttattattgaggccgtattggtttgcctgattggtggcgcactcggtattgcactgtcgtatatcacaggtgcgctctttaacgctctggcggacgggatattcgcagctatatattcgtggcaggctgctgttgctgcatttttttgctcaaccttaattggcataatcttcgggtatctcccagcccgcaaggcagcaaggatggacccggttatttcactggccagcgaataa

SEQ ID NO: 107004 - DNA, 1182 bp, Enterobacter aerogenes; identical to SEQ ID NO: 5201

SEQ ID NO: 107005 - DNA, 291 bp, Enterobacter aerogenes
atggcttgtttactgacaaccagcatcgtttttggggattacgccgctatacaggtgtggtgcggtgatgtgacctatatctggacgggtaagcccggcggggtgatgttccacagcgatacgagcaggcagttccggcagttattgtggcgataccagatcaggcagagtatgagccggcgcggaaactgctgggataacagcccaatggaacgcttcttcaggagtctgaagaacgaatggatgccggtggtgggttacgaagcttctgcgaggccgctcacgccataa

SEQ ID NO: 107006 - DNA, 255 bp, Enterobacter aerogenes; identical to SEQ ID NO: 81011

SEQ ID NO: 107007 - DNA, 906 bp, Enterobacter aerogenes
atgagacttaaagttatgatggatgtgaataaaaaaacaaagattcgtcacagaaatgaactaaaccatactttagcccaactccccttacccgctaagcgagtaatgtatatggcgttagctccgattgatagtaaagagcctcttgaaagagggcggatctttaatattagagctgaagatcttgctagtcttgccaaaattactccttcgttggcttataggcagttgaaagaaggtggcaaaattttaggagcgagcaagatctctttgagaggtgatgatattattgctttagctaaagagcttaacctcccctttaattcaaaaaatacgcctgatgaattagacctcaatatcactgaatggattgcatattctaaggatgaaggttacttatcacttaaattcactcgtacaattgaaccatatatatcgagtttgattggaaaaaaaaataaatttactacacaattacttacggccagcctccgtctgagtagtcaatactcttcatctttgtatcagctgataagaaaaaattactctaactttaaaaagaaaaattcttttgttatttcaattgaagaattgaaagatgaactgattgcctatacttttgatggagacggtaatactgagtataaataccctgaattccctattttcaaacgagatgtacttaataaatcaattgcagaaataaagaaaaaaactgaaatatcttttatcggcgtttctgtttttgaaaaagaaggccgtaaagtaagtaagttacagtttgacttcattgttgatgaagatgagttttctggaaatggtgatgattcattgactgctttcagtgaagaagatagtgcatttctaaaagaatttgataaagcagttcctcctaaaaaaaagtga

SEQ ID NO: 107008 - DNA, 180 bp, Enterobacter aerogenes
atgaaaaagaattttatggagaaatatatttggcgtgtatatatattactgagcgtgatgagtggttatatttttaactatttttccataaaaattttagcgctgttcttcgccgcgattttttcccgcatcatcacgtggaatatgctatccacgcatcgctacgtggactatgactga

SEQ ID NO: 107009 - DNA, 2202 bp, Enterobacter aerogenes
atgatgataagcaaaaagtatacgctttgggctctcaacccactgcttcttaccatgatggcgccagcagtcgctcaacaaaccgatgatgaaacgttcgtggtgtctgccaaccgcagcaatcgcaccgtagcggagatggcgcaaaccacctgggttatcgaaaacgccgaactggaacagcagattcagggcggcaaagagcttaaagacgcactggctcagctgatccctggccttgacgtcagcagccggagccgcaccaactacggtatgaatgtgcgtggccgcccgctggtcgtgctggttgacggcgtgcgtctcaactcttcacgtaccgacagccgacaactggactctatagatccttttaatatcgaccatattgaagtgatctccggtgcgacgtccctgtacggcggcggcagtaccggtggcctgatcaacatcgtgaccaaaaaaggccagccggaaaccatgatggagtttgaggctggcaccaaaagtggctttagcagcagtaaagatcacgatgaacgcattgccggagctgtctccggcggaaatgagcatatctccggacgtctttccgtggcatatcagaaatttggcggctggtttgacggtaacggcgatgccaccttgcttgataacacccagaccggcctgcagtactccgatcggctggacatcatgggaactggtacgctgaacatcgatgaatcccggcagcttcagttgatcacacagtactataaaagccagggcgacgacgattacgggcttaatctcgggaaaggcttctctgccatcagagggaccagcacgccattcgtcagtaacgggctgaattccgaccgtattcccggcactgagcggcatttgatcagcctgcagtactctgacagcgcttttctgggacaggagctggtcggtcaggtttactaccgcgatgagtcgttgcgattctacccgttcccgacggtaaatgcgaacaaacaggtgacggctttctcttcgtcacagcaggacaccgaccagtacggcatgaaactgactctgaacagcaaaccgatggacggctggcaaatcacctgggggctggatgctgatcatgagcgctttacctccaaccagatgttcttcgacctggctcaggcaagcgcttccggagggctgaacaacaagaagatttacaccaccgggcgctatccgtcgtatgacatcaccaacctggcggtcttcctgcaatcaggctatgacatcaataatctctttaccctcaacggtggcgtacgctatcagtacactgaaaacaagattgatgatttcatcggctacgcgcagcaacggcagattgccgccgggaaggctacatccgccgacgccattcctggcggctcagtcgattacgacaacttcctgttcaacgccggtctgctgatgcacatcaccgaacgccagcaggcatggctcaacttctcccagggcgtggagctgccggacccgggtaaatactatggtcgcggcatctatggtgctgcagtgaacggccatcttcctctaacaaagagtgtgaacgtcagcgacagcaagctggaaggcgtgaaagtcgattcttatgagctgggctggcgctttactggcaataatctgcgtacccaaatcgcggcctactattcgatttctgataagagcgtggtggcgaataaagatctgaccatcagcgtggtggacgacaaacgccgtatttacggcgtggaaggtgcggtggactacctgattcctgatactgactggagtaccggagtgaacttcaacgtgctgaaaactgagtcgaaagtgaacggtacctggcagaaatacgatgtgaagacagcaagcccatcaaaagcgacagcctacattggctgggcaccggacccgtggagtctgcgcgtgcagagcaccacctcctttgacgtgagcgacgcgcagggctacaaggtcgatggctataccaccgtggatctgctcggcagttatcagcttccggtgggtacactcagcttcagcattgaaaacctcttcgaccgtgactacaccactgtctgggggcagcgtgcaccactgtactacagcccgggttacggcccagcgtcactgtacgactacaaaggcaggggccgaacctttggtctgaactactctgtgctgttctga

SEQ ID NO: 107010 - DNA, 1278 bp, Enterobacter aerogenes; identical to SEQ ID NO: 5194

SEQ ID NO: 107011 - DNA, 1743 bp, Enterobacter aerogenes; identical to SEQ ID NO: 5193

SEQ ID NO: 107012 - DNA, 948 bp, Enterobacter aerogenes
atgtctggggcaaacattgttcacagcggatatggactgcgctgtgaaaaactcgacaagcctctgaatcttggctgggggctggacaatagcgcggtgttgcactggcccggggagctgccaacagggtggctgtgcgacgcgctggatcagatatttatcgccgcaccacaactttcagcagtggttcttccctggtccgaatggtgtgaggagccacaggcgctgacgcttttcggacaggtacaaagcgacattatccatcgttccgctttctggcagttaccgttatggctgagttctccggcaaaccgggcctccggtaaaatggtttttgatgcagagcgtgagatttatttcccgcagcgccccccccgtccgcagggtgaagtttatcgtcgttacgatccacgcattcgcaggatgctgagtttccgcattgccgatcccgtttctgatgcagaacgtttcactcgctggatgaacgatccgcgcgttgagtatttctgggagcaaagtggctcactggaggtacagatcgcctatctggaacgccagctcaccagtaaacatgcattcccgctgattggttgtttcgacgatcggccgttcagttatttcgaaatctactgggcggcggaagaccgcattggtcgccactattcgtggcagccctttgaccgtggcctgcatctgctggttggtgaacagcaatggcgcggagcccactatgtgcaaagctggctgcgcggggtgacacattacctgctgctgaatgagccacgtacgcagcgcacagtactggagccacgcaccgataaccagcgcctgttccgccatcttgagcctgcgggataccggacaattaaagagttcgacttcccacataaacgctcgcgcatggtgatggcggatcgtcatcacttcttcacggaggtcggtctgtaa

SEQ ID NO: 107013 - DNA, 1725 bp, Enterobacter aerogenes; identical to SEQ ID NO: 5191

SEQ ID NO: 107014 - DNA, 1194 bp, Enterobacter aerogenes; identical to SEQ ID NO: 5190

SEQ ID NO: 107015 - DNA, 381 bp, Enterobacter aerogenes; identical to SEQ ID NO: 5189

SEQ ID NO: 107016 - DNA, 216 bp, Enterobacter aerogenes; identical to SEQ ID NO: 5188

SEQ ID NO: 107017 - DNA, 858 bp, Enterobacter aerogenes
atgatggcattattactggagccactgcagttcacctttatgagtcacgcactgctgatttcactggtagtttccataccctgtgcgctgctgtcggtctttctggtcctgaaaagttgggcactgatgggtgacgcgatgagtcatgcggtttttcctggcatcgtgcttgcctggattctggggttacctctggctacaggggcattcgtcgccggagtattctgtgcggtggcgacgggatacctgaaagacaacagccgaatcaagcaagatacagtgatggggattgttttttctggcatgtttgccgcaggtctgatcttgtatattgcagtcaaaccagacgtacatcttgatcatattcttttcggcgacatgctcgggataaccatcggcgatataatccagacggtgattattgccggactggttacacttgttattagcgtaaaatggcgggattttttgctgttcagctttgattatcaacaggcgcaggcaagcggtttgcatacgagatggctgcattatgggctgctgtgcatggtctccctgaccattgtggcgacgctgaaagcggtaggtatcattctctctatttctcttctcattgcgcctggtgccattgcggtactcctgacacaacgctttcatattgcgctcctgctggcgactggcatatcgatattggtctcaatgactggtgtctggctgtccttttttatcgacagcgcgccagctccgacaattgttgtcttattcgcggtcatgttcatcatgacgtttaccgttaccagcatcaacgcacgcacaaaggaaaatgccgaaccacgggatttgttatcatccgattag

SEQ ID NO: 107018 - DNA, 858 bp, Enterobacter aerogenes
atgaacgtgctactggaacccttcagctatgaatatatgctcaatgcgatgtgggtctcggcgatggtcggcggtctctgcgctttcctgtcatgctatctgatgctaaaaggctggtcgctgattggcgatgcgctgtcgcactctattgtcccgggtgttgcgggggcatatatgctggggcttccgttttctctgggagccttcttttccggcggactggcagcgggcagcatgctgtttcttaaccaactcactcgcttaaaagaagatgccatcatcggcctgatcttctcgtccttttttggcctggggctgtttatggtgtcattgaacccgacatccgtgaacattcagaccatcgtcctgggcaatattctggcaatcgatccggcggatatcctgcaactcactatcattggcattctctcgatcatcgtgctttttttcaaatggaaagatcttatggtgacctttttcgacgagaatcacgcccgtgctattggattgcatccgggcagattaaaaatcctcttcttcaccctgctgtcggtttcgaccgttgcggcgctgcaaacggttggtgcctttctggtgatctgtctggtggtgactcccggtgcaacagcatggttgttaaccgatcgttttccccgcctgctcatgattgctgtaactattggcagtgtgaccagtttcctcggcgcgtgggtcagttactttctggacggcgcgacaggtggaatcatcgtggtggcgcagacactgctgtttcttttagcatttgtctttgcgcccacccatgggcttttggcaaatcgtcggcgtgcgcataaagcgctggaggatcgctcatga

SEQ ID NO: 107019 - DNA, 828 bp, Enterobacter aerogenes
atgatgcaatctgcaggcattgtcgttaatgatgttactgtcacctggcgtaacgggcacacagcactgcgcgatgcatccttcacagtaccaggcggatctattgccgctctggttggggtaaacggttccggaaaatcgacgttgtttaaagcgattatgggatttgtgcgtctgaccagcgggaagatatctgttctgggtattcccacacgacaggcgctacagaaaaacctggttgcctacgtccctcagtcagaagaggttgactggtcatttcctgtactggtggaagatgtggtgatgatgggccgctatgggcatatgggtatgttgcgtatcgccaaaaagagggatcgtcagattgtcaccgatgcgctggaacgtgtcgatatggtggattttcgccatcgacaaatcggcgagctttccggtggacaaaagaaacgcgtctttctggcgagagcgattgcacagcagggtgatgtgatcctgctggatgaaccttttaccggcgttgatgtgaaaaccgaagcgaaaatcatcagcctgttgagggagttacgcgcggaaggcaaaacgatgcttgtctcaacgcacaatctcggatccgtcacgacattttgcgattatacggtcatggtcaaaggcaccgtcctggcaagcgggccgacagacaccacttttacagccgagaacctggagctggcttttagcggcgtactgcgccatgtcacacttaacggctcggaagaaagcattattactgacgatgaacgcccttttgtggcacatcgaccgtcagcggtgcagagggaagaaagatga

SEQ ID NO: 107020 - DNA, 915 bp, Enterobacter aerogenes; identical to SEQ ID NO: 14950

SEQ ID NO: 107021 - DNA, 510 bp, Enterobacter aerogenes
atgcctgccagtgagtgtgtggaacatatcttggccagtggcttggtctgtgatgtgctgcgtataccgggtgaaccgccccgccgcttgtttgaccgctatattctgcgggagttttcttggaggcacgggatgaaatccgcagcatggcggatgccctggcaaaaatccggaaatgatgacgatggcggggaaaatccccgcctttttcctgccggtccccggacagagcacaaaggaagtcgccgccggctccgctttacccggccatgcggagcatggccttgtgggggttcagttatgtggacgtcgagtcgtgtgcgggctgtgccgtgcctccatcttagccgggctggcgttgatgcaaggggcaacgccgtttcgcaaaccgcgcttcacgtcgttgcggcgggtccctgcccgttgttctgtccggtgccattcacctgtttaagcccctgtcgccgggggctgatacagccacaaccgtctccgccagtccaggggtga

SEQ ID NO: 107022 - DNA, 123 bp, Enterobacter aerogenes
atggggattctggcgctggccgaccacggccagaacccggacttttctggtctggtcatcaacatcatagaggacatgctgtcccatcagactgatccggcgaacgtcctcgccatagcgtga

SEQ ID NO: 107023 - DNA, 903 bp, Enterobacter aerogenes
ttgtcaattaaaaatataaagcgcattattacggcctggaaaccatctacattcgaaacgtacaaaaaaacttttgaaaaatacggtggtagtgtaaacatgcatccggatgttgtttcatactttatgatacatcatgactggaagtttgatttttttcactatgaaaaagatggtgatatcaaaggctcatattttctgtgcaatggaaaacaaattgggataatggcaagaaggtcttatcctctttcatctgatgaggtattaattcctttttccccacatgcaagatgtttttttccggataaaactaataaattatcaattataaataaacaaaatattatcaatgcaacatggaagatagccagaaaaaaacaaaattgtattataaaggaatctttttcacctaaatttgaaaaaactcgccgaaatgaaatccagagatttatcaggaatggcggagagattaagtgtataagccagttatccgataaagaaatatccagctcttatatatcactttttcattcccggtttggaggtaccctaccttgctacgaatatgataatctgttaatgtttatttctcacttacgagaacttatgtttggccatgtgctattctgggataataaaccgtgtgctattgatatagtactgaaatctgaaagctcatgtaatgtttattatgacgttccaaatggtgcagttctgaatgatgagaattgtatgaaactaagtccgggaagtgtccttatgtggctgaatatagataaagcacgaaggtattgtcaggataataataaaaagatgatatattctatcggtgcattcagacctgaatggaaatataaactactatggtctgttccctgtaaggttggtaaatgcttatgttag

SEQ ID NO: 107024 - DNA, 1110 bp, Enterobacter aerogenes
atgaaattgttattacttacaggtgcaacaggatttcttggtggcgcggtcctggataagctgctggataactgtaataatataaatttgctacttttagtacgagcacctactccacaagcgggactggaaagaattaaagaaaatatgcgtaaatttaatgtttgtgaggaaaggttgcatgcattaactaatgataacatcttgcctggggatctaaataatccggaagcctttctcatggatcctcgtcttgatgaagtcactcatgttataaactgtgcggctatagcttcttttggtaataatccttttatatggaatgtgaatgttacaggtacacttgcttttgcaagaagaatggcaaaagtggcaggactgaaacgcttccttcatgttggtactgctatgtcttgtacacctcatacggggtcgctagttaaggaagagtctgcttcatcagaaacaggtgaacatttagtggagtatacgcattcaaaagcaacaatagaatatctgatgcgtaagcagtgtcctgatttacctttgttggttgcccgaccatcaattattgttggccacagtcgtttagggtgcttaccttcaaccagtattttctgggtattcagaatggggttaatgttgcaaaaatttatgtgctctctggatgataaaatagatgttatccctgtagattattgtgctgatgcattgctaatgttgcttgaaagttcgttaattaatggtgagattgttcatatatcagcaggtaaagaaagtagtgtgacgttctctgctattgacgaagctgtagcccgtgctttgaactgtgatcctgttggagacagatatactaaagtcagttatgacatactggcaatgagccgtcatgattttaaaaatatttttggtccctgtaacgaacgccttatgttaaaagccattcgtttatatggagcgttcagtatgctcaatgtttgtttcagtaacgacaagctactgagtatcggaatgcctaaaccgccaaagtttactgattatattaaatactgtatagaaacgacaaaacacctttcaattcaacaacaaatggaagttgattttaaataa

SEQ ID NO: 107025 - DNA, 747 bp, Enterobacter aerogenes
atgaatcatctttacgaacaactgaccgcacttaaactcaccggcttccgtgatgcgcttaaaaagcaacttgctcagccgggcacataccaggagctgggcttcgaagaacgcctgtcattactgacagcagaagaactaacctgccgtgaaaacaggaaggcagagcgtctgatcaaacatgcacggttcagacttaatgctgagttatcaaagctggattatcgtaacaatagagggctggacagggccctcatccgttcactcagtcagggaaactggttaaccctgaaacaaaatattttactgaccggggccaccggcagcggtaaaacgttcctggcatgtgcacttggtcataatgcctgccgacagggatacaaggtctactattatcgccttaaagcgctgatggaacagtgctatcaggggcatgctgatggaagatacagcaaacttttgaccaggctgaataatagcgatctgctgcttctggatgactgggggctggaacctctctcatcagaacagcgtagcgacctgctggaaatagtggatctgatgtaccaacgaggctcaatcatcgtagtgagccagttgccggtggaaaactggtacaaaatgatcggagactccacacatgcggatgccatcctagatcgactggttcatggcagtatcaagatcgaacttaaaggagaatcaatgcggaaaatacaatctccgttgaccgaaggagatcagtga

SEQ ID NO: 107026 - DNA, 654 bp, Enterobacter aerogenes
atggtggacagggactggctggatacgagcaatcccggaacctggactgatgagagtaaacatccgaatacccgtctaaattttgctaatgaattcgacctgaatattaagggatggctcctgaatcaaccagactatcagttaggtcttatggctggttaccaggaaaatcgttatagctttacagcaaaaggaggctcttatatctatagtagtgagggaggcttccgggatgaaacgggatcatttccagatggtgaaagagctataggctacaaacaacactttaaaatgccctatatagggttaaccggtaattatcggtatgatagctttgagttcggggggagtttcaaatatagcggatgggtgaaggcatcggataatgatgagcattacaaccctgagaaaaggatcacctatcgtagcgatgtaaataatcagaactattactctgtctcactacatgctggttattatattacacctgcagctaaagtttatgtcgaaggaacatggaaccgtattactaataagaaaggtgatacttctctgtactccagaaatttgaatatatctgatcacaccaaaaatggtgcaggcattgaaagctataactttatgaccacagctggtctgaagtattatttttaa

SEQ ID NO: 107027 - DNA, 297 bp, Enterobacter aerogenes
atgacaaaaattgaaaccgttgaacagttaactgactacatcaacagcattattaatataaatcactgcgtgatgccgcttgaaaaccatggtattacctttttccttaaccatacacttaaagaaagccgggtactattacagaagaaacttaatattagtgaatggaacgattattcatatcgtaatgaagagcaaaatatattgataacattaaataatatgggaggtatgacaacctgctttgtcacggttatgtcactgcacttagaatatataaagcagtttgatcattag

SEQ ID NO: 107028 - DNA, 555 bp, Enterobacter aerogenes
atgaaaagtatttcagtttttttaccactacttatcatggtaagcggttgtgacaccccatccagcaaagtaaatatttatgcaatagtgcctgctcactcatgcgaagatacttataccttaataaaatctgaaaatactgatagtgataccatgaagttaaaaaaaagaatggactcacttgatatatatggaaaagatagtgatgtacgaatagccataaacaaagaactactatcagggcaactaaagcccaaaggacagttgcggggaggaatggagttttcattagctttcactaatgtgaagaaacaacagtcctttgaaaaagaagtaaattggcgacaatgttatatttacctttttaaaggccattttaaaaatcaaaaaataaatttcgaatgtgcagaaggaaattcattcatcgtcgaggattataaattgatccctcaatatcccaactgcgtcatggaaaaggataaagaacaaatggaacaactggaaaatatggaaaattcatatgagccaaaaattcactatcctgtgacgcaataa

SEQ ID NO: 107029 - DNA, 468 bp, Enterobacter aerogenes
atgtttgatttttctgcagaaataaaatcatttcattcgttaggcgatgtgctgttaaatacaaatatatctgtctatcttgctgaaatgtatgctgaccattgtgttgagtacaaagagtatcttctacctgatgcgagtaagagatttgcctatgtattggatgatactttaactatatcaaccgaacctgatggaaatatattttctattggatgcaatcaaaattacaaagggttatacaaaaacttattatatgccggtcaagaatttggtgaaataaaaaaactcacttatcggcaaagaatatttaatggttccattattatagacgaggattttggcattcaatttatattaccctcaccatttgatgagatagctgacagtatagataacattccgtccgacttgaaattgaatgaaatatatataggggatttttcattttggaatccatgtaaataa

SEQ ID NO: 107030 - DNA, 1338 bp, Enterobacter aerogenes
atgccacttctcaatgacctgctcgatttcagcgaccatccccttatgccgccgccttctgcacagatgtttgcagaacatctccctgctgagtggatacaacactgcctgacgctctctgagcacgccaccgtccggcgtcgccgtctgcccggtgatatggttatctggatggtcgtggcgatggcctttttccgcaatgagccgattaccgatgtggtccgccgactgaacctgagtgctgatggtgaagcgggtatgaacctgctggcccgcagcgctgtcacccaggctcgccagcgggtcggagcggctccggttgaatggctctttcgccagaccgcgcagacctggggagccgagcgctaccacaaagatgactggcagggcctgcaactttttgctgttgatggcgctcagttcagaacacctgacgaacctgaacttcgcgactattacggctcagcgaatacgtccaccacgcgccagagtgcatatccggttatgcgtctggtggccttaatgaacctgggcagtcatgtgctgctggatgcggtgaccgccccttaccggcggagtgaaatcctgctggcacagtcgatgacggcctctattccggacaactccgtcacgctgttcgacaaactgttctacagtgcagacctgctggtgacgctgaatcagcaggggaataaccggcactggctgctgccagcccgcaagaatatggtggcggaaacagaggaaagttacggttcaggagacaggctactgaagctgaaggtgtccccgcaggcccggaaaaagaatgcttcactgccggaatactggtatgcccgggcggtgacttacgaggtgaatggtgtggagaaaacggtcctgacctcgcttccggcagaccgctatcgggcaaaggatgtggcagagctttatcattcacgctgggaaatcgaagtcgggttcagaaacctgaaaagcagtcttctggataatgcgctggtgctgagaagccggaaagttgacctgctggagcaggaggtatgggggatgttactggcctataacctgatacggcgcgagacaacaagggcggcggagaaacacaggaaggcgccctcagaaataagcttcaagttcgcgttccagtttatcgcgacggaaatgatagtactgggcaatacggtatcgccgggaaccatcccgaggctgctggagcatctgcgaggaaatctggaggcggtgttcataacaaaacgcccccggcctccaaggccgagggcggttaagatgtcaaaaacccgctattcggtgaactctcatgccgctccgcttaagtga

SEQ ID NO: 107031 - DNA, 621 bp, Enterobacter aerogenes
atggcggttatgggacttgccggtgttctccggggtaaaaaggtccgtacgaccatcagccggaaagccgttgccgcaggcgaccgcgtaaaccgtcagttcgtggcagaacgacctgaccagctgtgggtggctgattttacttacgtcagcacatggcggggcttcgtctatgtggcgttcatcattgatgtgtttgccggatacatcgtggggtggcgggtctcatcgtccatggaaacgacattcgtgctggatgcactggagcaggcgttatgggcccgtcgaccgtccggcacggtccatcacagtgataaaggttctcagtatgtatcgctggcctacacacagcggcttaaggaagccggattactggcatcaacaggaagtacaggcgactcgtatgacaacgcgatggcggagagcatcaatggtctttacaaagcggaggtaatacaccgtaagagctggaaaaaccgtgcagaagtggaactggccacactcacgtgggtggactggtataacaatcgacgattgctggaaaggctgggccatactcctccggcagaagcagaaaaagcttattatgcttccatcggaaacgatgatctggcagcctga

SEQ ID NO: 107032 - DNA, 300 bp, Enterobacter aerogenes
atgtcaaaaaaatatcagccattgcttataactcattatatgtcaacatgggtcactataacggaagcagttgagatcactaccaaagccataaaacaaaaaattactcctagcgatatttatcgtcatgccttgagtggcaacatcctactatcggtctatttccagtctcctgtgatacttaagaagatacaaacttttaatggaaaaataaaattcaggcagtttgagggagacctacttgataaactatgcatgcttgacactgagagatcccctcataatttccccaaaacgtaa

SEQ ID NO: 107033 - DNA, 222 bp, Enterobacter aerogenes
atggcggcgcacagcgccttatccgggctccggttcggtagtcggttggtagccccggtaagcgtaagcgccaccggggaggggtcccggatagcggcgcacagcgccttatccgggctacggttcggtattcggttggtagccctggtaagcgtaagcgccaccggggagaattcccgcatagcgccttatccgggttacggttcggtagtcggttggtag

SEQ ID NO: 107034 - DNA, 261 bp, Enterobacter aerogenes
atgatggaacagttgcgagccgaactgagccacctgcttggcgagaagctaagccgcgtggagtgcgttagcgagaaaccctcgtcagcgctatggtcgctgtatgatgcgcagggaaacccgatgccgctgttggcgaaaagctttaccacgcccggcgtggcgcgccagctggcgtggaaaatttcgctgcttgcccgtagcggcaccgttcgtatgccggtggtatacggcgtcatgacgcttattccgcagtcgtga

SEQ ID NO: 107035 - DNA, 291 bp, Enterobacter aerogenes
gtgcgttatctcaccaagtgtctggaaaatctcaaaatcgtcgattattccccgcagcaggaaggcaaagtgttcttcggcgcgtgggtggagatcgagaacgacgatggcgataccaagcgctttcgcattgtcggctacgatgaaatcttcggccgcaaagactatatctccatcgattcgccaatggcgcgcgctttactgaagaaagaggtgggcgacctggctatcgttaacactccggcgggcgaagccagctggtacgtcaatgaaattgaatacgtgaaatag

SEQ ID NO: 107036 - DNA, 525 bp, Enterobacter aerogenes
atgcaagactgcgtatcagaaaagccaaacgtcaacttgccacagcaggctgatgaagaatccagatcttctgaagagctcgcggaagaaattgaaggggagttggtagaaaatcctgcagtactcgagcgactcctcgaaaggccacagattaagatgctcataagccagagctcgttccgtggcccccttccaccaccgtcaatgcttcgtgagtacaatgacattgtcaaagatggtgctgaacgcatcatggccagaagtgagaaagagcaagcgcatcgccatgatttacaaaataggacggtaggcggcaacatcgataaagataaacgcggtcaatggatggcgtttgttattacaattctaatattattaattgcaacattatttgcctggaagggtaatactgtttttgcaggaacattaataacaatagatctcattggacttgcgtctgtatttattatgggtagaacagttagtgctactccacgcagaccaaagaatggtgaagaagactaa

SEQ ID NO: 107037 - DNA, 309 bp, Enterobacter aerogenes
atgaaaagaatttttcttttattcatagcagttccttttttttcacaagcagagctgtctgccagttcatactacaattgcataaaagataatgtggctaagtacagcaagaccaacgagtcagctgaatctatcgcgtcggcatctgtcacttcttgtggcaatgttttgggtgaagtgttgaaaagcagcgcgcctttcatgaatgctagtgctgaagcaaaatcaaaatttattgctgatatgaaagcccaagggaaggaagctggaataaaatatgcgatggatgaaaagcttaataataaatag

SEQ ID NO: 107038 - DNA, 159 bp, Enterobacter aerogenes
atggtgctggttgaaaaaagcgatagtatgttggtacagctaaagcctgcaccggcgcttaccccttgcggagttgccgccacatcaaacgatctcactgagccaaaattaggcgagctaggcttaatcttgcaatctgcgtgtatcaagccgctgtag

SEQ ID NO: 107039 - DNA, 777 bp, Enterobacter aerogenes
atgcagatagcctggggctggcgcaccatgttcgtggttatcggccttgccgggatcgttgtgggcctgtgctggtacgcgtggtatcgcaaccgcgcgcagttcgatctgcagcaggaggagcgccagtatctggcggcgccggaaaaagcgcgcccaacgctggtattcagcgagtggctggcgttgttcaaacggcgcaccacctggggaatgattttaggcttctccggggttaactataccggctggctgtatatcgcgtggctgccgggttatctgcaggcgcagcagggattgagcctggcgaaaaccggctgggtggcggcgatcccgttcctggccgcggcggtgggcatgtgggtcaatgggctggtggtcgatgcgctggcgcgccgcggttacgatctggcaaaaacgcgcaaaacggccattgtggttggcctgacgctttctgcgctcggctcgctgctggtggtgcaatcaaactcgccgacccaggcggtggcgtttatctccatggcgctattctgcgtccactttgccgggacctcggcctgggggctggtacaggtgatggtcagcgagaataaagtcgcgtcggtggcggcgattcagaacttcggcagctttgttttcgcctcttttgcaccggtcgtcaccggttgggtggtggataccacgcactccttcaacctggccttggttatcgccgcctgcgtgacctttgccggcgcgctgtgttatttcttcatcgtaaaagaccgcatcaattaa

SEQ ID NO: 107040 - DNA, 864 bp, Enterobacter aerogenes; identical to SEQ ID NO: 91418

SEQ ID NO: 107041 - DNA, 186 bp, Enterobacter aerogenes
atgttgatatctaagacttttatcgctgtgctgtgcatcgcttctgctcttggtggtgctgttgtgtccggtgtctttgtttccgtcagcaccaattgcgcgactgctgaacggcctatgccgacagatgccgataaaaacttcgaagcccggaaaaacaactgggggccatctgaggatttctaa

SEQ ID NO: 107042 - DNA, 381 bp, Enterobacter aerogenes
atggccggtgaaaatgcgattgaggctatcaagccgcattcgcgtgggacacgtccacggcgggagcgaattgaggtttgggtcagcattgatgagaaaaaagagttagccgaaagggccgatcaggcgggattgtcgaatgccgctttccttcgcgctgttgggctgaatctgcctataggttcacgggccgatttggaagctgttcgccagttggcaaaggtgaatggcgacctaggccgggtggccggattgctgaaattgtggctcgctgagaaacgcggtcagggtgcgcgaccgattgacgtagaagtgatgatgatggatttccgcgcaatccaagaggacatgcgggcgctcatggggaggatttccaaatga

SEQ ID NO: 107043 - DNA, 1908 bp, Enterobacter aerogenes
atgatcgcacatcgcatcaaccgtgaacgcaaggcctcaagcccagcccggttaatcaagtatatggtggcggccaagggcggcattgacccgacgagctgggagcgcacggccgattacattctggattccgccaatggcacgaccgagggcgagaaggtcgccagctaccgcgttaccaactgcggcacggatgatccggcagatgccgcaatcttaatccaagccacgcaagcggctaacaccaggtcgaaggcggaaaagacctaccactttgtctattccttcccgcccggcgagcagccagaccttgagacgctgcacgccatcgaagacgaactatgcgctgccatcggcctcgatgagcaccagcgagtatcagcggtccatatcgacaccgataacctgcatgtgcatgtggccatcaacaaggttcacccgaccgggttacagaacatcgaaccctattacgatcagttccgcctcatggaggcctgtgagcgtcttgaggtagagcatggcttgcaaagaacgtttcatggtctggaggcaaagcagcggcatcagaaccgcgacattgagctgttgccagcgaaagccccagagcagcgcgacagcctattccgtgaacaccttagaaacgcttacgacctcagcatatcggagcctcctgaagccaaaaccctgaacgggttgcgcaagctgtccgatacccgtctacagaggcagtcagcagataaagcggagccagtccgcaccagcgcgaaggtggccagcgtggaggcgcaatccggcatcgagactctgaccgggtacgcggctcgcgagctggccccggcgatgcggcaggcgacgagctggcaggagctgcacgacgcagcggccgagcacggcctagaggttcgccagcgcggcgctggccttgtcatcggcgagccggatttaggcatttgggcgaaggccagcaacgtcggtcgcgacctttccatgaaggccctgaccgaccgttttggcccgttccagccttccgaacggcaggccgaggcgaaggcgaaccgcaagcggtacgagccacgaccccggcggccggacaacccgacgacggcgggcctgttcaaccactaccagcgcgagcgacaggcggccattctgacccgccgtcagggcctcgaccagatcaagcgcgagagtgcggctttcaatgcgcaagtgaggcagtggagccagacagagcgaatgcttttgaaggtcgcgggcaaggggccgaccaaacgcctgatgtacggcactatcaaacagcaggccgacgcctcgcgccagaagaaccggcagagcgcagacgctcgccgtcaggcactgttcaaacggacgacgatgcccacttgggccgactggctaacgcagcaggcggagcgcggcaactccgaggcgctggccgtgctgcgcgaccgcgaggaacggacacgccgctggaacggggagctactgactgccgaccgggccgacaaggccaaagctgtcgttctcgacaagctcaaccccaaggcccggaaagacgggacggtggcgtacagcaccatcgacggcggcatggtgatcgaccggaagacgcacgttcaggcgcagaaagccacgaccggcgcggcactggttgcgctcgaactggcgtccaagcggttcgagggccaagccctcatcgtggaaggcacagacgagttccggcttgaagtcgcccaactcgccggtatgcacggcctcaaggtcactttcaccgatccggcgatggagcaggtgtgccgcgagacggccgagcataaggaaatggagaattcaggtaaggctgactcaaggaaaacttctcgccgtcgcggcagcaaagatggtcagagtgcaggggtggaaatttga

SEQ ID NO: 107044 - DNA, 1548 bp, Enterobacter aerogenes
atgggcgataagtacgctcttgctggcttcgcgaacagtgtatggaatgtttttctaagacaacggttaaaaccagatcggacgattatttttgatgatctagaacgcagctctttatggacaaatcaaaagagtgaattactgggtgcaattaatcactatgtagaacatcgcggcttccgcgttatagttatttgtcacgatgagcgcatagctgatcaactagccgagcttaaggaaaaaacatttggccatactgttatggtcgaaccacaaattcatgcggcttttgaagcgtttctaactgatattcaagataaagttgcacaagattttgtcaccaaaagaaaatcaattattgaggaagtttggtcgcaatccgagcagtcttctttgagaatactgaaacacgttatcaacgatgtggctagacttcgtttaataatgaaagacaggcatctagaaaataaagatgctatagagcacattataaaatttttctgcgccttggatatagaggtgcgtgcgggaaatttaacacgagatctactccttaaccggatgaaactacatatcgcggagaggatggatcgcaacaatgaagacgatattcggccattaagtaaaataatttcaaaatattcatcatctgatattacaggctcaattctcagcgatgaaattttagagtcaaccctcatagagggtagatttgattctgaaatgcttgcagcatggctcgatcaaacaccttattttatccaagcctcagatacccctccgtggctcatagtaatgaaattcgatgagctcgatgatgaaattattaaagaaggcatatctcggatgcaaaagcagttcgatgagcgtgccgtaactgaaatcggagagtttcttcacatcgcggcacttcggctaatgatggttgaacagggcgttattgcccactctatggaagaagaaacatcactctgcaccacgtatattgacgaccttttagcaaccaaaagaatgcctccaaaaccattggaatactcatttgatagactatttgaggcttatggtggttatggttattgggtttcagaggttgcgagaccacatttcagggccatttgtgagcacgtggaccaagcgcggcatcaagcgctagaggccacttatccaagtcatgccgcagaaattttgcgccaactcaaagaagatcaagcgtctatttttaagacaatttcaccaacaaactctggaagcaacactctcgcgcatgttcctatcctcaatcatatacctgtgaattctttcttggacgcttggcttagcggtccgcgcagtggatggcgacaaacaactatggcactcgacaatcgatatgaacatggtcaactcgatcggaacttgagtaccgaaagaccttggttaattgacctagatcgggaaatgaatgcgcgaatagataaggagactggtctcgacgcatttcgattgaagcgaataaagccaaaaatatttagtgagttacaagaaatagaggcaccagatcaaagatag

SEQ ID NO: 107045 - DNA, 198 bp, Enterobacter aerogenes
gtgagagatagatcgcatgacacggcgatggccgaagacttccgcgccgatccgacctatgcagcggagctgcttgctgaagtccgccgcgacggcaacccggccgaactggccattctgttgcgtcagatggccacggcgtcggcaggtgatgagaggtcggataacgccgatacagagcgcgctctacctctctga

SEQ ID NO: 107046 - DNA, 573 bp, Enterobacter aerogenes; identical to SEQ ID NO: 91182

SEQ ID NO: 107047 - DNA, 423 bp, Enterobacter aerogenes; identical to SEQ ID NO: 74986

SEQ ID NO: 107048 - DNA, 1038 bp, Enterobacter aerogenes
atgttctggggcatgtatagcgtcggcttgcagacgattccggcgttgcacaagctatacggcgccgaacagttacagcaggtaatagccaacaactggcactatagcgttgcccagtggttaggggtgagcttcagcgccgatgccgggtggctcagcatgatgacgctgggggcggtatttttcctgcctatctacttgaccgtattcatcgtcggcggtttttgggaagtgctgttcgcgattgtgcgcaaacatgagatcaacgaaggctttttcgttacctcgattctcttcgcgctgattgtgccgccaacgatgccgctatggcaggcggcgctggggatctccttcggcgtggtgattgccaaagaaattttcggcggcaccgggcgcaatttcctcaacccggcgctggcggggcgcgcgtttctgttctttgcctacccggcgcagatttctggcgacctggtatggacggcggcggacggtttttccggcgcgacgccgctctcccagtgggccagcggcggcggtgaagcgctggttaacgtcgccaccggcatcccggtgagctggatggacgccttccttggcaatattcccggctcgattggcgaagtgtcgacgctgatgatcctcatcggcggcgcgttcattatctttgcccgtatcgcctcctggcgcatcgtcgccggggtgatggtcggtatgattgccaccgccacgctgtttaatttcatcggttccgataccaaccccatgttctcgatgccgtggtactggcatctggtgctcggcggtttcgccttcggcatgatgtttatggcgactgacccggtatcggcttcctttaccgataaaggtaaatggagctacggcctgctgattggcgtgatgtgcgtgctgattcgcgtcgtcaacccggcctatccggaagggatgatgctggcgattctgttcgccaacctctttgcgccgctgttcgattacctggtggtgcaggccaatatcaagcggaggaagtcgcgtggctga

SEQ ID NO: 107049 - DNA, 987 bp, Enterobacter aerogenes
atggctactgcagagcagatcaaagctttattgaaaagccacgttgatcgtgatgatcagcgtttcttttctattgctttgcaggtggcagctaaggaagcaaggcaaggtcatcataagcttgctaatgatataaaaaacttagttgataaaaatcagaaaacaacgagttctgtaggtttagttgaaaaacgactaacaccatttgttaagcagcctgatggtgatcttaaggggttacttgagcaaacgaacaagccagtacatcttcaagaactggtgatttctggaagcgttagggaaagattgaatcaggttctgcttgaacaaaaacagaaagataaactttctgagtttgggcttattccaagaagaaaaattcttttcactggtcctcccggtactggtaagacaatgtccgcatcagtcattgctacagagttaaagctaccactttatacagtcgtcttagataatctaatcactcgctatatgggtgaaactgcagctaagctgcgtttaatttttgaccacatacggcaaacaagagctgtatatttttttgacgagttcgatgctataggaactcagcgtggcgctcagaatgacgttggagaaattcgtagggtcttaaattcttttttaatgtttgtagagcaggatgattctgagagcatagttttagctgcaaccaatcatccagagcttttagatcgcgccttatatagacgatttgacgatattataccgttcacaaggcctgaggataatctaatcaggaatcttattgaacagagactcgctgtctttgacctcggtaatttattttggagtgagatcattgatagtgcttcaggtctaagtgcagcggagatcacgcgagcaagtgaagatgctgccaaagaatcagtgctttataatgcaaacaatattacaaccgatttgttagtaaaggctataaagcgtaggcaagaaagtagacaataa

SEQ ID NO: 107050 - DNA, 213 bp, Enterobacter aerogenes
atggttgattataatagcttagttttggaagcgctaaaaatccttttttccgacaaaaataatgaatttgtaaaaaaactctatgatcccttgataaatattctgtgcattgaagactattattttgctaccggaatttatgattcagaagatgcgtccaaacaaattgaaaagctaaagaaagcaataaatgattataggtttaattattag

SEQ ID NO: 107051 - DNA, 540 bp, Enterobacter aerogenes
atgaaatctctcaggatggaccgatggcaaagatgcttaaagggtgggtttatgtctgaggtgctgagaaacgacattttcagatttacggcagatctgccagttcagcaaggtttctatcgcttgtgcaaatctaagcccgaaaatcctcaattctatctgccaaatttactggtcagtgaaactgaactcgattccagacttcctgcatattttgcagactacgttgtgagcactaatcttttcaattccatagaagatggtgatatagggattgttaacaacggaaacatgattagggtgattttgtcacggagagcaaaccataacactgttctggtaactgaaaggtgcaataacagttgccttttttgttctcagcctcctaagacaggaaacgatgactggcttcttaaccagtcagcacttgccatcgcctctttctccctgaatggtgtagtaggagtgagtgggggagaacctctactgtatggcagagagaattttctcactatagctatcatgctcaatgaagattga

SEQ ID NO: 107052 - DNA, 561 bp, Enterobacter aerogenes
atgaccaccaccaccttttattttattaccgtctataccccaacttatggcagagcggtactgcatctgagcgcacgcgacagcttgctggtcacgatgctggtcggtatctctaactttatctggttgccgattggcggggcgctgtcagacaaaataggccgccgtccggtactgatgggaattaccgtcctggcgctgctgaccacctggccggtgatgcaatggctcaccgccgcgccggatttcacccgcatgacgctggtgctgctgtggttctcgttcttctttggtatgtataacggcgcaatggtggcggcgctaacggaagtgatgccggtctacgttcgcaccgtgggcttttcgctggcgtttagcctcgccaccgctatcttcggtgggctgacgccggctatctctaccgcactggtcgaaatcaccggtgataagagcgcgccaggctggtggctgatgtgcgcggccctatgcggattcgccgccaccgccatgctgttcatgcgtctgagccgcggctatcagccagcggaaataccgcgttaa

SEQ ID NO: 107053 - DNA, 192 bp, Enterobacter aerogenes
atgagcacgatgtttgccctggttctcaccgtcagcatgctgacgggcggtaatcaggatgtcctgctcggggtttacgacactgagaatgactgcaaggcagcggcagaagagcaacacgtgaaagctgaatgttatccgctgaaaggtgtactggacgagcatccagccgggttcacggtgcaaatgtag

SEQ ID NO: 107054 - DNA, 315 bp, Enterobacter aerogenes
atgcgggttgatgccggtaacgccaaaggccagctcgtgcagggtggttttgccgcgcagctggcagccgttatccagcagcgcctcgactacggcggcatggcgaacggcaggaggcgcatcctgcaataccgggctgccggcgcgggtcggaaaaccggcaatatcgagactgtctttaaccgcaaacatcagctcgccttcgccaagggtgaagcgcgagataaacccggattctgcgttttctgcctctgtacgatgttcagtaaccatgtttcacatctccgtgagggggataattaccgcgcgaaatga

SEQ ID NO: 107055 - DNA, 447 bp, Enterobacter aerogenes
atgaatgagttaaccgcgctgcaggaacgtcttgtcggtctgattgccagcctgtccccggcggcgcgtcggcaaatggcggctgacattgcaaaaaagctgcgtgccagtcagcaacaacgcattaagcgacagcaggcacccgacggcaccccgtatgccgcgagaaagcgccagccggtgcggagcaagaaaggacgtattaagcgcgaaatgttcgccaaactgcgcactaaccgctttatgaaagccaaaggcagtgacagtgcagcggtggtggaatttaccggcaaagtgcagcgcatggcgcgtgtgcatcactacggcctcaaagaccggccaaaccctcacagtcgcgacgtgcagtacgaggcacgccctctgctcggattcagtcaaaatgaagttacgctgatggagggagtgatcttgcagtatttttcctaa

SEQ ID NO: 107056 - DNA, 864 bp, Enterobacter aerogenes
atggaagaatctaaaagaatacgtcaattaaaagaaaagctcataaacgaactacctttttttccaaatgaaaaatcaatacgcaccgagctagaaaatcaaagcttaaatggagttttaatcgcttacctccattggaaaacaagaattgtacctacccgtcgaaggaaagttcatatatccccagaggtaacgagtgataaaagatggaaaacattaaagtctggtattcatggcttattagataaggtgagaaaaggtgaagacttgtatcctcacctttcattgagagcacataagtatggctacacttctgttgaaagaattcgcaatggagaagttgattcatgggaagacaaggatcaattattaaatacaaaaggttttcatcattttcatttaagcatggatatccaaagcacaggtttgggcgtaaggacgaatagtgttcttttcgccttcgtttctcgcgaccaatttcatgcagttgggatatttgatcatagcgtatttgataagccagatatttttaatggcatgactgaggaacgtgaaagaatgtgggccctacatgaaaagtacaccacattcggaatgaaacccggaacagtttatatgaataatccgataacaacctccggacatcctgtaagccttatcatgcttgccgatcgttatgctgcaatcatccgagaatatgatcagaaggcggaacaaagaacttttataaatgaaatttatgctcaaagcccatttccatctccagaaaggtataagcttgaatggagtatagaaggtttagatcttgttctttttgatagaaaaaatagagtggcctttaacatctataaggcgtacatttaa

SEQ ID NO: 107057 - DNA, 345 bp, Enterobacter aerogenes
atgaagacacggcagcatgcgcaaaaatcaatcttcggtctggaagcaatcttcgaacagtcccgcaacaatgttagtgaacttgaacagctgttgagcgagctgacctttcgcaacactgccagggcgcggacgctaacgtctaaaatcgagcaatctctaactatacttagcgaccgcaacgtggtcgccatgtcggcttccagcccatcaaaacgtcatcctgattcggcgtccatacaatcttctcaagttgtgccccacaatgcgcctgcagatgtagagcagctgcaaccgaaggttttaccagtgaagtggatatttttaaactgggtatgtctgtaa

SEQ ID NO: 107058 - DNA, 5109 bp, Enterobacter aerogenes
atgagtttatctacttttttattaaaatgcctaggtcctattgggcgtatcgttatgcctaaagcaaagcaaatttacgctgagcatacggcgggaaataagccggatgaagccatcgaacttcaattggataaatttctaaatgaagccttgggacggctgggggttgtggatgactcgaaaccttggtggtcaactgctatgaatgccctaggtaaagcggctgttcagccagaatcatttaaacgtcctcatatacaaaagtggttaactcagcaagagacgcaataccttcttaaacaacttatcagggataagcttactggtaatgaatactcacaagaaagccttaatatactcgtttcaagctacattgaagaatcttttgagagtaagcagtacgctatttcgataatcactacagcacttgccgtactcgaagccagtgtattgggttccattaaagataaaggtactgctgctattgttcaggcttatggggacaagcagttggagtttctgagcagtctgcgcgaaaatcttaatcacctgatacctgacgacatacggcagattgtcagaattgcacaaaataacgcagaaagcattcagtgcgatataggtggtatacaaatagaacgtacggcatttctgcaggatataaataacctcatcaaatcagtccaattcattcaagtccgcggtttacctggcagtgggaagtctgtactactaaaacaactggctcagcaggctcttgataaaggtcccgtactttttctcagggctgagcagcttgaaggaaaaagctggttcagttatgccagtacgcaggggttatcagcacagccgctattccagttgctctcccaaatagagaaagttggtactcccgttatattcattgatgccattgatagaacggaaaaagagcaacagcctattattctagatatcattcgtactatcatacagtcaccagagcttgcaaattggcgtattgtagcatctctacgtgatacgagcgttgatgcactccagcactggcttggggatacagttaatggaatgacattaggaaccgtatccctcaacaatctaagtaacgaggaagctgaaacacttgcagctgctaatcctctgcttagatcattgctttttagttcaacacagcttgaagatattgttaggcgtcccttctttgcgaaagtactccatcagaattacaccattgatccccagtcaacttttcagcctcgttcagaagtcgacttgattgcccaatggtggcaacgaggtggatacaatgagacaggtcagtttgctgtagagcgtcagcgccaactcattgagttggcaaagctccaagctcatgccttaaacaaaccgatcaaaatgaatcagctttctacaatgatgcatattgacgcaatgaagtctgatggccttcttgactctgtgcgtgacggtatctctgtacgttttacgcatgatatcttcttcgaatgggcttttctccatgtcattgctgagtgtgaggagcgatgggttgatgagattcggtcctgtggtgagcctcctgctttagctcgcacgatagagttggccgctcaatgggagtacaactatggggaaaactgggctgcctggttagccctaactcagtcttccgggttgagaacacaatggttacgagcatggctgttaggacctttaggtttgcctgactttgccaagcagcaagatccatacactcgagccatttttgctgatggttgtcagcttttcaaaaaagctttagtttggttccaggcgactaaaattacgccgaacgagtccatcaatactttcgcctttccctctgaaactcaacagcaatatgcctacctagtaagctggccctccgattatcttttatggcggcgttttattgaattcattcttgctcacatatctattgtcccaaagagactctatccagatattctcgctgtatttgaggtttggcagaacgtgttcttttgtaccgctaatcccatcacccataaactcttacttcaatgtaatatatggttaaatgatgttgataatattaattaccgtgataattggaatgcaaattcctttgattggcatgaaatacctgaacttgaaaaattcaggaaatctttgagacgactaatttttctctcgtcaaaggctgaacctgagatagtctcaacctatctactcaactcaggtcggtcgaatacgctacgccgagatgtttttgacgacgtattaactctttgcccgatattggcacaatcgcaccctagcgaaattgttaatattacattggcctgtttaaaagaagaattacccgaagaacaacttgcacgagaagcagcagaaaacaagcgggacagggagaggcggattaccattcaggccaagccagagtccgaaaggacctcacaagaacaggcatatctcaataatttcagcttattcacaactgtcggtgtttcccattatgattgggatagattgtgtttggatgatggttttcgtaatttctatccacctacaccgcgaagggagcctttccagtcattgttccagcactcacctaatgaggcgttagctctagtcagagagctttgcaatcatgcgacaatggcatggagacaaatccatacatgctcccgagatacacaaggtacgcctatcccgcttgagcttacattttgttggggtcatcagaaattctggggaaacgctcgtgagttccagtggttcagagcagcccgagcttctcatgtaattggctgtgctttaatggcactcgaacagtggtgttatgaagaactaatgcgtgctcgcccactcgatgacctgcttgaacaagttgttatcggccatgataacattgctatcctgggcgtcgccgcaatgctaacactacatactaagacagtttcccctgctacattgccgctgctaacatcacaacgagtgctaagtgctgatcagcagcgaatgcaccaagacttaatttcttgttcgggcatgttttcttccaacggtcagaccgatccctcacttattgggactacatctaccgcatctatacaaccagaacggcaacaaactttgacaagccttatttcatcacatttcattaagggtgatgaatatagcgatattcttaaaaagaacattctcagttttactgataatctaccttttgagtacgaagagttgcgtgatcggcctgagtgtatttctagattgaggactgaagccttaaagtatgctgaattggtagactggaataactacaattttcatgaagttgagaataggccagacctgatagcggtttctcataccagttctttttcatccaccccggaaagtcttgccaaaagagaaactgcttcgaagtttattaacgcaactcgacttttatcatggtgtttgaaatgccttgaaaaaaaagcattgctagacacattctcaataccagaggctattgctgttggaagacaaatcgacacctctgatgttatgatctattctgcagatgaatcagaagaaactcacttagctatttatcgaggtgcactttcagcaattgcggccgttatattaacttttcgtcaagaaactacaccttcgaatattcattgggcgcgagatattttaatgcgcgtgctaaaacgaaaagaaataaaagatacgttctggacccccgacgccattaccatagaccacccagcgatatttgctgcgcaaggacttgcagccgaactccgtgaaaatgctcatcaatatgaaatcgctcgcagcttattaattctgataactcatccacttaaagccgttacattagcagcactcaaagaagcctgcgatttatggagcacagcaccaaaactcacatgggtggcactggttttggcattttctcgcaattgcgcatctattcattcattacaagacacccgtaagaaaggagatataaacttgccgtcgcctgaggctgagattgaaataaatgcactccttgaattctatgaagggggtagcgagtggccgaaactcccgctaattccagcgccttgggtaaaacgtaataatttaaacattcagaatcataacaaagataatccaaccgagagtgacgaagaaaagaatgcctctgacattatctggcttgctgcagatgctgcaaaagcattcagtcttgttcctgttgaaagcattatggcaagtgatagaaaagaagattttttaatttttcttcagagtgcattaaactggaccgttcaagagtatgaggctaacggtgaacaatccaaaggtgggaattattcgcgacatgacacctttgaatggtcacaatcgctaggtacaacacttagcttggttgctggcttaattccatttagctcttttaatacacgttttctcatacctattttagaaattgaagatagtcattgtctggaacttttgtatccgttagtaaatggttatgtctgtcactatgtatacgacgcactaacaataccatctgacacagttatcatacttaatatctgtttagaccgattccttaaacttccggagtttgactcaaattctttcctcaaaggtaagctgaataattttcagtatcaggggctaattgacgccttgatgtttgtttctgttgagaaggcagagaaatcagctcgttatgcgaatggtgattggtccgaacttccactaatcttaccagttattgatcactttattagggcagttggtgggttgattccaatcatggaaagatttttaacactttgtgaacgtgcaaaagtaacttatcccgcggatatgtttgccgatcaaatcatatcggttttaaatcagggcccagattccctccaaggatggcacagcactctacttctagaacgtattgctgcgttagttgagtattttgcgcatcgaaatacgccaatgtcagtcgatttgtcacagaaactcttgaggattcttgatgtccttgtagatatgggggatagacggagctctttgttacaattaaatgagtcgtttcgagatatccgtttatag

SEQ ID NO: 107059 - DNA, 531 bp, Enterobacter aerogenes
gtgtatttttatcagcctgatacccggcgtgatgaacttctgatccatgcgctgactgagctggcagaacgctatccgcgctacagtttcaagaagctgtttcagctgctgccagtgcgtaatccagcaccactagcgatagaaatcggcctgaatatcccggttcagcgagtcgtccgggggctggacagggtcgtggtaaaccgcggatacccgctgaagatgcggatggacaacgggccagaactggtctcgctggcgctgacaaaatgggccgaagaacatggcgtgcagctcgaatttatcaagccgggcaaacctacacaaaatgctgttatcgaacggttcaaccggacagaaactctggatttatacctgttcagaacactgaatgaagcacgggaaattaccgggcgctggctgatggaatataacaacgagcggcctcatgaatccctgaataacctgacgccggaagagtaccggttgatggctgaaaacccggaactctcaaaacatgcgtggaactaa

SEQ ID NO: 107060 - DNA, 396 bp, Enterobacter aerogenes
atgtttcaaatgtcgactctcatcctcaaggtctttgatttttttaatatcggccgcttccatcccgccatactttgccttccagttgtaatagctggcctccgaaatagcggcctcacggcacacatccttgacggtacgtccggcttcgacgaacttcagaacggcgatgatctggtgttcagtgaatcagatcttacgcatagcgttctcctcaggggatataataagtatattggaagatctctaaaagtgaatggaactgaaacaggtgtgcttacacttgaatttgccaccgctttaaaattttccagaatcggttttctgattcgtttggtcgtagcccaccacgcaaaaattattcaatattttttaaaaatcaaagagccgtcttaa

SEQ ID NO: 107061 - DNA, 801 bp, Enterobacter aerogenes
atgtctgaaaaattgatttttttatcccatataacagaagaaaaagaattagcgaaaataatcaaagatgcaattgaagacgagttctctggattcgttgaagtatttgtatcgtcagatgggaatacaattaaagcaggtcaaaacttcttaaatgttattgagaatggtttggtgaattgtatcgctgctatttatttgataagcccagaatcagtccggagaagctggattagttttgagttaggggctgtatgggttagaaatgctatcagtcagaaaaatggtgggccagaaatcccggcgattcctttttgccattcagatatgatttttagtgatttaccgcaacctatttgtaacctaaatggtattgaagcaaaccgctctcattcattggagtttgcattcaagtcaattcagaccgcagttggaggaagaggacgattgagaactgattttgatgttcttgccgagaaaataaacagtttcgagagggactatacggtattcaaaagaataggtgaaactctcaatttaattggtgtgaacgacgaacgtcgagcacaattagttcagttagttaatagtacagcagagaacaatgttacgattaaaactaatgttcgacaggattcagcagatcaaatatttaaattagttaatactaaactaagccattttgcgaaatataaagttacatcttctggtttaggtatggggcctcaaggtgcatcccctttctgtgaaattgaattgataatggatcgaaaaatactcagtgattacttggctagataa

SEQ ID NO: 107062 - DNA, 246 bp, Enterobacter aerogenes; identical to SEQ ID NO: 103247

SEQ ID NO: 107063 - DNA, 1572 bp, Enterobacter aerogenes
gtgaccccaagtgatacccctttaaactcacataaacccataaatttgtataccagaagtattctagctactatctggtatacacacttgaaccactggtatacattgatgaaaatgacactcaatcagtcgattataatcaataagttatctatcgacgtgaaaccgagccttgatccgcaaggcagagtagtctacttacccaatccagagcgaaaaccgtatcttatcactgataatcaccgggattcaccagttggttttggtgtcaaaatcagtgcaacgaaaaagacctatatcgttcagcgacgagtctcttctcctggcaaccgccctaagacaggggggaaatccccatctgaggttatcaggtctacaattggcaatgtctctgatttcgctaatatcgatcaagcccgcgaggttgctcgcaatttagttcaaaccatgaagttgaccaaaaggaaccctaacaagataaaacgggagtccgatgcttctgaactcactatcagtcaagtttttgctcaataccgccagcatctgctgggtagagcgaaaccagctaaacccaacaccttggctgtattagataaagcagagaacaggctttctgagtgggctggtttgcgagttaaagatcttactggtaatgaaattcttcggaagtttgatgagattgcttcaagagctagaacagcagcggaacagacctttaggtggatcaatgttgctgtcagacatgcaatcgaaattgaagccagcaatgcccagacccagcaacgacaaccctccttgtcctacaatccattctctatcttgaaagttcagaagaagtttaggactcgttctgagcttgaggatagctatcgtgcgaaaggtgttcgaaacccactttctccgaaagatacacttggtcggttcttgactgcattacataataagagaagcttcaaccgccttgggtgcgattatctgctactcaccgttctcttaggtgctcgtaaggaagaaacagcatctttatgttggagggaagctctaaccaatgaagaagcaaaaacgacaagctatgttgacctgagtaacagaactatccgtttttacgacactaagaatcgaaacgatcacgagcttccgatttgtgatgccgtcaaaagaattttggaagatagaagagacatagtaaacgatacgggaacccggaaggacaaacagaagtgggttttcccggcccgttcttctcgaagtaaagttggtcactattccgatagcaaaagtctaagagaatatatctgccaagaggcgggaatcctgaagcttggtatgcatgatctacgaaggacatttggtagggttgctgaagaacttgtttcatatgccgtcgttaagagattgctcaatcacagaaatacaacagatccaacagaaaggtatgcagaacctgatcaagaacggatttttgaagcattacaaaggattgagttgcatatgcttatgactgctcctaaattatacaatgtgttacttgcttcggctaagtatcctccattacctgaaacgagggagtga

SEQ ID NO: 107064 - DNA, 123 bp, Enterobacter aerogenes
atgactgacaacgttctgactgatgaagaattgaatgctatcatcgcaaaattacaagcacactatgcaacaatgtctgaatttggcttgaagaagaaaccgaagaggctagtcagttactaa

SEQ ID NO: 107065 - DNA, 384 bp, Enterobacter aerogenes
atgaagaaaaagattggaaacatattacctgtattgctggcagcggtattcatcgcctcatgtagcgttcatgctaaaaacagagagctcagtttcagtgcaggggatgaaaccttcacattgaaaaaagattgtattgatgatgtttcatttaaagatgcatcctctcccagcgtttttataaaagtcaaaaagagtgaagtctgctctcaaaaattcgacaagcttatctctgataatataggaaaaaatctagtcgtcactttcaatagtcaggctctcctgaatgctaaaattgcatcacagataaaaacagaagacggatttaatctttccgtacctaataaagatacggctcatagtatttatggggtttatgaataa

SEQ ID NO: 107066 - DNA, 738 bp, Enterobacter aerogenes
atggctgatgaaaccatggttgtaaaaggcactgcatcacccagttttggacaagacttatctattccaggtggttcgaatgccccacacgtacctgtgactggtcacattaaaggaggagtcaatttcccagtcgctattaccccagacgggtggccagtagatatctctgaaaggaagaaaagtgaaatcagaccagacgttgattcattaccagttgacaccaaagtcgtagtggaaaatggtacacctgccaatggatatcgattagtaacgaactatatccccatcgggcaggttgaagaacgtattactgttttagcgaaaaagtatcataatcaacagccgcgcttaattcttaccgatggtttatccatcagtttcgatagttttcatcaattatttgctttcgctaatcgttctaaagctcgtggaacacccggtggtcagaatcatggcgcctccacacaagcatgggcacctccgctcacttggggtccatgggttgatttagcttcgcatgttggtgttgacgtatatacaatcaattttgatactgtgtctgaagctccatcaactttttctatacaaattgagtatgccggcacaaatggtatggttacgattaatactttaggccctggttcatatcaagtaacagataataatggtgcaggaactgatcgtattcgttttaagagccatacgatcgggcaaaatattagcattcaatattaa

SEQ ID NO: 107067 - DNA, 492 bp, Enterobacter aerogenes
atgctttcaggctttcaggctttcaggctttcaggctttcaggctttcaggctttcaggcagcagtcctgcacttcatcacatcggtcagcacactcataattgcgaaaaacatgttgacctgatattaaaaaaacaaccgactttctctgatttaatttatggacctgtctactcaggaataatccttcatcgttgtcgcgggcccacaaatcttcatttatcgcaaagtattacgtttgtagcagcaggccctttttcaccactctgcatggcgaactcaactttctgcccttcaaataaggtattgaaattctcaccatggagtgcggaaaaatggacgaagacatccttgcttccgtcaagaggtgaaatgaaaccaaaacctttatcttcgttaaaccattttaccaaacctttaattcttgtggacatactgactcccgttatacatgatagtattaatagtaaacgtatagtattaaaggtatga

SEQ ID NO: 107068 - DNA, 1044 bp, Enterobacter aerogenes
atgagtgacacgttggctaccattcatcgcctgacgccgctggcggacgttttctggcgcgaggttaccgccgcgccctggcgctacgatctttttcatctgctgcgccgcattgacgcacaagggggcgaacgttatccgcttgggcgcgcgccgctgccgaaatttgaatcgctgcgcatcgggcaaacgccatcaatgggttttgcgccagcaacgctagccagcgcgcaaaaacgggcaaatagcgcggtgcatgagatatcgattctcagcttcggtctgttcggccctaatggcccgctgccggttcatatgaccgaatacgcccgcgagcgtattcatcatcatcaggacgacagcctgagcgcttttgccgatctctttcatcaccgcctgacgctactgttctaccgcgcctgggccgacgcgcagccaacggtatcgttagaccgtgcggataaccgccgctttgagcgctatctcgcctcactcatcggcatgggtcagccggggcaactggagaagggcgacctgagcccgcatgcgcgtttcacccactcaggccatctcagccgccatggtcgggatccggaagggctggagaagatcctgcgaaattacttcaaagtcccggtcaacattatcagcaacgtgccgcaatggatgccgctgaccccgcgagaacaagcgcagctgggggcgggaaggcgtctgcctcgcctgggcgtctcggcgtttctcggcgtcgcggtacgcgatgttcagcataaattccgccttgaaatcggcccgcttagcgccgccgaatacgcccgttttctgccgggcgaaaacgcggtaaacgaattacgcgactggatccgccagtatcttgggatcgaatatgcatgggatgtcagggtacttatccgcggcgatgaaatacccggtacggtcctcagcggcgacggcaaactgggttacagcacctggcttggccaccagccagcccccgcgccgcgtggcgatttagtgtttagcgtggagcagagcgacgcctga

SEQ ID NO: 107069 - DNA, 585 bp, Enterobacter aerogenes
atgcatctcgacggattcattgcccggattatcttcgaagaacaagaaactgctgttatcaatattcccatccttactccgcgtcataaagcccatccgggtggcgtcgccggggagatcccaaggcggcatgctggcttcattatacacacgtccggtgacgatcgggcggtcaggatcgccgttgataaaatcaatgaccacttcatcgccgacgcggggaatttgcacgccgccaaagccctggcctgcccaggcgctcgacacgcgaacccagcaggagctggtgtcatcgcctttggcgtggcggtcccagtgaaacttaactttgatgcggccatacctgtcggtccagatgctttccccttcaggcccgacaactttcgccgtctgcgggccataggttcgcggccagtcggttacctgcgccgggcgatagaccaccgaagaggggatcactctaaaatggatttggtgcgagatatcgctattgccgccgctggcgtagctgttctcttcaaacaagtaatctgcggcggtcgtcaaatattcgccgttatcgctaaagaatggcgcattggttag

SEQ ID NO: 107070 - DNA, 3111 bp, Enterobacter aerogenes
atgagtgtattaccaattgggtcgttggttatttcagatagttttgacggcattggcaaagttactaatgttgatattgatgccaaccgcgcaacagttgcattttttgagtcccccttgcaacctttcgcccggcacactgatactcgtctggataagttgattccgacaattcctcacgatgaggcagtgatatattgtatcgaaccagaaagccagcgatgggtacgcgcgcgttttggcggatcccgtcccaatggcgattttctggtaatctttcgagaagacgaatctgcgactctcccgatcgataaagtctacgttctcaataaagcccctgatatcccgattaatccggcccatttccttgcctctcagacgaatgatgctccgtttttcttccctcgccgtcaatcctttatcaatacgtatatccagcagcgagcgtcatgtcggggtatggcttccctttcaagcagcgcagttgaacttgaacctcatcaattagctgttgtacggcgcgtactgcaagataaaacgccgaagtatattctggcagatgaagtagggctcggaaaaacgattgaagcaggcatgatcattcgtgaacacgcgctagaagaagccagtcatgtcagcatgctcattgccgtacccaaccaactcgttaagcagtggcgggaagaattgggtgaacgttttcagctgagacagttgctcgtagatgtgacgacaacactctcttcactaaggcaagatgggatcgcgcaagggatagttatctgcagttatactgaagccagccttctgcttagcagaggattcaaaccatctctggttaccgtcgatgagatccaccaaattgcaaactggccatggtcaatagatgaagacgaacgccatgatttcggcctgatttcacaggcgtgccacagagcacattatgtgttgctacttacaggaacaccgcttcatgggcatgagcgtaacttcctgtcaatgctgcattgtatcaattcagaggcttatcagattgacgagaaccatctaaaggcgttcaccgaattggtgaaaaaccgtgaaagtcttggtggcgttttctcggcccttgtaccgtcagtgtctaacatcagtctccgccgtaaccttgatgaaattcttgcgcaatttccggatgaccatcagttagcaacgctgtgccaggacttgtttccgttgattggcagattctctcagccaacgcctgagcgtgaagcgggtattaaagcgatacgcctgcaccttggtgaacattatcgaatccatcatcgtttgttgagaaaccgccgccaagtcgctcttagtcaggacgaaagtaagaacctgaatttaaatctgctattccctggacttgatggggtgattgagtatcactggcaaaccgaagggctgacgctggacgagttactggaagaatatcgggccatggcagtgctgccgcaaaaccataactggtcgctaaaagaagcgagctatatcgactgggttgacgatctattttccagtccattgtgcgtgatgcagcgtgcaaaagcggctcttgcatcttcaaaccctcttccttccgatgaagaggcattgctggaacacatagtcttaacggccaaaaacgaactacaggccatcgacaatatgttagctgcagcactcaatgactggctgaagcaattccaggagggtaaagcaattgtgttctgcgatcgccctgagttggcgcaacatctatcggtcaaactaagtatcctgttggactatccggttgaacgttatctaccgggtcaaactttgcaatttacccaaccgcaaagccccattcgtgtacttctgtgcgataaaagtggcgaggatgggctgaatctccatggagggcgccgactggctgttcactacggcttgccgcgttcctgcagtcgtatcgagcagcgacttgggcgcctcaatcgctatagtgccaatctgataaggatcaaacccattcagagccttgtgctaaagaattatgctacccaaggtctacgtaatctgtgggcagatcttctggtgaacagcattggtgtatttaacaacactatcgccagccttcaatttgtacttgatgactatattggcgatgcctggagcaggttgttccgagaaggtccacaagtactagaaaaccttgcgacagaattgccaggcgaaaacggcgtgttgatcagagaaactaacaaaatcaacatgcaggaaaaactgctggcgatggatgaagaggtcgtacaagctgcacttttcgcgcagcagttaagcaatgacgacctaagcgctgtagaacagtgtaaagccctgacgccctggatcaccgaaggattacgcttccgctcatcgggaaatgctgaagagggcatacggtttcgtttcgaactagctgaacgcagttcaggtacgctagtcgactttaaaacattcctcacgacctgtatgctcagctttgacaaagagggaggcaaccctccttccacgcatctaatgagcgcaaagcgtatcccggccattgatgggaaaacggtgtatcctttgcgctatggtcagccctttgtcgatgcaatttggcaactcctgaaccaagatgcacgtggcagttcagtagcattactgcgcatgattaacgcgcaactcaacgcccctcgcttcttcttcgagatgacctggctcattactggttgcgaccccctcagcccttacgcctaccttcgtaaaagcgacgagcttgcaccgccacgcatattgcaggaatgggttgctgctgacggttctcttgtgaccagtccacaactccttgagatactaaacagcgagtacagcaaaaatccttcagcaacgaaaagctatgttgatctcaacctgcgcgcctcaagatggcaggaaatagaagaactgatttccgctgatgcctggaaagaaatggtcgagcaagtttatgataaagccttgcaaaaacagcgtggtttggtcggagacagcgcttatatccagttaatgtcagtaaaagcgatcatcatctgtagcagcaatattttatccggagttgcctaa

SEQ ID NO: 107071 - DNA, 2481 bp, Enterobacter aerogenes
atgattgaacaatggtcgcgtctacagttggcgctgacaacctgttttaatgaagatgtgacctttacggaagggattgaaaacccctttcttaaacggttaatgaatattattaccgattcctccgctggtcagaatgatatttttgctggttacgccgatgcccttcgagccgcacaagcgaatggcatcgaagaaccttggctcccctatccaccaacaataacggatatgccccatcctctttggggtctggtaaaatcagtcgcagggcagacattgtcactctctgtagatatgcacctggatagcacaaaagctacttaccaatgcaaaacccgtcgcaatttactacaaccggagatggatccggcgcttaaaaacctgctggtagatacaccacatacgcactatcgcggctttgggcagcaggcagcaatccgcacgttactcacctcagacatcaacagtacgttggtgataaatctacctactagttgcggcaagagcctgataactcaaatccaggctatcagcgctcctgcctgttccttaactttagtcattgtcccgacagtagcactggcgattgaacaagccgatttgatgcgggatatgatgcgcaaggccgaacaagatcatggtggaagctacgcgtgggttggcgggcaggatcagacgacgcgccagacactgaaagagcggctgaaaaacggcacccagcgagccctgttttgttcaccagaagcagctaaatcatcgctggttccggtgctatttgagctggcaaaaaataatctgattggtgccgtcattatcgacgaagcacatctaattgatcaatggggagccgaattccgccccgactttcagctcattgcgccattgatccgttcactgaaagcccagcctgattgccgtttccgcaccctgctgctctccgctacctggagccagaacactcgtgacgtcattgtggagcaattccgtgcagatgacagtgaactcattgaaatcacggcgaacttcctgcgtcccgaacctgaatacttcgtgcataccgagcctaatccgacctcacataagcagcgcgttgaacagttgttgatgtcactcccacgtccactcattctctattgcacgactcaagaagaagcagaaagctggtatcagcggcttcaacaacgacaatatcaccgtgtcggcctgttccatggtgatacggaaacgctgacgcgtagaaagctaatttcacaatgggcgaacgatcaactagatataatgattgccacttctgcgtttggcgttgggatgaataaaagcaacgtccgcacgatcattcatgccgctgttccggaaaatattgatcgctactatcaggagtgcggacgtgccgggcgtgacggcaaagcgtgtcaggcacatctggtctggcatccagcgcagatggagacggcggaaagtctctcagttgaaaaactcatcggagtcgaaaaaggtttcttacgttggaaagcgatgtttgaacaacgtcagccaagtgatatcgccaactattgtatctctctggataccaaacccgatcacatcgactatcagggggatcgcaaccaagcctggaaccgcagaaccctcttgctgatgcagcgtacaggactgattgaactggtgtttgctgcacctgaactaccgaaaagcttacgagaaggtggagaaaaaaatgatcaggcgatccgtggttggtttgccaattattatagccaagtacatatccgtcactgcaacgattctcacctttcggaagagtactggaataactttgtggaaaaagcccgtagggaagaattgaataagaggcgagcagcttttacgttgttaagagaatggctgaaggatctcgaaccatctttgtgtcaggttttaagaaaattttatatttatcaaaataatgaacctgagctaacctgtggaggctgcccaggttgccgggctcagggcaaggcctcattctctccaaccgttggcaccgatgtaaaaatcttgcactcgacaccaaagaaaaaagcacgcttcgttggagcagaaaaaaaagtgtattacagcgaagaaatggatattcgaactttgctgtcagaacttcgcgttacccttcgccatctgatcggttccggcaattacgaaaccatccgagcagataaagttaactttattcatctggaacgcgctttagattctgtgtctcgtttctggagcgtacaaaaacttgcagcgccaacgtcaaacggagcagaaattgtgatcgtggcaaataccgccacagttctaccgacactaccagcctcacgttatgaacgtattattatcgccccacagcatctggcagatccactgcatccgtacagaaaatggtgggatagcgcagaaaactctctgcccctggacacttttatcaggcaatcacaatatgtcaatcatcaataa

SEQ ID NO: 107072 - DNA, 870 bp, Enterobacter aerogenes
atgtcaatcatcaataacgccaaccctggcagcagtctggtgctgctccctttgtttgatcgcattgtacaaaacgcccgtgtttcgctttctcaggatgcgatcatagctcgctatcgcccaaacaatctccccgcgaacgacaatgcctggggaaagattagagagaaccttgccttctggtgtcgtttgggactttggcctatggaaaatgaagcgctactaccgcaaccagaagaaacacgcccgctctatcagcgagtgctgcaatgcaccatcgaagcctgcaaagaaaaaggcatcgccgaagggaatgagtgcgaacctatgtggcgagtgctgtcttgtttgctaagtttgcaacaacatacattgatggggacagaacctctttcagtaactgaggttgctaaaaatgtacataaatggttgccagcaggaacgatcaacagtaatagtgaaaaattacctatagaatatggtcgctaccttggcttcctggaattagctccagaccaaaaatattacactgatcctacccgggcaattaaatgctttttaccgcaaatttttggcgaccagaaaaccctgcccatcaaagcctttatggccaatatggcagaagcgatgccaatgatggatggtggcgattttagagtgacagtgcaggaaatgatggccgaacgggggtggtccgcaccggaaggcaaaaacatcagtaccagcacttcgcttgcgctccgtcgtctggagatcagccaacagatccaactgactttcggaagtgatgatgccgaatcgttatccctgcaacttcccactggtgaaatccgccccgtaagcaaggttagtctcagggagatcgcataa

SEQ ID NO: 107073 - DNA, 3177 bp, Enterobacter aerogenes
atgagcattatgaactactggccatcccttgagaacatcgagcaatgcatccgtaaagaagctgaagaattgcaggatgacgtgcttctagctgtgcatgaaaagatggatctcatccgccgcgacgtcaataacaatcaggagatcctccaagatgaggatctttttgaccaactgcttactaccgagcgtgctatcccactgattggcgactcagggatgggaaaatcacatctggtgcgctggttggactgccgtctcaaaagctacctggagacgaaaggtcagcttacacagtgggaaattgttcgtattccgaaaaacgccagcttgcgccaagtgctgttactgatcctgaaaaacctgcacggaggcctttttgatgacgcgcgcaaacgcgttgacgatgtggcccaagcgcattccgctaaagacctcgccgacctgctattaaccatgatgtcacaccaactacagagcatgtacgacgaatcgatggcacttggtatggaatacgaaaagcaggggaaagagattcctgccgatattgataaacgcattaataccattattgaagaagtcgaaaatggcattggcaacctgataaccgatcctaacttcaagctgaatctgctcaagccggagcattgcatctacaaacgcgccagtcgtatgagcgatgggctaaaggctagtgatgaggatcacgacaagtacgaactggtgcctagcgacctctttttccaagacaacattgatgacctgtcgtcgcttgcccgcgaatatattcgacattctcgtattgatgaacatgataatgaaaaggcgcgagttcaggccgtaaatgttctgaatgaagcgatgcatgcagcactgaaatctttatttgccaagctcttcacctttaacggcggcaattttcaggaactatttcaagagatccgccgtgaattacttgcgcaggatcgccgcctggtaatcctagtggaagatatggctgctatttcagcgatcgaagacgtattgattgatagcctaatcgaagaaggcgttcgtgacggggtgagaacactctgcccggtacattcggtcatagcggtcactaacgagtatccaggttataaacgtcgacaaggcacgctggtaacgagggctggctatgaatggagcattgaaagcacacataaaagcgacagttgtgaagaaagtattatttcactgtgcggtcgctacttgaacgcggcgcgtcatggtgcagcagcactgaagcagtcgcgagcgcaaggtttaaatgactggcctgcagtctggcaggacgaagaagtaccagaatggctggctgattttggtagtacagccaaacagggcgttccgctgttcccatttaaccgcaatgctatccgggcactggcaaataaatactgtcgagacggcagcaatcaacttgtttacaatcctcgcgtagtaattagccgtatcctgttggatattctgcgggattgtcgtgctgaagcagaacaaggttcattcccaccgcctaatcttgcaggcattaccacggatgctgaaattcagtacaaaataagccaattaactacccatcgagtttccagcgcggcgacactgaccggactctggggctacaactgtcactcctgggatgaagtcagaaaacaactatcaccgggcgtcgccaaagctttcggtctgaatgaattagctgaacacctgaacggcaaaggcaaaatgcctgaaacttcaaccagaaatggcgacactgataagaaaatagctatagctcctaaaccaccggtatctcctccacagccaaaaccactagtggaaaatacgagtctgccttttatcaggcatctcaaagcttgggtaaacgacaaagtcgttttaccccaagatattgcccgaaatctgcgagccggacttaacagttgttatgagctctacgcccaagcggagtttttcggcatggtagaaaaaccctcgttgctcgagcgtatcccgttaattagcctgccgctttcagcttccgatccttccaacgccattgtaaagttctacgatcgtaaagacctgaacgacccgttacgaaggatcgaaatctacaatgtgtccctggcaatactgcgtattcaacattatatcgatcttgaacaagggggcgactaccctgaagcgctggaagactatgtccattatgaaaactttgtcagttggtgggtcccacaagccactgaaaaagcaattaatcatgcccgcgcacgaaaattgaaacccgcactgcgcaatcattaccaaaaagcactactactgggactgatgacaggaaaagagaatccagcggaactagttgatacgctttgcctgacgcagaaaggggttggcagaacccaagggaaaacccgaggacgtacagcagacactaacccttccgctctctgtttctacgggcttgaagctaatcaaaaacctcacaccagcattaaagtggctgaagcacggcaagttgcccttcagggctgggacgaggcgcgagacgcgtggctttctcaggtcgcagttcctgagttgagttctgggctcagttcaatccgagccttggaagccgaagttgtcaccctcgcattgaaagagatcctaaaagagccgctgggtgcggagatacaacgcgcggcagagacagccagaaaagagatcgcatcaacgatcgagaatgcacaactctttgagaatgtgaaaaatcaggatgaattcattgcccttctcgatgactggaaaacgtttatcgaagtggttcgcacccagtactatccagcagaaaccgaacagattagaaattcaacttggctattgaatgaaatcgatgccctgaaagtggatgctgaagccagcctacataccctgcaaacacttaattccctcaccagacaacaggatgtcttcatgctatggcacgacatctcccatctggatggcgattatgtcaatcgcatcggcaacctgcttgcacagtggcagaatattcaatcgaaaatcagttttaatctgcaacagataaacagtaagggtgatgcgccaaaacttgaaaatgctcgcaagcaggttgaagagcgactgaaaaatctggcggctgatatcagcgcctctggagcgaatgaatga

SEQ ID NO: 107074 - DNA, 828 bp, Enterobacter aerogenes
atgagtacgttacgccaacagcttgcagacatgcagaaacaacttgatttgagcgttcaggcaagtaaggccacgctaattattgaaaaatgcggcgtggtactgtcgagaaccgatacggtcgctgggcattatagtcgtctgaagaatcagtacccggccctgcaacgtctgcctccagaattaagagttacctggaacgaaaatcagcgtaatgaacttaaaaacgctgcaaatagcgttaataatctgctgtcccagtggagtcgctggctgaaaaatcagactctggctggcgctgccatcagcaccgaaaatcccgatccacagttggacgaagaaacgacgacaaaagaaccaacggcttatgacatcattcagaatgactccttaaccaactgcatgaacctgtcacttggcctgtaccgtacacttagtggccaactgaacaacgcatgggaagagtggcagcaagagttgcgtcaacagattcatgttgacaacaaaactctcgaggctcagcagaaagtcggcaaactaaaagaaattgccgatgagtactcaaacttacgcaataaattcgatgcactggttcagtccttacctgagaatggcgagagcattactcagatccgctcgatggcggaacatctgaacaccttacgcggcatgatgaaaaccgactggcctttggcggttcaacacttctttgaccgaatcaacgggccacagagtggcaaaccaaccctcagcacacttacaacagaagtttttgagtggttgcgtgatgaagacatgttggaagactttgtgattacaaggaaatag

SEQ ID NO: 107075 - DNA, 4431 bp, Enterobacter aerogenes
atgactgctgaggatttagcccgtttacacgcggcgcttgatgtactcgaagggcgagaagccgaactgctagtctggggagacacggaaggcgcgtttacagatgctgatattctgtctctgtttgcccaccattttcccgacgaaaatggcaaaatattgatgcaggatctgcaggatgccgcaatgttgtttagcatcccaaatactaaaggtacgcggctttatcgcacgcgaatggcggaatccgttcatctgtttcgtcaccaacgccagtggtttcgcggtcagcaactgagtcgtacccggacgttggtggcagattatcgttttatccgccgccctcgaagctatccggaaaggaagtatccggctgagaaggttctgagccaattgagcgatgtcgaatggatgaatgacatcaagcgtcaagccttgcgagcactgatcggtgatttctcaattgctggttttcaatcgcgggcaacagctcgtatcctgcgagcatgggatttccatagcaatcatacgcgcgtcaaagaagcaacggctacaatcgtatgtgccggcaccggcagcggtaaaaccctggcgttctatctgcctgcactaacttcactcatcaatgacttgcaacgcgatcgctcagcacgggtccgtacgctggccctgtatccccgtaaggaactactcaaagaccagtttatggaaacttggggaaaatgccgagaagtggacgctcagtcagttaaactctctggacgtaaaatccgcatcggatctttctttggcgataccccccacagcatccagtacattgataaagacaaagatattcctttcgacttactgcgctgtaacacgcctaaatgccaaggcggaatgcgctggaaagcggaagatatcagccggggcaaagagatcctgcgctgtacgcattgcgcacatagtgtgggtgaagacgaagtagtgctcactcgtgtatcactaatgaacaatccaccggatattttgttcaccacgaccgaaatgcttaaccaacacctcggcaataacaaggccaaccacttgttcggtgtgggcataaacgtaattgcaccgccgatggtgttacttgatgaggttcatacttattcaggcaatagcggtgctcaaaccgcatatttgctgcgccgctggatgcaactggcacgctgtcgcccgcactttgtcggcctctcggcaacgctgagtgatgcagaacgcttcttcgcagacctggtaggagccaacaaaaagcatgtcatgctaattgaacccactttccaggagatggaggataaaggggctgaatatctgttagcactacggggtgaccctgtttcgcaaacggccttgctttctaccaccatccagaccagcatgttggcacgccgactaatggatacccgcaaagccacatcgcacggcacctggggccgtaaaactttcgtatttaccgacgatctggatatcaataatcgcctctatcaccaactttgcgacgctgagggatggcgtacacgcgggaagcaacttgtgcccaacgaaacccctctggcggctcagcgtaacgaacgcaacggtgtatccaatgcgctgacccttgctggtcaaaactggcgaatagctattgatattggacacccgcttgataattccgatcgggctatcgtagcgcgtacctccagtcaggacaccggggtggaccccaaagccgaagttgtcgtggcgacagcttcgctggaagttggctttaacgatccctctgtcggggttgtgattcagcacaaagcaccgcgtaacgtcgcttcttatcttcagcgcaaaggtcgcgccggacgttcaagaactatgcgcccttggatgatagtagtgttgtcagaattcggccgcgaccgcgtggtgtaccagcgttatgaagagttggtgacgccggaaatcaagggccaatcactaccattaggtaatatccacatccagaaaatgcaggcggcgatggcaaccctggactggctgagtatgaagatccccggcagtaacatctggtcactgctaaacaagccgcccaaaaacagagagcaacacgggcatctggaacagatgctcaatctgatttctgtcgtgctggaacaaaacgtctggcaacaggggctggaacaatacttgttctacgcgctaaaaattaccgaatcgcaacttcagcacatcatgtggtcaccgcctcgttccattatgatggaactacttccgaccctaaagcgccagttgactaccaaatggtcactgatgggcattcccggcgcagacagaacaccaggccgctcaccgctgcctttgtttattccggcagccctcttcagcgagctgaatttgcctgaactaagcatccagcttgagcgcccttttacaaaatatgaatacctaccatttattcaggggctgaaggagtttgcaccgggccgcatctccaaacgctacgccatttattccgatcttgaagccgactggctggtgccacacaattttgttccgttactaaaccaagtttcagaagtcgatttcgagatcaacgaggcatttggtgatacctggctgcctgagtgtttgattacgcttgcggatgctccagcaatgaaagttattcgtcctctgcaggtacttactcgggcccttgatttcaaacaaaatctgaccgagaaaagcaattctcagctgaagtggcatactcactttgccacaaatgctcaggccgaaacgatggcgattcccgcaggtccatggagcacagtgttgcagtccgccacgttctatacccatcagcatatgactccacttgagctaacgcgttataccacagccgctagtgcttcgctgcgcagtaaaagcaaacaacaggcttgggttaatttcagatgggttgagaatggtcaaccggttgcggtgggtgctcgtcagtgggtggatgggctgaagcttagcttcaccctgccttccacactacatcagcaggtcatgaacgacgccaagttagctagttcgctcaggacgctctatttccatcaccgcattagcagtgaggcgcgtttcgaacatgacagcttcactgcagactggatctacgagtgctatctggcggcactgactaaagagatcgtcagccacaataccgtcgccgatgcaattcatgccctgcgcacgccggacggtagagagtcgctggcaaccattgccgattcactattccaggctgaaaatatctttgaaaacgacgatgatggtaacggtattgcggaacgtcaagagttacagcagcagttgagaagcctgttcaatgagccgcagcttctcgcgatgcttgatacacatagtgctgtgtttactgaagatctcagccagagtgattcattttgtcagtggcttcagaccttgttgatcaataccttctccggagccgtaaaacagaccggccatctactgctaccagatgtggacgacagaggattgcttgttgacgccgtttttgatggcgagcacctcgatatctggctcaccgaatcagagcctgggggctgtggaattatcacccgcctcgaagaagcgttccacagcgatccagtcgccctgctaaatctgtttatacgcagtttcgccgccagcgattacgagcaaatagatgatgatcttttcgaactactctctcgacttccttcaagcactacattacagaatgcgctgaacgatttgcgcatggcggaaagtcatcacgatcgccgaacagcgaacggacaactgcgtgctcagctgaaaaaacaaggatttgctctttctcacagctttatgtccgtgctacatacccgtattcttcgccctggcagccacccctctcacgatcggcgcttgctagagtatctgcgggaatggcaggcactagaggccaaagcgggttatgaagtcagcctgaatatattcgcccatacccaagcaactcaggaactgcctgatgcgaacgtcaccaaaattttcgaccgtttttgccagattcagggcatgctatggcagcgtggcagtccccttcgtcagtcagtactcagctactacaatccctttgataatgggccgaaactgacagaaagattgctgctcagcaccctcttccagcagcaagcaacacaagttgatgtgaccaatagcgactggcttcagcagatccatatagcaatctctcgcgaaggatttgctgaactgttgatccctcgggaagcccgttatcagatagtacagatcgtgtccacactgcaactggagcctatcgattatttcggcctgcacctctatccacgaatgggagccgtagactatcggggtggtaacatagtgttgcgaatcgaactagctgaagccctgcagtaa

SEQ ID NO: 107076 - DNA, 531 bp, Enterobacter aerogenes
atggaagagcaacgacaaatatttctccacggacctctcggacagcgacaacttagggaagtactgagcgcacagttctgtggactaatcctttatccagaactcatctggttgatctcgccctggataagcgattttgacatcattgataatcgcggcggccaatggagttttcttgacccatcatggggggccagaatgatcagtttccaggagttgcttgctacagcggcaaataacggctgtccactcaggattgtcactcgccctgatactcgtaacaaagtgttcgttgaacgactgctggcaaggctctctccggatcatgatgtgcaatacacataccatgagaacttgcatgctaaggatatgttaacaaagcacttcctcttgagaggttcgatgaactacacctggagtggtgcaaacctcaatgatgaacatttgctgttctccaccaataaaaccattatttctgacacactaattgagctcagtggacaatatacattcggagacagagatgactaa

SEQ ID NO: 107077 - DNA, 2190 bp, Enterobacter aerogenes
atgactaatgttccctcctggcttcgagcctttttcggcgaaggcaatttgctcagcctcgaaaaattactgactgacggacctggtgcttatccagaagagcaaaaaaatgccctgctacctttggtggatagcgcacgagatggcgaatggcccattattctgccgtggtgtgaccgcaaaaactgggttttctttgcgatggcggaagatgagcgcactctgttagaactcagtaacgtcatcggagcccgactcggttctgctgatgtcgaacctgaccgcagggtttacctgagtcccgcttctggtcccacactcaccgcggaaaccatactgttggagcactgcccaagggggtttattcgtattgaattgttggccgccaaacgtgaggataaactggcgaaaatgcgggtttttactgcactgacggaggtaattacgttatttcgccaacgtccatcgcttgttcgtacccgcaaacgcccgtttggtcgtatccttagcgatttcatgttggcaacaaatcaaaatgagatagcggccagtaacagctatctacaggaactacgtgacaacggtctgctgtctaaacgcaatttgctgttgctcgaacttcaacaggctgggaaatggcagaaatgggacaccctgctaaaccatccagatctccctgaactgatcagaggacgcattcctacttcactggttagaatgctgctcaccgcttatcagaaccgctatttaggttatgatatgcagagctacgcgcagcaggccccctcagtattgcgcccggctttcctttctctacatccgctctttatgcaggttccgctgctgggatacgaagaggaagctcttaacatctggaaaacttgggcaatcggagtggcgctagccggtgaaccaaccctgctaagtgccctgccaaaagcgctgaaatccaactggctaaaagaattacagcagtgggccgatcttggaggaattaggtacgatatctctacacaatctccagtctcattctctttgcctcctacgtcgctagaatcactggcctcttatctacaaacatcgctgacggcaacaaccgacacgctgaattcatacgccgacacactccgcgacatagatatacaactgctagatcaagcaaagaaagttccactacttataacgctgattgaaagtatcgaacggcttactaccactcatatctccggctgggatagttggttctcacatctgtgcaatcccaatgctgatggaaatgcactgttgcagattgtcgctctggaaagcgaacattggtccacctcctccttccaggaatccacattcattcgcctactgtcacagaatattccgccacacgcatttcccaccctgcgtaatgctatgccggccttcattaactggctgaggaaaaaccaagtgcttttaatgagctcaacttggcttaaatggatggatgttctggcgatggaacaaagtgtcagtccggcagatattcaactggcgacgctagcaacggagcatttccttcaaggttctgtcagccggactgactatcaggaatttgttgcgacactgcaactcattattgaacgctgcggttcgcttaaaaatataacttcacttgccgagatgatcgaactgttcctggatgcaccagaacacgataaagaggttagaaacgctctgtggatgaatattcaagcttgtgctgttggtgtgtggccgcgtctagatcactcaacccgcacgatcatgcgtaatctggccatcgacgtattgggcaagggtgccgattctgcgtttccgccggaaccaccacgaagtgatgacagtgagcttgaaacacttccgaatcttgcaggaaaacgagtcgccatttataccttgactgaaggcgctgcgcgccgagcacgagggatgattgaggcgttgtttcagggaatcaaagtagatgtgaatcatgatcataccgcgacggacaagttgatcaatttggcaaaacaggcggattactttatttttgccgcctcaagcgcgaaacaccaagctctgtatgcggtaacaccatatcgacgcgatcttatttaccctgaaggtaaaggagcgggttcaattctgaatgcattcatcacccatgttcaacatgccatgaatattacaggataa

SEQ ID NO: 107078 - DNA, 957 bp, Enterobacter aerogenes
gtgagccaaattaatctgataactacatgtacaaatggtaagcacagtaacggttatccgatactgaatctcgcaacgtggtcaacttctctttcctgttcccaaaatttaatccaggcatggtgtaaggtcgttaattcggctatttctgctgggcataccttgcctgttgagaaattgtataaaggtggacactgggcgacagcaatatctatccatgagatatatccagttgaattgtgggtcctttctgcagggttagggttattgaaacgtggtgataacgttgttccataccaggcgacttttgctgtaggccataatgactctataccattattttctaagtcgtataagggaaaagaatttcatcagatatggtggtctgaattaaataaatattcgccgtttcaagagaagcatcctacatcgctgactgatctcatgaaggccagacctgatgagtattttatcatttgcggttcgcctgattatatcagcgcagttggtccagatattattaccggtttgccttatttacattcagcagaaaaacaggtgttgataatatcatcctctcgggttaaatcgccattaaaccattatttactggaaagtaataagagaattgctgaatggctaaattgtaacatgctgatgctgaacataaaaatcgcgcagtatgtaatagagcagtttacccgagagggatatgacaatttggggttattagccgataggttgaatgaaaagttctcttcgttgcctgcggcctgcaaaaaacaaggcgtgcgcaggactccggaagaggtcgaagcctgggtattacaacatctcaaagaggtgcctgataccagcgcgtcacgtgctctgcgtgtctttcgtgatagcggaaacagttttgaagagaagcgatttcgtgccttgtttcacactgcgcagttgcgcaatcagtaa

SEQ ID NO: 107079 - DNA, 234 bp, Enterobacter aerogenes
atgttgtcatttgatacgaaggccgcgttggaactgatcacacactctgctggtggttttagctatgacactcttgccagggcattgatttcagataaaaaagcacaactttcccaacaccttttagctgattgccgtgagttttgcgaatcactggagtcacaggggattattcagcggtgtgcatcctgtcgcgaagttcaggatgtgtattacgaatatcgtgcccactag

SEQ ID NO: 107080 - DNA, 633 bp, Enterobacter aerogenes
atgagtgaacagcggccgcctccttcacgcccggcgcagggactggttggctggacgctgtcgctggccggacggattgttgggctggttattggcgcgctggtgttgcgggtggtactggacctggcgggactctatttctggtggccacaggagggaagcagacatgtttttcaggtgatgaggagggagcaggcggaactggtcatcgcactacaaccgcatccgcaggggaatgacattgttatgctgctggagaacgggactacgcacgtgcttaaggccaacatactccttcagaaaccgttcaccgtactgtcttatatgctggtgagttttatgctgcgtctgatatggctggccgccatgacccccctgctctgcctgagcgctttaaccgggctgacagaaggtctggtacaacgggatttgaggcggtttggctccgggctggaatcggtttttcttcaccgctatgtcatcaggtccggcagttcggtcgccacaacactctggatgttttatctggcgcagccgctgtttctgccagcaatgctgattttactacctgcgagcttatggtttgggataacggtatggatggtagctgggagttttaaacgctggttataa

SEQ ID NO: 107081 - DNA, 858 bp, Enterobacter aerogenes
atgggatttagtgctggggatgtgaagcaagttattgaaagaatgcttgtttcttatggggttaggaatcgacaggcatactctgaaataactaaggttccgctttctacaattagtaattgggttaaaagtggaaaagtgcctggtgattatctcatccaatgtacattggacacaggggctgacctcaaatggctcatggaaggcactgaacttacaaatgtaagattcgagccgggcaattaccccatgcagggaatacgactgatggaagcaatgcaaaactcaggcgggaaagagattctgcagcgcatcatgcaagcgtacggcttcaccatgcaaaaggagctgggcgaccatctcgatataccatccggcacgatgagtgcttgggttcggcgtgagcacttcccgggggatgttgttatcgtttgtgctttagatacaggggcatctttatattggcttgctacaggtaacggcggactttatgaacataatgtggccgtacccaaagaacaagcggcgttagccacaataagaaaataccgccttgaaaacggtgaattaaaaaaaataggtaactggttagctgacccgtcaatgattcctgataatcaggatggtctgatgtttgttgaaggtatgggtaaatcttggttggttgataacgctatgcaaaatattgctaacggccgctggcttatcagtattgatggtgtaatggacgttttcaatgtaattcggcttcccggaaataaagctcggttatccaacgactccgctgaatttgaatgcaatttatctgatattacaccatcaggtagggttattcttacacttgagaaacatatataa

SEQ ID NO: 107082 - DNA, 141 bp, Enterobacter aerogenes
atgaaatacctcttctttgctttgttattcagtctcccggccttcgccacggaagtggcacagtgggaaaacatcccgctacccgtcgcgctgcatgtcgggcaggcgaacaacgtcccgccggttttgccggtgatgtga

SEQ ID NO: 107083 - DNA, 804 bp, Enterobacter aerogenes
atgacatatgaaagtagtttaaattttatcaaagagcagataaaggcttttgagtttgttttagtagattgtaacaaacaattgaagttcaaagaggttgaacaaagcagaattgaatcaaaaatagcctctttaaaagttgagataagtaaacttaaaaacacggattatccctcagttgctctacaagaggaatatttgcgccgtaaaattaacttggaaaatgacattaatgatattgatgaggcgattagggatataactaacattcgtcttgaactagatacgctacacaagaagtacaaaaagctaacgtctgatagaaaatccctcccggaaagaatactttctcagaacgatattgcaaagttgcgtttgttaaattctggcgttgttcaaagattgatgaaatataattttgatagttttgatgcggaacttataggcatttcggaagataattatcttccgactagggaaggctatgatattggctttgatacctcagcaagtgatggtatcaggataatttgggggtatttgatcagcttgttcacagttggccaacggtttgctactaatcaccctggagtgattattttcgatgaaccacgacaacaagaagcaaacaaagtgagctttgctgaattgctcagagatgcagcagaatcaacaaagatcagtggccaaattatctttgccacatctgaggatgagagtgttttagtagaagcgctaaatggctatgattatacaattgtatccttcgataaaaaagacggaaaattgataaggaagttataa

SEQ ID NO: 107084 - DNA, 642 bp, Enterobacter aerogenes
atggcctgtagcgcgctggtggagtcaggcctgtggtcaagcgacgcggtagagcgccagatgagccatcaggagcgtaagcgcgtgcgggcggcgtataaccataaggcgcagcatctcgaagagcgccaggagatgatgcagtggtgggccgattatctggatgcaaaccggttcaggcatgttgtgccgtatggcttcaaaaagtcgccgggaggcgcactcgaccatatgagtttccaggagcgcaatgaccggcagctagaagagctgaaagccagaatactggccgactcggaatggcttacggcgtctgagttatcggcaaaaacgggtttccgttctgccgatcctgatgctggcccgaaaggctggaaagcggccgggaagatattctcgctgaaggtcgacggggaggatttgtacccggattatgttctggatgagaaaatgaggcccctcaaggttgtcaggctgattctctcgctgttcaaagaacgcaaaacgccatggggactggctatctggttcggttcggcaaaccgcaggttgagaggtgggaggccgaaagatttgctgatttcaaagtcagagttggttctgatggccgcgcaggatgaggtggagtttgggggtaagtag

SEQ ID NO: 107085 - DNA, 618 bp, Enterobacter aerogenes
atggcgcttacagatctcgcaatccggcatgccaggccgcttggcaaggcatacaggctctctgactgtcacggtctttacattcaggttaaccccagcggatctaagttgtggtatctgaagtttcgctttggaaacaaagagaaccgtatggcattaggcccttatccgcttatttctctcgcactggcaagggagaagcaagcagatataagaaggcttattttagaaggcattaatccggcggagaaacgcagagaggaagagcggggtggagagcccctttatacgttcgagtccgtggtgcgcgaatgggtctccagcaacgtgaactggtcggcagaacataagaagcgggtgttgcgttatttcgagctttacgtctttcccacgaacggcagctgcgacattaccaaaatgaaggtcaaagacctgctggtaccgatcaaagaggtggagaaagcgggcaaactggatgtcgcttctcgtctccagcagcgtaccgcgtgcgtgatgcgctacgccgtccagaacggcattattgatcataaccctgcatcagatttaaccggcgcggtctccacgcccaaagtacgtcatcacccgggctggatctga

SEQ ID NO: 107086 - DNA, 465 bp, Enterobacter aerogenes
atgcatataaccatagaggaaataattgggaaacctttcacctttacaaaaaggcctgaacatttaccttgtgatatgagaccattgtggcgttgtagtttaattttattgattctaactatcgttggacgttctggttgctgttcgttaaaaaaaatgcatgttgttaattgggttttgaaatcagatcaaaatgtagctagttttgagttttggactttaaacaaggaaagccttaaacctgaagtacgtatggaccctacactcgaccgtgcccttgagttaatgttaggcgaagggtttataactcgagaaaatgaaaaatataaaataactgataagggagagttatgtgcagttaagttaattgcacttgatgtattcaaggatgaatcgtttaaactaaacaagcttaaaaaaggattgtccgaaactaatattaacaaaatattccaagtggggtaa

SEQ ID NO: 107087 - DNA, 204 bp, Enterobacter aerogenes
atgggggcagtatatctgattatgtttatgaagactctattcttaagaaaatatatgttcagcaaaaagaacatgcagaatcatcttttacagaatttgaagttgtattttcgtataaaaatgcgatcatcgataccattaaaaatgtatttcctaatggttatgaagaacaacgttatcctgcacgctgaattagctaattaa

SEQ ID NO: 107088 - DNA, 288 bp, Enterobacter aerogenes; identical to SEQ ID NO: 91989

SEQ ID NO: 107089 - DNA, 555 bp, Enterobacter aerogenes
atgcgtcgttatccgggaatcctcccccggtggcgcttacgcttaccggggctaccaaccaaataccgaaccgtagcccggataaggcgctatgcgccgctatccgggaaccctccccggtggcgcttacgcttaccggggctaccaaccgactaccgaaccgtagcccggataaggcgctgtgcgccgctatccgggaaccctccccggtggcgcttacgcttaccggggctaccaaccaaataccgaaccgtagcccggataaggcgctatgcgccgctatccgggaaccctccccggtggcgcttacgcttaccggggctaccaaccgactaccgaaccgtagcccggataaggcgctgtgcgccgctatccgggaaccctccccggtggcgcttacgcttaccggggctaccgaccgactaccgaatcgtagcccggataaggcgcgatgcgccgctatccgggaaccctcccccggtggcgccttatctggccagcaaatcgcgcaaaacagcagccccgttacaagatcacgatttaatcgcgtgttga

SEQ ID NO: 107090 - DNA, 480 bp, Enterobacter aerogenes
atgattacagcaaacgaagaagcttttattctcaaaaaagacggttcacgcaaggggccatacaaagctaaatttgcaggagatactgttgttataaatgacaagatggccgatattgatgatggagattttgtcgttagagtcctaccgaatggtaaggaagaacataaagaaatctacaaagcaaatttctacgacactaaactcggtggctttggtccacactttcaactgaaagttggccccaaaaaagacatgccgtcatttgcctctcagcatatcaacattcatggcggtaatgttcaaataggtaatcacaatcgtctagaaatatcgaatagcatcgaaacgctgaacaatctaatcaataacgctgaaacaactacagaacaaaaagaagaggcaaaaggattgctacgcaaactagctgagcaccctttaatcacagctctcgctggtggtgcgataggcctactttaa

SEQ ID NO: 107091 - DNA, 705 bp, Enterobacter aerogenes
atgactcagcaatcaattaatcgtgccccggctgttggattttcccctgtgttcggcggcgtagtgacaatgagcagtcgggaaatcgctgctctggttcagagtaaacatggtgacgtcaaacgctccgctgagcgcctgaaagctgctggtcttttaaccgcgccgttggcgcagttcgattttgagcataacggaaacgtgtatcaggagtaccgcttcaataagcgcgactcattggttttggttgcccgtctgtctcctgagtttaccgcggcggttgtggatcgctggcaggagcttgagaacaaatcggccattcctcaaacgttacctgaagccttgcgactcgctgccgatatggctgaacagaatgcgcagctggcgcataaggttcagcaggatgcgcctaaggtagcgtttgtaaaccactacgtagagtccggcggtgccaaaagtctgcgtgagacggcgaagatcctcaacatgccagaaaaggccatgattgacacgctattgcgtgacaaggtgctgtttcgccagtccggcaatctgctccctcatgccctgcgccagcgtgaaggtctgtttaccgtcaaaacgggtacttcagattttggtcatgcatacacccaaacgcgagtaaccccccgcggcgtccagtggattgcacagcgctatgcctctgaactgatgggaggctga

SEQ ID NO: 107092 - DNA, 198 bp, Enterobacter aerogenes
atgagcaatttaaccgcaaatatcccgcgttcgcaactccgcgcgttgccggttcgtggtggcaaaggcgaggtcacgtattgctatgccgtaagagtacccggtggctgggaagaggtgaaccacagttttaccgagtgggctgtgggtgactatagatccagaggagtgaaaccgaatgactcagcaatcaattaa

SEQ ID NO: 107093 - DNA, 558 bp, Enterobacter aerogenes
gtgggtaatgagccaatttggaaagtagaacgccaaccggcctggttggtggcggccataaagaaaacgattactgaactgcctggtggttatgccgaagcagctgaatggcttggtgtaactgaaaacgctttattcaatcgcctgcgtgtagatggcgatcagatcttcccacttgggtgggcgatggtgttacagcgcgctggtggcgcaaatcatatcgccgacgcggtagcacgccagtctgggggggtctttgttccgctggcagatattgaagaagtggataacggcgatattaaccagcgcttaatggagtcgatcgagtggattggcaaacactctaattttgtacggaaagcaacagcagacggtgtgattgatgaggctgagcgcgctcagattgaggaaaacagttatcaggtaatcgccaaattccaagagcacatcacgcttctttatcgagtgttttgtgtaacagaaaagagtgacgcccgcgagtgtgcagctccgggcgtcgtggcgaataaatcaatgtgtatggagaaatccgcatga

SEQ ID NO: 107094 - DNA, 198 bp, Enterobacter aerogenes
atggcacacgtaaaagtaaaagacctcgttgcggctgcacatgccgcatcacaaaatttgccaccagcatcagcgaagttaatgcgcgataccgctactcgtctggacgttacctacgccgcactaactgaagcaatggatcaaaacacagcgctggcggctatgttagctgcagcgcagaaaaaggagaaaaattaa

SEQ ID NO: 107095 - DNA, 573 bp, Enterobacter aerogenes
gtgaaccatttaatgatcgacctcgaaactatgggcaataagcctgctgcaccaatcgtcgcgatcggcgctttattcttcgccccgaaaagcagtgagttgggcgctgagttctatatggccgttaacctcgccagtgctatggatcaaggtgcgacacctgacggtgatactatcctgtggtggctcaaacaatcatcagaggcccgagcagctatttgtactgacgataccagaagcattacatttgctctctccgagttgagttcatttatcagccgtcactctgacaacccacgatatctgaaagtctggggtaatggttctaactttgacaatgtgattttacgctcagcctacgaccgcgccggccaaacctgcccgtggcaattctggaacgactgcgacgtgcgcaccatggtgttgctcggcaaacaacttggtttcgaccctaagcgcaagatgccatttgaaggtgtagcccacaacgcattggccgatgctcgccaccaggcaaaatacgtgtccgcaatctggcaaaagcttattccagcctccagcaccgaagaataa

SEQ ID NO: 107096 - DNA, 501 bp, Enterobacter aerogenes
atgaaagattatgcttggatttttggtcttgcaggtaatgttttggtttttataggatgggttgttgtttatttaaatgcaaaaaatatttcaacacgttctgagattaaatccgttgttgattcaattgttaagactatgaatgagacgtccgctataggtatgaagtattggcatagcaaaggtacggaatatataaataatgagtattatatttctatcgcaatgtcaaacatcaccttaatatctcaattggtcttatttctcaaagccagaggaatagacatagatgaagatattaataagtttattgatgctttaactctaaactgtgatgaagtcctagccatttcggacatgcagtgtattttgagagcaaacgaaataaatgcagaggctatggggattatcactgatttgatgaatgcatttcatgagaaataccctcccactcattattctgatgttcgtaaatggtacgttcaattaagttcgttttaa

SEQ ID NO: 107097 - DNA, 936 bp, Enterobacter aerogenes
atgattaaaaaaagtgaagtacaaatacgcatcgacaaaccattgtgtttgtatcaaaccaaatatttttctgaaacaatgcatacattacgaagtattaatgatgcttccttccgattcggccatagcctcgaaatcgacctctcaaacactccatttgttagtgctgcagcctcacttttgttgttcgccatcataaaccgagcacaattgtgccttcgcgacggtcaatcgatgcgagttgtactacctacaagaaaaggaaaccccgagggatatcgatggattgtatctacaggacttgcaagagcgcttatggcttcaactgttgagaaactggatgagctcacttcaagtggaagattttatcagtcctctgttgatccttacagtcatcacgcaaccacagcgaggatgttgaacgtcaggtcgtcaacggcgttttccgatgagcaatatgctcttctggaatcaggtattagcgaagcaatgcttaatgtatcacatcatgcttacgatgccccgaattacaatgagttagttgcaaatctaggtggtaagagatggtggcaatgtgcttggttcgaccaggagaaaaatagggtaacgtttatcatctgtgacttaggaatgggcataccaagatcattccacggggataatctgcaaccattcttacaaggaataacgttggcggatgcatggactctaggtgctacaagaacaggtgtttcaggtcgtggtaatggatcagaggatatcaaaagccctgtaggtgtcggttgcacagatagtgaaacacttttaatactgtctggtcatggtaagtacgtgaagagttcacaacaaaacaaagtaacaagtgactatactgaggatgaaataccaggtacattagtccaatggagcttagtgccaaaacggggggagttatga

SEQ ID NO: 107098 - DNA, 165 bp, Enterobacter aerogenes
gtgagcgataagaatcaacatttgaccatggaacaacaggaattcattttcaaaaccaaagtggaattactggccgagcttattcagatcaaaattcctggtaaatccgacgcggaagaactggccgaagtggtcaatgccgcattcgacaaattaacggcttaa

SEQ ID NO: 107099 - DNA, 447 bp, Enterobacter aerogenes
atgagtgacaaagatatcgaacagcaaattcagaccaaaggcttgacggctccgcgaattacgctggatgactttaaagcaaatatcgtcaacacagagatcgttaaacacgtttctgtttcagggcaggtactgcgctgggccgtcctgaccacgaaaaacggttttgctgttaccgggaaaccatcatgttcagcctcttcagaaaatgatgacgctgaaattggtgaacagattgccatcgaaaacgcagaaaacgaactgtggccgcttatggggtacgccctgaagcagcgcctgcatgacactggcggtcataccgaagaggaaaacttcgggtacttcctttcctattctggatttcacaacgaaaaagctgaagtgatcgagaagctgcgaaaagcatattacgatggcggttacgctcttcagtggaaatctgaataa

SEQ ID NO: 107100 - DNA, 258 bp, Enterobacter aerogenes
atgacagaagaacctgtattgctggatgaagaactggcagaattacgcctggcacggaatgcggtaaatacggttgggcgcaatctgtcaacgattattcgtaatcgggactatgccgatgtatcgcatgaatcattgtgggaagatgttaaacgccttacccgtgaggttgaaaccgttaaaaaagcagtgagaaaactaacaaattcagcggtgaatattcgctcggttaaactcagaaacgaaccgaaggggtga

SEQ ID NO: 107101 - DNA, 1170 bp, Enterobacter aerogenes
atggcaaagtcgaaaaaaggtagtgattttgaatatcgcgccagaaaattaaaagggcagcaggaacaagcccgacgaacgccgcataattttaaaatgagaaacggcggcgtaaactacgacaaaaataccttaagccggacgcttcaaaagggcgccagtcgtgaggttatggttaaaattacggggagtgcaaatcagtgtcgcggcgttaaaaatgaaatcaactatatagcccgcgaaggggaaatcagacttaaagattctaatggggttgaatataatatcgctgaccgggaacaaagaaaagaagcctatgaatctatgctcgatgatgaagataaaaaaatctataaccatgatcgtgcacctaacctggtacataatttctcattctcttcgcctaaaattgcgggtgtaccagagaatgatgtattaaaagccgtcgaagataccttgcgtgaaaaatatcccgataatcgctttatgatggcttatcatactgataaggaacatcatccgcacgtccatgcattgctacgtataccggataacagcggtaagcggataaatatacgaaagaaagatttacgggaacttagggaaaagtttgccactaacctacaaaaaatgggatataacgttaagtgtacccacaaatataatatggggttaaaagagcaactcaaacgtgaaccagacaggttacgtaacctctttgaagttgtggaatttggccgtactaactatctttttgaccctaaaaataagcaaaataattatattacgttgcgcacgttgaaaaacaaaacagagtttacccgatggggaagtaatctggccgatgaaatcaagcgtgaaggagtaaggcaagggagcataataaaaatgcgcaaagaaggtgaaaccacggttaaggttccactcacggacggtcaaggccagaagcaagggtgggcggagcataaacgtaataactggcgtattgagaatcaaggggctttaggcataaaacctgcacccttcgagaaggttaagttacttgatacgcctgaacagcttctcaagcagcaacgcggatactcactgttcaggcaaaatcaccaggcttcggtgaaattgcaggaacagcagaaaatggggatcaagataggggtatttaagttttaa

SEQ ID NO: 107102 - DNA, 393 bp, Enterobacter aerogenes
atgattgggaagagattgcgcgaggcaagaaaagcagcaaatatgacgcagggcgaactgtctataaaggcagggctggacgatggctcaaacagcaaaatatcccactatgaaacagaacgctaccagccacattacaaaacggtgtgtttactggcaagcatactcgacgtgccggaatgctacttttattgccgcgatgaatcgatggctgaaaacattctggctattcacaaaaaaaataagcgataccatctgtcaccaacagaaattaacgaactggaaagggcagaaaaacaactggaagaagccaccaacacggttaaaaaattacttagcctgagactggatatcgaggccgctgatcttctgcccggttcgctaaaaccttaa

SEQ ID NO: 107103 - DNA, 495 bp, Enterobacter aerogenes
atgcaggaatggcataaggactggtatttgttacgcttttcgcaaaatcactggcgaaaactgctgtcagttctgggtgattcaaatgttgagttctgttgtcccatgatccattcagggcgacttcgaaaggataaaaagcagtgtatccgtcatagcgtacatccggcttttgaggggtacgttttcgtgcattttaatccagaaaagatccccgttgcagtattccgaagaatgcctggtgcagtggattttgtacgttttggcggtgatatgcagcggatatccgcccaaactatacgtgctctccgttgtgccgaggcgcgaattataagaagtgatagttgtgtatatgagtgcattggcgtagatgaagctgatgttgcaaagattattgaaatatacgacaccacttctcccctggaacgtgccagtaagttaatgacgcttattcataaatctaatatcaggaaagagaggaaagatgcagcctga

SEQ ID NO: 107104 - DNA, 198 bp, Enterobacter aerogenes
atgcagcctgaaaaaaaacgtatatataacaatgtttatatccctgcctgtcaacgtcaataccttgaaaagattgtactggaagttggctacatgcgcggtaagcgattaaccgcttcggcgtttgttcagtttttgattgaaaattacggtgagcaggcaaaaaaatttttcctgaatgagggtgaaaaaaagtga

SEQ ID NO: 107105 - DNA, 222 bp, Enterobacter aerogenes
atgctttcaacatcaacctttctcgcgcttgctatgcaatgtgccgccacggttcaccccactacggcgcaggatgtggcaaaaacagaatcgggttacaacccctatgcaatcgctgaaatagttcccaagtcgcaacgtaaaccgggtgataagggggtgatatcgtatttcccaacgaataagaatgatgccctggctatcgtcaatcgcattgaataa

SEQ ID NO: 107106 - DNA, 381 bp, Enterobacter aerogenes
atgcaaatcaccagtaccaattttgctaaatatggcatgacggccgaaaaattgttctctccatgtcataatttgtctgtctttgaaaagataatttctgattgctatcttcgcgggggttctcttgaacgtgcgttgagttgttactattcaggtaatttcacaacaggcactaaaaaggaaaatgaatttaatagtaccagctacatagaacgtatcggatataaaccgaatatgccttatgtagtgccgggaacccggcaggattttaatgaaaaggaggcagtaaagagaaaagagactaacgtaattattcctactcagattgtcattgtttacccctcgcatttcgtccgtggtgatataaaagccacccaatag

SEQ ID NO: 107107 - DNA, 294 bp, Enterobacter aerogenes
atgaaatatttagcggtattcaagaagccggtatcggctgttactgtgtttgttctgttcatgctggcctcacctgcatttgcggcagggtttgaaccggttaacaagttacttaacgcgctgattgttggcttacactccatcgctattgcgaccgccacgctggcggggctgtatgtggcctttaaggtattgtggcgtaaagaggctctcagtgaattcagtaatgtcatcatcggttcgtgcattatcgtgggtattgctgaactcgtcgcctatatcatcccggcctga

SEQ ID NO: 107108 - DNA, 2766 bp, Enterobacter aerogenes
atggctaccgtctataaggctctgacacggccgacgctgctcaggggcgtgcctattgcccctttcatgttgtctgttatcgccattgccattatcggactcattgtgactaaatggctttggttgctcattccagcactctatttcttaatgcgccgtattacttcacgcgatgaacacgttttttcattaatgtgggtttggtggaaaacattgggaaaaaaggggctggttttatcgcggaatgttgctacccgcttctataaagccagatctataagtcatacccgctatgacaatatcgatatcaaggagtttttagcgaatatgaaactcaatcaacggcaaccggttgaggaattcattccctactcaacgcatattcatccctttatttgcaagacaaaacgtgttgattatgttgcctcatgggaattacagggggaagcctttcagtgccagaccgcagaagcccttgaattgctttccgaacagtttaataaggcgttggtttctttttccggtgaaacagtcactttctacgtgcatacgattcgtgaaaagtatttcgaccgtttcaattctgtctccggtaataaatttgccgataaggtcatggagcgttattacaacgacatggggcaaacgcctttctatcgtaaccggattttcttcaccgtctgctatatccctttcaaccgggaagaaaagctggaaagaaaggcaaaaggacgagcgtaccagcagaaatcgcaggatgaagccattgtgcgcatgaatgaaatccgcgaaacggtagaaggaatgctccggcattatcggcctgtcccgctcggcctgattgaagaagggaaaaaggtgtattcatctttgctcagtttcttcaactacctgataagtggacagtggcaaaaaatcagagtcggaaatatccctttctataacgtccttggcagtgctgacctgtatttcagcagtgattccggtcaggccaatcagtttgaccgaaagcgcttttttcgctgcatagaaataaaaaatttgccgggcaatgtggacgttggcggactcgatgcgcttttgtttgagcaggcagaatatgttactacgcagtcgtttacctgcatgagcaaaaccgaagcgctggaaaccatcaagagcaaaggtaaggcactgaatagcgctcaggatgatgcggtgtcagaacaggtggatttggacgtactgcgagacatgatcaccagtggcgatgtcagcgtgggtaaatggcattattcattcgtgctgtacgcggattcgctggatcagcttgttcgtgacagcaacgacattcgcgccacgctcactgacctggggatgattgtcacgctggcgcaaattgcgctacccgccgcgttctttgcacagttgccgggaaactataatctgcgcccccgttgcgtgccgatcagtagccagaactttgccgatatgaccgcgtttcattcagtctacggcgggaaacgtgatcggctgccctggggggaagcgatgctgatgctggataccgaaagtcgggatgcctactacctcaaccttcaccagtcgttacttgaagacgacgactttaaccggcagcgcctggggaatgcgaagattatcggtacagccggggcaggtaaaaccatgctgctcgatatgctggcctacgcgatgcagaaataccgaaatcacgccaccttttcgccagcggcgaaaagcaagcggctgacgaccgtatttttcgataaagaccgtggggcagaagtcgccatccgtgcattaggcggtgaatattaccgcattcgtgccggggaaccgtcagggtggaacccgtttgcactggatagcaccaggcgcaatcgcaaattcgttaaagacctgatgaagctgatcgtcacccggcgcggccaaccgctcagtgaccggcaggaagatgatttgtttcaggccgttgatgatgtgatggatatgccgctgacacagcgacagtacggtatcacacagcttttgagctacctcaatgagccgacgactgtcgaagcacaggaaaacgggctgcgtatccgcctcaagcaatggaagcagggcggtgagtttggctgggtattcgataacgaagctgacacgttcgatgtacgcaacgtggataatttcggtatcgacggcacagagtttctcgacgatgccgatacccgcaccgctatttcgttttatctgctgtatcgcgtcaccagcctgcttgatggccgccgtctggtgatcatcatggatgaattctggaaatggctcaccagtgatgctttcaccgactttgcctataacatgctcaaggttattcgcaaactgaatggggtggtgatcttcgccacgcaatccctggatgaagtggtgaaaaacaaaatcgccagagcggcgatggaggtcactgaaaccagtatctggatggcgaacccggatgccgattacgacgattatgttgagaaagcaaaagtagacccggcgcatttcaatatcatcaaaacgctcgaccccggttcgcgtcagttcctggtggttaaaagtgcattgcggcgcggggaagtgaagaaatttgccgcccttgtcaaattcgacctgtcagcgatgggggactatctgaaaatcctcagcgcaggtgaacccaacctcgaaatcttcgacgagatctggcgtccgggaatgaaaccggaagactggattgaccgttaccttgaaagagcactttaa

SEQ ID NO: 107109 - DNA, 741 bp, Enterobacter aerogenes
atgaaaattaaatcattaagcgtggccgtattgtcggccaccttgtttgttttttctgttccgactcaggcaggcggaataccggtattcgacggtgcagcgcaaatagcgaatgcacagcaatgggctaaagaggcgaaggaatggctggaaaccgcgcagcactataaagatcagatccgagcctatcaagaccaactggctacggccacggggctgcgggatattcaggggcttgttgcacaggccaaaggattgaaagacgatatcaaagcattgcagaagcaggggatcagtcttaacgacctgctactgtcagacagcccggttacaggggatgccaaacgattgtatgaccgattcaaggcattcgatgaatgtgaaccggcggctaaggaacagtcgtccagctacgcgacggcctgcgagaaaaacgccatcaacaagggctatgtgttgcaacagacgctggatgtgcaatcacaggtaaacaaggcgctggacgagataggggggctgacagaccgcatcgcctacgccaaagacagcaaagagtctcaggatttggcaaacaccatccaggcaaaaagcgtacagctcaactcattaacccgcgcctgggaaatgaacattaaagcggctgaacaacgtgataagctggcagagcagaaaatgcaaaaggcgtttaacgaacagcagtttaacgcacctgttccccattttggagatttaggttcatga

SEQ ID NO: 107110 - DNA, 423 bp, Enterobacter aerogenes
atgaaaaagatagggctggtatttttgatgatgattggtggattggttttatctggatgtaaggaggacacgaaatcggttgactggtggtacaaaaatcaagagcaggcaaagttaaaggtcaaagaatgcaatgaaagtggtgatgatacacctaattgcaagaatgcaatacaaggaaagtttttgtatgaccaagaacatgcacctattccgaagtttagtggtatggtggatgaaacggataaatacgaaaaaatttatgccgaaaatcctgatttggcattttctgattacaaaagttgtaaagaaaccaaatctatcagtgaaaaatgtgacgctgcattatatgcggctgtggaattttctgatgccaaaaaacatccagaactgagtgctaaatttaaagaaatacttaagtaa

SEQ ID NO: 107111 - DNA, 1059 bp, Enterobacter aerogenes
atggatgctgatttctttcaggtaatggataaatttataatggcggcattaaaaactgccactcaggggaaaatggctttctatggttccctgatatccacgttgtttacctctgcttttacgttgtatcttttggttaatgcttatcaaattgtcgcagggaaatatcaaaagccactcgaagatctaacctataacattgccaaaatggcattgattacgctgtttattactaacgctggcggttggttggatatgtctattgcagcgattgaagggcttaaagagggattggcaggaggtgatccgtggttgttccttgaccagttgtggataaaaatacaacaggttgcagctaaattacttcaattagatacttcaacttacgtgaaaatggctggaggtattggcgctctgctcactttaattggtggaggatttgtgctggttgtaacagctctggtttatctggctgcggaatacacaattctgctgctgtgtgttaccgcccctgtgtttattttttgcctgatgtttggttttcttcgtcagatgttcaataactggttgcaggcgatattttcttccatcctgacagtcatgtttgcctcgattgtaatgatgggtgcaatcaggtttattaacaaaatattttctcagatggtacaacaagctgaattctcgaatctcatgactatggggctaatggcgggagttgctggagtgatctctggcgttttggtggtgctgtcgtcaaaagcggcgggacagattgccggggtaagcgtcaacgccgccgtgcagggtatggcgatggtagggcttggcctgggtgccggtgtggccgctaaagcagcgatgggggcaaccagaagcgttgcaggcggagccaaaggtgccgggcatggcctttttgaaggtggcgcagggcgcaagctggatgaaaaaaaatcgcgcggggcatcggctatgattggctacggtgctgcacggggaacccgtgccgtggttcaaaaaattcaacagcgccgggcgaggaaaaaggagaaagccgcataa

SEQ ID NO: 107112 - DNA, 129 bp, Enterobacter aerogenes
atgaaaataatcattgcgctggcgcttgcctgcgctctgacgtcatgcgcgtcacattcgccgttaccccctgacgtatcgggggaactcattccaattaactcaccggagatgatgaaaaatgtctga

SEQ ID NO: 107113 - DNA, 687 bp, Enterobacter aerogenes
atgtctgaaaaagagcgcgtcacgcgaacggcgaaaaactttgagcaacatatgctggaaagagacagccgcgacagaaaagcggggtttgtttttggcgggatttgtctcggtattgcggcggcggcagttattgccgtcgttatcctattgccattaaagcaaactgaaactgcattatatgttactgacggcattaccggcagaaccgaacgggtgacgatggttaacagcgtcacctttaatgaaaatgaggtgatgaataagttttgggtggcagagtacattaagcggcgcgaaggttataactattttgcattgcagaatgattataccgtcacgcagctttttaacagtaatgaagtcaataacgcctatctggatattttttcaggcagaacatcgccggataagatttatcacaatgcacagaaacaggtattaatcagtattgtttctgactttattaccgatgccaaagacccggataaggtagcgaccgttcgctacaagaaaacaatcagggataccaagacccgcgaagaagacgtggagttttgggttgcgcgtctgacgttccgctatatcccggaaaaagaactgacggaaagccagcgagaagcaaatccgctgggctttatcgtcacaacctattccactgaacgtgagcagggggtaacgcgatga

SEQ ID NO: 107114 - DNA, 921 bp, Enterobacter aerogenes
atgaaattcactgttgttttactcgcgctctctctggttgccggaggggtgcaggcggcggccacgccgcaggggagccgatatgacagccggatgcagcaggtcagctataacccgtacaacaccacggtgattaacacgcaggtggcgttcctttccacgctggtatttgacgatgatgaaacggtgatcgacgcccgttccggcatggcaaagggctgggatgttcagcatgacgccaaccgggtgtatgtgatgccggtgccggtcacgcagaccgaggaagtgaccgacagcgagggacaaaaaacgcgcacggagcgggtttatgaacccgttccgcaggactggacgactaacctgtttgtcgtcaccagtaagcggtattactcgctggaattgaaagtcaccgaacccggaaaaacgcctgttcaaccggctttcgtcgtcagctatacctacccgcaggagaaccgcgccaaagccgagaaaatggccgcagcacgtcaacaggaaatgcagcaggccaaagagcgtgaagccatcgcgcgtgcgctggaaaacgcacagtacccgcgtaactgggaatactatgccagacccggtaaagataaagccaacagcagcatgattatgccggatgtggtttacgatgatggccgctttacctatgtcggctttaagccagggaaaaaatttcccgccgctttctcttatatcgacgggcgggagcaaattcttaataccagtgtaaaacaaaaggcagatatcaagtatctggttattcagcaggtcaatcctgcctttgtattgcgttatggcaatgccgttatcggtattgtcaataaaggttttgggaaagtgcaggtaaaagatggcaatacggtttccccgcagattgaacgagtggagaaagaataa

SEQ ID NO: 107115 - DNA, 1290 bp, Enterobacter aerogenes
atgagtaatgaacaggataaaactccggatgaaattatgcgtgaactggcggaaaagcaacagcacgcgcattcccctgtagcgccggaacgtgaattaacaacagcagaaaaagaatcgttattaaagcaacagaaggagcaggaattaaaagaaaagaacaaagacaatgagcaggaagtccatcaaccggaagtgaccaaaatcaaaaaagggaaaaaagacaagctgcttaaatggctgattggatttattttgctggctgtggttttcggactggttgggatgaacgtctggcgaacctatacagggcaaggaaaaaaagagcagaccaccgataacgccgtcagcacgggaggaaagacggccaacgtgcgcaacgatttggggcaggacaaccctttccctgggggaagcggtgacggcgataccgaagggaatactgacgggcaggcagcagataccggaggaaagaacgcgtcaccgccgcctaaacccgccgtgttctcgcgcgccctggcttctgtgagtaccgtaaccgcgtcaggaagcaccacgcgaagccgcagtgaggaaaagggcaaggaagcggtgacaggagatgacagcgccagtgtgaagactgacggccagggtgtaccggctgggatcactcctcaatccctcaaagcagtgacgcgcatccctttcaaccctgacctgtatatcccggagaatcgcgccattccgtgcgctctgacgcggcgttttgtctctgacgtggccggaaaactgcaatgtgtcctgaccgaagatatctacagcgccagcgggaatacgcggcttctggataaaggcacactcgccagtctggaatacaagagcggcacgctcgctcacggcgtaggccgcgcatttatcatcgtgcgcaagctgcgtaccgcgcagccgccttatctcgatatcccgatggatgcagggggtgacagtagcgccgctggggaacttggcgaggccggggtgtcgggatggatagataaccactacgtccagcgttttagtggggcattaatggtgggaatggtgccggatgtgatgggggcgctatcgaatcaggcagggaagaaagaccgcaatactgattacaccgaaaacagccgtgaagcctttgcggatatggcaaaagaaacgctgaaaaacagcatcaatattccgccaacgctttataaaaatcagggtgaaattatcacgctgatcgctaatcaggatattgatttttcacatatctaccaactcaagctaaagaggtaa

SEQ ID NO: 107116 - DNA, 1032 bp, Enterobacter aerogenes
atgtcagacagtaacagcctgaattacacgactcgccgccttttcggtgaattcctcgatctggaaggattgacggaaatcgccgtcaaccgtccgggggaattgtttacaaaaatacgcggccagtgggaacggcatgaagttccgctcacgcttgacgattgcgagaagttttctcgcctgcttgcgacttatcacggtgaatacatttcggatatcaaacctattttatcggcaaccctgaatacaggggaacgttgtcaggtgattattccacctgcctgtcaacgggacacggtttcaattaccttgcgcaaaccttctacggtgcaaatccctcaccagtcttatattgacaatggcttttacgacagggtacagggcaaggtacaggaagaatcgcataatgctgaattgctccgtctgtacaaggaacgcaatattccaaagttcattgagaagtgcatggagtacggcaaaacgatggtgttttgtggtgaaaccggcagcggaaaaaccacctatctgaaaaccctgattgattatattccattgcacctgcgcatcaccaccatcgaagataacccggaggtgtttttcaaacagcataaaaactatgtgaatttgttctatccgagtgaagtcggcaacagcagcaaagcgattgtgacgccgggggctctggtgcgtgccaactaccgtatgaaccccgaccgtattcttatcaccgaagtgcgcggcggtgaagcctgggagtttatcaagatcgtcggttccggccatgaagggtgtgtgaccagcgtacacgccggttcaccctatgaagccattcagggactggttgaccgctgtttccagaacaccgaatgcagcaatctgccctacagcgtattactcagcaaggtgctgaacagcgttgatgtggtagccagtattcagcttgagggcgatgttcgccatatgggcgatatctacttcagggaggcggataaagcggagtacatgcggaggttccgcgatgaaatcttttga

SEQ ID NO: 107117 - DNA, 1827 bp, Enterobacter aerogenes
atgaaatcttttgataaggggcaactggcattcctgctgctggcaacgttacccgtggcctggatgatagcgacagtggccgtgtatccgcttaatggtatcggcctgatacagacgatcaaaacgtggcgcgtaggaatgttgtggacggtattaacggacagccacgtcaggcacgatatctggttcaacggaataaaagccctgggcgttggcctggtgggggcgctgttgatggtgggggggttaatcctctccgggaaccgcaaacccaaaaccgcgctgtttggcgaggcgcggttcgccacggatgcggatgtgcgtaaatccaaacaggtgacgtgggggaacgacaaaaaaggcggggtgatcatcgggcgttacaaagggcaactgctgcgctatacgcaacctgattttgtctcgatgggggcaggcacccgcgccggtaagggcgcggggatcgtcattcccaacctgcttgattttgaattctcaatggttgtgctcgacccgaagcaggagtgctacaacatcaccagccgataccggcagaagacgctggggcataaggtttttttactcgacccgttttccagcaagacacacggtttcaatccactgttctatgtggatctcgaccatgaaaagggcgcgggctatctgctgaacctgtctaccacattgtggccggtagcagggctggcaggggcggaggcgcacttcaacagcggtgcagggcgcgtatttatcgcctacaccgaacttctgcactttgccatgaagtatgaccgcaaatacctggaagcggtgggggtgaagccgctattttccatcggaacggtgctggacttgtactacaacgtcaatcaggaggaattgcttaccgaccgcgaagggtggattgaaaaagcgaaaaacgataatgaccggtatctcattaccgatgcgctgaacaaaatcaagaagctgtttgagtcagaaggggaagcgaagtccagtctggaggaaacattccagaaaaagctcaatttgtttacgctgcctctgttccgcaaagcgaccgaccgcaatgattttgatttacgcctgttgcgtaaggaaaaaatgaccgtgtatctgggtatcagtgccgacgatgcgaaaattgctgatgaattcctgaatttattcttcaatttcgctatcgacgtcaatatgcgagaaaacccggattttgtaccggaaaataagcatgacgttttgttcctgctggatgaatttccggcaatcggtgcgatgcattatatcaaaaaggcttccggctttatcgcgggttttaaactgaaactactgaccatctatcagaacctttcacaactgatagaaatttacggggtttacggtgcaaaaacgctgatgtcgatgcacccttgccgggttatttatgcagtaagcgagaaggacgacgccgatgaagtctctgcgaaacttggctacaccacgctaaaagccaaagggaaaagcaaaagccgtaataagggcggcacttcgcagggggaatctgaaaatgatgcgcagcgtgcgttggtgttaccgcaggagttaggcactctcaagtttgaggaacaatttgtcatactgaaaggggaacacccgattaagtgccataaggcgatgtactacaacgacgatttctttatggataaactgattagcctttcgccgtatttgcagggagtaaaagcaggactgaaaaaaggagaattccctaccaaattagaccttgctcatgcacttttgcgcagggagcttgaagctactaacttcgatttaaaagaggcatga

SEQ ID NO: 107118 - DNA, 468 bp, Enterobacter aerogenes
atgaatgcaaagaaaaccgctatcgctcaggcgatgagtaagccggaaggttacacgcttgaagatgatttttcgccagaatcgcagaatgaaactcagaataagaagacaggatatcgaaagttaaggccgggtgaaggtaaagaaatagcgctgaccattctcttttttttaatacgcgcactaaacaaaagcatcagatactttccgttaatgctgtttatttgtgcaattggaatattggcgttcgttcctgtcaatgtactgtttgaaataaaaacagagtggcagaactctggtgcgttggatttgggtgatttttcaaaaatgatagaaatgacaaggacagttatctggtacatatggctaataacattcatgtctgttgtggttagtgacatgcattatctaaccctgcctaaacacaatgcagcttttagtaaacctatgcgaggcgaaacgaagtga

SEQ ID NO: 107119 - DNA, 315 bp, Enterobacter aerogenes
gtgaatatgaataaattactgctaatcaccctgtttgtcattcctgttacgggtttttgtgccgggacaccggttaaagatgtggataacgctgttatcgctctaaaaaatcagcaattgcttaaagagcaattactggaattaaaacttatccgtcaggaattacaaaacctgaaaataaggaaaggtgataaagaaacctgcctgtatgccagtaagtcttataccgatggcaagcagatcaaggatgcgccgttgatggcggataaggtatgcgaaaacggtaagtgggtaactaaaggagagggagaatga

SEQ ID NO: 107120 - DNA, 393 bp, Enterobacter aerogenes
atgcgagcgttagccatttctttagtactgctcctggtagggtgttcttccccaccacctccgccagaggttaactggaatggggaagcacaggcgctgaataccaccttgccgcagtggcaggaaaacaacgtgattgttccggcccccgttgtggccggtaactggtcacgggtgttgtacggctttcagggagaccgtgaaacctatacgccggatgttttttacgccgtagcgcattcaagcgcggtgctggttgccgccagccctaaaggagactattttgcagccaaatcctggcttcgccagcatggtgcaaaaggtgttattcgttaccagtcaaaaaatgactgtctggcgtgtaacagcgtggatatttacctcatacgttga

SEQ ID NO: 107121 - DNA, 318 bp, Enterobacter aerogenes
atgaaaaaaactgcaattgcggcggcactgctgtgcctgaccgctacaacaatgccagcgatggcagacgataacgttgattccggcgatccgtgtacggtatttctttgcatggccgggaaagtcatgggtgaaagcccttcggagtgtaacggcgctgtgaagaagtttttcagcattaacgcctttaagaaaaaacatcgctttaaccccggtaaaacgttcgacatgcgtcaggaatttttagggcagtgcgccagcgcagaccctgccaccgtcagtaaaatcctgtctaaattcggaaaaattcgcggttaa

SEQ ID NO: 107122 - DNA, 303 bp, Enterobacter aerogenes
atgaaacagacagttatatttggttttaaagtcgttattttatacttcataaaacttgctgctctcgctgcgttcggattgatcctggtgtacttcatttcaaatggattgctttatctttccagtctggttatgcactcgtcagtacagtatgtgacgtggtatcaggtatgggatatgtgtgctgaactgttcaaacacatagcaccgtggttgccagtaatctttatttcctcactcgcgctttccgttgctttcagttttatcatgaaagtaggtacgacaaagtacaaaggagcctga

SEQ ID NO: 107123 - DNA, 225 bp, Enterobacter aerogenes
atgactgacaaaaacaaacgattagattatttaaaaatgtattcttgcggtcatttaggagggctggcgggaaacccggacgaaacaaatatcgttaaacacttttcaagtatttatgtgaggtctgattgtagcgatatccaggcagccgaaggactaacggtaaaatctattttagaaaatagcgcatttaaaattacctttaggatggaatcagaaggttaa

SEQ ID NO: 107124 - DNA, 1263 bp, Enterobacter aerogenes
atgggtaagttaacacttgtagaacaagctttgcgccttcataaagattattacggtgatgaaaattttgggacggtagtaaaagattatgattactaccctaaggttgctgagatttttataaatagaaagaataagaaaatttattctaatcttgatattgaaccaattgcatcaaccgtagtacatacaggcagtagtccggttatggctaaaaccggaagaataaaaaaacttatgttcaaagatggttctggagcttaccgaattcatcttggacagaatgaggttgttcacattatacgctttattcttaactcaaaagtcagaatggaatatgccgtaggtacgtctaaaagcatgtctatgcttcataatctctgtgaggctgggcgagcaaagttaaataggtctttacctcgtaaagggatctggaaactcggtaattatgatggtgttttttatcatggaaaagcaagaaaagatgaaattgaaaacgcacttcgcttttcagtacatccaaaatttgaagagttagaaaacgattttaatcaattcttttctgatattgattactatacgcgatatggtcaatcagggatgcgtaaaattctttttacaggccctcccggaacaggtaaaactactattgcaaaagcgttgggggcgaagtatcaggataagtatgtttttgtctatgcggatgactactttaaagatgtttgttatgcagccgcgaagaagaagatccccgtaattataattgcagaagaagtagatgagctttaccgggcagacgccggaacattgagttttctggatggtgccgacactccccgcaatgtggccggaacgtatgtcatcttctcgactaattatcctaaacgaatagatccgaggataataaaacgccctggacgtattgaccgaatcatatctgtaggcgcattcagaacaaaagcagcagccgcttgcgcaaaaatgtatttacctgatgatattgacctcaatgcaaaggagttgggtgctgtcctagacagaacaaccccggctgaaattaaagaaataataaatatagcgattggtatgattcgtgggactaaccacgaattatctatagaggtacttaaaaatgccagagcctttctaaaagggacgctcgaccttagcgtgatggaagcagaagaagatattgaggagagagagacactttataaaaaaaatggtgcacaacccgattatgaaagttaccttgaggattaa

SEQ ID NO: 107125 - DNA, 576 bp, Enterobacter aerogenes
atgcaatatgcactgtttgatggtcagcaacgaaaatttttgctggatgctaccgagcttgagttactgaaaggatggaaagaaaatccagttaaagaactatcgggttttgatgaatcaaatcatccgtaccatttatgttatggcggatatttgttaaaccctgacattccagattctgatatctgcgagcgactaaagaaactggagaacttttggttggcagcaattgatgacactgcgctgaactgccatcaaattgctttatattcaattcatacactccctgtaatctctattgggtatcaaaaaattgttccttttgcagcattaataaaatctgatgattgcataatctctaaagtttcagcgggatcagatttctcagtgactgcattcttgcgagtaaaagaatgggatgtcgcaactaatattctcaaccgtgaagggattttcgcttttaacgaagtggaaatgagatttaaagagcctgtaaatgaagataactggaaacgattgattgcagaagaacgcgctattcggtgcgctaacaaattaatcagatgtaaaggataa

SEQ ID NO: 107126 - DNA, 2145 bp, Enterobacter aerogenes
atgaaactctatatcgcagaaaaaccctccgttgcaaatgacattgctaaagcacttggaggaagcattcaaaagaaaaacggctatatcgaagcgggtgaagaccttgtaacgtggtgctacggccatttactgaaaaccgttgagccggagagttataacccggactataaaaagtgggtggcggcggatttacccctacaactctatcctctgcgttatgaacccattgccagtaatgccgctcatacacaaatcgttatcgacctgattaaaaaagcagatgtgatagtccacgctggcgaccctgacgacgaagggcaactgctggttgaagaactgctggagtatgcggggaatagcaagccggttaaacggttgctgattaacgacaacaccgatgcggcagtcaaaaaatctctggcgcagcttaaagataaccgtgaattccggggcatttatcgtaaggcgctggcaagggcagccggtgatctgatttacggactgagcatgacccgtgcctacaccattgctggccgggcgcagggctataatggcacattgtcagttggccgggttcagacgccgatcctgggattaattgtccggcgttatctggctaatcagtcgcacacgtcgagtttttactacacactggcgggtgatttttctgtgaacggtcaacaattcaccgccaactggaaggtcagcgaagatgcgccacaggacgataagaaacgccttaccagcaaaggctatgccgataacctggcgcaacgtttaaagggcaaggcggccagcatagaggccgcaggcgtgcaggataaagagacagccccgccgttaccgtttaacctggttaaattgcagcaatacatgaaccgccagcacaaaatgacggcggcaaagacgctggaaatcacgcagcagctacgcgaaaaatacaaggcgatcacctacaaccgctctgattgctcttacctttctgacgaacagtttagcgaagcgccgcaggtgctggacgcgctgaaatcgcgggcagaatatgcagatctgcaaatcgacgccagccgtaaaagcaaagcgtttgacagtggaaaggtcacggcgcacacggcgatcatccccaccgcgaacgtacctgatttatccgtcctcagcgagccggagcgacaggtatatgaggctatcgcgcaacactatctggtgcagtttatggcgaataaacgctaccaggaggcgtctgtggtggtatcggtggacggggagacgttcagtagccgcgctcgtcagacaaccgatgccggttttaccgcattcctgcgtggtgaagaagccgaagaaccctcagatgatgcgccagaaagcagttttgacgtactcaaggcactgtgtacaggtgaaagtggcagttgtgacggcgtcactgtgaatgagaagaaaacctcaccgccgccgttgttcaccgaagcaacccttctggccgccctggttcgtgtggctgattttgtagaagatgcgcgtattaaggcactgctcaaggccaaagacaaagacaagaaggatgaacacggtggcatcggtacaccggcaacccgctctgatatgctggaaaagctgaaaacccggcagtacatccagcttgataagggcaaactcattcccaccgataccggcttagccttttttaaagcgctgccagagtcagcgacattaccagatatgaccgcgctatggtcagaacagcaggctgaaatcgagcagggaacaaaaactgtagatacatttatcgaagacctgttggggcaattgcgtgaacaggtacagagtgttaccgtgggcgaaatccagggtgagggtaaaagcccggcgggtcaatccgaacgactggaagccccctgccccaactgtggtaagtccattgttgtcaggccaaagctgttcgcctgcaccggctgtgactttaaaatctggcgcgagttcattggcaaaacattgaccactaaccagattgaaacgttgctgaaaaaaggggcaacgggtgtaatcaagggctttacgagcaaagccggtaaaaaattcgatacggctttagttctggaaaacaagcaaaccggcaaactcggctttccacctcgtaaatag

SEQ ID NO: 107127 - DNA, 210 bp, Enterobacter aerogenes
atgaaaaaaacaaaagaagactggttacgccaattacggcgttgtagtgaaagagaaactctggaaaaggttgttgagctaaccagtcaaaaactgaccggcgatgatttgggacgattttacatggctgctgatcatcgtcgtgccgaactagtgatgaacaagttgtatgataaaattccatccagcgtgtggaaatacgtcaggtaa

SEQ ID NO: 107128 - DNA, 456 bp, Enterobacter aerogenes
atgagcgatacagacactaacaatgaaatccgccgcacgttgagcaacatcagatcgcttcgcgtgttcgcccgcgaaactgaatttgatttactgctcgatatgtacgaaaaattgggcgcagttattgaggaacgccgggaagatgccgagcgtgaagctaaagaacgcgccgaacgtgagcagaaacgtctggaactgctgcaactgattgccggagaagggttcaccccggaagaactcttagggcaacttgaagggcaagtcaaaaacaagaagcgcagcaaaacccctaaagctgcaccaaaataccagtttgtagaagatggcgttactaaaacctggacaggtaaagggcgaaaaccaaaacccattgaagaagcgctggccgcaggacgtgatctggatgaattcttgattgcaaaagattcgtctcaatctgaaggtgaggaataa

SEQ ID NO: 107129 - DNA, 189 bp, Enterobacter aerogenes
atgcgcttattaatagctttcattcttccctggttgaccttctttactataggacgacctattgcggggattatttgtctgatattgcaaatcaccctgatcgggtggatacccgctacgatatgggcagtctatgcgctttcgcagtacaaaaccgatcagaagatcaggaaagccaccaacggttaa

SEQ ID NO: 107130 - DNA, 2898 bp, Enterobacter aerogenes; identical to SEQ ID NO: 7675

SEQ ID NO: 107131 - DNA, 606 bp, Enterobacter aerogenes
ttgggacatcgtgccgccatttactgccgggtttcaacagcggatcagtcttgtgaacgccaggaatttgatctgcgagccttcgccggccgtgccggctacgacgtggtgggaatatttaaggaaacaggttcaggaactaaactcgaccgggccgagcgaaagaaagtcctggcgcttgcccagtccagacaaattgatgcaatcctggtcactgagctttcccggtgggggcgctcgacgctcgatctgctcaatacgctacgtgaactggagaactggaaggtttccgtgatagccatgaatggaatggcgttcgatctttcgtcgccgtatggacgaatgctggcgacgtttctttccggcattgcggagtttgagcgggatctcatcagcgagcgggtcaagtcaggccttgctgttgcgaaggcacgtggtaagaggcttggtcgtcaggccggagtgcgaccaaaatcagaccgacttttgcctaaggtggttgcgatgagggccgagggacgcagctatcgctggatcgcacgcgagctcggtatcagcaagaataccgtcgctgacatcgtgcaacgacacagagctaacgcttag

SEQ ID NO: 107132 - DNA, 636 bp, Enterobacter aerogenes
atgattattgttatcggtggtgataagggtgggacaggaaagactacgctggctgcaagcctggcggtttgcctggcgaagcagggaaaagccgtaaccctggttaagacggataataacaacagcatttcagactggtacgaagaaagaaaacaacgcaacttgccactgttcccgctggtagagtgctttggaaagattgaatccgagatcaagatgctcgataaacactctgccatcgtgattgttgatactgctggctatgacagtccggaattcaggagcgttctgcaatgcgccgatctgctgatcagcccggtaagaccctcgtcgcccacggaggttaacagcctgacgaaacttaacggcatcatcagaacggcacagcaactgaatggtaagctaaaagcgaatatccttttctatcggtgtaaacccaataaccacaaggacaggctggagcttaatgaatacctgacagcagatccagactggacgcaaccgttacagtcgtttatcactcatgcagccgcttttgataatgccatgaatgagggtaaaggtgtgcacgaaatgaaagatgcagggaaggcaaaagcacagattgaattgattttacaggaaattggagcgtaa

SEQ ID NO: 107133 - DNA, 264 bp, Enterobacter aerogenes
atggcactacctaaaaaagaccttaaccctgcaatgccgacaccggcagaattcgtcagagaagcgaacaaaaaacctgcatcggataaaggaaaacgtatcacgctataccttcccattgccgttgacgagaaattcacagcacttgcaacagagaataatgtcagtaagaccgttattctcaaaacgcttctggcagcctttgagcagttggatgttaacgagcaaaaccgcttgttatttgatgcaatcagggggaaataa

SEQ ID NO: 107134 - DNA, 303 bp, Enterobacter aerogenes
atgtcactgcttaaggaggtttttaaggtaacgttagacgtaatcccatccggcgataccgcgcccgttcaaatccaggatgctttgagaggtatgggttttcgttacaatggtattcatcatgaaccagttaacaatgattcctatagcagggcattctatcagtttaaaggtaaagcgataaagaccacaaatagctctgacaaagtatttgaaatcgtttacaagaaggaaatagaagataaggtaaaaggactttcaaaagatatacgagtgacgattcatgataaacgctttgaatga

SEQ ID NO: 107135 - DNA, 147 bp, Enterobacter aerogenes
atgagcgaatgttggttgaagtttaaagatatcgtgggtatttttcttttagcaagcggtattcttacagttactatgagtgaatacacgatggctggagctatagcatcgttgattgcagttcttctgctactttacgaaatgtaa

SEQ ID NO: 107136 - DNA, 141 bp, Enterobacter aerogenes
atggtagatattaaagacatatatgatatttttcttacatatacctttattgaaaagggggtagttatattagctatactcgtcaccatgcaggcggcgatatcgcttgcggtaaacctattcaaaaaatgcaggcgataa

SEQ ID NO: 107137 - DNA, 384 bp, Enterobacter aerogenes
atgatgatttttaaagagcgtcgcttattgaatgctgaggaaaaggagattttctgcaatctgcaaagactcttccctgatcacatcgcggtgatggcaaaggtaaaactttctgaatttttattgcctgccagagagtacggcactgaactattctatcatgattttcttgaattgaataaagtaacagcaccctttttaatttttaatttacgaagtgataaggtattagcagtcttttacaaggtaaaagtaaatgaaaccggggaattggaaaacataaaggaatggttattaagctgtcaaatcaatgtgtttgagtttgacagcctatcggaaatggttgttcaggtatctgaattatcgcctgcattttttgaatag

SEQ ID NO: 107138 - DNA, 525 bp, Enterobacter aerogenes
atgcagcgaacgactaaaagcgtcatttcgatgattgttcttcttatgatcccgctgtttgttgatgccggtgaagtgcgagtaggtttctctccatcaggaagtgcgcaaaaactggtgttagaggcaattggtgaagctcgcgtaagcgtagacctcgccgcttattcttttaccagcaaacctgttagtctggcgctgttacaagcaaaaaaacggggtgtgttagtccgggtggttgcagataaaaaggccaacgatgatcggtatacagcagtaacctttcttgttcacaaagggattgaagtacgattaaacgggaactatgctattcagcataacaaattcctggtagtagacgctaaatctgttcagacagggagtatgaattacacaaaaagtggtgatagccgtaatgcagaaaacgtagtttacctgcgtgatatgcctgaaacagcgaagcagtacacacgtgagtttaaccggttgtgggcggaatcagagagaatcgatgccaaatattaa

SEQ ID NO: 107139 - DNA, 453 bp, Enterobacter aerogenes
atgactaaaatctatcagtttccgcaaggcaatgaacgtaacgcctacaggaatgcggtaaaaaaggaaaagtctaaaaaacttgccataaaagcgcgagggaaagtaatggcgttaatatcctggtgttttctgtggctacgtacagcgattgcaacggcaattcattttgttattgtaatggcattggggatattcggggcgtttaagaactggatactgactttcggtattctgtattatctgttgatcacgtatgccctgccaaaggcggttaacaatccgactgagcaaatgttgataattgggggatgttacctgtctgctcttttggccgttccgctcgctaactggatgaataataccttccctgttcactggctcctcggattgaatggcagagagccggaaaaggaaaacttaaaggatgaagattatgcagcgaacgactaa

SEQ ID NO: 107140 - DNA, 1029 bp, Enterobacter aerogenes
atgcatgatcctaacgagatagagcgagaacgcaacttgaaaaccctacgcccccgtaaacatgaaattgacttcttcatcgctgatgaagtggagttatccggctttcgtgacgagatggccagtatggagcatcctttttttgccctaaaaggaggggacgataaagtcagagagtatgtaagcggtaacgtgattctgaccgtaaggccgtccgtggggataggtcttgcgacagtttttgataaagatatctggatttatgcaatatcgaaactgcaagaagccatcaataatggggagggaacaagccgtgaagtttatttcactccttatgatttttttgttacgactaatagagataagggaggtaaatcatataaggaattagagaaagggctggatagattgaaaggaactactattaaaaccaatatactgtattctgagcaaaaaaatgaattggcaggttttggtctaatcgatgactggaaattgaatgtagaaaagaaaggcaagctagatataggcatggttatgataagattacctgaatggctttatcaggcattgcaaaaaaagaaaattttaaaaataagccctgattatttccgcattcgtaaggccattgacagacgcatttatgagattgcccgtaaacattgtggtaatcagggtgagttccagattagccttgaaaagctacatttgaaaacaggaagctccgctctgctaaaaatgttccggcataacgtcaagcagcttgctaagaccaacgacttacctgattacagcatccagtatgatcttgaacgcgatatggtaatgtttacaaatcgcaatctaaaaccggaacaagttgaaaaggagcaaaaacgtgaacagggcaagcgtgaaattcataaactcaaaaatcaattaagtgaaggaaaaaatgaaaagggaaaacaatcaggcaggaagtacgttgtagatatttgtaatccgggtgaaccagatagcgaaatcccaccgggattcagagggtaa

SEQ ID NO: 107141 - DNA, 153 bp, Enterobacter aerogenes
atgcaccggtttttaaatcccgatagttggtttttaaatcccgatagttggtttttaaatcccgtgtacgtggtttttaaatcccgtgcggttatggcacttttccacaaaaaagaggggcagtgttgcctcaaaagcgcccgttttggttga

SEQ ID NO: 107142 - DNA, 222 bp, Enterobacter aerogenes
atgttgctctggcgatgggaatcagaataccgctggtacgaggccgaaatcttgtgcgacttgttcggtgactggctgatcgtccggcgttggggcgggctgtacagtggccgtcacggcgaaaaaacggaggtcgtggcggatctactctctggcgtagccgtgctgtttgccatcgacagggaaaggaagtccagaaaaccaccctacaagcgcctgtaa

SEQ ID NO: 107143 - DNA, 525 bp, Enterobacter aerogenes
atgaatattcagcaagcacttaatatctttggcctttcaggtgaactgaccgagcaggacgttaaaaaagcctacaaacaggcggcgctaaaatttcatcctgacaaaaaccgcgagaatccgacagcagcggaaatgatgaaagccgttaatgccgcatatgattttctgatgcagaatatcgaccgcatcaatgaagctcaaagcagcgacgatagcgcccgatacaactacggggaagaactagaaaacgtgctcaatgctttacagggtatgccaggcgtgattttcgaagtggcaggtaactggatttggatcagcggcgacacaaaagcgcacaaggacgcgatcaaggcgctgggctgcaaatgggcgagcaaaaagcaaatgtggttttaccgccctgacgagtataaggcgagccgtaaccgcaaagaacacagcattgacgaaatccgtgaaatgtacggcacgacaggtcagcgcaaggctacaggttttcagaaagttgaaaaccgcgcataa

SEQ ID NO: 107144 - DNA, 543 bp, Enterobacter aerogenes
atgaattcattttttgaacgctataaacccgtttttgaagtcgtcgcccgtctgctggggaacggctggcgcgtcaatctgcttgatgattgcccgtaccgggtaaaactcaccacgccagcgctaaagcgttacgctatcacggtacgggaagataaaggccgtctggtgattcatggtttcgttgaatcccgccagtggcacggatacggcgcacggtgtaccgtgtcgccgtcacgaaacgccacgggcattgccgaggatatacgccgtaaaatactgatacaggcacaggaggatgtaacaaaggcgcaggaagcagagcagaagcaacgggacgcgcaggagcaggaaaaaatcatcaaagggatgttggcgcagcttgtaacactgaatcactggcataatgcattgacgggctttaaagcggaaaacgggcttgatggaaaaattaccgatcatttcaacggttacgggctttttgttcagggtttgagtgtggatcagttgattaaactaacaggagcaataaaacagttatga

SEQ ID NO: 107145 - DNA, 258 bp, Enterobacter aerogenes
atgaaaaagtcaaagggcgatgctcaatattatcttgagaaggaaggtgatatatatcatcttgtaaaaagggttaaaacattttctaaaaaattgactcaggggaaaactaaagcaacaacgaaaacggtcagtgattttagttttactaaaaataatttcgaggatatagattttaatgcaaatggtttaagggagaaagataagtcaataattgttcagatggttgaagaaatcgaggggctacatgctgattaa

SEQ ID NO: 107146 - DNA, 234 bp, Enterobacter aerogenes
atgctgattaatacgcctgaaaacatcaaaattttgcgaaaaaaaatagggctaacgcagaaagaatgtgcggaaatgttcggaatgaccgcacgatcatggcggcgtaaggaagaaccacaaacgacagccagcaatacaacactatcgccaatagaatttaactatcttttgttactggctggcgagcatcctgattatgttttgtgcaagcgcgaggcattgcacccgtag

SEQ ID NO: 107147 - DNA, 213 bp, Enterobacter aerogenes
atgaaaaccatcttaaatctcacctatccagccacctttaaattctctttcactaaagctgaaattcaggacggtaaagcgttcatgaatagctacggtatttctaaaacatttgaagtgaaaagccatgctgatttggaaaacttgatccagattatcgccaaaaaatgcggcgtaaatccttctaatgttgattttgaaattatcgactaa

SEQ ID NO: 107148 - DNA, 138 bp, Enterobacter aerogenes
atggataaaggaaccttagaaatgtatgaaaaagaatatgaaatttatttcgattctttaaaagaaggtgacgaggttttaagtttaaaggaatatatagaatgtttaacgtggaaaaaaaaggaggatgaaaagtaa

SEQ ID NO: 107149 - DNA, 138 bp, Enterobacter aerogenes
atgtcaacgcatcaaatcgtacagcttgcggattctcttgtcaaaggctgggaaacgcgcattcctgcgatgaaaggcacggagtgggagcaattcaggtggtggttaaactacctgcaaggttacgcgatgttttaa

SEQ ID NO: 107150 - DNA, 297 bp, Enterobacter aerogenes
atgatagaaataaaacggacgccggaagttgaaaagtggctcaggtctttgaaggacagaacggcaaaggcaaaaatattgatgcgacttgagcgcatggaggacggaaattttggagacgtggagccaataggtgacggattatcagaattaaggattcatcagggtaaaggctaccgtgtgtattttggaaacaaaaacaatcaaattattctcttgctttgtggtggagataaaagcacgcagcaagcagatatcagaaaagcgaaacaattagctaaacagtgggggttttag

SEQ ID NO: 107151 - DNA, 285 bp, Enterobacter aerogenes
atgaaagaagaacttaaaaaatttgatgttgttgaatttcttgaagatgaagaagatattcaggaatatcttaatgcggcaattgaagaagatgatacaaaatatctttttaaagcattaggtaacatagccagagcaagaaacataagtcagctatctaaagaagttggtatgtccagggagggaatttacaaggcgttatccggtgaaggaaatccatcattccagactgtctctaaaatcacaaaagcacttggtttaaaacttcacttcacaggggcttaa

SEQ ID NO: 107152 - DNA, 225 bp, Enterobacter aerogenes
gtgaacggtgatcgcggcaccgtgatgtttcagggcattaaaaatggcgatgccatcaaagacatcgccaccaggcgaattaatgtgaaggttaatgtggctgacatcacccagcgctttaagatcgttaacaaactgtttggctgttactccccaataaccaatttcatcatagatatagatatccgcttcattgttggcgctggacttcatgcggaaccatga

SEQ ID NO: 107153 - DNA, 591 bp, Enterobacter aerogenes
ttgtaccgcgtcccaattggcctgcagggtttcgacgctgatcccctgattcaccacagagaaggacgtaaggaggatgccatctggcggagcctggttgccaggcgggataacactaatcgggcgctggtcgatgatcgcgccgttatcgatacgcgggaatttatccgggtcgtgagccacgccggtgatggtgagcgtgccgttattgttgtcctttacaccgaaaacgcggtactgctgaggcaccaggtcggtatattcgacgatccagacgcactccgcctctggcgtctcgctgtatgccgttgtgaccgtcacctgccgacgaccgttcaccgactgaatggtccgggcctgcgagatacccgacggcagattcagatgcaggcggtcgccctctttcgcatcaatatcacggtcgagcgtgatgacgcgcccattcaccgcgctgatacgaccaccattaacccgcccggccagccgttcgtcacccagcccaatgatgtaacccggctgtgggatcctgccgtcaagaccaacatcaatttcgaccatgcggtccttgttgttggtcagaatggcccataa

SEQ ID NO: 107154 - DNA, 591 bp, Enterobacter aerogenes
ttgcaccgcgtcccaattggcctgcagcgtttcgacgctgataccctgattcaccacggagaaggacgtcaggaggatgccatccggtggagcctggttgcctggcgggataacactaatcgggcgctggtcgatgatcgcgccggtatcgatacgcgcaaatttatccgggtcgtgagccacgccggtgatggtgagcgtgccgttattgttgtcctttacaccgataacgcggtactgctgcggcaccaggtcggtatattcgacgatccagacgcactccgcctctggtgtctcgctgtatgccgttgtgaccgtcacctgccgacgaccgttcaccgactgaatggtccgggcctgcgagatacccgacggcagattcagatgcagacggtcgccctcttttgcatcgatatcacggtcgagcgtgatgacgcgtccattcaccgcactgatacgaccaccattaactcgcccggccagccgttcatcgcccagcccaatgatgtaaccaggctgcgggatcctgccgtccagaccaacatcaatttcgaccatacggtccttgttgttggtcagaatggcccataa

SEQ ID NO: 107155 - DNA, 600 bp, Enterobacter aerogenes
atgaaggaaatgaaaactcaaatagaattgagcggaattcttggtaaaatttttggtacttcccatgaacgtataattactacggtaggggaatctattcaggctttatgctgtacaatagaagggtttgaaaagttcctaagcaatagcaaagaaaaaggcctaacctttgctgtgtttaaaggtaagaaaaatattggtaaagatgacttgggctttccagttagtggagaagttatccgaattgttccggttgttattggaagtaaaaaagcaggtattcttcaaacaattttaggtgcagcactcgtagtcgctggtgtgcttgttacggggctctcatatggatgggcggctccagtagggcaagcgatgattggcgctggtataggtatggggttaggcggtgtagttcagatgctctcccctcagcccggaggccttgcccgtaaagaatccccagataataaagccagctatgcctttggcggtgtaactaataccgcctcacagggttatcccgttggtttgctttatggtaagcggcgaattggcggcgcgattatttccgccggtatctatgtcgaagaccagcaataa

SEQ ID NO: 107156 - DNA, 834 bp, Enterobacter aerogenes
atggaaatcagtcgcataccagacagagccgtacggcgaggtctgattaatctgcaggaaggggcgcatatatccgtactgctccagcgtggaccctttcgcaacggtgaaccggaatctaagttcctgccaggtctgagatggcgagatattcccgcgcgaggtgtctgccactgctccactgttggggccggtagcccggccaatatagacgttaaagttcgccgttgcgcctgccttcgcggctatccagaccgatatttcaaacgtctgcccgccttttactggccacggttttgtattcaactggtgatcacgtcctgccagttttgcaacgtagcggcgtggagcacccgccggaacatccgggtcatacgggacgccatcatcgtcgttgctgtctaccgtatcccggcgggtaaagcccatcgatggatatgcggggtcaaatgtcgggttcaggatgtagtcgccacccgctgccgtctgcgaattcagagcaacattaatcccggtgatcgccgttccctgcgattcaattttcccctcagcactggtgacgcgcgtatcaagcttgctcacggcatcggcggtggccgctttggccagcccttcctcaaccgtcgctacgcgtcctgtcaggctggttatggcctggttcgccgccgtaatatccttgccctgttgggtcacggtggcgctgaggtcctgtactgtcttgttatccgccttctgatcaatccgcttgccgaggtcagtattcaccgtatcgactttattgctgacctgcgtaatctgctggccctggctggtgatgcggtcgccctgctgtga

SEQ ID NO: 107157 - DNA, 456 bp, Enterobacter aerogenes
gtggcctggtttatcgatggcgatgtgcgggcctacaaaattaaatacccgaatggcaccgtggatgtgttcaaaggctggtgcagtagcctgggtaaagccatccccgcgaaggaagtgatcacgcgtaccgccaaaatcaccaataccgggaaaccagaactggcggaagaaagcggcaacccgccgatcgcagtgaccggcatcaaactcgacaaggcaacagccagcgtggccgtcggcgcaaccacaacgctaaacgtcaccttcctgcctgccagtgcatcggaacagtctttccgtacggcgacctctgatagcgcgaaggcgactgtggccgtgagtggtaaatctctgattgtcaccggcgtggcggctggcgcggcagacattattgtcatgagcaatgacggtaattttgtggcgacctgcaaaaccaccgtgactgcgtcctga

SEQ ID NO: 107158 - DNA, 309 bp, Enterobacter aerogenes
ttgctcgacaacctgcgccttcagctggcgaagaaatttctcgcgcgcctggttcgatttttcctcaacctgctggagttctttctgtcgggccgtggtacgggatatcagggagagataatcgccctgagtgatgttcccctgtgcgcgggcctttcggaattgttcctggatactggccagcgaccgcgtttcaccactgagggttcgaacaccatctatctgccgaaagaacgattccgccagcgcatcctgccgccgcgccagcgcctcagcctgcgcgtcgttctcacgataacgctggtttaa

SEQ ID NO: 107159 - DNA, 264 bp, Enterobacter aerogenes; identical to SEQ ID NO: 88828

SEQ ID NO: 107160 - DNA, 279 bp, Enterobacter aerogenes
atgaaagaagcgcttggtcttatcgaaaccaaaggtctggtggcctgcattgaagccgcggacgcgatgtgtaaagccgccaacgtcgagcttatcggctatgaaaacgtcggttccggcctcgtcaccgcaatggtgaaaggcgacgtcggcgcggtcaacgcggcggtcgactccggcgtggaagcggcgaaacgcatcggcgaagtcgtcagctctcgcgtcattgcgcgtccacataacgacatcgaaaaaatcgcggcgcagcacaaagcatga

SEQ ID NO: 107161 - DNA, 873 bp, Enterobacter aerogenes
atggcacactacagcttaacgccgcgcgtcaaagtgctggcagaccgtttacgctcgcaggcaagcaccctgtgcaccgagcacgccgcgatcctcagcgcgctggatagcgatatcgcgggcattcccgccgccgtcaaaccggctcgccgtatctatgaactgatgcgccagctgccgctgaccatcagcgccgacgaactgattgtcggtaaccagacccgtaaaccgcacggggcgattttccatgatgaaagcgccgcgcatcgcccatccgtattccagttcctcaacctcaacagcgatctcgattcaccggattacaaactggtagtcgaaaaaggcgtgctggcgattaaacaccagttggaagagaaaacccgcgccctcggtagcgccgttagccgcagcgggatggatgaagtcaacggctgccgcgccgccatctacgcctgcgacgccctgctcgcgctggcgcaaaatctggccaacagcgccgaacagctggcggccgcggaaaccaatgcttatcgcaaagccgagctgctcgatagcgcggccattctgcaccacgttccggcccatccggcgcgtaattttaaagaagcctgccaggcgttctatctgttccagctggcgctacagctggataacggcagctatgcggttaacccgcaaggggcggatatcgcgctactgccttacttccaacgcgatatcaacagcggcgcgctgaatacccagcaggcctatgaaatcgtggagtgcctgtggttcaagctggcggaactgagcgaagtccgcgccgttcgccgcctgcgccgacacgccggcgatggaaggcttaaccccgcgtatgcagcgcctgcgtaa

SEQ ID NO: 107162 - DNA, 189 bp, Enterobacter aerogenes; identical to SEQ ID NO: 97942

SEQ ID NO: 107163 - DNA, 606 bp, Enterobacter aerogenes
atgaatcatctgcgcgtggtgttggggctaatgatgcttggttcagcactatggctggtcagcctgctgacgatccacatcggccgcacgccggtgcttaccctgctggtgattctggccatcggcctgctattggccaccgcctggcgctaccgctggcgtacggcgctgcgcgcgggcactctggccatcgtggtggcgggcgccgtcgcctttgtcgcacaacaggacggccagggcccgcgccgcgaccgggttaactggcagccgctcagcgagcaggctatcgctaacgcccttgcggagcataaacgggtatttattgatgtcaccgccgactggtgcgtgacctgtaaagccaataaatacaacgtgctgctgcgcgacgacgtccagcaggcgctatcagcgccagacgtggtcgccttacgcggcgactggagccgcccctccgctgacattagtcagtttttaaccgctcgcggcagcgccgcggtgccgtttaaccagatttacggaccgggattgccgcagggacaaattctgcctgcgctgttagaccgcgaacaacttctcgccaccttgtccgccgctaaaggaaaataa

SEQ ID NO: 107164 - DNA, 771 bp, Enterobacter aerogenes
atgaaaaccgcatacatcgcaaaacaacgccagattagtttcgttaaatcccatttttcccgtcagctggaagagaagcttggcctgattgaagtgcaggcgccgatcttaagccgcgtaggagatgggacgcaggacaacttgtccggctgcgagaaagcggttcaggtaaaagtgaaaacactgccagacgcccaattcgaagtggttcattcactggcgaagtggaagcgtcaaaccctgggacaacacgacttcagcgcgggcgaagggctgtacacgcacatgaaggcccttcgccccgatgaagaccgcctcaccccaattcactccgtttacgttgaccagtgggactgggaacgcgtcatgggcgacggcgaacgccatactggcacgttgaaagcgaccgttgaggcgatctacgccgggatcaaagccaccgagctggcggtaagtcaggaatttggcctgacgccattcctgccggaacagatccactttattcacagtcaggagctgctgagccgttatccggatctggatgccaaaggccgcgagcgggcgatcgctaaagagcttggcgccgtcttcttaatcggtatcggcggtaaactgtctgacggcaagcgccacgatgttcgcgcgccggattatgacgactggagctcgccatcggcggagggttttgccggcctgaacggcgatatcctggtgtggaacccggtgctggaagacgcttttgagctttcttctatgggggatccgtgttga

SEQ ID NO: 107165 - DNA, 1077 bp, Enterobacter aerogenes
  misc_feature (901)..(910): n is a, c, g, or t
atgagactcatgccttttaacttcgacaggatgcctgacggccgggtattcatcagcaacctcgctggctttcatcattttgtaggtgagcaagaatttttcgatctcgtaaacggtcatatcagcctggagcagtcctcatcgcttgaaagcaaacttttcgtttgcggagaggaatcttcatctgttacccctcatgcactaagttcggcttttgccaaacgactcatgaatgaactggcggtcaggccaatcttcatgattgtacctactcttcgttgtgatcatacttgcaaatattgccaggtcagtagggcatcggtcacaacttatggttatgatctcaatcctgaactgataccgcaaattgtcaacactataaagaaactgggtacacctccctataaaatagaagtacagggcggtgaaccacttctccggttcgatcttgtccagtcaatctatcacgagtgcgagatttcattgggtagtggtgctttcgaaatggtaatagctacaagtctgtcattactcgatgaaagcatcctctcatgggttaaagagcggaatatcaccttctctgtctctcttgatgggaatgaagccgtccataacaagaatcgccttcttactgactttcaggctcacaacaaagcagtaacaggtattcggaaaatcacagaagagcttggagcaaaccgggttgcaactgtcaccactgttactaaggaactgacaaaggagccagcttccatagtagatgctcatctgtctctgggtcttacagacatgtttatcaggcctgttagcccttatgggtttgctcagaagcagagcttcactttttcaatgccagagtattttgctttttataaagagttgatgcaggaagtgttgattnnnnnnnnnntctcaggtgagttttcgattatgaagtccagaaattgcaggaaatcttcgccatacagtagaggttctcccccactcactcctactacaccattcagggagaaagaggcgatggcaagtgctgactggttaagaagccagtcatcgtttcctgtcttaggaggctga

SEQ ID NO: 107166 - DNA, 276 bp, Enterobacter aerogenes; identical to SEQ ID NO: 91793

SEQ ID NO: 107167 - DNA, 1347 bp, Enterobacter aerogenes
atggcattacaaaatgagttaatcgcccgtggttacataacttcattactgaccatcccggaacagtcattgacggcgggcacattaaggctcgaactcgcttatggcaaaatcggtgatattttctggtcaacgacaagcgagcaaaccaccagcatctggaacaatatccccacccgcacgggagatatcctgcgtctcaccgatctcgaacagggaatggaaaacctgcgccgcctgccaggaagttcggcgaatatgcaaatattaccgggacaacgggaggcagaaagcaatctgcagctaacgcgtcggctggataaaaaatggcaggtgggagcctggatggatgacgctggcagccgcgccagcggtcgctatcaggccggaggtgcgctctatctttatgatatcaccacactcaacgacattttctatgtctcaggaggaggagatatcgagtttaatcaacataatgatggcaaccagaatggcagcctgtattattcgattcccttcggttactgggcgttaggtctttacggttcacagagccaatatcgccagttgttcaggggcaactggtcgcaaacggattataaaagtaaaaatcgctactatagcgcgacgctgtcacgactgctgtctcacacccgtcagcaaaaaacgtcgctggatttccgtatctcaaaaagtacatcacactactattttggcggtgaagaacttagggtgatgcgcaaacagaacccgacatgggagctgacgctacgacagcaacgctatttcgataaaaaagtcgtcgccgccagcctggggttacagcgccgcctcccatggctaaactccgtcgccacaccggaagaaaaagcaggccagttcagtaagcgctcacgcgtagtacatgccgatttgcaggccttaatgaaattcgatttaaccggagatagatttagctatgcaccgcattttaatgcgcaatatagcccggacattctctcttcggataaccaatttaatattggcaaccgctggacggttcgcggatttgatggcgaatatactctctctggcaatcagggatggtactggagcaatgatttcatctgggatattgccggcccggaacagcaattctatttaggattagatattggtcgtattatcggcagtgaacaatatcggcaaggaaaagttatttcaggtgccgttagcggattgcgcggtgatatattctcaacacaatatgattttttcatcggcacaccgctaagtaaaccagataactttagtagtgactcattcaatatgggtttctcattgaaggtaatgactccaacttactga

SEQ ID NO: 107168 - DNA, 510 bp, Enterobacter aerogenes
atgctggcggtaatgtgcggtattttctccgccggcatgtcatttgcgatgaacgccgctaaaccaatgcatgaagccgccgcggcgctgggcgtcgacccgctgtataccgcgctgccaagctacgtggtgatcatgggcggcggcgcactggttaacctcggcttctgttttattcgcctcgccaaagtgaaggatttgtcgctaaaagccgacttctcactggcaaaaccgcttatcatcagcaacattctgctttccgcattgggcgggctaatgtggtatctgcagttcttcttctatgcctggggccacgccagtatcccggcgcagtatgactacatgagctggatgctgcatatgagcttctacgtactgtgtggcgggctggttgggctggtgctgaaagagtggaacaacgccggacgccgcccggtcagcgtgctcagcctcggctgcgtggtgattatcatcgccgcgaatatcgtcggcctgggaatggctaactga

SEQ ID NO: 107169 - DNA, 336 bp, Enterobacter aerogenes
atgaaatatcaggttgccaggctgtatcgaagtggcgatttcgttggttatggaatagctgttgccggaattcttcttgagggtcaggtttcaacaacgatagaaaccgaaccgggagaattaccaaaagtcactgcgacatttaacttgcttaatgagcatttagaaaaccagccgaaaattgatttagataatccccgagcttctaaagaacttcaattcgtgatccatcctgatcggacgttaaccattgcacaggctgaagagctacgcgatgtggtaaatggttttcttacccgaaacaaactgtctgatggtgttgaatggaagtcttaa

SEQ ID NO: 107170 - DNA, 291 bp, Enterobacter aerogenes
atgaaattaacaatgttggctcaaccgaacccaatacttgatgaagatatattggcaacaatacgtacaggttcacgagttattgttcaacttaccgatggcatttcagataaattcaatatttctattgtgctgagtgtccgtgaccgtgatgagcatgttctggaatgtgaattcctgcaccgccagctcggaaaatttgatgaccagagtcttaagtacaaatcaccattccaagaggatgtcattgttttcatcaaagaagcagtgtttgatgttgaaaatgattga

SEQ ID NO: 107171 - DNA, 246 bp, Enterobacter aerogenes
atgtcagaaattacacctgcagaacagatccgcctgaccatcatcaagaaagttaactacgacaccgccgctgcgaagctggccattgactgggttggcgatagctatctcaaagctgagcttttcgcagactctttcgatcgcgtttatacggaaagtgagattgtctcgaaaacccgtaaggcgattcaggaagcgaccgaagcgctggcgctgtttgataccgcgactgagcagtccagttaa

SEQ ID NO: 107172 - DNA, 264 bp, Enterobacter aerogenes
atgcaatcaccattaagaaatttgcgaaaatcgcaaggtatgacgttgtcccatgttgccaccgcagtagatattgatcctgggaacctaagccgtatagagcgaggccagcagattgcctcaacggatgtggctgagaagttggtcaaatttttttcaggccaaattaatgaactccagattttatatccgcatcgctatttgaagcatacggaaagcaatcaggaatctgcaccacagaaagagagagatgaccgtgggtaa

SEQ ID NO: 107173 - DNA, 696 bp, Enterobacter aerogenes
atgaacattggaaagcgaatcagagagctacgccttgcaaagggtttaaaaataaacgatctggctgatgccctaggcattgatggcgctaacgtttcacgccttgaaactggaaaacaaaaatcatttactgaacaatcgcttaatctatatgcaaaagctttaggcgttgaagttgccgagctatttacaccactccaaaataaaactactgtatgtaataacagtacagatcatccagttcatggagagggtagctcggtgtttagagtggaaatgcttgatgtcagcgcaagtgctggtggtgggtttattcagggcagtgatgttatagatgtcattcgatccattgaatacaacaatgaccaagctatagctttgttcggaggcaggacccctgactcagttaaagttatcaatgtgcgcggtgatagcatggctgacactatccagccaggtgatcttatttttgttgatgtatcagttagcagctttgatggcgatggtatttatgtctttggtttcgatgataaaatttatgtaaaacgtttgcagatgattcctgataaattgttagtaatttctgataaccctaagtaccgggaatgggaaatcgaccgggctaatgagcacaggttttgtatatgcgggaaagtacttattagtcaatcccaagccttcaagcgtcacggctag

SEQ ID NO: 107174 - DNA, 591 bp, Enterobacter aerogenes
atgggatgcgatatccacatgatggttgagctgaaacgctcagtaaatgacaaggaagtttgggtcaactatgaccactttagaaaaaatccgtacttcggggaatttgatgacgaggatgagtacgttcgtatcgaacttaattccgtcagaagctatgttgcgttttctcagctttgcggtgttcgcgcttactcaaaagacacgccgatgatttctgagcctcgcggcatccctgatgacgctagtgaatataccaaacgggtatcgtcagaatatggcctggacggtcattcacacagttacgtgaccctggctgaaatcagagatttcagggccaatttaaagccaatgccattcaaaggcatgatttctacagaacaagctgctgatcttgataagggtataaccccagattcatggtgcggacggactagcgctgcaggatatgtacatcgcgagtggacagaggtggttgacgggcttaaagaaattggcgaagcgttggaatcccgggctttagagttctggccaaataaaaaatacgtaaacccagagaacatcaggatcgtcttcttttttgataactaa

SEQ ID NO: 107175 - DNA, 570 bp, Enterobacter aerogenes
atgaaagaactgacttttcccgacagcagtaatgacgagattgttcaaacggcacagaaaaacgatatgagcgttgagtttgtacgttggttcttcaacgaaaagaaagcagcttgcggtgagcaatggtttctggcgttaggtgctatgtgggaaggctggaaagcgcgtgaaggagaagtgaccgcaatggcgctgactcttgagaagagtcgtgaagcatcaggctgcctggctggcgtcgacctgcaggactgggttaggcagttggcggaggagagcttatcaatcaaggcaatgaacgattgcctatctgaggaattgcgtggttatgagtctgatggcgcatttgatggaccgaagatgcatctgctgtggtggcaggtagaaacccccgccaccgatcgcattgtagccgtgattaaggctgatggggccagcgagttcattagccgcctgcagcagtgtgtcgatgaaggtgattttgtgggtgatgaagttgccgtaattgttggcgctatcgactgcggcaaggaattttgcgagcaactgcgcgagggggccaaatga

SEQ ID NO: 107176 - DNA, 270 bp, Enterobacter aerogenes
atgagcaagtcatacatcgtaattatccggcgcgcctggtgtaacgaaggtgggcacggtatcgaatattcatctgaccttattcactacgaggcccgcaatggagccatatcacacggttttcggactgtagatagcgacgatttcaacatcggagttatcgagggcggcaagttgatttcatttgactggatggacaagccggttggagaaagcgaagacacgctggcgcagattgccgagctaatcggtctggaggatgcagcatga

SEQ ID NO: 107177 - DNA, 183 bp, Enterobacter aerogenes
atgaaaatcaacgtaactctcgcccagcttgaggccatcaagcgacttgctgatgattgcgccgcgatgattggctgcggaaattatgaggcagataaagcgtggtctcgcaacgtcgaactgattgacaggatgctcgaaagtaatgggctatcccgggacttcaaggtggaggctgagtga

SEQ ID NO: 107178 - DNA, 885 bp, Enterobacter aerogenes
atgtttaccggattgtgtgcttttccgctgacgccgatgcgcaacaatgaagtagatagtcgcgcgctaataaaaatcatcgaacgtctggtctcggcgcgagttgattcgctgggcattctgggctcaaccggcagctacgcctatttgagccgcgagcagcgcaaaatggtggtcctggcggcaaaacaacatgcgcaaggggtcccgatgatggtcgggataggcgcgatggcgacggatatgattctacgtcttgctgaggatgctcagcaggcgggggcggatgctgtgctgctaccagtgctgaactaccagcctctgacggatgatgaggtgtttacactgttccagacggttaaccgccatgtgtcggtacctatttgtatctatgataacccgcgcaccacccacagagccttttctgatgcgcttgttgagcatattgcttcgttatccaatatcgcatcaatcaagatccccggtttgccggccgaccaggctggcgtcagagtggcgacgcttcgtcagcgattgccgcagcgagtgagtattggcgtcagcggcgacgcttttgccgcggcagggtttaacgctggctgtaatctgtggtattccgtttgcgccggtctgttcccgcaaattgcccaaaatattaccgcagcagcgttgagcggcgagcggcagcaggcatcggcactaagcgaacggctggagccattatgggcattgttcagacagcacggtagtctcaaagtgattgccgctgccgcctctattcttgaactagccgaagtagagtgtttaccgcgaccgttggccccgctctccgcggaggccattaacgatgtcaaatcggtcatggataagctggatctacgctga

SEQ ID NO: 107179 - DNA, 768 bp, Enterobacter aerogenes
atgcaaatggacatccttgttgcgaagcaaagatttagttacccaggaatgggttacatttatagggctggtggtgttgctaatgactccagtgcgtatggtagcttggcgttaattcttggtgttgcatctcttattggtcttcgccataccagcaaaagcaaaatactttacattttgatactgcttggccttgtgtttaacatatatatttcacttacgcgaactctggtttttgcgctggcggtatatgtattctttgatttaataagaacaagaagccttagcgtattcaagatgctgtttttcgcagctatcggtgctggtgttatcatttacggcattagtaatgattacattgttgcgctaatggacaggattaccgggtcaggtcagattgatatcacatctggacgacttgcaacatgggctgccgttccagacatactaggcgaaagcccaatctttggtgttggttatcgtatggctactgataagtacggcatcgttcctgataacgtgttcatatcatccttgctggaaacaggcgttattggtttagctttgtacgtgggtatgcttgtgtctctgtgctactgcgtttacaagaacaactcagaaagtctcccgcttctccttgcgtttatagcatcagggatgtttgttgatatatctacgttctggattagtattcctgcactaatcttctttgttgcagttaacagtcagcgcgatgaggatgatggtcgccatcgcgctatagaatga

SEQ ID NO: 107180 - DNA, 1089 bp, Enterobacter aerogenes
atgatagaaaataatgagttagctaatattgagaaaagaattgtcacccgctttctcgatatgtttattaagttcggcttgatactggcgctggcctccttctgctttaccgtcttctcgccgttcctgaacatgatgctgtgggcgctgattctggccgtcacgctgtatcctttacatcagcacatcgcgcgacgtatcggcgggcgacaaggactggcatctaccatattagtgttattcggcctgctgattatcgtcatcccgaccattttcatggtgacctcgcttggcgaaagcgccggcagcctgattgataaagtcagcggaagcgatctgacgctaccgccgccatcggctaacgtcgcctccattcccctcgtcggcggtaagctgtatgcgttctggctgaaggcctcggcggacttgccggcggtactgagcagttatcacgcgcaaattggcgaggcggcgaaactggtgctcggcgtgctggcgagtatgggcggcgggctgctgggctttgtcctctcctttattgttgccggcgccatcatgacctggggcgcggcgggcgccagcagcgctaaacgtatcgctatccgtatcactgatgaaaataaaggtcttgccctgagccgcctgtgcaccggcactattcgcgccgtggcgcagggggtcattggcgtggcgctgattcaggccttgctgacgggaattatcattgcgttggcggggatcccggccgccgggatcttctttgtgctggcgctggtgctcggcatcgcgcagattccggtaatactagtcaccgccccggcgatcgccattatgtggatgaccggcgaccacggcaccgcggtgaatgtcgtgtttaccgtcctgctgattgtcgcgggaatggtcgataacgttctcaaaccgctgatgctgggccgcggcgtagacgcgccgatgccgatcgttctgctcggcgcgttgggcggcatggccaccgatggcattctcgggatgtttattggcgcgaccctgctctccatcgggtatctgatcttcatgaactgggtaaacgaaggcgcggcgaagtaa

SEQ ID NO: 107181 - DNA, 324 bp, Enterobacter aerogenes
atggctattagcacacccatgttggtgacgtttattgtttatatttttggcatggtactgataggttttattgcctggcgctcaaccaagaactttgacgattatattctcggcggccgcagccttgggccatttgtgaccgcgctctctgccggtgcatcggatatgagcggctggctgctgatggggctaccaggagcgattttcctctccgggatttccgaaagctggatcgccatcggcctgacgctggggcgtggattaactggaaactggtggccgggcgtctgcgcgtgcataccgaagtcaacaacaatgccctga

SEQ ID NO: 107182 - DNA, 1227 bp, Enterobacter aerogenes
atgctgcttgatgccctgtttcgtagcgaaccgcttgaaaaccctgcgctgccaattacaggggattctgcggaaacggacaatatttttgcccgtgatgtgtttgtcagcccggaaacagcgatgaaactggctgctgtgtatgcctgtatttacgttatttcgtcaaatattgctcagatgccgctgcatgttatgcgtaaaacaaacaaccaggttgaagcagcccgagatcatcctgttttttatcttgttcatgatgagccgaatatgtggcagacaagctataaatggcgcgagttaaagcagcgtcatatcctgggctggggaaatggttacacctgggtgaagcgttcccgtcgtggtgaagtttccgggctggaatgctgcatgccctgggaaacgacgctgcttaacacgggtggtcgatatacctatggtgtttacaacgaagagggggcgtttgccgtcaatcccgacgatatggtgcatatccgggcgctgggtaacaaccagaaaatggggctcagtccaattatgcagcatgccgagactatcgggatggggatgagcgggcaggcatacaccagttcattcttcaacggtaatgcacggccagcaggcattatttcggtgaaaaaccaacttaacgaagaaagttgggggcgattaaaaagcatgtggcaaaaggccaccgccgctttacgaagccaggagaataaaacaatgcttctcccggcagagctggattataaagcgctcaccgtttcccctgttgatgctcagatcattgatatgtcgaaactgaaccgctcaatgattgccggaatattcaatgttccggcacacatgattaacgatctcgaaaaagccacgttctcaaacattacgcagcaggccattcagtttgtccgctacacaatcatgccgtgggtgaccaactgggagcaggagcttaaccgtcgtctgtttacccgcgctgagcttgctgctggatattacgtcaggttcaacctgacgggcttgcttcgtgggaccccgcaggagcgcgcgcagttctaccacttcgcaatcactgacggctggatgagtcgcaatgaggcgcgagctttcgaagatatgaacccggtagatggcctggatgaaatgctggttagcgttaatgcggctaacccggtagacgattttaaggcaccaaaaaccgacgaggaaaaaaccaatgaatga

SEQ ID NO: 107183 - DNA, 351 bp, Enterobacter aerogenes
atgcccgcgctgataccccgtgcttgccgcaagcgtggatgtccaggcaccaccactgaccgttcgggatattgcgagaagcatcgcaatgagggatggcagcagcaccagcagggaaagagcaggcacgagcgcggttatggtagccattgggatattaagagagctcgtatccttaagcgtgacaatcacctgtgccagagttgtctgcgtaacgggcgtgcggtagcggctaagaccgttgaccacatcaaggctaaggctcatgggggtaccgatgacgactcgaacctcgaaagcctgtgttggccctgtcacaggacgaaaaccgggcgagagcacctcaaatga

SEQ ID NO: 107184 - DNA, 264 bp, Enterobacter aerogenes
atgcgttattacttacttcttggaggacatatgcgcctgacagttctcgacgacgatccgggtgaacgtatcgaacccggtcgcgagcgtattacggtgtaccttgatggtgttgaggtaaagcacgtcttctcggctgatagcgataaaggcgaagtgattgccgcagtgcttgatagccagggctacctcactgccgagaacggcgaggttaagcgcgagactctgttcggtcatgtgaggatagagcgatgcccgcgctga

SEQ ID NO: 107185 - DNA, 531 bp, Enterobacter aerogenes
atgaacgtatatgaaatggaagggtttctgcgtggtaaatgcttgccgcgcgatctcagggttaatgaatcaagtgctgaatatctagtgagaaaactcagctcagtaagcgagttgcaaggcgaagtaacagcgttagtagcgaccctgggaaaaagccgtgaggtatccggctgcccggctggcgtagacctgcaggaccatttgcggcaactggctgcggagaacgtgggactgaaggcagctaacaatttggctctcaatattctgaacgatgaagaaaccatggtgacaagtctgtgggctagtagcgttcagcatgttgaagccaccactcccgccaccgacgcttatctggacgggattaaggctgatactgcagccccgctggtgagcgctcttacggtgatcgcaaattcagagcagattagcggcgaaacggttgtgtgtgattttgactcgcttatttctgttgccgcgggcgcattgcgtgactactacgcccagcagctgcgcgagggggccaaatga

SEQ ID NO: 107186 - DNA, 300 bp, Enterobacter aerogenes
atgagcaagtcatatgtcgtaattcagcaatacgtctgggccaacgaaggcggtcacggtatcgaatattgctcagatctcattcactacgacaaccgtgcagacgcaatttctcacggattccagctggcagaaagtgacgatttcaatatcggcgtcatcgagtccgggaaccttgtgtcattcgactggatggataagccggttggtgaaagtgaaggcacgctggcgcagattgccgagctaattggtctggaggatagcgatgcgctgatgccaaaacaggagccttcagcatga

SEQ ID NO: 107187 - DNA, 318 bp, Enterobacter aerogenes
atgaaaaaaatcacagcactgccagtagagcgcgaccaatacggttactggactcatccgctatacgatgaattttgtgatggtcgggagtttatttcatctgaggagttcaatgcctggctggataaaaacggactcgcttggaaagtggtttaccgtgatgaggatgatgtagacccaactgtcgatggttacgacatctctcaatggcagccagaaccgcctgctggagagggctggtttgttggctcaattcacgacactgaagatggcgcggtatgtatctggttgcgtcacgctgaaggcggtgccgcatga

SEQ ID NO: 107188 - DNA, 267 bp, Enterobacter aerogenes
atgaccagtaaattaactaaaaaagagcaagcctgggtggatgaggtaaatgcggtgctcgcgcggtgcccgtcgccgaagaaagtcggtttttacaccatcggcgacccgtcaatcgcgctctacgacctgcgcaggctagatgaggtaacggcaatgctggatggccgcaactcatctgactggtgtaccgccgttcaaaaaatcggtgcgggctttgatgaaaccattgagtttccgtccgccgtcgaaagcacagccgggtaa

SEQ ID NO: 107189 - DNA, 234 bp, Enterobacter aerogenes
atgaaattgggtattctttttccggtggtgattttcattgtcgccgtggtctttctgggctggttttttgttggcggctatgcggcgccaggggggcatgatgaaaaagacaaccatcattatgattattgtcgccatcgtggtggtcgccggcaccgaattgggctggtggtaatctcaaattttcccgccgccccggtattgcggagttgtcttatctactcaataagttaa

SEQ ID NO: 107190 - DNA, 324 bp, Enterobacter aerogenes; identical to SEQ ID NO: 106698

SEQ ID NO: 107191 - DNA, 189 bp, Enterobacter aerogenes
atgttaagtattaaagatttgcaagtcgccgtagaagacaaagagatcctgcgcgggctgaaccttgaggtgcgccccggcgaagtccacgcgatcatgggccctaacggctcagggaaaagtacgctctcggctaccgctcgccgggcgggaagattacgaagtcaccggcggcagcgtcgagtttaa

SEQ ID NO: 107192 - DNA, 153 bp, Enterobacter aerogenes
atgaaaaagctttctaaacagggttttgaatattacagcgggcgtacgttgcgagttttcgccctgacattgaattttgttgtgttgtttatcgtgattgcggcgctgtcagccttgggtatctgcatggtcaacgtctgggtgaatcaatga

SEQ ID NO: 107193 - DNA, 255 bp, Enterobacter aerogenes
atgaccaatgttgattctcaagacacaaccatctaccgcgataatttaaatcgtgtcgttgtcatggtgaggggaaataatcgccgagagtttactccagatgaatggaaagtgatctgtatggcggctgatatcgatttggaaaatcgtgtatacgcattaagcagagcattggaattgcggagcatgcgctgggatgaagaacgtaatcaactgctaaaacgcattgatgagttagagaaacgccatggctag

SEQ ID NO: 107194 - DNA, 2472 bp, Enterobacter aerogenes
atgatcacgctgaaaacagataaaaaacgtctggcgctatttattgctctggtctgcgccgcttcatgggctgaagcggatgaggctattgaatttaataccgacgtactggatgccagcgacaggcataatgtcgatttacagcgtttttccgaaggcaactttgtggctcccggagaatatctgctggatgttcgaattaacagccaggagattcctcagcagacaatccgttatatcgccgatcctgctaactcacataaatctatggcgtgtctgacggcgcaacaacttgagttactggcgctcaaagaagaggcgctgacccatattcatgccattagcgcaacctgctatgacatttcccacctgccgggtgtggcgctgaataatagcgcaggcgtactggacattaccgtgcctcaggcatggatgaaatataccgacccagactggacgccgcctgagcgctgggataacggcgtcgccgggctgatttttgattacagcatttcagggcaggccacgcattacgaacagggtggcgatcactatcgctctctgtccggctatgggcagacaggttttaacctcggcgcatggcgttttcgtggccagtatcaggccaattacgcttcagatgataatcatgggcgtatcgactgggatcagatctatgcttatcgcccgttaccgatgcaggctgcaaaactgacggtcggcgaaatctatttgaattctcaggtttttgattcggtgcgcttcaccggggtcaacctcgccagcgatgagcgtatgctgccgccaaatttgcagggctacgcgcctgaagtgcacggtatcgcccgcagtaatgcgaaggtcaccgtcagtcagcagggccgtgttatctatcaaaccaccgtccctgcggggccgtttaatattcaggatctgcacggttcggtacgcggtacgttggatgtgcgcgtcgaagagcaggatggcagcgtacaaactttccaggtcaatacggctgatatcccttatctgacgcgtccgggttatgttcgctacaacgccgcggttggtaagccgtcgcgttataaccacgacgttcagggccctgcgttttatagcggcgatttttcctggggggtgagcaatgcatggtcactgtacggcggcgcgttgctcaccggcgagcgctacaacgcctggtcgatggggattggacgggatttaagctggctgggagcgctgtcggccgatgcgacgcaatccgtgagtcgggtgaagcatcaggctgaacaaaaaggcatgtcctttaagctcagctacgccaaaacctttgatgagtacaacagcgcgattacctttgccgggtaccgcttttcacagcgaacctttcgcaccttctcgcagtttctcgacgagcagtatgaaagtaacaacagcgccggcaacgaaaaagagatgtacaccgttaccggcaacaaaaccttttttgctgacgatccgcatttagcgaccacgttatacctcacctatacccaccagaactattgggatcgcggttcccaggatcgttacggattatcgatgggacacagtttttccttcgcgggaatccaggggatcagcgccaacctcgcggcttatcgctctgagtatcagggcaaacgggacgacagtctttcgctttcaatttcagtgccatggggcgatggccgctccatggattatgaattacagaacagcggtaaccagaccagccaaatggtttcgtattccgataaccgcgatcgtaataatccgtggcgtttgcgcgcaggggtttccggggaagggcgtacggcatttgatggttattaccagcatcgcagcatgatggcggagctggaatctaacgtcagctggcagcaatcacgctatttctccgtaggcggcacggtacgcggcggctttacggcgacgcgtcacggcgcggcgttacataacagtcaggcgtcaatgaataccgccagagtgatggttgataccgatggcgttgccaatgtgccgcttaacggcgaacaggcgcactcaaaccgtttcggtattgccgttgtaccggacgtcgtcagttatcacagctttgatacccgtatcgatgtggacgtcatggacgaggatatttccgcgaccaaagcgatcgtgactaacaccctgacggaaggcgccattggctaccagcgctttgccgtcgcgcaggggcaaaaaatgatggcgctgctgcgcctgaaggatggctcggtgccgccgtttggcgccgaagtgtttaacgccaacggcgtcagcgtcgccatggtgatggaaaacggcatggcctggattgcgggggtgaatccgtccgagcgtctttccgttgcctgggctggccgtgcgcagtgtcacttacaggtgccacaacaaatcaacccggaaggtaacgtgctgttgccttgtgaataa

SEQ ID NO: 107195 - DNA, 330 bp, Enterobacter aerogenes
atgtggtctgcgaggggggggagcttcgatcagggcgcgttgaacattaatcttggcgtacaaactaccacggcgtcaggcacggcgggatttaacgatcatctcctcggcacgctaagcggcggccaaaaacgcgacgatctcggcattgtgattaaagacgcgagcggcggcaccgtcgtgcccaatcagttctacaacgtgaagggtttttaccagaatcagggcgactggaatcttaccgccgcgccggtggccaaaccgggcgtgggaagcgtcaaagaaggtgagtttgaagcctctgccaccgttgtcgcgcagtttcagtag

SEQ ID NO: 107196 - DNA, 624 bp, Enterobacter aerogenes
atgctgcgcgccaatgccgccactggcaacctcagcatcctgctgccgatggtcaccagcctcgaagaagttgacgaagcccgccgcctgattgagcgcgccagccgtgaagtcgaagagatgattggttacgctattccgcgcccgcgcctcggggtgatgctggaagtgccgtctatggtctttatgctgccgcagttggcaaaccgcatcgactttatctcggtcggcaccaatgacctgacgcaatacatcctcgcggtcgaccgcaataatacccgcgtcgccaatatgtacgactgcctgcatcctgcggtattgcgggcgctggcaatgatagctcatgacgccgagcgttttggtatcgatctgcgcctgtgcggcgaaatggcgggcgacccgatgtgcgtcactatcctggtaggactcggctatcgccatttgtcgatgaacggccgttcggtcgcgcgcgtgaaatatctgctacgccgtatcgatatcgaagaagcgcaggagctgtcacggcgcagtctggaagcgcagatgaccaccgaagtgcgccaccaggtggcggcgtttatggagcgccgcggtctcggcggcctgatccgcggcggacggtaa

SEQ ID NO: 107197 - DNA, 189 bp, Enterobacter aerogenes
atgcagtacctggtactcggcgtcaccaccattgtggtcgatatcattgtgatgatcggttacgcgacgctggcgcagcgcattgcggcctggattaaaggtccgaagcaaatgaaggcgctgaataaagtgtttggctcgctgtttatgctggtaggggcgctgctcgcttccgcccgtcacgcctaa

SEQ ID NO: 107198 - DNA, 618 bp, Enterobacter aerogenes
ttgacgcggatccggctggcgacggagatgatgggcgaacaggacggctatcttgccgagtcgatcaataaagatatcgaagagtgcaacgccatcatcgagcagtttattgattacctgcgcaccggccaggagatgccgatggagcttgcggatctcaatgccgttttaggcgaagtgatcgccgccgaaagcggctacgagcgggaaatcgccaccgatctgcaggccggagaaattccgctgcgcctgcatccgctatcgattaaacgtgcgctagccaatatggtggtgaacgccgctcgttacggtaagggctggattaaagtcagcagcggcagcgaagccagccgtgcctggttccaggtggaagatgacggcccgggaattaaaccggaacagcgcgaacatctgttccagccgtttgtgcgtggcgatagcgcccgtagcaccagcggcaccgggctggggctggcgatagtgcagcgtattatcgacaatcataacggtcgcctggagattggcaccagcgaacgcggcggcctgctgatccgcgcctggctaccaattccggtgcatcgcgcgctgtcgccggcgaagcctgcgaaagagagttga

SEQ ID NO: 107199 - DNA, 699 bp, Enterobacter aerogenes
atgaagcgcgtgcgtttttcgccgcgaagctcatttgcccgcaccctgttactgatcgtcaccctgctgttcgtcagcctggtgacgacctatctggtggtgctgaatttcgcgatcctgccgagcctgcagcagtttaacaaggtgctggcatacgaagtccgtatgctgatgaccgataaactgcagctggaagacggcacccaactggtggttccgccggcgtttcgccgcgaaatttaccgcgagctggggatttcgctctattccaatgaggcggcggaagacgcagggctgcgctgggcgcagcattatgaattcttaagccagcagatggcgcaccagcttggcgggccgaccgaagtgcgggttgaggtcaacaaaagctcgccggtggtgtggctgaagacctggctgtcgccgaatatctgggtgcgggtgccgctgactgaaatccatcagggcgatttctcgccgctattccgttatacgctggcgataatgctgctggccattggcggcgcgtggctattcatccgtatccagaaccggccgctggtcgacctggagcacgccgcgctgcaggtcggacgtgggattattccgccgcccctacgcgaatacggcgcgtcggaagtgcgttcggtgacccgcgccttcaaccatatggcctcagccacgatttgcgcacgccgttga

SEQ ID NO: 107200 - DNA, 204 bp, Enterobacter aerogenes
atgagtggcggagacggacgaggtccgggtaattcaggtctgggacacaatggtggtcaggccagtgggaatgtgaacggtacatcaggtaaaggtggcccttcatcaggtggtggtacggatccaaacagcgggccgggctggggtacgacgcatacacctaacggggatattcataactataacccggggggggtttggtaa

SEQ ID NO: 107201 - DNA, 903 bp, Enterobacter aerogenes
atgtcacaaattacagaaaataaagttgtcaccgcaccggtgccaatgaccccgctgcaggagttctggcactatttcaaacgcaataagggtgccgtcgtcgggttggtgtatgtggcggtgatgattatcatcgcggtattcgccatctttctcgccccttataacccggcggatcagttccgtgattcgctgctggcgccgccgttctggcaggatggcggcagcctggcgcatctgcttggcaccgatgacgtgggtcgcgatattctctcacgcctgatgtacggcgcgcgcctgtcgctgctggtgggctgtctggtggtagttctgtcgctgatcctcggcgtggtgttggggctgattgctggctatttcggcggggtggtggactccgtcatcatgcgcgtggtcgatatcatgctggcgctgccgagcctgctgctggcgttggtgctggtggctatcttcgggccgtcaatcgtcaatgcttcgctggcgctcaccttcgttgccctaccgcactatgtgcgtctgacgcgcgcggcggtgctggtggaagtgcaccgcgattacgttaccgcttcccgcgtggcaggcgccggcgcgatgcgccagatgttcgttaatattctccctaactgtcttgcgccgctgattgttcaggcgtcgctgggcttctctaacgccattctcgacatggcagcgctggggttcctcggtatgggcgcgcagccgccgacgcctgagtggggcaccatgctttccgacgtattgcagttcgcgcaaagcgcctggtgggtagtgaccttcccgggtgtggcgatcctgctgacggtgctggcatttaacctgatgggtgacggtctgcgtgacgcgctcgatcccaaactgaagcagtaa

SEQ ID NO: 107202 - DNA, 993 bp, Enterobacter aerogenes
atgattaataacatacaaatgctaagggctttggcagtaataatggtggtggcatatcattctgttggggtagttaataaatatggttttggattagtagactattcgcaaataggaagatggggggctctgggagtagatatattttttgtgatatctggatttattatggcaatgatagatgacaaaaaaagaaaatccccctatgagtttgcaaaagatcgtgtgttaagaatcgtgccaatttattggttaatgattattacattgatagtaatccaatcgataatgccagaaatatttagagatacgatctatacgacgactcagaatatcgcatcaatatttttcgttagtagttattttggcttcaattatccaacgttatatgttggttggagtcttgagttagagatgtttttctatgctgctttctcattgtgtctaattataaaaaatcaaaaagctaagttagtttccctgatcggaataatcttggtattatcgatgttgggtttaattaaaccaatttcaatggagttcgctttcggaattatcgcctactataccagcaaaaaaatatcatcaatgcaagccaacattttgttactcctctcggctacattaatcgcgatagcgctattttattctctgtcaatccctactgacttgtactctattgaaagacctttatttgctggcttgatttcatttgctattgtgtttacagcagtggtatgtagagatgtaaaaaacaatttcatgacggaggtcggtaacgcttcatattcaatataccttgttcaggtattttcaattccgttaataacaaaaatagtagtgaagctagatttgaaggtgagcggtttgatcgttttccttgtggccacaatattcacggtaattgcaggttatatcttctacattctaatagagaagaatgtggttaatgtaagtaaggggcttagaatgagacagctaaataaagtatag

SEQ ID NO: 107203 - DNA, 1095 bp, Enterobacter aerogenes
atgaaacacataaaggaactcgatgggctgcgtggtctgatggctctttgggttgttgctggtcatgcttatgaagcaattccacctctttcaagcatgatcccgattaccctaatgaatgattcagctgtggatgttttcatcgttcttagcggttttgtaatctttaattatttaaacaaaaacccttctgtgccttacaaaaaatacataaaacagagggcgttaagattattccctatatatttggttgttatggcattaacaatctcgagcatctatttctatagagatatattggtaagctcaccaatatcaccatctactgactttaggttacatcagatagacacatttcttgacaagatgattcaacatattgtcccccatctatttctattgcagggaattatcccagaaagaatattgcatctttctggaacaacaattgtaggccaggcatggagcgcgtctgtcgagtggcaattctatctgattgcacctcttctttttgtgctttgcaatagagtaatacagtccccaaccgtaaagaaatccatcatcataattatctcaatgtttttattcttagtgattagcagattaattaacaacaaggcattcattgggactggagcagcagcgtttttcattggatttatatcatttttctatcttcgtgatattttccataaagtaacagacaaaaatataatccttacttcgctatgcctgtgcgttgcaacaattcttattttgaaaaaggactgcattggttatcttatttggattgttgtgttttccgctacgttaattaaaaacaaaagagaaaaagacaatatcataacaaaaatactcaccaacaacctatcacaagcaatcggtaaggtttcatactcggtatatatggttcatatgttagttatctacatcgttctttatgtaatgacttcattgcagttgcctttaaatatgtatttcatgttagtccctctgtctattgcgttatctctaatcatttcagtttacacatataagtttatagagcgccccatgatgaacttgggtaaaaaagaaaaactcgcccacaactga

SEQ ID NO: 107204 - DNA, 2574 bp, Enterobacter aerogenes
atggcagaagttccattacctacaccgacacaagctcctgttccaagcactgatatccgtaacgctgtttttgcaggcgcgaagcttgatgaagaagtcaccgggacaggcaatctttatattgaccgtctgggtgtcaaacgactgactaataccggaagaaataaccagttcaactcagcacagcaggacaggttaactctgtttaataatcaacttgctgatcagaataccaggttcaacgaattcatagcgtcatctggctatctgattattggtgattattacgatggaccacttacggtagaagattataaccagctggttatgtacaaaaatgagttatataaactcacctctgctacaggcattccatttacaacatctggaaactcagatagttcatggagcgaatctgattcagtgcattttgtatcggttggtgatgcagcgcttcgtcagaatttggcttcgaatgcgcctggtcagggattatcgcttaccactacaactcaggggataaccggtcaggagttcgctgatgcaactcttcagacttcagtatcccgcattacggatcatggtgtaggttttgcaaactggccgcagggtaaggccgttacgttcaataataatctttatgtggggtataactacgcaactgcgcatggatctgtagtgcaggatgcgatggttatttcttcgcataatgggctggactgggcggcgccagtgatgattgcgcagcacaatagcaccgagtccgcatcggcgtggtcgcttggatataacgcagcagcaaataagttaatcgcactggtacgttttcgcacggggggcggggacacgtccccaatgcggtatgaggcttacgaatccacgaatagcggggttacatggtataaggccgcagacataaatatcaaatcaactaccggttatgacgcggtagaactgcatggtttttgccttgatgctcagggaaggtatattacggggtaccatagcattgatggcgagttgggctatcttgcgattaatacggatgattataccttccaaagaattgtcctgatgagtgcagcggacaacttcaatggaacattaatccagtgtgagcttaatttcctgtattcatcaggtttacaggagatcctgataacggcgcgctcgcaggatatttcaaagggataccccaaagcctgggttattgatgcgaatacccttgctgttaaacgcggcccgactgcgacaccattcgcacaatctcttaaccccgtaactgcggtttacagcccggactttaacgaagtctggtttatttacgctaatcgttatgattcaacaaatatctctgctcaacaggcgggcatgtgggttagcagaaccagcactaccgatgcattcaatcttaactttgcgtcggcgaaaacaaatatgttatgccaggcttcaggcgcgttaagcacatcagctgccgtagccggcgctcagcatgcttgtttgtttggaaacagaattgtcattccttttgcggccagggttgaacataactctgacagatccgacgtatttgttgtcactgtcgatatggatgctgacaggtcgaaagttggcgcagcccgttataaccctgttaatacgatggcctcaactgcgaaccagaaagttgagcagcgctactatagtgtcggtccttatcaggcgcgtattcgttttaatggccttaacctggtcaatgacacaggcgagagctttgatcttggtttctcaaactataacaatggttatcgaaacttcagattctttacaggaacatctacacctacgctatatattgcgagcggtcagagcgtggctggaagcgcaaaaatagatttgaacgcatctacacagttttatggtactgatcaccaccttcgccctggtgcccggctgcgcattaattcctcgatagatagtcctgggccgtctgtcttgtattatgatcagaatcttggcctgattatggttggttcctcagctgcgggcgcttcgccacttgcattggtcgggaacggagttaccacagcatttacttaccgaaatattggtggtgtttctgcggggcatggattcagaaatgctgacgataccgccgcaacacagacgcttgtgaggggttctggttcttccggttttgcggttgatattgctggcattgctaacgcaatgtcgatctcgccaacctccggtaatgtttcgtttgtggggccagtcagtgcaccggcttttaatccgacatcagaccgtacactgaaatcgaatattggtgatattaacccggctttaatcgcggtcgctaaagctgtaaaacctcaacaatatacgcttaacggagatagcgagaagaggataagaaccggatttattgcacaggatattatcgcagagatggaagcaaacggcctcgactggagagaattttctctggtcgtagaaaacactgttgtacaagaaggagaaagcggcactacaacatcaacttattacagtgttgattatatgcaaatgttgcttcttaggagcttgtaa

SEQ ID NO: 107205 - DNA, 228 bp, Enterobacter aerogenes
atgaaaacgttaaaggtcgagaaaaccggctgctggggcatgattgatggtgtcttccagcagcttcctgttggacacgaattcgtcgcggcggatattcctgcagcctttgcaggtcgcgtgtcggtagttggcgaagtgaaagatcgcgtgcttgaagtcgcctctcctggcactgatgctgaggagcagccggacaccaccgctaaagcgaaaaagggtaaataa

SEQ ID NO: 107206 - DNA, 432 bp, Enterobacter aerogenes
atggacgcgttaaagttttcaacattgtcccgcatgctaagtcagcacggtgaagatcttcaattcaaagcagaaaacctgtttgaacgtgtttacaattactggaacaagtcacaaacacttaactcacagataaaattttccaaaactgctgaaggactcaaaattgttatcccacagtgcgattttcactgctttggagagtcaaagataaggttttacgattctaaacctgttaacgagattacgtttttcacaaatggtaacgataaaaaaataccctttgccatttttcatatcaatcaagataatgagttaagcgttcccggcaatgccgaggcaccaatagtagatctagactacgcaaggtcagtggaagaatatttcatgaacgagctaattatggcagcctcaaaggccagccttgtatag

SEQ ID NO: 107207 - DNA, 504 bp, Enterobacter aerogenes
atgagtgaccacgaaatcgcacttcagactttctatgttgcacagtattcagcaagatgggctagatacgccttgtggatatctggattatctgcagccatcgcctttattgcgggagtggtgaccttttgggctgtattggtagcccggaaaggcctaagttcatggaaggatcagcatattagcaatgctaaggctgaatggattgcctcgctagtgaatttcgcttcaggagtatcttatctgccatgccgaattaattgggaaaatgaaaatgatgctcaacatattgccaaggttgctgcgcttcaatacgaatgtattaagtgctggaaagttcttcaggttcatttggctcataatcctaaattagaaaaagagttctatgatagatatgctcacctgtggagcaactttagtgttaagtcacataattcctacatgaatggcaagatggatatgaaggaactaaaaaatatctgcattgatttatataacacttaa

SEQ ID NO: 107208 - DNA, 966 bp, Enterobacter aerogenes
atgctcgagccagttaaaatccataaggaatatgacgctctcatcgagttactcgaatctcgcgggattgaaatcccagatcgagagcatgcaatccgaaaaattacacaagtcggatactatcgactttcaggcttttggtatccctgccgtctcccattgcttacctcaggcaaagtcacgggtcgatcggataaagtaagaaaaggaactaactttcgccatatctatgacctgtatctctttgacaaaaaactacgtctcttaatgatgaatgcactcgaacgaattgaggtatttattcgttcagtgattgctcatgaaattggtcgtgcgaatccattggcttatcttgatgattcttttattaatcaaacgcatcttaagccacgaccttggcggctgaacccaatcagcgtcagggaagaatggctgcttaagcacgaaaccgagttaaagaagagtcgtgaggaatcaatttgctggcatgcaaaacgctatcaagggatacccttttgggtagcaatagaggtctgggattttggtcttatgtcaaagtattttgcaatgctaaaggatgggcatcgtaatgccattctgaagcgtttagatatacctgcaggcatgggtggcatcttcgaaaaatggttaagcgccatgaatgtattgcgaaacagatgtgctcatcattccagaatctggaataaattgaatgaaccaaagcttaagcctctgcctaacactccatattttgatgagctagcacttgactctgatgcgtatgaacgaatgtatggaatgatagcagtactgtggttcttagtgaaaaagattggtccaggctctcaatggataaataacgtagcagacctgatagacactaagcccccactagttgggtgtcatcttactgcgatgggatttcccgataatgatggattccccagaacagcattcggcatttaa

SEQ ID NO: 107209 - DNA, 543 bp, Enterobacter aerogenes
atggtaagtacacaaaatgcagtgaatagtgggttgttggcttgtgcgtatcaggccgatataacataccctggcgttaaacactttgactgcggaaatgcagttatcaactcctttgtgcgtggctctttaaagaaaagcgttaaggatggtaattgtgcagccaaggctttaatcgatgagtcatcgggtgagctgataggggtttgtagcttcagcgcctactctcttgctaaagagaagttagccggtgtaatcagcggttctttgccgaatgatgtcggggtagtgcgtcttacaatgttaggcgtggctactaaagagcaaaagaaaggctacggcataatcttgatgacggagtttttagatcaagtaaaagtaatacaccaggctctcccaattaagggagtttacctggacgcagatcctgatgcggtaaatttttacgcgcgcttagggtttgttgagttaaacgagccaccaaatgcatttggggctaaaccaatgtttcttgggatacagcatattcttgccgctgtatag

SEQ ID NO: 107210 - DNA, 321 bp, Enterobacter aerogenes
atgaataatgtagcgatgttcccaactgatactaagggcgttaaaaacgctcgggttgagttgaaaacgagtagtgatcttaaagaagtgcttcgtgaagcggctatggccgcaggtctggatttgagtgcgtttatccttaacgcagctctggagcgagccgaaagcgtcctggataatcagcgtcgccgagagctatctgaacagagctggcagcagctaaaccaacttatgtccgaacctgccgcgccaacgctggctttgcaagcgttaatgcggaggaagtcaaaagatggtaagtacacaaaatgcagtgaatag

SEQ ID NO: 107211 - DNA, 390 bp, Enterobacter aerogenes
atgacaactgatatcaccgaactggcgcagagagagaaattcgaagcgtggtgggagcgcgagtataaacatctcgaatcctcgaaatataccgatgctgtgccgcatatcaaatacggtttctggatggcatatcaggccggtggagctgagctggtagaggcgctggagaaggcgcagaccgagcgcgatgaattcagaaaccgtctcaaacttgagcgctcgattcttgaggatgccgataagcgcatcgccgagctggagtcccgcaccgtgaagctgccagagtcattcaagttggctaaatcatcgagcggattaacgtactactacgccgacgaggttaatgaagcgctaaccgcgcagggcatcaagtgggaggctgagtga

SEQ ID NO: 107212 - DNA, 237 bp, Enterobacter aerogenes
atgagcaacgctattcagcaaattaatttctacgtgaacgaagcagctactgaaactctgcgcgaccgtcagaactacctcactatcgtattcatcccttggttacgtcgaggacttgtaaacacagagcagtgggttaaggagaatccaggtgatgctgaaatgcaggaactttacgcagcatatcgtgcaggggttgaattttttaatgcctgggaaagggagcgtaccgcatga

SEQ ID NO: 107213 - DNA, 930 bp, Enterobacter aerogenes
atggataatgtcaatttcccggttattggacagcagcaagatctagaccttttcccggtaaaagagattgaagtcgatggtattcaaatgggggttcttaataacggcaccccttacttaactatgcgtgggttatcgaggctgtgtggtgtcgattctgcaacaatggttagatttaccaccaattggcaagaagaaagatccaagccgagaggtaaaaaaatcgatgcgattttgcaatcaaaagggctttttctagataagctttacactactgttgttagtcaaggtactgaaacgcatgcttatcctgatactgtctgcatggcgattcttgagtattatgccttcgaagctgcaaaaaatggattattcgatagcacaacagcgcttcaaaattaccgagctttagcagaaagcacactacgacgcttcatcttcttgagcgtaggaattgatccagaaaacccacttagaggcgcccttgagtgcttccatgaaagacttctgatgaatgatcaaattccgcttggcttcttctcggtgttcagagagatggcagatctttctttacggatggtgagacaaaactttaattttggtccaggagcaataccggatatcagcgtgggtatgctttggtcaaaacactgggtagcatcgaatcttgatgccaaatatggaattcgaattaagcatcctcatgtttaccctgattggttccctcaggccaaagcaggcccagtagaggcatggatataccctgatgatgctttgggtgagttcagaagatggatgcaaaatgagtacattcaaaatcgcttaaccccttaccttctgaaaaaagttagcgatggcagtctccctaaaattgatgcaccaaaaatcattgaagcacttcgtaagccagaattaccaaagccacactga

SEQ ID NO: 107214 - DNA, 192 bp, Enterobacter aerogenes
atgcgaatctcttcgctcaacctcggatgcaaaattctgtttgttaatgagcaggcgacttgccgtccgccgctggctaacttcgctcagctgtcgatgtttcgtttcgatgggcttattaaaaactatagttgttttatcgtcaacaacaatagttgttattttggttgttttggttttatgtggttgtag

SEQ ID NO: 107215 - DNA, 189 bp, Enterobacter aerogenes
atgactaaatatattttgataacttcattgcttagtgttggaggacagcctgacgttaatacagcaaagtttttcatcgtggattctgatcgggattgcattgcaaaaatgggggatattcaacggcctgcccatgaagaagggaagaaaatatatacatggtgcgtccctgccattgaagaaaaatga

SEQ ID NO: 107216 - DNA, 195 bp, Enterobacter aerogenes
atgaataaaattattagcagtgttatcaccgggattgtatttgcaattgtagcaatgttgatttcatggatcggtaattcagtatttcatggaattcatttcagggcttatgcacataacatgcaatatgcctctgttctgttctttgtgattggttatgtttggcgctctgaatggaaaagtggtaagaaatga

SEQ ID NO: 107217 - DNA, 879 bp, Enterobacter aerogenes
atgaaaaagttaattcttgcaagtgttattgctcttgcctgttcctctgcattcgctcatgaagtggattataaatgtagtcgtgaggctccaaatggttttgtatccatcggaacggaatacaaacagattgattatatcaatcgtccctatattgaaatggtgagtcctacgggtgaagtgacagattaccgctatgatactttgtctgatctggaacagggtgtttatagttttgatcgtaattctgttatttccattacgagcaatactgattacccgcttgttgttcgctacaaagatgaaagtaaatcatatgagtatcattgccaattagatgatgatgcaaataaggttattgcacaacgtgaagcggaggaacggcaagcagaagcagacgcaaaagcagaattagcggctagtgaaaaggtagatgcggaaacagcagcggaaacagcagcgaaagccgcagcggctgaggcagcagcagcgaaaaaagcagccgccgctaaagaagctgctggtgttgatgatctgttgggtgatttggatactggtaagagttcccctaagccatcacataaatctgttagttatggtggtgcttctggtgttgatatttcgtactacatgtcacaagtgcaagccgcggtgaaaagccatctgtatgattatagtgattgggctggtaagcaatgcaacattcaagtgatgattcaggcagacggcacaatcacagcggtagatagtgaaggtggtaatccagatttctgttcatacgtgcaagcatcatttaacaagataaataaattgcctaagccaccatcacaggcagtgtttgaatctttaaaaactatgcatcttattttcaaggcgtaa

SEQ ID NO: 107218 - DNA, 348 bp, Enterobacter aerogenes
gtgattcttgctctgcaaaaatcgaggtatagtaatagttttacttttgaaatgggtatttgtgttgatgagttgagagatgttgatgcgctgaaatattatacgtgtggaatatcattgagattaaatagtattccagaatttgaacctgtagacatagacaaatctttagatttggaaataaataatgaaaattacttctattcctttgtagagttcttagatgaaaaaggaatggatgtaataatgagtttctttgagcctgaatatcttcagcgattatataaggaaggtttttttattgataaaatgattgataatcattctgtagatattttatctaattaa

SEQ ID NO: 107219 - DNA, 453 bp, Enterobacter aerogenes
atgagatttaaagtacagataactccagagatatttgattttccaaatcttcacaaggaaagagtcgagcttgaaaactacgttcatgaattaacaaggaattctgatgcagagaaaaagcttccagaatggagtattagatttttatgtttgctaggtggcgagggacatgaaattggtatttataaaaaaggggcgacttatacatctgagttaatgaaaagttacactatatatataccaatcccaacgagtaacgatattttttggggggttgaaaaagaaaaatatgctcataggtcgccaatagataaaagtaaaatgaaaatgctaagtgtgaactttaatgaatataataatgtgaagcattatattttggcgtgttcaaaaattggtattttagatttgttaaagaccggctttagcttaaagggagtgaaattcagaatataa

SEQ ID NO: 107220 - DNA, 138 bp, Enterobacter aerogenes
atgtggtatgaggaagagtttttcgcggagatgcacccgcaaatagcgcaggttatcgggatagcggctatgcacctactggttgagaagcaagagccgtcaagagaagctctgatagagattattcaggtgctatga

SEQ ID NO: 107221 - DNA, 900 bp, Enterobacter aerogenes
atgtcccaagaattatctttaacctttaccgaaaacatatattattcaacaaaagaacctgtaagcatcaaagatgtgatcacatcccttcaagggtgggaagccatcgcaaagcaatcagaaggtgttttacaggagctgaccggtgcaaatatcctcgatatatcggtgcatgtagcccgattagaagccggaagcctctatgaagatatagttattaaactcctctttggcagccaagaagaaatggacaagtttcttgctggcgctcatgcaaagctaggaaatgggaaaatgagaaatgctctcgttggtgctgtcgttataggtctagttagctatggcttggtcctggcaactaaggctatggctccgaacaacacctcccactttgaagcaaacaacaatacgattatcaatattggagctggtgaggccaatatttcacctgaacgccttcagtccatcatcgaaagcacagtcaccaataagaagacacttgccaaaaactccattaagacacttgcgccagccagagcagatgagggagcaactatggtaataggcatgggtagcggcacagtgacaatcccggctgagaccattaaaaaagccccaactgaagttgtgtttacgccggaatcgtatactcaagatcactctgatgtggatgttgaaatccgcgcattggacctcgataatccagagaaaggctgggctgcagttattcctgggttgatagatcgaagagtaaatatggtacttggtcccaacgtaaaaccatcagactttgctggtaaatttgctgtacgggctgatatcacaataacgtatcaactcaaatcatctgataagaaataccagccaaaagaagtatttataaaagaagtaatcaaataa

SEQ ID NO: 107222 - DNA, 288 bp, Enterobacter aerogenes
gtgaagcagttggcggaggagagcttgacgctgaaacagttccccgagcagatagttaaatttatcggcagtcttggctcaagcgagattggtagcgacacgaaagagaaaattgagttagccgcaagccgcattaaaacctccgctaccgatcacatctacgccgaagccgaggcgcgcggagttgagaaattcgcgaaaaagcttgagtcacgtggaaggcatcaggactacgttgaaattgccaacgcattcgccaagcagctgcgtgagggggccgacaaatga

SEQ ID NO: 107223 - DNA, 504 bp, Enterobacter aerogenes
atgactgatatcaccgaactggcgcagagccttaaagcggctgcagagaaagcgactccgggcccgtggcatctcagtaatgagaataagttgcttatcagggatgaggatggcgtatggattgcacatgttggttattttgattcaccgacagagatttctgacggtgagttcatcgccctggctaaccctgccaacatcatcgcgctggtagaggcgctggagaaggcgcagctggtagacgacgaactttgcaagctcctgcctccaggtgttgagtacatggacccaccagacggcggtgatgtcacgccgcttgagggagtgcgtcgaatggtggctgattatcgccagcgcatcgccgaactggagtcccgcaccgtcaccgtgaagatgcctaatcaaactcagtttgatgatccgctatcagcgtatgaggctatcgagaagtgcaaagaggcgcttaccgtcgagggcatcaagtgggaggtcaatcatgactga

SEQ ID NO: 107224 - DNA, 357 bp, Enterobacter aerogenes
atgccggggctttttcgtttctggtggatcaaatttcaaccgctggtggttattcctggcgttagcagtcctctagcgacgattaaaaatattacccacgacaattacaggctgcgcacttgcgtagccttttatatttgtgacgtactcaagcgagttgcagcgccggccgacgcaaagacctgtaaatcggctgagccgcagttactggcggccaataccaaaacagagcggcaggaaataagcaggggtagcgccctggtgtcacaaactattgaccataaagttagcgctttgttaacttatgagcgtggtgaatccccctatgcggaggggcggaaacagcattgtatttga

SEQ ID NO: 107225 - DNA, 336 bp, Enterobacter aerogenes
atggaagcgttgttaacatttacatttaaagactttatagcttttatgattcctctttttattggcgggcttatcttcaataggagacgtaaacgtaaggaggtccgagtgaagttttcatttctttggcttgttttgatagttggtggaattcttgaaatatgtgatgagatttacacaacttattcctataggcataatcacttatataataatgatacgcttacaaccgtgtttaactatgattttgcaaaaattgttttttgtggggttttgatctttgtttctattgtgcttcttcttcaggagttgcttttaaacaagcagtcacattga

SEQ ID NO: 107226 - DNA, 2292 bp, Enterobacter aerogenes
atggcctttaatccgccgctggggagtacctctcccgctgtgttgcttgataacgccacgcgcctggataagctggtcaacggacagccgacgaccgttcccgaccgcgccggtgatccgctttattcatggcggggcatccaccagaaccttattccgctgagcaagcagtatatgacgctggctgatgctcaggcggatattgccaatatccacgaaggctcgaccacgtattaccgcagcccggatgatagcgcactggctatcgaggttatcaacagcggaggaacactagcacctaccgggcgtaggatgccttcacaggcattcgttgcaggtatcgaccaatttaccgcagagctttctgcacaaatcgctgctcttcagctaaaaacagcaatgctgtcacaatacagctcagatgagtggcaatggattttaaccgggttgcaggggccatcggcaacagcgcttgcactggataacgatttcgggctatggctggcaggtcttaaatcatcattgcaggattatgtagagcagctaatccccaaacaacaggcaaatctttatcagggattacaacatgtcattgtggctcagaacggcgttgatggtcttctgactattgatgataatggtgatgtacgtattgtcggcactgatgatgttcttcaggacaggcttaacgcgctatgttccactaacttttcccgcaccattattggcttccagcatgtcgtttttgcagccgatttaaaaaccgccatttttgcaatagatgatgatggcggggtccatattcccggtatcgatggaccgttacaggacaatcttggcgaatcactggcgaccgttaaaaccgttggcggtgtacctgcagcagcatggcgcggagaggtggtctggtcagaacgtcccgtactgactacgcaaaaactgacgccttccggtttcgttttcagttatctacctggcggagaggcagtatctggttccggggtgatgtatgtaccgtcaatacgtgaaatgccgcttgatgcacctgaaattcaggggggcggttcaagtggacagtctctgaacatggaagcggatcatgtcggacagaatattgttaatcgtaatcccatttatcgcgggcggttattggccgggatgaacggacggcctgaaggtaaaaatatacaggcggtgaatgaggatgatgtatccacattgaacgatatgaattatccatcataccggcagggtaatattttacctatgtacgatgtcctgatggataagggggtaggaaataccatatttattcatgcgccttttgcagcaggaggtcgttcatttaaacaaatcagcaaagggacaatcccatatcagaacgggcagaaatttgtgcagatgggtaaagatgccgctgatggtgttggtaagccgtatacattccggtttctgacgtttgagcacggtgaaacagactccgataatggcgacaatcttttacctggtgattaccttaccaaagcaaacacctatttctccggtctccagtctgatttcaaggctatttccggacagacgactgatttcgctgtcatcatcggtcaggtgggaagccgattttataccaggtcacagccagtggatgaagccggtaatgcccagggtgacccggtaatcgttcagccttactctatccccgcggtggatcagctgacttatgtccgccagaatccgaatacggcaatcatgtacgggccaaaatacccgcttaactggctatatagcgacgggtcactcagccacatcaatgcaaaaggcaaggtgttacagggtgaatataccgcgcaggcaatatactggcatctgtacgataccgaaaagaaaggaacatggacgggatgtaaaatcagggatattacattaacaggaaaccttttagagcttgcctgtgatgttccctttccgccactgatcatcgatacagattttattgccaactgtccgaactacgggatcagcctggagaaaaactcagccacggtacaggctgtttctgttatcaatgggaacacaattcgcgttgaactgaaccagcctcccgcacctgatgacgtcctgttaatcggatttactaataccacaccacataccaatggaaatctttatccgctgacctgtttcagggattcttcacagaccgtgtcacgttgggtgacgctcaatggcgcacctttccctctgtataactggttatgtctggatcgtcttcccctcactggagaaatataa

SEQ ID NO: 107227 - DNA, 420 bp, Enterobacter aerogenes
atgcagttttacacgcccgttgagttacgtgagatcatgctgatcccgttgtacagtgaccttgtgcaatgtggttttccaagccctgcacaggattatgttgagcaacgtatcgatctgaacgagttgctcgttaaccaccccagtgcgacgtattttgtcaaagccgccggcgacagcatgaaagacgccggcataggggaaggggatcttctggttgtggatagctcaaggacagcagttcatggcgatatcgttattgctgctgtggatggggaatttaccgttaagaagctgcagctgcatccgcgggttcagcttaacccaatgaaccctgcatattcgccgatagtcgtgggtagcgaggatactctcgatgtgttcggggtcgtaacttacatcatcaaatcggctggctga

SEQ ID NO: 107228 - DNA, 726 bp, Enterobacter aerogenes
atggggctaaaaatatataatcacacaatcttggtagtttcaataatacttttgctgttttgttgtttaattattgcttatgcggtgggttttagcagtattttatatgagatgaaaaattttcctgattggttaagttctatcagcacatttggaactctagttgtagcatactcagcatataaaaaagcgccagaatggataagtcagagaatgcatgaagatgcattttctttagctaaaaaaataatccttgatgattatccatcacttaaagaaaaaatagataatgctggaaatcaagtgagttataatgttatatattttgatttgcttgatgatgattgtgttgtatctatttccgtagacgattgtgacaaggcgttgtctgttttctatgatgtacaaaattcaccgacgacaataaaaagcaatttggagaatctctctaaacttggatggaatgttgaccgggatattttaattatcaacgatgaaattaatgcgtgttatagagaaatgcaacatgcttatcttatggcatttgccggaataaagcgaatgatatcaactaaaaatattaatgagaagcgtcgttgcgctactcgaataagtggattttttgaacaatttgagggtaataaaaataaatttgatctgctttacgaaagggtaagattaaagcacagacgggttccggattattttgatgtcgagaaaaaataa

SEQ ID NO: 107229 - DNA, 402 bp, Enterobacter aerogenes
gtgcgcctcgtccttctgctcgtcgctcaggtgatccatgtcgtcgatcgcctggtgggcatcgtccttggcttcctcgaggttcttcgcttcggcgtcggccagcgcctgctccgttcccggcacgtcggtggcgtcatcaaccgccctgtgcgccgcgtccttctgctcgtcgctcaggtgatccatgtcgtcgatcgccttgtgagcgtcgtccttggcttcctcaagcttatctttggccttattcgagctcttactgccgccatcattatcatttattgcggcaatcgcgataccgcctatagctgctgccgcaattacaggcacaacccatacgtaatcgctattatcatcttcggctggttcagccccttcaaatacctcatcaatactctgtaa

SEQ ID NO: 107230 - DNA, 606 bp, Enterobacter aerogenes
atgagcgaagaaaatatttatcttttagagaacagaaaagttgcatggggagattggggagacatattgtgggaaggactcaccatacatgatccacaaagtggacgtatgtatattgagcgcactggtccttttacaccaatggcatatctctcaaacaattatttcattttaacagatagtgcgaaaaatcttctcgagagaagcgctctttcaggagtgactgttgactatgaaatagagaaaagaaaaatagttaaactgaattggcagtcgtgggattataataagcatattacgcaataccttgatgtaattggttgtcctgaggatataatactgcaaggcgtgaatgaccgtgttctgtttaaagaaatgccagcgtattggttagcaagcataggcaagcgtttacatctctcaattgataaaagtttattaagtgatgaaccatctgattatgtttttattgatgatggggttaaaggagaggatttttatcttggtgttgaaagatccggtgtttatgtctcacaaagagcaaggatgtggctgaaagataactttccagggtgttttacttatcatttgatttcccggaaataa

SEQ ID NO: 107231 - DNA, 258 bp, Enterobacter aerogenes
atggaaaacaataacatcaaatgcccgttttgcttcaaaaatagtcagcgaggggttcatgtttgcactggctgtttagctacggtgttatatggcacctttcccggctggtatgctttcgtgatcatcctgttgtcttttggcatgtctacaggtatggctggagctactatcagtttgccagtaattgctgttgttggatttgtcgctggaaaagtcattttctcagataatgttgtgttcaggcgaagaatgtaa

SEQ ID NO: 107232 - DNA, 480 bp, Enterobacter aerogenes
atgattgtcagtggaacggctaacacagttatgagaaataaaaggaaagtttttattgtccatggaagaaataatgaagctaagcaggaggttagtaggtttattactgatttggggctcgaacctattatccttcatgaacaagcaagttcaggcatgacgataatagagaaaatagaacgatattcaaatgatgctgacttcgcattggttttggatactgattgtgatttaggtcgttctattgatgaacctgaccctcctcataaccgtgctcggcagaatgttgtatttgagcacggatatttaatggctaaattaggtagggaaaatgtttgcactttagttaaagataacattgaaacacctaacgatattagcggggttgtttatgtcccattagatccttatggtgcttggaaaatgagtgtctcaaaagagcttcgcacatgtggatattgtattaaatcaatgcattag

SEQ ID NO: 107233 - DNA, 1215 bp, Enterobacter aerogenes
atgaaaaataaatacatccctactgcggcagggctgtatctcaactacctgatccacggcatgggggtgctgttaatcaccctcaacatggcccatcttcaggaacagtggggaacagacgctgccggcgtatcgatcgttatctcctcattaggtattggtaagctggcgacgatcgtgaccggctttttgtcggatcgctttggtcgtaagccttttatctatctagggatcctgagttatctgatcttcttcgtcggcattctgctgaccaaaaatatctatctggcctacgtgttcggcatcatggctggtctggcgaacagcttcctcgactccggaacctatccggcgctgatggagtctttcccgcactcggccagccgcgctaacgtgctcatcaaagccttcgtttccgcagggcagttcctgctgccgttcattatcagcctgctgatatgggcaaatctgtggtttggctggtcgtttgtaattgcggcggctctgtttatcttgagcgcaatctatctgctcaagatgccgttccccgatagccaggcggccaaaaaggaagagaccccagcagcgcagacagcggcttccgctaaaccgcaagccaacaaactggacatggtaatctttaccctgtacggctatatcggcatggcgaccttttacctggtgagccagtggctggcgcaatatggccagttcgtggtcggtatgccttatgcctcggcgatcaagctgctgagtatctataccgtcggttcactggtctgcgtcttcgtgaccgccgccttcgtcaaagaggtgttcagctccgcggtagccatgatcatttacacctgtctgtcgatggtctcactgctgttagtgtgtttattcccgacaccggtgatggttaccggtttcgctttcgtcatcggctttgccgccgccggcggggtattgcagttgggggcgaccatcatggcaatgagctttccgaacggcaaaggcaaggcaacggggatcttctacaccgctggcagcatagcgagcttcacgatcccgcttatcaccgcaaagctttcgcagattagcattgccagcattatgtggtttgatttcctgatcgccgtcatcggctttgtgatcgccctgtacatcggctatcgtcaacttcaggctcgcgcggcgcaaagagtgtctcgcaccaccgtcaccgcctga

SEQ ID NO: 107234 - DNA, 249 bp, Enterobacter aerogenes
atgaatagtaaaaatgttgagctggatgcagccaaagaaagactgactaaactgattgatgatctgcacgttttagagcgtgaatacgacaaagcacttgatcatgctgcaaactatcatggatatgatgaaaagatcgaaaatgccagagacaaaagggctgaaggtgtgttcgagagtatgaatgaagttaaaaatcagatcatgaatcaaaccaaattaattgaagcgctagtagctgactattga

SEQ ID NO: 107235 - DNA, 387 bp, Enterobacter aerogenes
atgcataacagatcggtgagttttattgcgaatgtaatcaactgttataccgagtacgatgtacccattataggtattgctgatgcacctctggagcctcagcaatatattattatttctcagtttattgatgatgacgaaagcactggcgagtcgatcggactgcagacccaccttgcggaacaggaaatttctgcagcgatagataaaatttacttaagccgcgatcttttgacggtgatgatctgccctgatcgaattgcagaggttggtacggcctgtgtcaaaatagatttaacaaagaacggtgctcaatggctgcaactgcaaaagtatttacatcttatttttgccggcagtaaaacattggtcgagcttgcgttatga

SEQ ID NO: 107236 - DNA, 543 bp, Enterobacter aerogenes
atgtgggtaataggagacgatatgccagaaattgatttttttgccgataaaaatttaatatttaaacactcacttcatggggtgtctaaaaatcgaatagatattctttttcctcatgaatttaaaggtaaggatttttttgtgaaattctatctttctaataatggtggatattttagtggtggtgcatatttttatagagatactttttacaccataaagcctaatgattacaatttaatggaaattgaagggtttaatttcattcagagttatccagatgaagagtcgccatttcttctttcaataaatgaagtttgggatatcagacgaaaatactcggagagtataaatgaatttgcaaaacaacatttcccatttgcaggtgatgcaggtgataatgactattggctagatatggaaagtgggagtgttaaatatattagatgggaatcagatgatgatcctgataatgcgataatagtagctccaactttttatgatttttgtatgggaatacaggctaatcgcagagttaattaa

SEQ ID NO: 107237 - DNA, 624 bp, Enterobacter aerogenes
atgagcatctaccaggattatctagctggtcttgcacgtaacttaccggctgatgttgccgcgttattggcaacgtgtaatggtgccgatgaagctgacattattgaattgctgaagcattaccccgatgcgccagaggatctgattgggctgctacgtgcgattaagggaacgcattatgagtcccatcaagggcaatcgatatgcttacccgttttagcctcagatgttgggaaggggggatacccttattatttacgctcaatctcacaaatcattgaagataaaagtaaccgcttcggccaaatgtctattcaggacatttatgaggagatgctggaatttattgatattgatgagcgtattgatgttaccgttccatccggcagttggatctgctttgcgaattgtattaataacggcgggacctcaatgttgtatatcgatttcgccccaacagcgaaaggtaaatacgggcaaatcatccgctatctgcacgatccagatagttatcaggttatcgcggatgatttttctctttatttacaaaatattatgtgtgagcaatacccgtttatcgatcctgacagaacggcggaagagtattgttcggatgaagattaa

SEQ ID NO: 107238 - DNA, 1344 bp, Enterobacter aerogenes
atggaagaggtcttaacctaccgctacagcgtgccctctctgctccgccaacgtaatggccatgacgaactgttactggcgaaatatagcgaaattgcgaaagccagcgacgctgcctgttttttccacggccaggtcaaacagccgtttatgatggcgcgctgcctgttggcgctatctaacgtcgttaaatcgagctttaacctctcacccgcgcagttggcactgctcaaggatccggtggttagcgccggatatcagctggtgcgctttgaaggtttctcccactgtgccggggtttatgcgcggctggatatcctgccggatggtttagacggcgaattcctgcaaagcggtactaccaatgttgattttaatcagccgatgctatcagcgctggcggcgatccgtcatcagcaggcggtcatgctgtctgtggggcagcagtcggttgcggtacaggtggaagaatatcaggtgatcgaacgtaaagtgccgctcccggtgaaatggattaaggggcttagctcggtacaggtttacttcgcgcagtcggtgttggcgcatcagtttagccgcgttcaggcgcaacaactgtttcgctcactgccgaaagggcaggtaaaaatcgattattttctgacgcagcgcggaaatacgccgcagttttcgccggtgaaatccgcggcggcaatttgtatcggcggcctgcatcgcctacgcctgctggaaccgctgctgccgtttatcgataaactacgggttttcgcccatccgcaaatgcagtccaccagctggcagctctatattggcgacctctgtttttacctgtcgttgtcgcgcgattgttggcgcggtttctccggcgaaggggcgacattgagcgctctcaatgaaggtatcgacgagagctggcttacggtgttcgacgaacaggcgcaggccaaccagcctatcgatccggccttttttaatgcgactggcacgccctggctgcccaaaaacgacacgctcccggcccaactggcggcgatggggctattggggtttgatcttgatgacggcgcgtatttctatcgccaactgccatttaaacccgcgcgcatcctgagcctcaatccgcggctaaagggcgcggataaactgattgccgatgataaggtggccgttgttagccagcagcccggccgcatcgaagcgcgggtggccggcagcggcgtgcagcatacggtgattctcgatagcatgggagaacgctgtacctgcgcctggtacagtaaataccagggcgagcgtgggccctgcaaacacgtactggcggtaaaaaaacaagtacggcgctag

SEQ ID NO: 107239 - DNA, 2661 bp, Enterobacter aerogenes
atgattgagtacaaggaaaagtacagcaaatatataacttctggcaatgctgagcagttgaataactggttgcaaaagctggatgaaaagacgagaaaaacactggtaccacagataaaaaatgaccttaagcgtttatatctataccaggttcagggggacggacggtgggcaagaagagcgacttcagggcagtgtgctatgctggctgttgcagtgataagttgttactcgcgaaaagatataaaaagcattcctgacgatttattctataacaatacatctatcgagcagactattagctggcgctcccctgagtggctaactgattatattaatagtttccgtaaccgggaaggctctccatttagctatcggcaactatgtgactggttggtcgccggatatatctatgctctggatccagagattgtcgccagaacgcttgtttcgtcatttattgatgaagattgtcataagataacctgtgacgaacatatctgggcactatttaatcatccttgtgatattgcttactatgattgtttttttcctaatcaggataggccagaaggcgcgagagaagagaaatggttgtacctgtttgcgatactcactcaaagccaacgaattgatcgattgcgagtgttaaaagagagtttgttagccgtaaatcgaaattttaagagggaccaaacaaactggttcgcaactttgtttagcgcgttgaaaccctctgttgaagaatgtattcaactgcaggatgaactgtttgccgcctttgcttgcccacagagcaaaccggtcagcaccgcgctggctgctataaaaacggttgtcgatcatccgcaatttcgcgttgatgagtttaccgctcaactgccgctgctgtttgcttctcccggcaaaggcgtgattaccaccagtctggcggtgacggataaaattgctgccaaaaaacccgagctgcgggcggaagtcagtcgctatatctgcggagtatttctcaacaaagatgttggactacaaacgaaagcggcgaagctgctggtgaagtacggcgatgcgacggatccgcaactgagcgcgctgctgatggactacgccgacaatttgctggtcgcggcgcgtgagctattaaccgacttcctcgatgttcagccggcgatgaatgaggctgaagagacgttcctgcagccattaatccgcgaagataatcgcattgttgaaccgcaacgctgggaagattttgtctttctcgccgggcaggcgtttctcaatctggagtcctggcatttcgacctgctacccgctgcggtgctgcgtttcgatagtatggtcactgaagagaacgtggggcaactggagccggcgtttgcccaggctgtacaggtcagtgagcattactcaccaacaaccggctatcttgacactattttggccgcctttttcctgcagtatggctgtacgctaattgaacgcttcccgcagcagactcactctttacagcagatgagggaacagcataaatgtatgtccagggggctaagcgcactacgttcatcgcagacggtgaagtattatccttatattgacctgctggaatcggtgctgtcacaactacgatactcagggcggctaccgctgctttctacgccgacgcatacgccctgttttattgattcatcggcgctgattgatcgtttgagccaatatcaaaaggctggagtaaccccatgtagtcttgatatgcaactggcgattcagcgctgcgcgctcaatacagtgccggcgacattgagcaatttgactggggaatatgcagcacttatgaaatacctcctgcacggcgaattggatgtgctggcgctcattccgcaggatgaatggaaactggcagcaattattacccgcagtgccagcgcgccagatgtggggtcatttgatgctggttatgcgttactggaaaaattgcagttgcctgctgagttgctgaccaacctctatccctggcatgttgaagtaaagcagcagcgtcagcggtacagcaaaagtgaaataaccaatcttcagtttgcttttgactttgctaaacactggcggctcgacaatatcacgctgttttatgagtatggctttatcaaaagtcatagtcactcatatgactatgggccagataagcggcgggctatctattctttcccctggttttatgaaactacgctggcacggtttttggaaaaggggttcgctaccgcggatatcaaagaggttaaaccaacgctggaaatgctgcaggcgctttttgacttacctttatcgttgtccggcgtcggaaatctgttaattgccctggcgatgttacatcgcgacaaaaccgtacgttctctggccggtgaactgtggattgataaatgccgccgacccgatggagttaactcggccgtaatcggggacgcgctggggcggctggaagcgcagggctgggcgccgctgaagcgctttaccgacctggcgatgcagtctttgatgggcgttagcgcccggcataacgccgcgctgctggagatggtaaatgcaatggctagccatctggatggcgtaaaaattagtaattataaaaagctggtggagctgcgccaggaactgacaaggatgtaa

SEQ ID NO: 107240 - DNA, 2568 bp, Enterobacter aerogenes
atggtacccgaagcacttatccaccagcgggattacatcggcatcgttgactgggcgctggcattaacgccgggcgagcgtaagcaaaaattggaagcgttatgccaggccgatcgtgttgtagtcactcacggcgatgatgaatggaatgcgctggcggtggcaaaagtggcctgctgtcgcagctatagcgacctgcgccgctttccggccctttggcagcgacagcgaacggtattgcatacgttggtcactccgcgttacgccgtcttgcatgatgcgttggtctattattttagccagtgcgcggtggattatgtcgatcgcgtggcgcacgaatcattgagtagtcaatattcggtgattgattttagcctgctgtggcgttgctggcagcagggatgtgccacttttgatgcgttgctgttctctcatgcgcttttcaatgtcgcgatgtttgaacgaagcgttaacgacgagttggcgtttctgcggcaaaaccctcaggttgtggagaaagtgataatccctttctggcagcacgatgtgccagtgttgctgcgttcaaagtggcagaagggggaggggcaaacatactgcggtattatcactgaattctgggatgaagttttaactcaactctatgctgaaaatcgccttgaccgccaactgctggcgggattgcttacttcgctaaccttgccgtttaaaaagggacgaatcgactggcatattcggttaattaaaatgtttgcccccagtgaacaagagtgtctgaattctcaggggctactgttggcggcgctgcatgccggcaataatacggtggttaatttcgccatacagatgctggcaaagattagcgacaattcgcaatttgaacacgccaattttatgcaagccctgccggcaatcagcgggcgtgaaagatgtgacgcagctattctgacggcgctgaaaattgctgaggcgttggccgagcattttgctgaatatcgcccggcgctggcggataacctatccggcgcgctcattcagggcaacgaaaaaatccagcggtgcgccgcccgtttgatgcttaaatatcgctctccggctgaggtttccgtgctggttgaaccctggcgcgcagggctaaaaagcagcgtggcggcgttgctgcagagcgaggcgcctgtacaggtcgaagctgagatcccggaacttgaatatactgccgttgaggtgccgcatagctgggatgcgctgctgttccattgcgggaaaatgctcgcagggcaggatgtgttggatattgagctattttatgcgggcgtgattgcacaacagaacgacatccccgctgattttcaaaaacagatgcaaccgcattataagaaattaatcaatcgttacctgccatcttccttattaaattcgcttagggactttctgcatcagtggttaatcggcgaaacagaatctgaacagggagaaaatgaaatcggttttcctcatctacagcatcagaatcagctagttttggggcgcctgcgcgatggctgtacgttgccgctgctggccacgccgacccatacgccgttttatgtttcgccgcaggcgctggtagagcgcctgcttgctcatgaacagcgcgcttatccggtggatattgacgatctgatcgtcgcctgtaatcgtttactaccgggtaacattgcgccaaagataaaacagcaggctttattattgaggggcgattatgcaccggcaatccattttctgctgggggcaagcgatgatattgtgccgcaaaacgacgaactgctgccgctatgggcgcaaattacccgcacacgtgatgctaacggtatttttccgcaatttgacagtgtgatgagagaacaggcttcatggccaacggtacgagaaccgttttatagccgctaccgggtacgtgttgataaaggagaaagctggacatggtaccgtctggagttggctcagcggcttgacgatagttatcagcaaaattcaccccagcgctatcccgatcgctcttactatctcagtctggattgcgaatctatttcttcggtggcagatgcctgttacgcattgtctctgattccgcattatccagacgttttcctgcagcgttgtgtacccgatacagcttcgggcaatgaagtcgcggaaattgaaaactgcctttatccactcaagtatctgctggaaaatcagttaccggttcatcatggcggctgggtttatattgccgtttgccttttgttcgagaaaaaaactagccgtagcctggctgctgaatatatccaactggcggcccggaagggattcctcaattgcgcctatcttagtgactgtctcgcttacctgttaatgcacaagtttgcgccggtcaatcgctttatcgaatttatcgataattatcatagtgacccggatgttctggtgttgcagaggctgattctggcagcgtgtatcgataacagcgaagttaatccacgaccgattaattttaaaaagcttcaggcttattatgacgaattaaatcgcagaggtctttga

SEQ ID NO: 107241 - DNA, 261 bp, Enterobacter aerogenes
atgctgtggatttaccagcgtatcgccacgcctgatatcaccgtccaggttgtgcaggaacatattcagtttggcgatcgcccaggtaccaaggttcttttcctgaccgtagagcttacagttgggtttacccattacgacgccatcatcaggataggtatcccgaatgtagtttgcggcttcgaccagcataccgccacaaccacaggttggatcatagatctcgtggccaggtttagggtcaatcagctttacaattag

SEQ ID NO: 107242 - DNA, 477 bp, Enterobacter aerogenes
atggtttataaaaaccggttgttgattctacttaattatttcatattaattgatcttggattaactgacaaagagtatgcaactcatacaatatatagttttaataaaataaaacttggtgcctgcttagaaacaaaatggttagctaagattataaataacgttcctatgatatttatttccaaagatgaattttatgtattaaaagcttacaaatcccattttgatgataccatttttatagataatgggaatgaggtttatagcttcgacatagagttatcacagacaattagacgagacagatacaaacaagggacacagtacgaatccaccaaccaattcatagaacaaaaaataatcacaaaaaacaaattaggcctaaaaacgataccagagttacatatccatactgagggaatcgatgattttatagaattaaaaaatgttcatatcttacatacagaacatgcctag

SEQ ID NO: 107243 - DNA, 588 bp, Enterobacter aerogenes
atgcatcagacaaagccgttgcccatctttaaataccatccagatcccctggcaacaggggcgttcaaacaagataaaaccgttgtctgcgcatgctgtgaacagcagacctctgtttattacacttcgccattttactgtgttgaggatgtggagtatctatgtccctggtgtatcgcagacggctctgctgccgaaaaattcaaaggctgttttcaagacgaatgtagccttgaaggtgtttatagcgaatgtgatgacagcgataaatctactgataattttgttaatccttacagcgaagaacaaatactcgagctaattaccagaacaccgggatatcaaggttggcagcaggaatactggcttggtcactgcggcgatttctgcgcctttattggctacgttggatgggatgaaattaaagatcgcctccatgaatttgccgatcttgctggagattgtagcgactttggtattgagcttgccgatctatcaaaatatctcctcaataatggcgactgtcagggctacctgttccgctgcctggactgtgggaaactgcgcctttgggctgacttttcgtaa

SEQ ID NO: 107244 - DNA, 639 bp, Enterobacter aerogenes
atggctgagtattttccggcagtttttgaaggcaatgcttttaattgtccatattgcggggtttatgcccggcaattttggcgagtgatgcaggggaatggtaatcagcaaatgtatgctaaaaatactttatttaagatgtcaacatgctcccattgtaatgaagacgctttttggtatgacggcaacatgttggttcctgcttctgcgaatgttgaattacccaatccagacatgccggatgattgtaaggccgactacatggaagccagaagtatcatcaacctgtctcctaaaggtgccgctgcgctcctacgcttatgtttacagaaactcatggtccatctgggcgagccgggagagaacataaacaaagacattaagtctctcgttgagaaaggtcttcctcctcgtatccaacaagctgctgacatttgtcgtatcgttggtaatcaggccgtgcatcccggagagattagccttgatgatgaccctcagttaacacatggtctctttaagttattgaatatcattgttgatgaccgcatcaccagacctaaagaaatcgaagcgatgttccagagcatgcccgaaggtccacggcaaggtatcgaaaagcgggacggcaaagttggttaa

SEQ ID NO: 107245 - DNA, 1236 bp, Enterobacter aerogenes
atgagtttttgcctcactctccctgaggtccgtcagttaaagcatgtcgctggcggaattatttttgtggtcaaatcgggaaagtcattacttcgaacctgcgtggtttacgatccaaattccgatgcatgcatccatactctcgcctggcgcaagtcaccgctgattcgcttttggtctgaatcgggttgccctacttgtgaagagtttgtctatgatggctttgctaatgacaaggatggcgctgcgcaatttttatcttcaatggaagcatggaattccccttactcaaacatcaatgattcctttgcagccttaacgccgctattcagccttttcgccgatggttactacatgttagaagagcgcgatctttatccaactgatggtaatgggcaattcttctggtgcgtaaataacgaaaagaccctgaatccagccacgacttctctctgggattgcgacgatggctatatgcaaggccatcccagctttttattacccagccagccgccgtcgcactttaaccgccagagggtagattactatcttgataagccgtctccacgcgctctggcatggcacattggcggaacatggctcaacattctgcttgatggtcatcacaaggccactgctgctgcattaaaaagaaggcccgtaaaaagcctcgttattacccagccgactcatcttattaaccaactgaaactcatatttccttgcggggaatcgcttgaagaaacggagttcctcgataatattccgttcatcacgcagcccaatatattacccgtcagcgcctgggacgattactttctacgcaatgactatcgttatgattctatcgattggcctgcagagcttgaaacatgcgtgaaacattatccggatctacgtaccgcagggaaaatagccgctgttggcgatattagttcagcacgtattctgcaaatcattgagcaagattcgatgtgggccgatgatgcccccgacgccttgttacttgcgttattttataatcaatccgaatcattgctgccatttgcgcaatatatcgccactcactcagaatatgccagctaccaccaactcgctttcacgttgttggcaaaggaacgtactccacagactgatgagtttttccttaactttgcgataaacgatgacggagaacgaccggaactaacaaaaataatggaccactattttcttcagcctcaagcgcaagcttga

SEQ ID NO: 107246 - DNA, 249 bp, Enterobacter aerogenes
atgcagcacattaagcagaaccagcggtttgatttcatttaccagctgctggccgatatctttattgaaggcttcgataatgttggaggcatagtcttctggccaccggctcactttcgtgccgtgtcattcaagcgcaacagcctgacatgtgttgttgagctgcgcctcgcgaaccaacttttcttcttttctggcaaaatatggggcgataccttcgagcagatttatctttgcttcatcatgtaa

SEQ ID NO: 107247 - DNA, 642 bp, Enterobacter aerogenes
atgtctattcgtgaactgattgatccgtctaattccacccttatttttattgaccatcagccgcaaatggcttttggtgtggccaatatcgatcgccagacgctgaaaaataacaccgtcgggttggctaaagcgggcaagatttttaacgttccggttatttatacctctgtcgaaaccaaaaacttcagcggctatatctggccagaactgctggcggttcatcctgaagtgaaaccgattgaacgtacttctatgaactcctgggaagacgccggttttgttaatgcggtgaaagccactggacgtaaaaaactgattatttccgcgctgtggactgaagtgtgcctgaccttcccggcgctgatggcgctggaagaaggttatgaagtgtacgtggtaaccgatacctccggcggtacctccgttgacgctcacgagcgcgccatcgaccgtatggtgcaggccggcgcggtaccggtgacctggcagcaggtcctgctggagtaccagcgcgactggtcacgtaaagagacttatgacgcggtgatggatctggttcgcgaacatagcggcgcctacggtatgggcgtggattatgcttataccatggtgcacggcgcgccagaacgtaaagcctaa

SEQ ID NO: 107248 - DNA, 216 bp, Enterobacter aerogenes
atgaccacgcactattcatatcaccccagcctgcatttaaaaggcgactggctgatagaggcgggatttggcacggggacgtttgtgacggtaaaagtctccgatggctgtctggtgctgattgccgataacagcgaggagcagcaactgcgggagcaacttgttcaggtgcagcagacagtgagcgggattaaagcggtttgtttagctaattga

SEQ ID NO: 107249 - DNA, 513 bp, Enterobacter aerogenes
atgactaagatgatgtataatgatgattatttgaaggttacctttaagttgataagagatgaagatggttatccgcctgtcagctatgagtctatttgggtaaagaaagatattgatggtgactatgttttagataacataccaacgtatatatatggcgtcagtaaatctgataagataagttttcatgatgagaatggtgaacttattgttgatggtataaaaaatagaaacggccattctactctgcgagtatatgtttttgataaagcaaatttaattgggattattaataaaatacgcgagcttggtgcaaatacatcgtcatcttctacatcgacatacttttccattgatattacgcctgatatttcttttgacttgattgatagttatttatctgggttgttaagtaacgaaatacttgattatgaagatgcatgcttacaacatccaaatatagatattcagagaaaacatgaatgtgaatcactgattaatattattatgtga

SEQ ID NO: 107250 - DNA, 210 bp, Enterobacter aerogenes
atgaccacctactattcacaacacctcagcctgcattcaaaaggcgactggctgactgaggcgggatttgagaccgggcgcggcgtgactgtgaagattacggaggggtgcattgtgctgatggcggataataacgaggtgcaggaactgcgcgaacagctttatcaggctaagcaggtggttaagggagtgaaggatgtgcttgtttag

SEQ ID NO: 107251 - DNA, 324 bp, Enterobacter aerogenes
atgcataaagataatgaatacattgaattgactggggatgaggcgttgtcagtcttaagggaaattaattatttattgatttctctcagagatatatcccgatattactatcattctcaaaatgacggtgacgtggttaataatgaaatttcttattgtaaagaaacaacgggattcattgatagaaataaaataactcatcgtcttgcgcacataagaatgattataactgaaaaatttaataacgaacttggcgatgatgatatggatgatattgaaagagaaatggaaaagataaagtattgggaaaagcccggagattaa

SEQ ID NO: 107252 - DNA, 207 bp, Enterobacter aerogenes
atgaccacctactattcacaacacctcagcctgcattcaaaaggcgactggctgattgaggcgggatttgagaccggtcgcggcgtgactgtgaagattatggacagctgcctaaccatcattaacaacaacgagatgcaggaactgcgcgagcagcgctatcaggctaaacaggtggttaatgggattcaggacgtaattgcttag

SEQ ID NO: 107253 - DNA, 306 bp, Enterobacter aerogenes
atgatgattaaactaaaattactcgaattgaaagagcaattagaagcagctggctgggaattaattgaggattctgaaatattccttgcatcagatgataccattgagtggagcctactgaatagaagactctctagcaaggaagttttaacatttttcttatttgataacttaggtaaaagaacagataagttgtctgatatattatatgtaatgcgaagtaaagacagtgtaaggctttattttgataagaaagataagaattggaaacgtaaggcgaaagaattcgtattcacaatgaaataa

SEQ ID NO: 107254 - DNA, 1062 bp, Enterobacter aerogenes
atgctccgctatccgggaacctccccggtggcgcttacgcttaccggggctaccaaccgaataccgaatcgtagcccggataaggcgcgatgctccgctatccgggaatcctccccggtggcgcttacgcttaccggggctaccaaccgactaccgaaccgtagcccggataaggcgctatgctccgctatccgggaacctccccggtggcgcttacgcttaccggggctaccaaccgaataccgaatcgtagcccggataaggcgcgatgctccgctatccgggaatcctccccggtggcgcttacgcttaccggggctaccaaccgactaccgaaccgtagcccggataaggcgccatgcgccgccatccgggaaccctccccggtggcgcttacgcttaccggggctaccaaccgactaccgaaccgtagcccggataaggcgccatgcgccgccatccgggaaccctccccggtggcgcttacgcttaccggggctaccaaccgactaccgaaccgtagcccggataaggcgccatgcgccgccatccgggaaccctccccggtggcgcttacgcttaccggggctaccaaccgactaccgaaccgtagcccggataaggcgccatgcgccgccatccgggaaccctccccggtggcgcttacgcttaccggggctaccaaccgactaccgaaccgtagcccggataaggcgccatgcgccgccatccgggaaccctccccggtggcgcttacgcttaccggggctaccaaccgactaccgaaccgtagcccggataaggcgccatgcgccgccatccgggaaccctccccggtggcgcttacgcttaccggggctaccaaccgactaccgaaccgtagcccggataaggcgccatgcgccgccatacgggaaccctccccggtggcgcttacgcttaccggggctaccaaccgactaccgaaccgtagcccggataaggcgctatgctccgctatccgggaacctccccggtggcgcttacgcttaccggggctaccgaccgaataccgaaccgtag

SEQ ID NO: 107255 - DNA, 384 bp, Enterobacter aerogenes
atgccttctcgccatccgtactttttcgttagcgcccgcggtcgcctgctgtcatttaacttgttgatggtggcggtgacgttaatggtcgccggagtggcgattttcggttttcgccatgccagtcagttgcaggagcaggtgcagctgcaaacgcttagcgacatgaacggcagtatgaatctggcgcgtgataccgccaacgtcgccaccgcggcggtgcggttgtcgcaggtggttggcgcgctggagtataaaagcgaagcgcaacggctgctggaaacccaacaggcgctgaagcattcgttgggccagttggcctcggcgccgttggcccggcaggaactggcgctggtagcgagcattattcgccgtagcaactag

SEQ ID NO: 107256 - DNA, 1752 bp, Enterobacter aerogenes
  misc_feature (420)..(458): n is a, c, g, or t
atgtatattacttcggggcgtgatctttcaataccaaagaatattaaagaacttgaagggcgtacaacagtatctgcagcaaaggctagtttagagcgtgcttttcaaataggagatttggaaaactctttaaaagataatcgatatgctacggagaaagctacagttcggcatattacaccatacatctttgttactaaagaagttatagatagtgaaactgtacttcttcatggtttagatgataataaaaaatctcaagcaattatttcaactcttccttattttttaggggtaagttcagaggcttcggtcactgctgaaaaacggttacgtcagcttcgaaaaatccttgaaattgaaactagcagagaagaagctcgccgttcaaaagatagcttactaaaacaacgtctacgnnnnnnnnnnnnnnnnnnnnnnnnnnnnnnnnnnnnnnntgaagctcatcaaataggattgttatctgagaggagtttatttgatgcagacgagaatgaacttatttctatattaaataatatcatgaccgcttctcgtgatgacttaagttatccagatgaaagtaaactttcagaattacatgaaatccgaaaaaatattctacatgagctcaaccaaaccaaacgaaaaaaacgtgcgatgttgatgacattaaaagagtctaaagattatcaatatgccatttcaaaacagcacgagaagttaaagatagccgagcatttaaatttgttagaaatcccttcacaatgccctatctgtcaatctgaaactacgaaaggtatcgaagttgctcaaaagataaaacattcacttgaagttttaaaaactgagagcagtgaggttggaagaatcaagcctcatcttaatttacagatggatagtctttctgaagaagaaattaatctaagtttaaaacttagggaacttgatgcaacaattgcatcaaaaatatcacaaatacaagatggagaaaaattaaataatttagctcaggttcatgcttattttcgaggaaaagccagttatttccttgagactttagatgatagattattacaaccagctaaaaacgtgagtggtttgcaagatgagatatataatttagagtctgttgttgatgcggataacagaagggtaagattacaaagagcagagaatttaatttcaaacttttctaatctagcatttcaaatgctaccgaaagaagaaccctgtacaaatgctgaaatattattctcctccagagagcctaaagttagtcttgtagaaaaaggcccttatggatcgatactatcaatggctgatgttgggtctgaccaaaattacttagctgtacacatagctttatcatttggtttgcaacgttatttttcaaaagaagaacgtcccgtacctggtatactggttttagatcagttgagtagaccctatttctctaattcaactggaggaataagagtaagcatcagtgatgatatagatgatgaaataaatggtatcgatgaaactgaaattgactctaatgatgaagatttccgagcaatgagaaagcatattgattttctttttgaagaggtcaatagggaggaagggctacaggttatattattagagcatgcatattttgtagatgacactcgctatgttaaagcaactaaacaacgttggactagagagtcaggagaggccctgattccgaaaaactggaagcggagagctgattataaatag

SEQ ID NO: 107257 - DNA, 309 bp, Enterobacter aerogenes
atggaaactaaattaagtttatataagcaagaaatacatgagttaaccgagttattgaacactgaatggttagacttaaatgatttgttaacgaaagagggctttgaaactaagggagggtacttggtttgctattatgaagatgaatcaggaggacaatatggcgtgtttgtaacgagcgttggtgaggtttttgagtttgccatattggatggtgaattaaaaggtttctctactgaagaggttgagcttgaatgttatccacaaattgaagtggccttgaaatatttcgttaataagtcatcataa

SEQ ID NO: 107258 - DNA, 447 bp, Enterobacter aerogenes
atggaaaataaaacacaaactcccttggggctcatggactataatgcttgtggagacgttttccttcaaaagatatataaatatcatgatgatgatatatttttatctattaaaattaaagatattgattctgtgcatgatgttgattttcttttcataaagagtatattggaaagcctaagtgtttttttagaaaaagcgactgattacttatgcgatgcttgccttaaatctccaggtgaatttggatataatatagataaattcagtgctattgttgaacctgtagtgtcagaaccggaaataacgttttgggataatagcaaatggtctattttattttcagatggtactattcctatttgtaaaccttatggaatattagttaactttgataaagaagaaattattgactttgataatctatctgatgctgaagaagtttaa

SEQ ID NO: 107259 - DNA, 141 bp, Enterobacter aerogenes
atgactggcagtaaagacaataatttcaattttttcattagattaaccttacattcaattgtggagaccatctctaatcagtttgtccggattgcccccgactttctgatggagaaaatgaattcagcgactgctgaataa

SEQ ID NO: 107260 - DNA, 738 bp, Enterobacter aerogenes
gtggcaaaattttactttaacgcgaagttatggggagcgaccgcctcaattcccgtaatgaaaatgcttgcggagcaggcagaaacaaatatatcccgtgtgctaaacgatgccgataagcccgggaccattgagtctggagagtttcaagatgaaagacatcatgaagatggaggggtttcaacgtatcaacgcacatactattcctgtggatcatgcatagggtatgatgaaaatgaagttaaatctgaatataagcatctgatagcgcaacttacccgtcgctcagcttttcttaccatttttggtctgtttgaacaccgtatggttgattgtctagaacttatggatcacctatcatgtaaaattacggataaaaaatacaagacagttgaggattgccataaacgcctcaagcagaatttcggcggtgaaaacattaaggatatcgatcatctatcggtgataagaaacatcatggctcatagcgatggtgttgcagataactataaaatgctttcatgcaagcaaaccaaaaaaaatgacgctcaaaagcgactcttgcgagccattcatcgcgctaaggctgagaatgctggtatttcaatgactatttttaataatgtactgatggatgaaaaatttctcatgtatgtctcatgtgaatttgagcgctatgttgaagagttgaacaccgcgattttaacttaccaagcacagatgggtgaaaatcattaa

SEQ ID NO: 107261 - DNA, 1080 bp, Enterobacter aerogenes
atgagtgttgtgaaattggtcaaagagcaggttctaggctacgttatatcgggaatactaggtgtagtggttataatagggcttttccattttacttcacaacctatacgatcttctgatgttcgcgaaaaattagtagaaatggctcgagcctgcatgcagcagcaacttgccacaaatttgacctctgtggtatttgactcagtgacaagtgagtcactcgacctaagcacatcaaattcagtagtagtctacggaaaagctgtgagcgctaatggtgcccttagccgcttcctgatgatcttcgaaccctctggacagagtttaatagataaagtgattggcagaccaggattctacgatattgggtactgggcaattatcccaggcgcagagaatgacgaagtcgtggcatcttcaatgaacattgaagacctcgataaagacggtaacaaggacatactaatccgtttaaagtcaacttacgcggatggcgtatctaaagggcttcttatccttaaaaaggataaacatgatgtatggcatttaatggggcttccatcaatgacaaagatcatgcattccattgccgcgggtcaatcccccctgccgaaaggacttcaacctgcactccctccaatacattggtttagtaatgacaaaaaactaaaacctaagccaaattataaacaataccttgattgggaaattgacgaatccaactggcaagccactgatgccattgggaaccattctttttggatgatcagaaacggcacgaagataaaaatgtacgagaatgaacaagcaggctacaagcaatttggtgtactggcaaacatctatgatgacgaggcaattcaggggaaccatcatctcatggtcagtttttttaagattgagaataatagtttgattcctgatcagcattggaactgggcctatcctatgttctctattggattagaggatagtcaagcagtggatctgagtgaaatgcaggaagcgggtttgcaagctcatgttgctggtggttcagttgtcggcttgacagagtttgggaaaatggactcagattaa

SEQ ID NO: 107262 - DNA, 528 bp, Enterobacter aerogenes
atgaatgagcatgcggttctgaaattgcttaatgagctggatatatcttttcagtacatatcacatccggaagtgaagacggtcgctgaccacacaagttttgctgcggattttccggcacagctgctgaagaacctgttgctgaaaaatagctctggtaagtatttttacttgtatattctggatggcaataaaaaggcagatcttcgcgagttagcgctccagcttaatgaatcacgtctgtctttcgctaaaccagacgagttaatagaaatactcggtgtggaacctggcggggttacgcctttcgctattggacataacaaggagagggatattcgaattgttatcgattcttctgtatcagagagtcggtcactgggctttcatcctctgatcaacaccgcttcggtttgtatttctaaaaaagacttattgcggctactgacatttttcagttattcccctgtaaatgttcagaccgatagcgtgctcttactactcgcgcgaacaacggatgcgttctaa

SEQ ID NO: 107263 - DNA, 609 bp, Enterobacter aerogenes
atgaaagttacatggaccgtcacgcctgtggggtatcagcgcatcgcgaaacgctgcccttcatgcagcattaaacgggactttttgccttcgggggcatttcgggttaattcgcaaaagaaggtgctggacgtgtggagtatctacaaatgcacacactgcgattacacctggaatatctccctgtttacgcgcctgcacgtcagcaaaattgaccgcgaacttcatcaccgattgatgatgaacgatgcagccacggttctacattttgcctatgacacagctacgctgaagcgaaataatgccgagctatcgggtcggcctgattttaccgttcaggaacgctggccggtaagcatcactgcccaccagcgggtccgcgttagtgtcaggatttcccgttcatttcagatcagcttgttgtcgattttgaagcagcagctcatgctgagtacaggcgaaattcagagaagggttgcagcagggcatataagtggcgttacgctgaagttgcttaaatcgagaaagctgaaggcagcggaatatcactttcagctatctgcggaaacgctgttcgcccggcgcaagatagttctgacacatcgttaa

SEQ ID NO: 107264 - DNA, 207 bp, Enterobacter aerogenes
atgaggccatttctggcgtacttcaacatgcatttgtcagtgtcgtcaacctttcccagtaaatgggttggcattcaatttccaaagtacatcacactttttctactgaaacatatccctcctaaaactacgtgttactattcgctccgtaaatacctttcaactcaacccgaggctttgatgctggagaatgtaatcatccgataa

SEQ ID NO: 107265 - DNA, 552 bp, Enterobacter aerogenes
atgacagcacaccacttcacttttcaaatcacagatgaaagtgatgccagtgatatccgggaagtcgaaacccgcgcatttggcttcagcaaagaagccgatttaacggcctctttacttgaggatgaaagcgcgcaccctgcgttatcgctgctggcccgacatgaaggcaaagccgtcgggcatattttatttacccgggcgaccttcaaaggagaaatggattcacctctgatgcatatcctcgctcccctggcggtcataccggaataccagggaatgggcgtgggaggacggttgataagcactggcattgagcacctgaggttgatgggctgccagacggtatttgttctcggccacgccacctattaccccagacatggatttgagccctgtgccggagacaaaggctatccagctccttatcccatcccggaggaactcaaagcctgctggatgatgcaatcactcaccgctcagcccatgaacctgaccggccacatccagtgcgcgcaggccctgatgaaaccggagcactggcgtgaataa

SEQ ID NO: 107266 - DNA, 393 bp, Enterobacter aerogenes
atgttttcttacattatgcttggaaccaacgacctgccacacgccattacattctacgatccgctgatggatatgctggggtatccccgtggcggcaggaatgaggacgtcgcatggtggggcgttttcaacggtaataacacgacggcactgggtatcggcagaccttttgataaacaggatgccacgaccggaaatggtgtgatggtcgccctgattgcccgctctgccgaacatatccagcagcttcacgcgctcgctttaaaccagggcggcacggacgagggagcacctggcctgcgcccgcattacggcgaaggtttctacagcgcttatgttagagatcccgatggcaacaagctggctttcgtgtattacaccgcacaatcctga

SEQ ID NO: 107267 - DNA, 189 bp, Enterobacter aerogenes
atgaaaaagacctgttataccgaaggacagatctcgtttgcgctgaaacaggccgaaacccgcacccgcacccgcacccgcacccgcacccgcaccggaaaagtctgcagaaagatggggataatgcctagcaatgttggcggttttgtggatgtggagaaggcagctaatgtttttgtacggaattag

SEQ ID NO: 107268 - DNA, 1437 bp, Enterobacter aerogenes
atggaaactgaacatccaaaagtattcgtatcatatagttggacaactcctgagcatgaagagtttgttattaatttagctgaggatttagtaagttcaggtgtcgatgtgataattgataaatggtgccttcgtgatggtcaagattcttattcattcatggaaagtatggttaatgacaaaaccataagtaaagttatgattataagtgacaaaggatatgcagaaaaagccaacaatagaaaaggtggtgtaggtacggagactcagataatttctccagagatttattcttctgctgagcaaacaaaatttgtcgttgtagttacagagaaggatgaaaagggtcatttttatgttccaaccttttataaaggacggttgtttatagatatgactgagccaagtacaatgactgacggagtggaaaggattttaagatgggtgtttgataaacctgtatttgttaagcctgagcttggaaagaaaccagcatttcttgatgagtccccagaagtttctctaggaacgaccgcattttataaccgggccatggatgcaattcgtaatggtaagataacagctgcaggatgttatgatgagtacttgtctgttttagcaactaaccttgaacgcatcagattccgtactgctgaccatagcgaacctgatgaagcatttcttaagaatattgagtcttttattccagcgagaaatgaattcgttaatttagtttgcttagccgcaagatataatttgggtatggattactttaagagacttcataattttttcgaggctggtataaactactactatccacaggagaatgttgggacttatagtagtcttgattttgataattataaatttttaattcatgagctttatttgtattctgttgctgcgttgctcaagaacgagcgatttgaagagtgcctcaacttgtttgatggctactatctgtctcgtaaattagctaggggtaatgaccctttgtcttcgtatgtggatattagacagtatgttgaaatcattcaatggcggaatgaacacaggggattgagacggctttcacttcatgcagatatactgaaagaaagatgtcattctttgccagttaattttgatgatataaatcaagccgactttgtttgttatcttcgctcaactatacaagctacggattattattctttatggtggcctacgactttactgtatgccagagggtttttcccttttgaaatttttgccaaatccaaatccagtaactacttttccaaaattaaaggtctcttggcaatagaaacggctgataaatttaaacagcatatacatgaattggaaaaaagcgataggttaccaaaatgggaatttgataggatttctccgttgaggcttagcaatgccgataacatagctacagtcatatga

SEQ ID NO: 107269 - DNA, 510 bp, Enterobacter aerogenes
atgaatgactataattgtaacagaaatattacgaaggtagaaaaaatttacttctatataaaggatttcgctctagtattaattggtgtggccggaacattagcaggtgttatggttacaaataatcaaaatgtggaaaatgataaaagtgctcaaatttatacatatcaatccaaaattatcgaccagagaataaaactcatcgatagagctgcaaatatatttggtaaatcaccaggcctccaggatacctttaaggaatattcaaatggattgtctaagggggaaatagaacagcccgtcatagataaaataacagatgcacagggtgaatttcaaagtgttgtttttcttgcatcggtatattttggtccgaaaacacaaaaagcgcttaaggatttaagcgatattaatgccccgtggtgggcaaagccgaaagttttacaagataatttaataatggcaatgacaacggaaattgattataaaataaaattgtttcgagagtga

SEQ ID NO: 107270 - DNA, 324 bp, Enterobacter aerogenes
atggcggcagtagtactaagccgccttataccggatggttacaagcctaccagtctcaagccgcgaatacgtgcaacctcatatttgagttcggcggtcttggcctcgcatagtctcaatgagttaagccattgctcagttgtaggcttaccaaatatgttctccattactacaaccgttatgaaacatagaaaaaacattttacattcagagatagactatgtgctgtgtttatgtaccgttgttttgatcgaagggaagatgcaggactattttttggaatcgttggaactccagtgcattgtctttttgtcaaacttgtag

SEQ ID NO: 107271 - DNA, 177 bp, Enterobacter aerogenes
atgatgagagtagagaaaaccacgggttcgccgatgtctctgccctacgtcaatgccgcagggcagcgtattgcgcggagtgatattcagagagtaaaagtccagcattgccccctgctacctcccccggctgtcagccaggaacaggtcccgtttaccgggacctgtttcgtttag

SEQ ID NO: 107272 - DNA, 333 bp, Enterobacter aerogenes
atgataattgaaatattcatcgagttctttcttgatgcaaaaagcacccaagggaaagaaaagattataaaaaaaatacataaaaatcttatggataaatatggctctactgctgtcagtcgcttgaatgaagcaaaatttattgtttcagttgaggcggaggagtggaaactctttgtatttaaaatgattagctattcgcaagacataggccgtcagtggatattaacaggaaatatagaatacgaatgcagtttatggactaatcactctaaactggttggtgttgatgcaataagtatcactgctgattatacaggtaaggttgaataa

SEQ ID NO: 107273 - DNA, 153 bp, Enterobacter aerogenes
atgaaagaaactgagttctttaattcaaaagtcgtgtctgatcttgaagagtttaaacgtgaatctgatgtgatcatttctaatagaatggctgatgaattaagtgacgttagtgataaggtttacactcgtgatttatttggaaatgactaa

SEQ ID NO: 107274 - DNA, 204 bp, Enterobacter aerogenes
atggtttcctatacgtggatcaagacaaactccctcaataatttgtttactattaagactttggctctctgcgtagctatccaactcattaaaatacgcaactctaagtgcgaggtaagtattagcgaacaactttattgcttcagcttctgtagaatcagtaaacaaggtaggaatgtcctgcttgacagcaccttgttttaa

SEQ ID NO: 107275 - DNA, 1248 bp, Enterobacter aerogenes
atgagtggtgattatttaaaaatcccaaatgggtggtatcttgtaacgttagataaaatatctaacgttataactaaaggtgcgacaccgactacgtatggttttgactggacagatgaaaattctgggataccctttttacgtagcgaatgcgtaacttcaaacggttttaacgacaaaggcatgagttttatatcactagaagctcacaatgcaatggaacgttcaaaaatcgttcccggtgatattctaatgacaatcacaggtaacataggccgtattgcggttttaccagaccgaatttctgaagctaatattaaccaacatatagcctgcatctcaatacgagatgaatattgtagtgagtatgtatttcaatcgctgcatctagaatattattctcgttattatgaaagaatattaacaggacaagcatatccacaaattagcttaaaacaagttcgagagacccctatattaatgcctcctcatgaagagcaaaaagaaatatcaaaaattctttcatgtatggatgagaaaataaaacttattgaacaaaaaataatagaaacagaaaagttaaaaaatggaatgatgcaaaagttattttcagaaggctatggtgttatagatgataagggggaatggcatccgcataagaaatatttagagctatcgggagaaacatcacctgagtcatggattaaaacagtgctttcaaaagtaattacagtgaagagtggtgattcactgagcaagagcaaaatggaagaaggttctattccagtatttggtgggaatggtatatctggatatcactcttcagctaactttaatactaaaaaaatagtaatcggtcgtgttggggagtattgtggaacagtttaccaaacacctgaaaaatcatggataacagataatgcgttgtacgtccatgaaaaaaaaattgaactcaatgatgattttttatattatttattagagtataagaaactaaatcaatatgccaataggaatgcccagcccctcatttcaggaaaaacacttgaacgggtaaatatatcaattccttcatcaattgatgagcaattaataatatcaaaaatattattaattattgataaaaaattaacattgttaagacagcataaatccgaaacccagctcttgaaaaaaggtctaatgcaaaagttactcacaggagaatggcgggtaccgttggattgcgacgaagaagaagctgcgtaa

SEQ ID NO: 107276 - DNA, 3384 bp, Enterobacter aerogenes
atgtcaggtaagactgcaacatctttcccggaattggatggcgttgagcgtccagcgattgagtggctaaagaaactcggctatacccatatcaagggatgtcatgttgaacaaacggtgcggacagagcccctgattctggaagaagtcctccttgaaagattgcatgcactcaacccctggctggtcgaagtctccggagcagcttcccgggcaattaaacaactgcgtgatatctggtttgaaaataacagcgatctgatgctggcaaaccatgctttctgggaaaacgtactgtttcagtccaacctgcaagaaaaagataaagagggacgcaagcgcagcgtccgatttattgaccagtccggtgcagcccacaaccgtttccacgtcgtcgatcagtatgtcggtaaaaataataatgctgcgccttttaaaccggaccttttgctgttcattaatgggctaccgttggcactgatcgaatgtaaagccagcaacgttaaactgagcaagggtatagcacagattgacggttaccagaattcattcccacatcatttcgcatttaacatggtatgtggggcaatcaatcgcagccaggctaaatacggcgcgctttatgctccagagcagttttaccttaagtggaaatttgatcctaaaagacctgatgagcacgctattcttaatgaaattaaagagttactaggtaaagaacccacagcccaggacactttgctgtgggcattattcgaaccttctcgctttgttcgttttgtttgcttctatcctgtgtttgaagttgaagatggtcaaatgatcaaaaaactgcctcgctatcaacaatggcgggccgttgagaaatccttgcgccgtctaaaggggaatgatccaaccttgccgggtaaatcacagggaggcgttatctggcatacccagggaagcgggaaatcgctgaccatggcacttctggtgcgtttgatgcgcgcagaaatatccaatttcgaaaatcccagcattctggtattaacggatcgcaccgatctggaccgtcagatccacaacacctttatcaatgtggggctcagggcgtcaaaagctgattcagtcgctggccttgaggcaatgttaagcaatgattacggcgcgatctttacctctacggttcagaagtttcaggaaagcgatggtaaacagatccaggcggcaaaagactctgaaaatagtgaggatacggatgaagagcagtcctcgaagagccgcgtcagacgtgtcttaaaacgtctggaaaacggtaaggatgaatgctggatagtcaaagaaaacaatcttaactttggtctgaataacgccagtggcgagcccctgaaagcaaaatggcaaaaagtcagcgaagaaaaagtggatttccgggttctcagtactaaagcaaacttctttgttatggttgatgaagcacatcgtagccaatacggttttctcgcggcctttatgcgcgcatcactccccaatgcgaagttcattgcttttacaggtacgcctctgttcaaagaagacaaaaatacccttggcgaatttggcggcaaagaatacatcgatatttatcgccttgatgaggcggtggcagatggcgcaacgttacccatcaaataccaagaaggtatggccgaatgggccagtgatggcaatctgaaagaagcgtttgaaactgagtttggtcaggaacctctggcacgtaagaaaaaactgaagcaacagctgctgaaaaagcgccgaggggccatcagtcgcattgaacagaacgcgaagcatttgattgagcactttcttaccagcgtaaaaccccgaaaatttaaggcgatacttgtctgtgatggccgggatatggcggttcgctacaaagatgttatcgatggtctgatggcagaacgccaggcacaaaatttacccacattcgacagtaaggtcgttatttctctggggagtatgacggataaccgtactggagcaagcgagcagcaagcccacaatgcaactggtgcacaaggggttctggagacgatagaagagcgagtaaagcgcgaggttaaagaagggaaaactccggttgccgttctgagcgatgatattcccactttggtcaataccgaattcaaactgccttatggtcatgaagcagagaacaaacctgatggacaagccaggattaataacattggtttgatcatcgtttccgatatgctgctcactgggtgggatgcgccgattgtcagtaccctctatcttgataagccgctgaaagaacataccttacttcaggctattgcccgtgtgaaccgtacccgcaagggaaaaaaagcaggttatatcgtcgattactacggtgttgttgaatacctggatgaagcgctcaaaatttatggtggcgatgttctgcctgaacaagtctggaccgatgtagaatcggaactgccaaaacttaaagccgcgctgagcaaagtagaagatattctgccgaaaaaacacaatctacttaagcaccctgaaccctataaagaggacgccgatctatatttagatccggacgtacggcttgatatcgtggaagatttcctcgttgctcttgcggagttcaatggtcgtttagatattgtattacccgatgagcgcgcagccccgtttaaaccttattttaaggtattcaatgaaattaaactgcagttgctgaataaaatgccggacagtgcggataaggtacgcatcaccgcttcagaatcagaactgcttaagggaatgctggacgaacacattgaatcaagtgaagtcaaaagcctgctgggacgcgaagtctctatccttgatgccgccgatatggatcttctgcgtaagcaaaaaagtaaaggcagcgcagcgctggtgatgaagaataaactgaagcacacgatcagaaccggtaaaggcaaagatccggcgttcttcggcgatcttgaagaagagctcgcaagattgatacaagaagagcgggaaggtcggatcgaacaggctttgtttctggaacagctggaattgttcgcacagcgtgtcagagacaaagatgcgaagcccagcgaaatggggctgagtaccgcaactgagcgggcaacgttcaattatctgataaaacaggttgctgaagcagaagccctggcgtggacgaaaggattattcaatcatccagatattgcagctgtgatgcgctctcctatctggaagaaacaaagtgacatccacaatgagatcaagaaaacgatacgtacaattttacgcggtctgggggggtgggacatgaccgttgcacgtcagcacaccaatgagatattccagataatgctgaacaactga

SEQ ID NO: 107277 - DNA, 702 bp, Enterobacter aerogenes
atgcccatttttcaatacggcaccatggctatcgagtgggagttcagggtcgactcaaggctagctcatcactacgtgaccgtggaacgtgaccataaggtactccttcgaggaccggatgtgtcgttgcaagaacagcaagagttgatacgctatcgcgcccgatggatcaagcaacgtctggctgaggtcaaccggccattgaaagatgagatcgtgacgggtagtcgcttaccttatcgtggtaaaactttctattgtgaagtcattccttcgcctgagctcactgtacccaacattacgttcaaccaaagtcgattcaaggtgttttcacccgagggccattttgtaagccgtcgtctttttaaacctgcactggacggtttttacaggcagaaagcaaaagagaagctgcatgcgaggatccttcactggcaacgagaaacaggtctaaccgcaacgacgtggagaattaagcacttcgatgcgcgatgggcaaactgcacggaaaacaacgtacttgaattccatccccgttgtatggagttttcaaatcgcgtaatggattacatcattatccatgagctgtgtcataccgttgagaaaaaccacgacaaaccattctggttactcataaagaaatattgcccagaatggaaagagctccatgctcaagttgaacatcctgaaatgcaactgtaa

SEQ ID NO: 107278 - DNA, 882 bp, Enterobacter aerogenes
atggaatctgaatcgaaatatcgagcgttactggctagcaaatttcggctcctggcggagataagcgatcgccctctggtatttcccagcgagctgaatgatttccctgaaatcaccgatagagaaatgatactttatacttcgaggaaaaataattatatttcctcaatcaaagatatccaggcatctaaggtcctgctgaacaatgaattagcgatcaacacccgtcttatggcgcagggagcgtcaagtaaagtcgatgttatcaggatcaggaagcagttggtcgatctgaacatgaaagagtcagagctaaattacaactatctggtaaaatcaggtgaggaactttcaagaatttccggagaagttgattcgctgtctcaaaagatcatcggccagcgcgatctgctgaagaaatcgaccattacttcgccggtccgagggatagtgaaaaatatagaggttaacactattggtggcgtaattcccccaaatggaaccatcatgaatattgttccacttgatgatcgattgcttatcgaggcgaagatcttaccacgcgatattgcatttattcatcctgggcagcgtgcaatcgttaaaattaccgcatatgactactcaatttacggcggcctggacggtgaggtggtgacgatttctcctgataccatatccgatcctcaaaaacctgatgtcgttttttatcgtgtctatatcagaacgactaaggaccatttacaaactatggataataaaaagcattttatttctccagggatggtggccagtgttgatatcaagaccggtaaaaaaacgattctacaatatctgattaaaccatttaacaaggttggcgaagcattaagggaaagatag

SEQ ID NO: 107279 - DNA, 552 bp, Enterobacter aerogenes
  misc_feature (509)..(518): n is a, c, g, or t
atgtgtttttctaagagtgaaaaacagatgattgcaggtagtatgctatatgaggataagcctaaggttgtttatgaagcaggcgctctttatccttataagcaaattcggatgctgccgttaaaaaatggcattgatgtatcgacaccaggcggtcttgatttgttcaatcaagaggataatcgagccacttatgccgcctggtggttctgcgcttttaaggtttccgctgcaaaatattatgcttttccattctttgttcggggggatgatatcctgtttggtgtaatgcatggttacccaatcatcactcttaacggtgtcgcatcatggcagatgaattttaaccaaaaatatagtgcactggtcgagtatttaagcgtcaggggactgttggtaccttcatttgtttatccatcggcaaagaaaagaagacagattgccttctgggtattagcgaaggttcttttgctatgtttctcataccgatattcttcagcacaggcagnnnnnnnnnntcgaggcgtatctcgacgtattacaaggagctga

SEQ ID NO: 107280 - DNA, 288 bp, Enterobacter aerogenes
atggcagaggaatgtgaagattgtgaaggtcatcataaagaagagcagggttatcagttgttccgatggtcttttgacatggctcatacccagatacgttcttttgcacctaactggaacgctagctattatgtacgtggaacctatcaattattatctatagatttaaaagttgggtggcatccgacatatatgctgagacaaatcctgctttttgctcatttttattatcaggattttgtgaattatataattcttccgttggtaaaaggcctgaaattcctctaa

SEQ ID NO: 107281 - DNA, 705 bp, Enterobacter aerogenes
atggacagttttggaaatgtattcgaaaactcgttagagaaaatcattaaagagagcaatattccttttatcacggagaattaccttaaggaaagactccccaaagataacaaagttgtagattttttatttccgcacactgatgcaaatatatttattgatgctaagggcgttgaaatacatcaaaaaggaatggttactttacgaccagaagatatttctgggaaaattaaatcttctgttttaaaagctatcgagcaagcccatgaagttaacagagaaattaaattagatgataaaacaatcaccccattcaggaaagaatcatttataatatgtattacatataaaaatttattcttaggtaatggcacattccttgcgggcacatatgctgaaactgaaatgcaaaagatatatgataaattcaatactaactatcatataccaaaggaaaatatattttgcttagcttttgatgaatttgagtatcttgtcgcatcttgcaaaaatgcacatgtgcctcctcatgtggttttacaatacgctgttgaaaagaacaaagaaccatccagcgcagccttccttttctcccaacacatcgaaagcttttttgatagagtaattaactctgatatcgttaatgagatggggaaagaaatggttcaatcagttctggacaaaatttccccaaatgaaaactaa

SEQ ID NO: 107282 - DNA, 687 bp, Enterobacter aerogenes
atgattgataaaagcgtgtcgacgctgagtgaggccattgccgggatccacgacggcgcgaccatcatgattggcgggtttggtcccgccgggcagccgacgtacctgattgatgctctgattgaacagggcgcccgcgacctaaccattattaataacaacgcgggtaatggtgaagtggggttggcggcgctgctcaaagccggacgggtgcgcaaaatgatctgctcattcccgcgccaggtggattcacaaatttttgatgacctctatcgccgcggtaaggttgagctggaactggtgccgcagggcaatctggcggcgcggattcaggccgctggcgcaggtctcggcgcgctctttaccccaaccggctacggcacgccgctggcggaaggcaaagaaacccgggaaatcgacggccgccattatgtgcttgaatatcccattaaagctgacttcgccttgatcaaggcccaccggggcgaccgctggggcaatctgatctaccgcaaagcggcgcgcaactttggccccatcatggcgaccgccgccaaaaccaccattgttgaagtctcgcaactggtcgcccttggcgaactcgacccggaaaacatcatcacaccggggattttcgtccagcgcgtattctcgctggaaaatctgtccgccgcgcaaagcgcctga

SEQ ID NO: 107283 - DNA, 282 bp, Enterobacter aerogenes
atgataacacaatccatcattaaccactatataagtatggaaatggggttgcgctctctaacacatgaatatatcgcggataacctctggcgatccgcgatgatcaataccgcgactttattggatgcctggcgagcccagttaactggcgttcagctcattttcaacggattgcaacccggccatagcgcaggcctcgtcaaaatttccccccggcgcgccgccgacgccaaccgcgccaatgacctggtcacccatcttaaccggcactccgccagctaa

SEQ ID NO: 107284 - DNA, 327 bp, Enterobacter aerogenes
atgtccatccgcgagctatcaacagctgaattttctgctgaagttttagacgcttctgttccagtattagtcgatttttgggcgctatggtgccagccttgccgctcggttgcacctgtaattgatgctctggctcgtgaaaacgccggaaagctggcggtatttaaagtcaatattgatgagcagccggagttggcggctaagcacggtattcgttcaattcccttctttaagatttttgtgcgtggtgaatccgtcatggagttttcaggcgccagaccaaaaagcgacttgattaatcgcattctgtgggcggttatgaactaa

SEQ ID NO: 107285 - DNA, 819 bp, Enterobacter aerogenes
atgctgattgagcggacaatggataccccttcgcgtcatccggcatttatctcttcacccgcggcggctcgtgtgcgtgggggaatgtcaaaacttactgatacgctgttggcgcttctcaatcctgaatgtgtcgtcatggatgtgcaagtaacgcagattgaaaaaaataacggaacgctgactgttcgtggacacaatgcagatgaacaggccgtgatcctgcacgcccaacacatcctgctggcattgcctccgatgctggcagcccggatcgcatttgctcccgcactgcctgaacccttgctacaggcgtggcgtaatactggcacctggatggcgccgcatgccaaatatgtcgcgctctattcccgcgatttctggaaacaaaagggcctctccggtgaggcacgaagcagcgtcggacccatggtggagatccacgatgtttctgagccggatgggatgtacgccctgtttggtttcatcgggctaccgtataacgcgcgccgggccatgggagataccgtcttactcgagcagtgcagggcgcaactgacgcgactatatggccccgaggcagcatatccccatgctgaattcatcaaagactgggcggccgatccttttaccgcaacaacgtatgatctgtctttgcaggcgggccattccgtaccgccagctttggtggatgatgggccctggcgacacgcagtaaccggaatcgccagtgagtggtcaaccgcattcccgggctatcttgctggcgcgattgatgccgctgccgaaggcgttcaacgaatcctaaacgagagataa

SEQ ID NO: 107286 - DNA, 243 bp, Enterobacter aerogenes
atgaatcgcacaaacatcgttgatgtaaaggcgtggatcgatgcccgacccatatctcgttttcagtggcatgtcctgctcctttgctttcttatcattatgcttgatggttatgacgccgctgtcatgggctttatcgcccctgcgttaattgaagactggggtattagtcgcactcagcttggcccgatactgggtgcagccatgttcggcgtcgctgtcggcgctttggtcgagaagtga

SEQ ID NO: 107287 - DNA, 507 bp, Enterobacter aerogenes
atggcagtagttcctagacaaaacgcaccaagtaaaaaaatgatctggcagtactggattgacaatggaattcaaagaggtttggatgatacgcgctatgataatgcgtgtgattttaatgtatgtgtttgctgtggccgcgaatcctcaaaattggagagggcgcatattatccctcactcactaggcggaagtaatgatgtctcaaattatattctgctatgcagtaaatgccatagagaaagcccagatattgctaatgaatctgcgcttattgaatggatgaatgagcaacctactgaaatggaaagcatgttaagactaatccagcaggaaatggatgaatataataaagaaactcaaatgacagttaatgaaactcttatcaaagaaactttcagtgagttgttcaaaaaggcaggaacacatggtggtagatattctgatgcaaccaaggtgtatattattagggaagctttgaaaaaaatatttattcagactatttga

SEQ ID NO: 107288 - DNA, 843 bp, Enterobacter aerogenes
atgaactataaagtaatcgcccttgatctggatggaacactactaacacccgaaaaaaaaatccttcccgaatcattagctgccctacaaaaagcccaaaacgcgggggcaagagtgataatcgtaacagggcgacattatgtagctattcaccctttttatcaggcattaactcttgatacacctgcaatatgctgcaatggtgcattattgtacgattattgccaaaacacagtaattgaatcagatccattacaggcagaacaagccacaaaattgattgccatgctcgatagttactgtgttcatagtttgatgtatgccgatgatgcaatgtactatcaagacctaacagggcatatcgtccgtacagaaaattgggctaaatctcttccagtgtcacaacgtccaatcttcaaacaagtaccttctcttcgtgaagcatcgcaaaatgttgatgctatctggaaattcgcccttactggttctgatactgaaaaactacacagcttcggtcagattgtagagcgtgagcttggccttgcttgtgaatggtcttggcacgatcaagtagacatcgcacaagccggaaccagtaagggtaaacgcctagcacaatgggtagaatcacaaggtttatctatgagccaggtaatagcctttggtgataatttcaacgatttaagtatgttgaaaaatgctggtttgggtgttgctatgggtaacgccgtcgatgaagtaaaagattgtgctgatttagtaatcgggaacaatgcagagccaggtatagctaatattgtaaaccggtactttgagcatgtaccaacacaagaaattgtatga

SEQ ID NO: 107289 - DNA, 723 bp, Enterobacter aerogenes
atgcaagacagcaaagagttagataatccatcaaaacttctaaagattgtagaagctattgcaattacgccacaagatgctaaaaaaatagtaattggatataaaaaagcaattttaaagaaagatgcaagtttatcagaacaagaagtacaaagaattgtagctaaaaaaattgtagaccgatattcatcctattcagcactcagcggaggcgttacctctctttcaagtatcgttcctggggtgggtactgcattttcaatgtcaggaggggctttagctgatgtcacttactgtatgaaaattcaggttgatatgtgtatgtgcattgctgaaacatttggttgggatcttggaaatgaagatgcgaagcatttatcatttttgattgcggcgggaggtgctttagaaaaagcaggtagtgaagtagcagtaaaagttgcatctacggcaggtgtaaaaatgctcaaaatgtatttaaaaggtagcgttttaaaaactattaaagctatgtttcaaaagataggaattaatttcacacgtaaatctttagaaaaatcgttacctttcggagtaggcatagctattagttcaacagctaatttcggcatgacaaaatacgtagggcatgtagctactaaatggttcacgatagaacaagaaactcgcctctcagaaaaaacaattattggcaatgataatcaaacaataatatctaactga

SEQ ID NO: 107290 - DNA, 1344 bp, Enterobacter aerogenes
atgaacaatacaccaccgcaagatcttatcaacgtactgacaccattctggcagtttcctccccagacgagcttcgaccttaacactcttaaaaaagaaaaagtgtttcgcaatctaaaggcttattgtattgcacattacgaagctatggatgcgggaatctttgccgatatcccactggcgaaggctctgtgtcttcttggtgttccaggcatttgtcagaactacaatcactcgagcaatgtcactcatgttgcaacagaaatccatgaggcgctgtccagaaccactgcgactaaaatttatttatgtcccttggattgtgctgaccacatcgagccgatcagcttcgggaatgctgaagtgaggaagttctcggcaaatgagctggaggttcttcttgggctgaaacagttaaaacgtctgccgtgctataaaaaatgcgatctgaacgccttatccgaatttgaatggcttgttgtaagggaagaggttgaacttcattctaaaatatcctatagagcatatgattttttagctacaggtttagaacgtgattacggggctattaaaccatattatcagcgttatcctgatgcatttaacctatcgcttttcggattattattagctccatgggaagagtgggtgactcatattgaagtcgagtggaaggcatttcatgttaaatgggtacatatagtcgaaaatgatttgtttagcgatcaaaagaacatacctgatgcagacacactaacgtgggattatagatactataatgacggtgatggtaaagaacatgaagtttaccatccttttgaattatccactaatcccccccaggatgcattagtgttagtcgtcaacaaccaactcatggctgatattgatacggcaataaataatggattaataaatgaggcagcacgtcatcactttattaaagcattcctatcagatggaatagatgagttccttgcgcatattgtcgttattgatgcatgcttgggtgaacctcgcgaacttggaaagaaattaaatctaactaaatatgaaaaaaacctaaaatctacgggccgattaaaatatcggttggttgggctattagaagattgttcagtgaaagccagtattgattctctttatagaatacgaagtgaatacgttcacggtcgagatatgtctgagatatctgggctagataaaaatctagcaagagtattggcaagaaaaaccttgcttacgattattaaaatggttcagtacactcctaatctgagcagattagaacttctaacttcattactcagaaaaggaatagatagtttcaaagacaatagttaa

SEQ ID NO: 107291 - DNA, 846 bp, Enterobacter aerogenes
atggacgagagtacgttagataaagtagcagagtttatttgcgggaatggtgaacagtatcctgagtaccgttccagttccaggttgacagctttttttgcccgagcagggctccctcattttattcacgatggttctactcgacaaaagtgggtactggaatgtctcaaagcttgcagtcgtgaggaactggcatctgtgctaaaacgcctggcatccccaaaagaatatgcaggcgaacggttgaaaattaaaaatgcattggatctgctgaatgaaattacgtatgtcgaaggattcagaattaagctggttgggctggaaccaacattcgaaaaaatagcgatagattactctgacaataatgatgaaagagcgctgacccctcaacctgtgccggatttcttgtcccttggtcttgagagtggtgtcggagaaatacttatgaatcgatgggaagaagtgcagaaatgtgttgatgcaggggctcatttgtccgcaattattattatgggcagcatgctggaaggattattactcggagtatgtcagcgaaaccctgctgtagttaaccgatgtccatcagcgcctaagcataaagataacggcaaggtgaagcattttgccgaatggaagctatcagaacttattgatgttgctcatcaggtagggtggctagatatggatgtcagaaaattttcgcattctttaagagacttccggaatttgatccatccctatgagcagatggtaacaaaagtttatccagatgaagatacttgtagtatctcatggctagttgttcaggctgcaattaatgatttagccagagtgatgaaagcatag

SEQ ID NO: 107292 - DNA, 462 bp, Enterobacter aerogenes
atgacaaactcatttcttgacagcttgagcctaccagctccgaaggaaattgaggcggcagtccgtggacagagagaacttgcaacctacctgtcaaccaagcttgaaacacaaaaaatttctattcaggatgcagacaacgtatctcaccagattgaattaccaacgtcgtccctgacgttgcttatgactatcttgggtgagttggctgcgggtaacgcagtacaagttgttccggtacatgctgaactaacaacgcaggaagcagccaatattctgaatgtttcacggccccatatggtgaaacttttggaagatggcgagctgccattccataaaacgggtcgccatcgccgcgtactttttgctgatctgatgaagtataaagagttacgtgatcagaaaagccagaaagccatgcaggagttgtccgaccttagtcaggatctaggactgtactaa

SEQ ID NO: 107293 - DNA, 576 bp, Enterobacter aerogenes
atgaaccactctccatatcccgtagttttagacgcatgtgtgctgtatccatcgttactgcgggatctcttgatgcgtttggggctaaaaggtttataccagccaaaatggactgctgaaattcaggatgaatggcagcgcaatttacttcttgatcggagtgatttaactccagagcaagtaaagcgcatagatcaactgatgaacgaggctataccagatgcaatggtcacgggttatgaaaacctgatcgctagcattgaattgcccgacctagatgatcgtcatgttgttgcagctgcagtgcgatgcaatgcagaggtgattgttacggctaatctgaaagattttccaggggagtgcatcgcaaaatttgatgttgaagctcttcatccggatgagtttatttcagatctgtttgacttaaaccacgcattagcgctgcaggctgttgcagagcaacgtgcaaacatgaagaaaccgcccaagagtgtggatgagtatttagaagcgttgttacggcagggcctgcctatgaccgtgaaagcattagagaaatacaaggctatcatataa

SEQ ID NO: 107294 - DNA, 318 bp, Enterobacter aerogenes
atgaaagaattaacagtttttgaaatggaagcaatctccggtggatatacgtgggatttttcctccgcttcagcagcgttcacttctctggctagtaatgcagtagaagcgcttggtgctggtatcctcggctctgtcattacggcctgtgtcggagcgggacttggcggctttcaggggggttctaacgggggcgtcctcgggctgggtctaattggcaatgccgttggcgctgtcgcattaggttgggaaggttccgttgaggctctgcaatcactgattgagagcacgcttaacggcactttcgctccgtggtaa

SEQ ID NO: 107295 - DNA, 549 bp, Enterobacter aerogenes
gtgcctttagtagagtatcttaaagacaaaaggaaagcgaaaagggtaaagaataacttcagtttagaaattgaagatgaaataaaaacattgaaaaaaaacctaaaaaaaatgggtaaggcattgaaagatgcaaaaaaaatgaaaatcggcaacccagagcaaggtgatatacgtagatacgctccgaggtgcacacagatctacttcattggtcaagctatggagttttcatttggagagtttaatgaaaaacaaagaaattcaattaaatctttctttgtccaaattgaagcaatcaatgattacatcaagagcattaaagtaattaatattgaaaacactgcgattgatgaattgattgatgactacaaacgttacttacacactggttcttgcatgcttaacacaatgcgaaatattataaatgatgtgaatttaaacaccagtgaaaacgacaatgatattattaatggtgttttcaaagaattgggaatcgaactttcttatgaagatattaaaataaagaaaacaacaaacattgcataa

SEQ ID NO: 107296 - DNA, 684 bp, Enterobacter aerogenes
atgactgaatggcttaatgcacattttggtgcagacgcagctacttatcttagcttattagtcggcgtactggcactgtttggtattgggggcggtgttacatatagaatcagacagcaaaacaacattaaacagaaggcaaagaaaaccgagggtgatgtgaaccaggccgggcgggatattaatcagaccaccaacgtttaccacacatccaatgaatctgctgaggaccctgtaaaaaaaaagcaagatgaacatgatctgaagatcatcgaccagatccttgaattgctgccttatgaggatactactcaatgggttgagcagagctacctgagcggtatacggcaagatgtttgcttaaacattgaaaaagctgaaaaatttagcggtgaaaagtatcggttattcaatactgaagtgaatggtgcgaaagacgcttttttggacgctatgaccgcatatgtagatagtacgctaccgtttatgagtgttgattacccgaacagaaagccagtgatgctaagccttccccatgactggaagagtaagagtgttgaatcggaggcaaacttccgctttcatcagcaaaatgtgcgtgaaacatcgggggtgatgattgcgcgctatgaggattttgtcaggacatttaaggctcatggattcataagcgataaactgtaa

SEQ ID NO: 107297 - DNA, 444 bp, Enterobacter aerogenes
atgaatacaaaaaatcatcagttcgaggagcataccgtaattactgcctcagcggtccctgacgagttacgcattggcttctggccacagcactttggcaccatcccgcaatggataacgcttgagccccaaatctttgcctggatggatcggctgtgttccgattaccaaggtggtatctggcgcttttcgacactcagcaaccgcggcgcttttatggctcccgagtcagatcacgatgagaagtggacattgttcaacagcatgaacggcaatggcgcagagcttaccagtgaagctgccgggatggtcgcctgtctgatgacttacaatcaccacgcctgtcgcaccgagtgtgacgcgatgactgagcactattatcgcttacgcgactacgtgctgaaccatccagagtgcagcgccattatgcatctcatcgactga

SEQ ID NO: 107298 - DNA, 366 bp, Enterobacter aerogenes
atgaaaactctacctgctacaatttcgcgcgcggcggaacccggcctgtcgccagtgggtgtctggcaaactttactgacacgcctgatggaacagcactatggtctgacactgaacgatacgccgttcagtgatgaaaccgttataaaggaacatatcgatgccggtatcactctcgctaatgccattaactttctggtagagaaatatgagttagttcgtattgatcgcaatggatttacctctcaggtacaagcaccatatttgactgcgacagacattcttcatgccagaagagcttgcggactgatgactcgtttttcttaccgggaagtaagtaatatagttcttagccgatcgcggtag

SEQ ID NO: 107299 - DNA, 429 bp, Enterobacter aerogenes
atgacgcgcgccctggctgtgatgctggcgttggtgctggcggcgctgggctggcagtcgtggcggctcaataacgccagccacaccatcgaaacccagggctctgcgcttgagagtaaaaccgaggaactgacgaagaaaaacagccaactgatcggcctgtccagcctgaccgaaaccaacagccgggagcagatgcggctttatgcggcggcggaagatactcgctctttactgcaccagcgccagaaccggatcgaggagcttaaacgtgaaaacgaaaatttgcgccgctgggctgacactcttttgcctgctgatgttgtcaggttgcgcgaaaggcccgccatcaccggaggtgcagcttaccgtgaatggctgtccaaaggtgacacagtgccgcctggaaaggtcagcgccgcgcagtaa

SEQ ID NO: 107300 - DNA, 447 bp, Enterobacter aerogenes
gtgaatgaactgcagaaagtcgatgcttggctggcggcgctgctggcaaatctggaacctgcggcgcgtaagcgcatgatgcaggggctggcgcaacagctgcgccggaatcagcagaataacatccgcctgcagcgtaatcccgatggctcgggctacgagccgcgccgggtaacggcccggacgaaaaagggccgcattaagcggcagatgttctccaaacttcgcaccgcgaaatacctgaaaaccgccgctaaggctgactctgccagtgtggaatttgccgggcaggtgcagcggattgcacgggtgcatcattacggcttacgtgatcgtgtaagccgtcgggggccagaagtgcgttattcgaagcgacaattgctgggctttgacactgcggcgtttaacttaatgaaagagaagttattgagctatttagctaagtga

SEQ ID NO: 107301 - DNA, 1029 bp, Enterobacter aerogenes
atgaattcttttgatagattttataactgggttgaatcaaccgggcatatcatcgaagagtgcgacgatgaatacgtccaacatctgttcatgcaatatattcaagagttaacaatcttatcacttaactcttataaactagaaatacctaaagtcatccacaaaaataaaatggaacatgataacttcctaaaaaaacaccttagccattgggaagatgctctaaacctacttgaattactaatagatatctgcattagttccggatcaaatttcagtgaaagtcggaaaattgataatgaccttgcaaaagaaaacaaaacaggtctcattataagactgcatgcaaaggcatgttcaatatccaacgaaatattactactgctaaaaaatggataccctgatggtgctcatgctcgatggagatcacttcacgagataaatgtcacattacaattcattaactcaaatagccctgattgtgcagagagatttctcgcacatgaaatctatgatagttttcaaggaatgaagtctcataaaaaatacgagcaccgactgcaagaaaagggacctacagatgaagaaagcgcaattatcaggcaagcatttaaagacgcattaaagaaatatggcaaagactttgattcacaatatggatgggcgactccttttcttccaaaaagcaatagagcacatggctttcagagcttagaaaaggctgttgaattagaccacatgaggccatactttaaatgggcgaaccaaaacattcactcaagtgctaaaacaatcatcaaaagccttgccatgccatctttcgatgcaaatataattaatattggcccgagtaactttggactaactgaccctgcccaaaacaccgcacttagcttaacgcaagcaactgcggcaattttaacaatttctgaaaccgagaataatatagttacaatcaactcactaactaaactcacagagactattggaaaaaaattcctagaaacagccagagcatttaccacatga

SEQ ID NO: 107302 - DNA, 1224 bp, Enterobacter aerogenes
atgaccggagtatctagagatcaatacgctgcaggtgaacagggcttagggtatatctatcagcctcgttttgcgctacttaagcttctacagtggccagaagatacatctgttttgatcgaaaaagatgatgacctagacttcgtcaattctaatggtgtcaaaacactggcatcgctcaaacacaaaggagatggggatactctaaccgacctgtctaccgatttctggaagtcagtccgcatctggctggaccgctataatcgtgatggtaaaaccgaagcaaatcttcgtttctttctgtttacgaccggaactatctcaaacgcctcgttcctgcaacattttttagtcgaagcgccaacaaaagacgataattcagtatcaataactcaactcgccaatacagctctggctagaagcaagtcaaaactgatcacggcaatagccgatgagttcaataaacttactgatgagcaaaaagatgacttcttatcacggataaccatatttgatggcgggcctcgcattgaagacctcccaacaattattaaaaatcagcacatgcgtatcattagacgcgataaccgagacgctatttttgaacgacttgaagggtggtggaataacatcatagtcgatctactaacagggaaacgtaaagaggcgatttttggttatgagatttccgacaaacttgcagcattttctgaagagtataaatctgacaatctgccgattacgttcagaggaaaaatgcccgttggagaaatcgatgctatgaatgatcacaggctctttgttgtgcagctccgtgaaatagggatttcctctaatcgaatccgaaatgcgattctcgactactaccgagcatttgagcagcgttcttcatgggctcgtgaaaaccttttggttacaggagagatagaagattatgaagaccgccttgttgatgaatggagtcgctataaagacgtcgtttttgaagaattagatgaaaattcagctgacgaagtacttattactgcgggaaaagcattgtatcaatgggccgatcttgaaagtggtaatattcactcattgcgtatccgagaacgagtgactgagccttatgtagttcgaggaggatttcacatccttgcgaacagtagaccactacccaaaattttctggcatccccacttcctaaatagagttggtcaattgttgggagcccaagcatga

SEQ ID NO: 107303 - DNA, 489 bp, Enterobacter aerogenes
atgaagcaatgggatcagcgtccattcgagataagaaatcttttcaatcctgcattttgtggtgttgtgctatttagagcaatgcagagctacgaagaggaaaactcacagggcatgccattttctctggctcttttagttttaccattatgtctgcaaaaagattctcgccaagtgtttgctgaaaatcctcgccgctaccttttgaaaactatagaaaacaatcccaaattactcgttaattttgctaaccgcgtcaataatatgcttccatttacgcttgaagcttttggaatgctcatggaacgaggatgttttgttgtaacacaagacggccggttgaaaacagtacctaataaagttcgcaaatcggtcatagggactgaagaatctatctcatgccagcgtgtcgcacgctatataggaaaagaatttgcccgtattgctgatcgcgttacggtatacacgacctttggaatacgcccatga

SEQ ID NO: 107304 - DNA, 1962 bp, Enterobacter aerogenes
atgaaaattaagtcgattcatgtctacagccatgatggccaacgtcgggacctgcactttaaggttaatggtttaaatgtcattactggccgttcctcaaccggtaaatcagctctttctgagatcattgaatactgcatgggtcgatctacctttaacgtaccagaaggtattattcgcgataaagtgtcatggttcgcagtcatttatcaattttcacaggaacagatacttattgcgaaaccaacaccaaatgcaggagccacaagctgtgggactgttatgctgcgacgaggaaatgaactgaccgcaccgaatttcaaagacctctcggttaacaccgatgatgattcggtagtcgcactgttgtcacgattacttggtatccgcgagaaccgtacagatgtggcaattgggcacagcagagaaagctttgatgcaaacatcaagcatactttttattaccttttccaaaagcagggccttgtagcaaataaagatcaacttttttatcgacaaaatgaggcatttcagccacaagctattcgcgatacattaccgattcttctaggcatttcatcaaatgatcgctatgaacttgaggccaaactccgtacagcgcagcgagatctgaaaatcaacgccaaacgtcttgaacaagcgcgcgatacaatcgatacatcattgctaaaaggttatgggcttttatctgaagccagagccgtaggtatcatcacacaagacaaagacagaatcggaactgacgaagtaattaatgttttgcgttctgcaatgcaatgggttccgtctcccctacctgaagacgatggacatagaatatccattcttgaaaatgaaattgctggtttacggcaagacagacgtaagatccagtcccgaattgattctgctcggatgtatgccaagcaatcaggtaattttgaaaacgaagttttagaacagcaagaccgattatcttctatcaaggctctaccgaaaaatccggaaactggcgaatggcaatggcctttctgtgaagcaaacttagcaatggaatctccgattgcaaaagcactcctgagcgaactaacaactcttgacgctgaaatgagcgttgtggctggacaacgtcctaaaatggatgcttatcttgctgaactagaagatgaggttcagaccattgtaagttcgataagggccaaagaagtggagcttgctgctgcaatcgcggcaaacgaagttattgagcaattaggcacacgcaataatgctgcggcaagagtaattggtcgtataagtttgttcttggaagacctagtacctaactcagagctggcaacatatgaagcagaaaatcgtcgtctaaagctcaaagtcgaagaactacaaaggaaagttggtgctgatagcagccatgaaaggctcatatctattctgaataacatttcgtcacagattacacgctacatcctggcttttgatgcagaatttaaggggctccctgctcgatttgatctaagccaaatgactattatctttgatcgtacagatcgtcccgtacctatgagtcgaactggcggtggagaaaatcatctcgcttatcacctgtctgcattgctagccattcatctctttgcctcaaagaacaattgccccatccctcaatttcttttaattgatcagcctacccaagtttatttcccttctgaaaaaatttaccaggaagctgatggtaccgttcagaaaacggaagctgatgctgacttagcagcagtacgtaggctgtttgcgttactgctgaagtttactaaagaagaggtcccaggctttcagcttatcgtgacagagcacgcaaatcttcgcgaccagtggttccaggattctttaaccgagcttccttggaccaagccccctgccctggtaccagaagactggcctttaccgtcagacttaccaaattaa

SEQ ID NO: 107305 - DNA, 1263 bp, Enterobacter aerogenes
atggatattatcaacagcattattagtctgggggcatcagtcatgatgccagtaatattctttattatcgcactttgctttggggtaaaaatcggtacggcatttaaagcggggatgctggtcggtattgggttcgaaggcgtcggcctggtaattggcctgctgctgacgaacattggccctgcatcacaggcaatggtcgagcgcatcggcctgcagctgaatgtcgtcgacaccgggtggccgaccgcttcaacgattggctggggctctccgctgatgctgcctgtcgtggtcggttttattgtcatcaatctggccatgctactgctcaaattaaccaaaacggtgaatatcgatatcttcaactactggatattcctgatcatgggctcggtcgtatatgccggaaccggtaactactggctttctgttggcataacatttggtatttttgtcttaacgttactggcagcagatttaaccgccccgtatttacaaaaaaattataatctcaaagggatttctttccctcaccttacctgtatagcctacgtcccctttggcatagcctgtaattacattattgataagattccgcttatcaataaaattaattttgatccggaaagcattaataaaaagttcggtgtatttggtgagccgttaacgctgggtttcgtactgggattgctgctggcattccttgccgggtatgacgtatcggctgccgtttcgctggcaatcaaggtctccgcggcgatgctgctgttgccaaaaatgattgaaatactggtgcagggattactaatcgtccgtgatgccgcagaagcaaaattgaaggccaaattccctgaccgtgacttttatatcggcatggataccgcgttattgattggcgaaccttcagtcctggccaccggactgctgttgatcccgatggccgtagtgctgtctatcattctgcccggtaaccgcgttctgccatttgtcgacctcgcttcattgatgttcctactggctatggtcacaccattctgtaaacgcaatatgttccgcatgttcattagcggcacgctgatcgtcagctgcattttgtacgtcggaacggacatttctaaggaatacactcaggcggcggttaactccagcattccggttccggaggggatgtctgaaattaccaatattgtcgggggggcgaccacaccagttggctggctggctgtgaagtttggggagtttttcagtactgcgccgtaa

SEQ ID NO: 107306 - DNA, 996 bp, Enterobacter aerogenes
atgaaatgtctggcaattgccgatctttttatcaacaaagcgatgatggatgcaggtcttaatgcgctcagggataaaggtatcgacgttgaagttcgtgaatggtcgcatgattcgatcgaaaaattgcaggaggataatctgcgggtcgagcaggaaggcgcagaagcggttacgttacccgcagccttacttgagggtgctgacgacgttgaaatcctgataacccagtttgctccggtcaatacggcagtgctggataaactgccaaagctcaaatacatcggggtattgcgagggggtgttgaaaacgtcaaccagcaggtcgcactggcccggggaattgaggtaatgaacacgccggggcgcaatgcccgcagcgtggcggaatttacggtagggatgatgctggccgaaatgcgcaatattgcccgttctcatgatgcgttacgcgataagttctggcgtaaagacagcccgaatcatcaggctattccagagcttggcggtaaggttgtcggtctggttggcctgggtcatattgctcaactcgtcgcgggttttcttagcgccttcggcacggaaattatcttttatgataagtacgtctccggccacgaacgctatgagaaagtcgatacccttgacgagctggtaacacgggctgacgttgtctcactccatgcccgtatgacgccggaaaccgaaaacctgatcaacgcacaccatttcgggttaatgaaaagcagcgccattattgttaacaccgcgcgctccgggctaatcaatgaacgcgatctgattgacgctctacagaccggaaaaatcatgggggcggcgctggatactttcgacgatgagccgttacctgacgacagcgcgttttatttactgaataacgtcaccatcaccccgcatattgcgggcagtacgctcgacgccttcagtaattcacccaaactatttgctgagatcttgctgaagaaactcagttaa

SEQ ID NO: 107307 - DNA, 762 bp, Enterobacter aerogenes
atggatctaaatctgaaacaccgcacagccatcgtcaccggtggagccacggggcttggccgggaatttgtcctttccctggctaaagaaggcgtcaatatctgtttcacgtacctgcgtgatgaagagtgcccggaattactgattgaacaggtgaaatccaccactgacgtcaaaattattgcgctgaaaaccgatcttgccgatgagaaaagccgggagcatctctttgcggcctgcattgagcagatgggaaaggccgacattctggtcaataacgccggtatctggctcagtggctacgtcaccgagataaccccacaggactgggacttggtaatgaatgtgaacctgaaagcggtattccatttaagccaattgtttgtgaatcactgcctgcaacaagatcaggcaggcagcattttgaatattacctcacaggctgcattccatggatccacaaccggccatgcccattacgcggccagtaaagcgggcctggtagctttctctatctcgctggcaagagaggtagcaaaacaaaatatcaacgtgaacaacatcgctgtcgggattatggacaccgcgatgatccgtaaaaatattgaacaggacccagcctattacgtcagccggattccagtaggtcgggtagctcagccaaatgaaattgccgacatcggggtcttcatggtttctcctaaaaccagctatatgacgggagcaactgtggatgtcaccggcggtatgttgatgcgttaa

SEQ ID NO: 107308 - DNA, 1539 bp, Enterobacter aerogenes
atgaaagatgaatatgtaatgggtatcgataatggcgggacagtcactaaggcggctatctacgatcgcaacggcagcgtggtttctatcgcgtcaaaatccacccggatgctgacacccagggaatttcataccgaacgcgatattaccgagctgtgggcggctaacatcgaggtcatcaaaaaagcgatggagcaatcagggatcgacgccagtcaaatcaaaggaatcgccgtcaccggacatggaaacggtttgtatctggtagatgaagctggcaacccggtccgcaacggcattatctcaaccgacagtcgggcaaaagagtacgtggaaaagtggcaaaactcacccgattttttgaccgacatcctgcctaaaaccatgcagtcaatctgggccggacaacccattgctctgctggcctggctgaaggataacgagccggaggtgctgcagaaagcacataccatttttatggtaaaagacctgatccgcttctaccttaccggagaggcttatcttgagcttactgacatctccgggaccaacctgattaacgtacgtgaccgcaagtatgacgatgaactactggcatggtgggggcttgctgacctgcgcgcgaaattgccacccgtcaagctgtccacggactgctgcggtcggataaccgatgaagtcgcccgtcagacaggcttatgcgcaggcacccccgtctctggcggcgtgttcgacatttccgcctcgtctgtcgcctccgggattaacactcttgataagctggctatcatcaccggaacctggagcatcaatgaatatgtgactgaccatccggttatcgacaaagatctgtttatgacttcgatttacccgatcgacggtaaatggctgataacagaagctagtccgacgtctgccagtaatcttgaatggtttatcaataatttcatggagaacgaccggaaaaccgctgctgctcagggatcttctgtctatgagttgtgtaactcgctggtcttatctacgacgccagaagaaagccatctgctgttctttcctttcgtatttggctctaacaccattcccgatgcctcagcaggctttattggggtgaacagtttccataaaaaagcgcatttcctgcgcgcgatttacgaaggtgtagcgttcagccatctctatcacaccgaacgtttacggaacatcaatccggatttgtgtcgcaccatccgaattgctgggggagtgaccaactcgccggtctggctacaggtctttgccgatatcttccagtgcacgcttgagattgttgatgtcaaagaacacggcacactcggtaccgcaatgacagccgctgtcatgattggctggtttgatgatgtcttcgccgcgtccaatgaaatggtgcgcgtcgcgcgaaccgtgacgccgaatccggcccatcagcaagtgtaccaggacaaatatcagctctacaaaaacctgttatctgaaatgcagtccccatggaaaagctgcagtaactacatcacgcattaa

SEQ ID NO: 107309 - DNA, 552 bp, Enterobacter aerogenes
atgtttttaaataacaccatcattccttcagtaagaaagtataagcattttgacaaggcattatcctgtgcatctgaatatgttctgttgtcagaggccaatatcggaaatctgcaatcactgataggcaaatgtcatcaaagtggtaagaaggttctggtccatctggagttactcggcgggtttaaacccgatcaggctgggatcaatctactgaaaagttattataaagttgatggtgttatttcttccaatctctccgccctgcgctatgcaaaaaaagaggggttattgactatttttcgggtgttacttatcgattctcgatcgctggatcagtctatcgatatcgttaaacataacccgccggatgcaatagaaatcttacctgctgaatatgcctgccagtgcctggaattgattagccgaaacttaaatggctttgacgtgatattcatcgccggaggctttgtaaagcggaaataccttgtagataaaatattccatgccgggtttaaaggaataaccaccagcgagccgggtttatggtaa

SEQ ID NO: 107310 - DNA, 792 bp, Enterobacter aerogenes
atgtctaaagaacgccgtctctcaaagatttttgcaaaagatggtaaatcagtgacattagcgctggatggttactatttttccacgaaaacaaatggtattgataatacgattaaccaactgcctgcattggtggaacaagggctggattgtgcgttggtcacgtacggtatgctgaaaaattttcgtgagccattaaattctgtccctgttgtattacgcgtcgatagtacagtcagtatttttgataataccgttcccgatactaccccgatgtttaccgttgaagatgcgttgaaagtcggtgctgaaggtgtcgtctgcatgaccttcccgggtgctttcaacgaagaaaaaacgcacatcatggcaatgcaactggcacaggccgcagaccgctggaacgtgccgctaattgtcgaatcacttccctatggctaccccgtgactagcgacgactcgaacaacccggcaattatcgccgcctcggctcgcgccgcagtggaactgggggccgatgtcatcaaaacacgttttacaggtacagcggaagaccgcttgatcgtcgaagcggcaggcgttcccgtccttgcacttggtggcccaaaaaccggcattgatggttacttcaggtttgttcagcactgtatgcaggttggggctaaaggggtggcagtgggtcgaaatatcactcaggacccgcgaccagacagagtggtcgcaggcctgaatgctatcgtccacgaaaatgcctctgcggaagaagcatacagcctctatatggctaaataa

SEQ ID NO: 107311 - DNA, 1257 bp, Enterobacter aerogenes
atgaagccattttcggggcgccttggcaggtatggcagcgtgctattatttccactggcgatgatcatctacgatttttcagcctacctgacaacggacctgattcagccgggcgtcattaacattataaatgagttacaggcggatgttacgctggctccagcatcggtcagtttgtatatggcagggggactggcgctacagtggctcctggggccactctccgacaggattggccgccgctcggtcctgctcatgggtgcaatgatctttgccttagcctgcctgagcatgctgtttgtcacctcgatcgaacaatacttcgtcgcccgctttattcagggcaccagcatctgttttatctccaccgttggttatgtatcaatacaggaggcctttgatgaaaaagattccatcaggatcatggctgcgctgacctccattgttctgctcgccccagttatcgggccggtggccggcgctgcgctgatggcgttcattcactggaaactgctctttgccatcatcggtgtgtttggtctggtagcatggttcttactactgttcaaaatgccggagacagttatatctcagggaagatcattcaaaccgggtgaagtgctgtcagatttcatcgcggcatttcgccatccagtggtgctgaccggctcactggcagtcgcttttggtaacctgcccatcatcacctgggtggcgctctcccccgtgatcctgattgagcacggggggatgtctcccggtacctatgcctggacacaggtgcccgtgtttagtgggatcattatcgccagtgcgatcgtagctaattttatcaaagacccgacttcaccgcgttttatctggggtactgttccgatacagcttgctggcttgctggctttgctggtcggcaacctgctatggccacacgtctggctatggtcagtactgggaacgagcttttatgccctgggtattggactgctctatccggtgctgtttcgctttacgctcttttctcataacctgccaaaaggcaccgtttctgccacgctgaatattctggcgctcggcataattgcccttagcattgaaataacccgctgggtttacttccatgctggcggcaggattgctttccactgcgtggcgctgctggccggtatagccgtcatcatatcagttgcccgcctgcttaaactgcgtgggcagcatcagagccagtcagtatcaccggtaggctgccaggagcaataa

SEQ ID NO: 107312 - DNA, 666 bp, Enterobacter aerogenes
atgccaatacatcgttttcttcaattgcttgaagaaaaaaaattaactttagtaagaccaataaagtgggatgatccattcgagaatgccttattaaatagtacaatcgaaacttctgatggggaaacaggcacattctccgcaaaagattctgtttatggtcaatgctggacatttcatagtgaaactgatgcaatgtggcggatatattcccatgataaagatggtgtaagagtttcaaccacaccaaggaaattattaactgcacttcaaacagcagaaccaacgcaccataatttaaagtgttttataggcaaggtttcttatcttccagaaatcaatcttctagaaaagctcatgtcagttaatttattagatactgatggttcaggtattgctgaatcacttttatataaacgtgtggaatttgaacacgaaaacgaagttcgtttaatttattctggtgatgacaatgcagttaatagtgatattttccaatttacaattaatccaggcgaactgttagattcgattctctttgatccaagaatggagaaaaatttaaggcgagcatacttattggcaattaaggataaaggttttaaagctgaagtaaaaatatctacgttatacgatgcgcctaagggactggtatttaaattatag

SEQ ID NO: 107313 - DNA, 1752 bp, Enterobacter aerogenes
atgatcaaaaccttcatctatagcagggtctccacccaggaacagcttactaagagtggattattccgccaagaggctgacgtaagagactatgttacccgcaatggtttagaccagtacgagatcgtagcaatggaggataaaggggtatctgggtacgacggatcaaacatgaaagaggctgaggcagagcttggtaaatggtacaaggaagcaattacgggcatgtattgggggagtcatttagtactggaagcgatagaccgattcagccgccgtgatccgatgctggctatggaggacttcaccacactggttaacaaaggtggtattaaggttcatatcgtcaaaatgaatcaggtaatcaatggtgataacctcccattcctttcaatgatgatgaatcttgctcacaatgaatcaaaacaaaaaagtgatcgaatcagtaagggttggaaacgtcgtcgccaattggcaattgataacggtactgtaatcactaatcgtaccccatattggattgatgttttcaataatgaatatcgtatcaattccaattcatcaatagtgattgaagcattcgatatgtataaacgcggtttatcgtgtggattgatttccaagaaattgaatgaacgtaaaatgtacttcccgtatatgtggactaaaacaagcgttcaacatattgttgacgggttgaatactgctggattggttgattcgtcacgtgcaaagaaattgattaaatcaatggcaaagacgggtaagggaagtgatgttattgcaaaggaattaaatgcaaatgaagtatttctcaaggaatggaatgcaccagcagtacacaaactattgcagaataaatctgtaactggattagttgagattcaaaagcgtaaattgattcaagattttgatgaatatggcaaaccacttgatttacgttataaggatgaaaccgaaaaacattatgaaatggtttatcctcaattagtcagtactgatgattttgaactgatccaaaagttacttgaatctaatagtaaggtgaaggatcgaaaaggtaacggtacagttactactaatgatgatggtgaagttgtaaaacaattcattttatctggcctttgccgttgtggtatgtgtggcggtgcaatgtataacaacatcgtcaaaactaaacgtgctggtggtaaggttgatacttattcatatctcagatgcataaatgaacgtgataagactaagcttaatgaagctggtgatatatgtactgtaaaggccatgaattattcagtactggaaaaggcaatcatccagcatgtaaaaggattgaattttgattcattgggaactactaccaatgatagtgaactggagctattgaaggttcaggaagtagaattattaaaggacgtggtattttatgaggataaaattaaggccgctaaagccattggaaagacaccaaatcgatcatatagggaagggttagccgaaagcgaggatgcgttagagagcgtccaagagaagattagaggcattcaggggatcactatcaatagtgatgaactaacaaatctgaatgattctgtacatgatattaccgagtatgaattacgtactatggtagaaatggaactacagaagctaatcaagcgtatcacatttggcagtactgaaaagaatgtatactttgcaagttttacatacaatagctgtctcttatacacatctgacgctgccgacgaatag

SEQ ID NO: 107314 - DNA, 1011 bp, Enterobacter aerogenes
  misc_feature (984)..(993): n is a, c, g, or t
atgtccacaatgaaacccgctatattttcattcttttcaggatcaggttttcttgacctaggcttcgaaaatgccgggtatgaggtggttttcgtcaatgaattccatcctcccttcatggacgcgtataaacactcaagaaaaaaacttggcaaacagccgccacgctttgggtatgcccaagaaagcattgaaactattgagcattcagtgattaagcatagcatgaaaacactgaaagatgaaaatcgcctcgtgggcttcattggtgggccaccatgccctgacttttctgttgctggcaaaaacaaaggcaaagatggtgaaaatggcaaattatcacaaagttatattgacctgataattgaaatgatgcctgatttcttcctttttgaaaacgtaaaaggcttataccggactcttaaacatagagaatttttcgaacaaattaagaatgaactagcttcagcaggatatatcctgcatgaaagattgattaattcaattgaatacggtgcgcctcaagatcgagaaagaattattttagtaggttttcttgataagtctttagccaaaaaattcgaatggagtggccaaatataccccaataaggaagctttccagttcccttggccaacaacaaacacatacgaagaagactcaagtatggaatgcccacaaggtattccagaaaaacttactatagaatactggttcgagaaaaacgatgttatcaatcatccaaacgctaaacatgtatttacggcccgagccggtttagcaagattccagtcagtagaagaaggcgatgatagtaaaaaatcatataaaaggcttcatcgctggagatactctccgacagcagcatatggtaataatgaagttcatcttcatccatacaaacctcgtcgtattacggtcgctgaagcattggcaatccagtctttgccaaaagattttgagctaccagcggatatgactttnnnnnnnnnntttgtcgaatatgtttaa

SEQ ID NO: 107315 - DNA, 228 bp, Enterobacter aerogenes
atgcgttatatgggaacttactcaattagttctcagggtggcgtggataacttcaatattaatgtaccgggaatgcatcataatggatgggtggcattccccgtaaataaatataatatgaatgaatggtactgcgattgtcaggaaggattctttacggcaaagtaccttccaactggcggtatatatggaacataccaattcgtcgtctataagtgggaggtataa

SEQ ID NO: 107316 - DNA, 3024 bp, Enterobacter aerogenes
  misc_feature (2981)..(3012): n is a, c, g, or t
atgtatcggattctctatctcgtagtacaagtccaactacacggattacccgtcatatatggtggagacttaccacataaaaacggtgttgatggtggttcatttattctaactggtactatatgtagttgggttaatatccttaatgatcagagtcaatatctattcagtgaacaaacggcatgttatgcgggtatcgaaaagcacatacaacaaatttatatagatcaagaaccagtattgggagtacccattactacggatggtattgtaccagatagctatctattagaacgttatcgcggattactacaattggaagttcgatttggtggtaactataccaatacaaaaactattgctaaacaatatgcaggttctaaatggaaggataacttctatggtaagggcgttgtaagtatcagtactgtaatcaagaaaacgcaaaaatcattagaaagcaatacacttgtaaatgatcaatttaccatgaccgttgagttaaagggtcagaaaattatggatcttgccgatggtataaagaaatgcagttccaatccaccaagtattatctatgatattctcaccaatagtatatatggaatgggcgtcaatcctgcattgattaatgtggatacatttatggaggctgcatcctattgtaaggcaatgcactactatgcaaatggttctctatcatatcaatctacctataaggaaaatattgatttagtactgcaatcgttcaatggattgctttatacctatatgggtcagatctgcatttctgccgattataagaaacttgctgttagagattttgatgaaagtatgatgtttggagattttaccgttattggttctggtcaaactgattacttcaatacaatggatatgaaatatacaaatacgtcagatcttgcgatgtataatacggatgtattgcgtcttccaagcgatattaatgatccaatcgtaatgaaagatggtaaggtaattgccataagccgtgattattcctgggtatatgatactgaaacccttgcaaagttgggtaatatcgaattacgtaaagggcaatttatattacgtaccgttaccttcactactaatgatgcaatggatctaaaggtaatggactgtatcgatatcaagaatgccgagtgtgaaattaatggtaagttcaagattgtatccaaggaaattcagactacccaaagtagtgcggggtatgtttccctaacatgtgtggaatggcctgatgccgtttatgacggtacagatcaaggtatttggtcgccaccaggagtgatcattaatccggcgttaatcgtagttccaccaagtaatgtggacgttgtaaagcgtggaaatacactatacggtaccgtaatcgatgtcacatggacggcaagcccagatattcacctacgtggatattatatctattataaattatccacttccgatacatggacatatgcaggtagtgcatccaagtatgaaacactgtttaccatatatggtattgccgaccaggagaaatacgattttgccgtagcagcatataatgatattggattgttatccgagaaggtaacgaaggatggtattgtaccagaatatgattttgcattgcctccgatcactggcctagtactatccaatggtaatggatttgtaactccatatagtaacttcaatctggtatgggataatcaaaaacccattccccttaatggacgtacatttgccgattattttaattattatcaagtacagatatatgatggtagtaccgtagtttctacatatcgaactaccgataacacatttgattttacactggataagaatatcaacaaactacgtaaacctaccatcggtattacggcaattggatttagtgcagggacatattctcccgaagttaagattaccgtagagaataaacaggcattaccccttaagagtctaaccattactggtggttttggtaatctctttgcaagttgggaacaaggcggaaatgaaccagattatgcaggggtggtagtacagatccgcggcggcgtttccagtactacctatatttcgaataagccagaatttgatagtattccaaatatctccgatggtacctactatgttaaggcaggggcatatgatgtatttggaatggacaatattacatatactgccgaacaagaaatcaccataaattcaaaatatcaatttacgcaagaagatgccgatgccattaatggtattttggatctggatacacgccttagtaatacactagatactgccgtaaatgagagtaatgcatatacgaatgtacaggttgataaactacagaatagtattgatggtaatacggcaagtattggtgaactaagcaaaaccgtagtagatatggatagtgcattctcccagcagattacacagctacaggcacaaacggatgatggttttgcaaccgtaagtcaggaactagccgccaaggccgatacggataatgtaaatgcgagttattcactaagtgtaaatgcaaatggtgccgtggcaggtatgcgacttattgccgatagtacaatgcccgataacacggcaatctactttgccgcaaataaattcgtaatttcgggtagtgatgttgcaaccgtgggaggtagtgcaccatttgtagttaagaacggtactacataccttcaaacggcgatgatacagcagggtagtatcggtagtgcatatattgccgatgcaagcattaccaatgccaaaattgccaatgcatctataaatggtgccaagattattgatggtgaaataacaaatgccaaaattggtagttatatccagagttataactatcccaataatggttggaatctagataagaatggtacattaaatatacttggtagtggcggtactggaagaatgcaaataaataataatctaatacagatatgggnnnnnnnnnnnnnnnnnnnnnnnnnnnnnnnngatatgggataa

SEQ ID NO: 107317 - DNA, 393 bp, Enterobacter aerogenes
atgttgaataaaatatatgaaattgcaagtgatgtaattggaatgcaacacgaatacggcagtgatgccgattgtaatattatagcccttaaggtactggatcatatcgcgggtactgattgggttagcaaggcacaatatacatctcttaaatctggaatatcaaatcttaagaaggttggctatgcctcagtacaggaaatcataattcagcactgtgatgaagtacagagagaacatactattgatggtgatctactctttttcgatgatcccatgaatattggattggtggtaagtggtcgcctactcactgcgacaaatgaacatactacatttagattaattaataagcccaagggcaaatactatagagtaaggagtgatacatga

SEQ ID NO: 107318 - DNA, 621 bp, Enterobacter aerogenes
atggatgatttcctaacaaatccagatattattgcatattataatgaacgatatggtactgataaaaccgagttatcatttccagatctatttggaattaatatagtcgtattttgttatgatttattaccagatggtatgagtggttttcactggacggattcattaattgatcttgatgtagatggatatcgttatacaagttttccatttatcattggtgattcacttaaatctgtaaccgaagaaaagggcattaataacaatcaattatctctaaagatcagtaatgtaaatacttctgtaaggtcacttgccctatctaatgcatttcgtaatgcccaatttaatatcaagttggcaattatgaatccgcagacggcaactataatcggtaccattcttatatattctggatatgtcgattacttccagagcgttaccgatcccattcagggaaagaatgaattaaccgtatatcttaatagtgtttatcagaaactggatatacaaccatcattaattgccgccaatagtgcatatcaatcatattatccgggggatgaattcttttcccttcttggtcaagttaaccaaaatcaaatatggaaatacaaataa

SEQ ID NO: 107319 - DNA, 129 bp, Enterobacter aerogenes
atgggcgaggtggtaaaatatgataatctcatggtggaaatgaccatcgatccagataatgactggacaatgccaattgcaaataaggttgacgtgagtattcaggggagggaggttatcaatggatga

SEQ ID NO: 107320 - DNA, 2028 bp, Enterobacter aerogenes
gtgccgtacggccttgctgcaactgtcgttggtggtctggtaatccagttaaatgatcaggttcgtgtactgaaccagttatccaaacaatcgggattatcagtaagtgaaatacaaaaacttggtaaggcatttcgtgaaacggggttagattccgaaaaattattggacataaatcaggatgttttagatcatttgggtgatgcttttcgtaatggagggggtgtcggagatgatattaaatctgtaggattggatgttaaagactttaccaaatatctaaatcaggcagatggtggtattaaggctgttattgattcctattataaaatgaaggatgcaggtgcaactatcgccgatcaaaagttcctattggaatcccttggaagtgatgctagcagattaacttcagtactggataagtataaaaacacgcaagatgcattgaatgccatacaaagtgaatcggtgacaattaccaatgagactgccgcagcatttagtacatttgatggtaatcttaacactgtaaccacttcattacagacatggctttatagtgcaattactcctacagtagaggaacttaatacattatacacattgatgaataaagattggaccagtaccgattttatgcagatgttgtatcgtggtaccgataatttcctattgggtggtaagggggttattcccgatacacttaaaaaattactaggtaaggattcattagatagtgcctttatttcgggatctgccgagaatgatttcatcaaaagaagtcaggcaggatacgaagccaacaagggcaagtttaccaaaccagcggcaaaacctttaactggtggatgggtagaccccaatgcagccaaaaacgccgccgataaggcagcacgcgacgcagccgccgcagccaagaaagcacaggccgaagccgaaaaagccgctaaggaacgcacacaagcccaagagaagtgggataagatattggtggattccattgccgatggtggtaaacgccaattggatgaaatcattcgacagggagaagcacaagccaaggcaatcaccgaatccggtactaaattgggtaaatccaaggccgagatccaaaagttacttaatgcaaatagtgcagctacttccaaaaagactaacgacgaattaatgcgtcaacttggtttaagtaatccaaatcaatcattagttgaacaaattaataccatcaagaatggtggtgttacaaaggatatggcaaatcaacttggtaatagtctcaatattgaatttcatggagaagacataattgaaactcaaaaggccaatatggaagcccgttattcggcattatccgaagtacagcaagtattatatgacaagcagttaatatcatgggatgaattccagagacgtaaacaggatattcagaatagttatgaggccgaaagtttagacctacaacaaaagacatcattacagacattggatagttatgccagtactgctggaagtcttgctgatattgccgccaaggcatttggtaaacagagtggagccgccaaggcatttgtaatggcacaggcaggatttaatattgcctccgcaacaatgagcatgtatacggcaatctcaaaggcaatggcagagggtttaactcccgcagatcgtgccgccgcaatggcaagtgttgccgcacaaggtgcaacattgattgcaggaatctcaagcgttgcaggacaattccatgatggtatcgattcagtaccgcaaagtatgaataacaaatcattcctacttgcaggtggcgagcgtgtagtaaacaaaaccagcaatgacaaacttactcgtttcctcgattcccaaaactccaatactaatggacaggggattggcaatactacaatcaatgcaccattggtagttaatggtagtgatactagcgacgataagaaatttaatgagatgctacagaaacataaaaacaatgtaatgcaggcagtaaatcaatcgcaacagaggaatagataa

SEQ ID NO: 107321 - DNA, 300 bp, Enterobacter aerogenes
atgaatattgaagcattaaagaaaaaactaaaaccagaaaatcatgattttgaaattgaaggatttaccattaagattcatgttccaaaaagtggtgacgtggaaaaatgtactgactatttcagtactgtggtattttgtaccgaagatgaaaatggacaaccaatcttttcattagaaccaagcgaaaaatatattgatatccatgaagtctcatatgattatgtactgaaaatttggaatgcaattatggaacttacttccaaaaccaataaggtagaagaaatcgaaaaaaaataa

SEQ ID NO: 107322 - DNA, 150 bp, Enterobacter aerogenes
atggcaagtaaatttgatatttttagtggtgccaatattagcctcgaagttggtactgcaactaccgatggtactgtagcaaccgattttgtaatggtaccagaagttgcagaattcgtaacatcacggattcgaatctaccgtaattga

SEQ ID NO: 107323 - DNA, 1134 bp, Enterobacter aerogenes
atgtacagcggtaaaagagttgccattgatctaactggaacgattagagaccttaatactctcattttctccggtactgatgcaggtaacgaaaatctattcgtatgtaagacgagtggaggtggtgcaaatataaccaatatgccagcgggtgtagatggtaactttacactacgtgttgaatctatgcgtcagaatacggcaaatgatgcaaccagtagacaaacacttgcaagtagtactaccaataaaacttatgttcgttatggtaagatcacttcgagtggtaatgtatggtctgattggtcatcggttattgaatcacaagcggataataccttttatggtgttattagttttaataatactgcaacattcaataatgcagttaatgccaatggtgtattgaatgcaagtggtggtatcacttctaccaaatatgcaacgttcagtggtgcaacaactgtattcactagtactgcacaatttaatggtggtattaactgctattcatcattcaactgtaccgaacctggaacatttgcaagacaaatatattcaaaggcaacaataaccataccacaacaaattaatattggtggtctattccaaatgaaaatggacgggcgtggtggttggaatggaggtgatccatccggtgcatattgtaatctatggttagaagaaaataccggtagtgagcattatatgataatgcaattaaatggattcggtagtaatagatattggaaatttagaagtggtggtcaaactacatcaccattaggagatctacaggttgcaggttcggatcgtcgattgaaggaagatattgtaccgattagtactgatgatgcagtaaatgcacttgaccgaatcaaccaagttaaaattagtgaattcaaattcaaggggattgaccgtgtacaacgtggatggattgcacaggatcttgatgcaattcctggagccaaatatgcatatcttggtggtacttctttgaatgaacttggtggtgaattccaagtaatgaacgtagatagcaatgcaatgattgccgacttaatattggtagtacagaaactatctcaggaactaaatgaattaaagagtaaatataatcaaggggaataa

SEQ ID NO: 107324 - DNA, 984 bp, Enterobacter aerogenes
atgaaaaacattctaattgatgaccgatggtcaggttcaggcggaatcggaacatttgctgaagaaattaataaaataacaaattataaaagtgctgggttcaatggtaaaccattcagccctgttgattgcataaaaacatcattaaagatgttgaagatgcgtgatggtatcgttttttttcccggttatattcctccgttatttaccaaggtaccatatgtatttacaatccatgatttgaatcatttggaacgtcctgaaaactcaagcttgttaaaaaaaatattttataaggttgtcataaaaagaggctgtcaaaaagctaagtatatttttactgtttccgagttttcgcgacaaaaaatcattcaatggtccggagttcctgctgaaaaggttgtaaatgtaggtaatggagtatccaatgatttcagacctgatggaaaaaagaaagagtttggctatccttattatttatgtgtcagcaacaggaaaagccataagaatgaggttggaacgattcaggcttttgctagagcagatatccccaaaagcgtaaaacttgtttttactgggaagaaaacagatgagttagcgactctcattgaaatcaatgaacttactgatagagtcgtatttactggattcgttaacaccgaagaattacctgagctataccgtggtgcagaaggactgatttttgtctccttctatgaaggttttggtcttccggtcattgaggcaatggccagtggtgtgcccgttattacttccaaaacaacctccctcggagaggtcgctggcgatgcagcactggtggtcgaccctgagaatatacagcaaatagcaacagcaatatctaaattacattctgatattgaacttaaaaaccaacttattagaaaaggctctaaacaggtcggtaaatattcatggagtgctaccgctgaacttgttaataagtatctaacaagtaattga

SEQ ID NO: 107325 - DNA, 306 bp, Enterobacter aerogenes
atgtgggtaaagaatgaactactaaataatagattggagtttagttttactcaacttgatcaattaaatgactgtgaattcatcaaccagcgtaaacaatccctagacccaattaaggatgcacaagaagtaatcatgctggtagaggctggcctaatgtccaaacaggaagcaattgccaaacgtggtggagatccaatcattactttccaacaaatcgagcaagaaaaaatactaattgacaataaggaaattgaaagtgaaacagatccaaacgagggaaatgacactagtacaggtgaatga

SEQ ID NO: 107326 - DNA, 954 bp, Enterobacter aerogenes
atggacacaaccgatattaataaggtaattaatggttttctacgtgcatttcgcatgagttcccgaaatctaaaaatgaccaatggcattttctccaattacataaccgtatcggtacgcgaggttattggtagtgatgggatttacgttaggccaatggtcaacatgtttgacgatatggaaaaaaatattgaattgtccctggaacttgaaaaacgattctacaaatgggctactgatgccaaccagttttcagtacagggcaatatggatattgtcaccatgcaacatttgatggaagaaacgcgagccgttgacggtgaatcatggctacatgtggaaagcgttaatggagtattgaaggtcgaaatgattgattcggcacgtgtacccaccacgaacaataatatgttgccaggcgggcgatacattagtaatggaatcgaatttgataagaatggtaagccaattgcagtatatgtaatgcgatataatccaattatgtacacctatgaaatggaaaacttcgaacgtattcccttcgaaaatttgctccattacttcaaaccatcatgggttaatcaacaacgtggtatacccgatgttgtgaatggtgttgaatccctaaagaatatgcaaaaattcctggatagttcacttagttctaaagttctcagtactagcctgatgggatttattactactcccaataccaacgatcagtatgttaatcttaataccgaagaaatttcacaatatcaacatgactatgcacctggtgcaatgattgagctacaggaaggtaaggacattaaggaatttaatccaaaacttgccgtagatggtatcaaggaatataccagtgaactatataagactattgcaatgagtcttaatattacaccacaggcattaactggtgatgtaagtgatgccagtttttcacggagctaa

SEQ ID NO: 107327 - DNA, 594 bp, Enterobacter aerogenes
atggcaggtaagggaatacaaataaccaatcttggaaataccaagaaatatctcaataatgccgtgggtaaggtcattgataactttgatggtgaatttatacgccagacaaaggcattgagtgtacatctacagcagggtatgaataatgcaattgacaaaggggcggtatctttcacacaaagagcagtactgtacttttataataaacatagtgatggaagtattacagcgacaatcaagattaaggagctacaggcaaagtatctctatgacgtaattgtacagccagatatcatcgaaaaattcgtacctacaagttctgcacgacttaccgcacagggaaacattccacgactgaaaagtaatattgatagtggtagatataaggtggtaaagagcggtggtaaggaaagattaattgatacaagtaaaaatcccaagaccaaggcaggacgacgtaagagggtaattggtgtacgtgagaataagaagcgtaagattgtatatgacttctataagaatgccgaaattggagtagaaaagattattgccacaatgcgtggtacttacaaatttacaagaggaatatga

SEQ ID NO: 107328 - DNA, 897 bp, Enterobacter aerogenes
atgtccaagcaaattgaatttacccacctggaaaacaaacgagactttacatttaacctaggtaacattcccgacgatattttatatctagtgtccggtactgaccaacaattagatagactagaaactaccatcattggcattacggataatgagaagaagatttatgtactggatcatcgcagtcattttggtatcgactgtacgaaagtagaaagccccgtatatcaggaactggcaaactttctaaatcagccattcaagacggtaagcggtagggaagtaccactattgggatcattcatcgatagttcgaatggtaacgctacagataccatataccgcattagttataagtttgcatccagacacggtaaacgactattcacgccaattaagggtgcaccaagtggtagtaatggtcatccactattcaagaaaaccaaaaccgaaggtaaggaacattggaaccttaatgtgaacttgggtaaggataatatctatagacttatacaacaatgcctggtagattccgatgataccgacaaaacgcaaatatatttcagtgcaaccgtaccggatgattattttatgcaattgaccagcgaggtacgagtattgaaaggtggaaattacttctgggaaaagaaactaagtggcgaacgtaacgaggcattagattgcctaaactatgcaatcatatgtaataagtgggttcaggcaaaccttgcagtaaatggtagaaatccatttcatgaattgagactctataccgaaaaccgaagcaaattagcaaatatcagtactgaaacaatacaacctaaaccacaggccaaactaataaagccacaacaaaatttattgggtagtcgtccacgtggaataaggttcacataa

SEQ ID NO: 107329 - DNA, 228 bp, Enterobacter aerogenes
atgccaagtacccttgcaccaaaagattccattctaattggtgattggagtgatgttctatttgtcgattggcaaactactacccaaatttacgatatctataccctaattccacaaggtctagtacgtctacaacaagaatcatactttgatgttaaggttctacatagtaaaaccggtactggtgatgcaaaaaccttcattcaactgaatctaggtactgtttaa

SEQ ID NO: 107330 - DNA, 291 bp, Enterobacter aerogenes
atgtcaagggcatttaataacaatcaaattgattcatttctaaatgcctttggagaaacaattaacgtggacggtatatctgtaccgtccattatcgaaatgagaaatatcgaaattgaaacgggtgatggattcattgccgttgatgaacattggttcacatgccgtaaatccgatgtacccgatatagatatgggtagtaccgtaatcattcgaggtcaaactctaagtgtattcgatattattgatgatttgagtggtattatcgacgttacagcgaggagaaagtga

SEQ ID NO: 107331 - DNA, 648 bp, Enterobacter aerogenes
gtgatcgatgcgccaaaagccgcctatgaagtcagtaatcttgagctggcgatcgtcaatctgacgatgaccaacattcgtaccgtactcggctcgatggagctggatgaaatgctctcccagcgcgatagcattaacactcgcctgctgcatatcgtcgacgatgccaccaatccgtggggggtgaaaatcacccgtgtcgaaatccgcgacgttcgcccgccggcggagcttatctcctcgatgaacgcccagatgaaagctgagcgaaccaaacgcgcttatatcctcgaggcggaaggggtgcgtcaggcggaaatcctcaaagccgaaggtgaaaagcagtcgcagatcctcaaagccgaaggcgaacggcagtcggccttcctgcaggcggaagcccgcgaacgttccgccgaagcggaagcccgtgccacccagatggtctcatcggcgattgcgtcaggcgacattcaggcgattaactacttcgtggcgcagaaatataccgacgcgctgcagcagattggcgccgccaacaacagtaaagtggtgctgatgccgctggatgccagcagtctgatgggctcgatcgccgggatcggcgaactgctgaaagagagtagcgccgagcggaaaaaatcatga

SEQ ID NO: 107332 - DNA, 270 bp, Enterobacter aerogenes
atgctgatttttatccccattcttatttttgtcgcactggtcattgtgggggcggcagtaaaaatcgtgccgcagggttatcaatggaccgtcgaacgctttggccgctacacgcagacgctgcagccgggcttaagtttagtggtaccgtttatggatcgcatcggccgcaaagtgaacatgatggagcaggtgctggatatcccttcgcaggaagtcatctcccgcgataacgccaacgtcaccattgacgccgtctgcttcatctag

SEQ ID NO: 107333 - DNA, 567 bp, Enterobacter aerogenes
gtgatgggattcaaagaacggaacacgttgtccctcaccccgaccctctcccaaagggagagggagaaaggcggaccggcaccgatattcaacgctagtgccgaacggttccctcacccaaagggcgagggggaaaggcggatcggcatcggtattcaaggcctgcgccgaacggttccctcacccaaagggcgagggggaaaggcggatcggcatcggtattcaaggcctgcgccgaacggttccctcacccaaagggcgagggggaaaggcggatcggcatcggtattcaaggctagtgccgaacggttccctcacccaaagggcgagggggaaaggcggaccggcatcggtattcaaggcctgcgccgaacggttccctctcccaaagggcgagggggaaaggcggatcggcatcggtattcaaggctagtgccgaacggttccctcacccaaagggcgagggggaaaggcggaccggcatcggtattcaaggcctgcgccgaacggttccctctcccaaagggcgagggggaaaggcggatcggcatcggtattcaaggctag

SEQ ID NO: 107334 - DNA, 156 bp, Enterobacter aerogenes
atgggaaatggatggcatgaatggccgttgatgattttcacggtctttggccaatgcgtcgccgggggctttatcgttctcgcgctggcgttgatgaagggcgaactttcgcgcgagcagcagcagcgggtgataatgagcatgtttgggctatag

SEQ ID NO: 107335 - DNA, 258 bp, Enterobacter aerogenes
gtgaaggccaaattccgcgtctacgattcgtatttctcggcgattgctgattacgtcaagctgctgaccaacaacccgcgttatgcctcggttgccgaagcgtctactccggagcaggcggcgcacgagctgcagcgcgcgggctacgccaccgacccgcagtacgccagcaagctggtcagcgtgattcagcagatgaagcacgccggggcgcaggcggtgaaagcctatgccgcggatattaacgatctgttctag

SEQ ID NO: 107336 - DNA, 468 bp, Enterobacter aerogenes
atgtggagtatacctacttggagtctggcagttgatggcttagtaacggcattttcaatggcagaggggaaagataaaaaactctctaaaacttactctctgagtggtaaacgaagcagatcagataaactgttaagcagaattctgggctctcttgcgggtgaaaacccgcaactaaatctgctaataaacctgtatcttgacgtgattcagacaggattgcgagagctccatacccagcaactgtatccagtcgtatcagacaaagtgtgtaacctagcattctatgaagtctgggttgtaccatttttgttgtccatgaaacaacacattgtcaatgaaggtcctgagtctgagcagttatgccatctgatatcgctacttctggaatatcaggccgtaagccataaacaaacggtagacagatttttaaataaacgggttcttgcgttgttacctcatggataa

SEQ ID NO: 107337 - DNA, 231 bp, Enterobacter aerogenes
atgccattccagcagtcggccatagctgccgtcatggctgtcgcaggtgatggcggtgacgtgcagcggggaacagatgcgctggggctggacgtcgctttccccgtcgcggcgttcggtgagcttgtcaaaccacagcgcctcttcatcgaggcggaagtgatccggcaggatatcggaaggcctttcctgtcgcaggcgttcaagctgcccggtccagttctccagtaa

SEQ ID NO: 107338 - DNA, 633 bp, Enterobacter aerogenes
gtgactccgattcggactctgacagcgactccgactctgacagtgattcggactctgacagcgattcggattcggacagcgattccgactccgacagcgattcggattccgacagtgactccgattcggacagcgactccgactctgacagcgactcggactccgacagtgactccgactctgacagcgactcggactccgacagcgactccgattctgacagcgattccgactctgacagcgattcggactccgacagcgattccgattccgacagcgattcggattccgacagcgattcggattccgacagcgattccgactccgacagtgactccgactccgacagtgactccgactctgacagcgattcggactccgacagcgattccgactccgacagcgactcggattccgacagcgactcggactccgacagtgattccgattccgacagcgactccgattcggactctgacagcgactcggattcggacagcgactccgactccgacagtgactccgattcggacagtgactcggattcggacagcgactcggactccgatagcgattcagattccgaaccgcaggcaaatgatgatacgcatacggcagctatcgataccgtag

SEQ ID NO: 107339 - DNA, 315 bp, Enterobacter aerogenes
atgcgctttgctacgtgggaagaagtcgacctcgaaaaaggtatatgggagataccagcggagcgtatgaaaatgcgtaggccccacatttttcctttatctactcaggtagttgaccttttcaaacagcttaaacctattactggccaatatccttacatctttattggcagaaacaaccgcagcaaaccaatctcgaaagaaagcgtatcgcaagtaattgagttacttggttacaaagggcgtgctacaggtcacggttttaggcatacaatgtcgacaattctgcacgataacgggtttgatagtgcttag

SEQ ID NO: 107340 - DNA, 258 bp, Enterobacter aerogenes
atgacaagaaaaactgacacaaatgagattaaagaagcgaatgcccattcagtgttgaatagccaactcgttgatatggcatttattacaatgtttacaggcatgacagataagtggatatacaaacaagtccagctaggtttattgcctaaaccaattaaactgggccgtagttcgcgctggcttaaaagcgaagtagaagagtgggtaaatagtcgaattatagcttcgcgagggagtgataaaaaacgcttttaa

SEQ ID NO: 107341 - DNA, 636 bp, Enterobacter aerogenes
atgctgaaccatctctgccttgactggagtcaggccccttttaatgaaaagtatcttcaggctattatcaaaaccatggataatgcgctaatgcagcatcatagaaccatggccgtgcgtgttgatttacgattacctgaatatcgcgatatcggagatagtataagttgcacacctaatataactcgagggttgctatcccgattcatccggtcagcgcagtcaaaaattgatgcctttcaaaaacgtcaggcaaagcagggtaaaaggattaacccatgcaaagttcgttatctatgggttaaagaaatagccgatgcgagtaaaccacatttccatgttgtcctgtttgtgaataaagatacttttcgtgggcttggggattttttgcatacaggagataacctgggctcgttcattcaggatgcctggctaagtgcgttaggattagaggattaccctgaatacaggcaacttgtgcattttccagctaatcctttatacgtgctggatattaatgccgctaacttccggcaggcctgcaacgcgttaacatttcggattagttatttcgctaaagaacacactaaagtttacgacgcctacgaacgctcaatcggctacagccaatgttaa

SEQ ID NO: 107342 - DNA, 348 bp, Enterobacter aerogenes
atggcctgtgtggaaacgtctctgagtgtttttcatcccaataaaaaggacaaacacatgaaacaagccaagaaaatacatgctatgaaagtggcggagtatcgttcatacatcaccatgttcaaagtgtattgggacggtttacaaggatgctgtagtgatgctgagcggtatgtctggcgcgggcgagcaattacacagttaaataaagtagcatcgctcccctgtccccgaaccacaccaggagacagagagaagtttgaacgggcctgtgagcgtcttcagcagtgcatcgatagaatcacaccagaaggtcagtggcatgattgcattaatcagaaaaagtga

SEQ ID NO: 107343 - DNA, 1347 bp, Enterobacter aerogenes
atgagttctgaatggccactaaaaaagatatctgagattgctgatttcttaaatagtaagcgaattccattgaaaagtcttgaaaggcaaaaatgtcaaggcccatatccttactatggtgcttccggtatcgttgatagtatagataggtatatttttgatgggacatacctgttaatttcagaggatggtgaaaatttacgcactcgtaaaacaccaattgcttttaaagctcatggtaagttctgggttaataatcatgcacatattctttctgagaaagaggaaggagcacttgattatcttgagtattatttttccgcgctagatcttaatccttatattactggcgctgtgcaacccaagcttaataaagccaatttagattctatagaaataccatttcctgacaaaaaaactagattgtttatcaattcaacgttgaactctttgactcaaaaggtagcaataaataataaattaaaccaaactctcgaacaaatggcacaagccctgttcaaaagttggtttatcaattttgaaccagttagagccaaaattgcggtactagaaacaggtggttcgcaagaagatgcaactcttgctgccatgacggcaatttctggaaaggatgcggattctttggttgtatttgagcaagaacatcctgagagatattctgaactcaaggctacggcagaaatatttccatctgcaatgcgggatattgaatccgttaaaatccctgaaggttggcgtttagttcaattaagtgaaatttcctctttcgcatctggcaaaagtaatgtagctgagttaaccaaagatacatatatctctactgaaaatatgcttggtaacaaaatggggatagagtgtgctacatcactaccttcagctaataccacaccatcttttaaatctgggcaaattttaatttcaaatatacgtccttattttaaaaaaatctggtttgcccgattttcagggggacgctctgcggatgttttagctttcgagcataaaaaaaatatcacagccgaatatttatacaatgttctttatcaagactcattttttgacttcatgatgcaaacctcaaaaggtgtgaaaatgcccaggggagacaaaaaagccataatggaatggtcatgcatagagcctgatatacgattagttaaacttttctcaaataaagtgaaagagttttattcttatattgaaagtcataatagagaaaatactctgctctcacaattacgcgacaccctgctccccaaacttctctccggtgaaatcaccttgccggaagccaaggaattagcaaaggaagctgactatgtttaa

SEQ ID NO: 107344 - DNA, 933 bp, Enterobacter aerogenes
atgaacgatttctatgaaaagcagaatgaacctcatatgctcaaacttcttgctgggcagcgtgagatctactctgaagtaaaagctattttaatgaaaggtttttttgctggggtagttatcccatcaatactatcatcaattttctttgtaatgagtttttatccaggttatacgggcccatggatgaaaacacttcttacgatctacggattagtattcttcattattaaccacttcataatggagtatgtcagtaactgtaagaaaaaagcagctcgtattcaggaggagtatgataccagtttgtttaacatggaatggaatgatatcgttgctgggaaaaaaatacctatttctgaaagcatagagtatgcccagaaacacttagctactgaaggtgaacatcgcctccataactggtaccttaatgctcctatgagcgtttctgctcctttaatggtaatgctctgtcaaagtaagaacatgggatgggatgcaggtctaaaaaggaaaacttcaacattcctgagtattatcctagcgctgaacataattatgtttgcaataacatttattttcaccaatccgacatatctacaatttattgcatttgtagcaatattgcttccgacttaccaattttattatcggtacgttagtgagaataagaaatctgtcgcccgcgcagacgaacttcgcacacttgttgagaatacgctaaggcaagtagtaaaagaacatgcttacgacaaaaaagcgttagaaaagcagtcgcgtttagttcaggatcaaatttttaactacagggcaacagggaatccggtacctgattttatgcataaacgaaatcggactaaagatgaagagcgatatgatcgaatttttgaagaatattcttcacaattacaaggcattgcaacatcatcgtag

SEQ ID NO: 107345 - DNA, 1005 bp, Enterobacter aerogenes
atgccttatcaggttagtactgctttcaatagcctcatgaacaactttgttaatcttgatgcagatgaaacacgcaacggaagaagaagccgtgattggttagtcgatgagcagctgactgggtttccagataaagatgatgaattcccacttttgagcactacgcctaaaatgtggtttggttcattctctagaagaacaaaaattcgtgaacttgatgacatcgatatgatgattgtcatgcatgctgaaggtagcacatacactcaaagcggcaaaaccttctatatatctccgggagcaaattcccgtttccaaaactacctgaacgaaactggtgagtgggtaaattcacgcagagtcgtcaacaaatttgtttcatcgctaaaatcagtccctcaatactcagccgctgatagcaaacgtcaaggagaggcagcaactctcaatctgaaatcctatacatggaattttgatattgtccctgccttcctcactaaaccagacagcaatggaaacacattttatctgatcccagacggcaacggtaactggaaacagaccgacccacgtattgataaagaccgtgcgactagagtgaaccaaaagcataatggcaatgtattgaacgttattcgtttagttaagtattggaagcgtaagcgcggtgtacctgcaatcggctcatatttactcgaaactattatgctcaactattatgacgaacttgctaaagattcaatgtcagaatctctcggtatcgaatttgcagatgctttgcaagtattagcctctgcaatcgtcggttatgttgaggatcaaaaaaacttccaaggtgatataaatcatttaagttcagaagagcagaaaaaggtgcgagaaatggcacttgaagatgccaacaatgcaaaagaggctctatcaatagaatttactgatcctgaaaaatccggaaaaatatggcagaaagtgttaggtaaagattttccagtaggaaacgtataa

SEQ ID NO: 107346 - DNA, 624 bp, Enterobacter aerogenes
atgttgagtcgagagttgacgaatgaactctcttggcgaactaaagagataatacagttgcgcatggaggcaaaagcgaaagaggggtctctaaagaaaacaatcatcaggtctggtgttgcgatatcatattcccattgggaaggttttgtcaaaaatgcgaccgagtattttttgaattttcttcattatcaaaaaatacagatggagtccttgaaattggtttatgtgacccatgctcttaaaaaagagattcatggattttctgaaactaaggatgttgatacatgtataagatttttaactgcattgatagagaaaaagactaatgtagcagtgataaggcatgaaaactatgttgataccgagtctaatttaagttctaaagttttcgataacatcgctaagtctattggtgtcgacactcatcaatacaaggacttttatccttatattgatgagtcaatagtgagtgcgaggaacaatattgcacatggggagcgcttgattgttgagcaggttagttttgaacaactaactgaaaaagtactcgctctaatgaatatgtacaaaaatgatattgaaaatatagttgttacaaaggaatacttaatatccatttag

SEQ ID NO: 107347 - DNA, 1092 bp, Enterobacter aerogenes
atgggattgcaggatgaattaaatctagcaaagaaagaaatatctaaagatagctttgatatgtcagttggagagctgagccgtatttatgaaagaaatgaagttataattaatccaagttatcaaagattgttcagatgggatgaatcacagaaaactcgctttattgagtcattattgttaggcattcctattcctcctatatttgtatttaccgatgagagtgggagatgggaggttattgatggcttgcaacggctttctactatatttgagttttcaggtgtgttaaaaaaagacgatgggacttgtcatcctcagttcattccttctggaacaagactgctaccttcccttgatggtatgaagtgggaaaaagaatcagaagacgatgaaaaagttattcctttatctattcgtttggattttgaacgctctcggttgcgagtggaaatacttaaaaaggaaagtgatgaaaagacaaagtatgagttatttgaaaggttaaatacaggtggttctagactcacagatcaagaagtgcgaaattgcatcatggttatgcttaatccggacttattcaaaaaacttaatgacctaagtcagtatgctagcttcaaggaggtaactcttcaaactgagaaatctatatcggaacagaagccattggatcttactttgcgttttcttgcctatagatactctacttttgataaaagtgtagatataaatgaatggttaaattctatttctcgagatattgcatcggataaaacttataacatagatgctgagagtgatttatttaagagaacgttcgatgttttagctaaaactacaggtcagaactcgtttaaaaaatatgatggcaataacttctcaagaggttttttaatttctgcttatgaggttattacacagggtattgctgcgaatattgataaatatgagaagcagtcagcgggttatgtcgaagagaaaatcaaagcaatctggaataatcctgagtttacaaactatgctcgggctggagttaatgcgccaagtcgtttgattaataccctgcctaaagctccagtttggtttgactaa

SEQ ID NO: 107348 - DNA, 447 bp, Enterobacter aerogenes
gtggatgaactgcagagggtggatgactggctgacggcgctgctggcaaatctggaacccgccgcacgcagccgtatgatgcgacaactggcgcaacagctgcgccggacgcagcagcagaacatcaggcagcaacgcaatcctgatggcagcggctatgagccgcgccgggtgacagcccgcagcaagaaggggcgcatcaagcgccagatgttcgccaaattgcgcacaactaaataccttaaaaccgccgcaactgcggactctgcctgcgttgagtttgctgagtgggtgcagcgtattgcccgtgtacaccactacggcctgcgcgacagaattacaaaattaggccccttaaaaaagtatcctgaacggagactgcttggacataccaacaatactgtagaattagtaaaaaacattatgttagattatatgaaacgttaa

SEQ ID NO: 107349 - DNA, 672 bp, Enterobacter aerogenes
atgtttaatgttattagagttgcacctgcaccttcctgtttggctcgtaaaatatataacgaccctacagttgttgctattttaaaaccgatgttctttggtaagtgttatctatgtgagcaaattgatcttacagacccagaaatcgaacactttattcctcatgaaaaagacaactcattaaaatatgattggaataacttattctatgcttgcggtcgctgtaatagtattaagggggttcgtcatactaatcttctaaattgtactgattccagcgtgaatgttacccaggaaattgtacatattttaccgggcatcagttcagaaaaggtaatagtgcgacctaactccgcaaatcctagccaagaaacattaaataccgtagcattgcttgatgagtgttataatttagaaaatacaggcttgcgaggtataacgcgagaaaatttgatggaaaaaatttttgattattattatgagtatataaatgctaggcgagtgttgatcactagaactagtttacaaaataaagttgacgaagctattgaaacattaaaagtaatgtgtaaaccaaaatttcctttctcagtgttttggatttggcattttaagcttgacataaggctgcatgagatacggcctgagatcttagaattgatagatgtttag

SEQ ID NO: 107350 - DNA, 1224 bp, Enterobacter aerogenes
atgaaatattcaattgatagattagtacacaatggtgagtttaataagaattttgaaatcgttcttgaagggaaaaatttaattattacgggtaataatggctctggaaaaacaaatttgttgagacgcttgcatactagcttagaacagcgattggttaatacaggaagcaatactttggagcaggctaagcaaaggctgcaggaagctgagcaacaattgaattatcgtttgccgggggattcattatatgattattatagtaggcagaagaatgatgctttaaaaatgattgataatgagggtaagttctcaataacttttaataatgagaagggttttaaggtttcctttcatgaaaggaaatcaattattagatttttcgaagcgacgcgacaggccagtatacaaggggatggttctatctcaggaatggagaaattattccaagagcacaaaaacctatctcttactattgattcaggtgttatgtttgaacgctacttggtatcttattggaactatggattgcttcagaagggaagtgggaacgaaatagaggctgagcgcgttttcagttggatagcaaagataaatcaagatttaaaagtattgtttgaagatgaaactctggagcttgattttaatctggcggaattacgtatttatttaaaacaaaatgataagctcccttttagacttgatcaattatcatcaggtttttcctcagtattagctatatatacagatttactagttaaggttgaacttgaaaaactgtcacgtcacgaaatatctggcattgtattaattgatgaaattgatgcacatcttcatgtaactttgcagaagaaagttttttcattctttagctcctcctttccaaatatacagttcataattacaacccattctccattcgtggttcaatctgtatcggattgcattatatttaatttatccacgctagaaagtatgtatgatctttcgatgtattcctatacgtcaattataaaaggattgttaggggaaacttcggagtcagagacgttaaaagaaaagattaaattattggagtcaatttttgacaggccaggaattgatgtggttaaattgcaaactctggttaacgaactcgaaccatttatagataaaatggatgcaggttcgaaaataaaaatagctctcgcccagaataaaattgttgagcttctgggggagtaa

SEQ ID NO: 107351 - DNA, 795 bp, Enterobacter aerogenes
atgctctcagaatacgatctaaatatagaaatacaaaatggaagggtttttgaccctgcttctgtagcaaaaagctcctacaaagttcaatcatcaagcattgatctttcggtaaaaaaaatccatataccagattgtaaaaccaataataagaccagaaaaagtcatttacttcaacctggcgaaacagtaattctggagttaaacgaaaattttaaacttgctaatgatttaggtggaatagttttcccaagaaatactctttctaagaacggcattataatgacgaatcctggacatattgacccaggttacaaaggaataatatccgtttatttagttaatatgtctaaagaaccttttcacattagtgaaaattctgctgttgcaaagatgcttcttttcaaaacaagtacactaacaggtggatatcaaggtaaaatagtcaccaaactagatgacgagcagttagatagaatgggtaaagactttgctggattagagtcgagaataccttcagaaataacaaaaatactcagaaactggacattcggcttgctcacaattgctgccattatgatttcagtcataagtatcgccatccccctgctttttcaggtgatttctaatagcgtcgataaaacaaaagacttacaagtgatcattacgcaacaggaaaaagaaattaacaacctaaaaactttaacatcaaggtttaacgatcaaatttcactattgccagaagcaaatgatacaattcaaaaagacaagaatcagcaagggaacaagcaatga

SEQ ID NO: 107352 - DNA, 777 bp, Enterobacter aerogenes
atgataaaaatatctgaattatcaattaattgcctatctcatccatcattcgaaaatggcgtatttgatgattttttagctaaacaaggcatgcaatgggtacgtagaggacaaggaagtaactctgagcatcttgttgaagcagccggtagactctgctacatgtcatttggggagagtaaacaatctcctagagacaccaatcaatatatatttaatctcatttcccaagggcatgaaagtgttttagaacatctgaattggacatttttaatatcaggcgtttcgagagcatttactcatcagttagttaggcacagagtaggattttcatatagccaattatcacagcaatatcatgatgagtctgaggcagaattcgttgttccaattgaggtgaaaaatgatgctgctttatttaagtcatggtgcgaacatattgaaagtagcctagaattttataaaaaatcgttaaaggccatagaagaaagcgaactgtatgatagtcgaaaagagaaaatgcgtgctctaagaagtgcttcacgctcaattttaccaaatgcaacagagacaaaaataatcgttaccgctaatgctcgggccctacgtcatttctttgaaatgcgaggggcgatagaaggagattacgagatgagaactgtatctgaaaaattatataatattgttaacaatgacgccccagcactattccaggattttgaaaaaatcgctgccgataccgatcaagtaaaaataatgaagaaacataaagtttga

SEQ ID NO: 107353 - DNA, 561 bp, Enterobacter aerogenes; identical to SEQ ID NO: 94712

SEQ ID NO: 107354 - DNA, 645 bp, Enterobacter aerogenes
atgtttggaaataaaggttcctcaatttccatcaaaagcgaaggtgatggaaacacatacaatatactccaaattaatggagataacgcttatgatgtctctaaacaattggggttcctaggattagatcgagttaaagacactaataacgctcttataaatgaatttcttaccaaaaagaatagtgttttgctttgctatccgaataaagacgatgaagtactaaagccaattatagaaaaactgaaggcggggctttatacaattgaagcaaatatttttgaaggaagtggaaaaacacaacttccagatgtacaaggctatccgcatattgctgaagtggatttcattaaaaatttaaaatgcgacagcatcatcatttttgtcatggatgagttaacactttctcaattaactcttctaagctattacaaaattgaatccaacattcaacatgttgatataattgctatcccaagtgataatatttataattacgataagtttttgtcaaatgggttgatacaatattgtgatgacaatgattgtaaagtgattaaattatctaatcttgatgatgtagaagtagaaagagtaatcgcaagagtaaaaagcagaaaaatgacacaagccaggagagcataa

SEQ ID NO: 107355 - DNA, 1515 bp, Enterobacter aerogenes
atgcttactaaagctgattcttataattttaatcacgaattatttttatgggctctttctgttattcaaccagcatcaccgaatgaagtcatttcatatctttcacttattctcaaagataatggattagttcttgcgaaagataaaattaacgattactttaaggccttagccaattcagaatatattaatcaggtatcaaagagaaataatctatattcaataagtctcaaaggaaatgaacagttaagccctgagctaaagaagctgagggataaactaagaatatatcttcttgacaaaaccagagttattagtaaggtaaaggggctggcctcaactgagtcaaagaaaatgggcggtgcttcgccgtcttcacagttaaggtttgttttaaaagaggttccgcacccaagtgttccttgggcgctcggggcccttcccaatcacccaaggaacacttgggtgcggatcgctgagcaaattaattttggttcgatgcttggtgaggccagcaatgctgatactccgccacaaaaagctcaacacactattttccctctcaattatggttcatataattctatagattataatttgattggcaacactggtccgacgatcctagcttcacttattggagttagtcctcatttgatagcaatcatgtcaatgactccagacaaatactatcgatcatttgaacttaataaaaaatcaggtggtcacagagaaatacttgcgcctaggaaattcatgaaggtaattcaatattggattaccgattactttctatttcggcttaacacacatgcctcatgctattcttacaggaaaggagtaagcataaaggataatgcaataaatcatttaaacaatgacttcattgccaatatagatatcatcgactattttggaactataaacaaagatatggtacaaaaatgtcttatcaaaaataaaatagaaattaagctagccacggccataactgatatagttacatataagggagttttacctcaaggcgcacccagcagccctcaaatatccaatgctattctctttgattttgacaatgaaatatctgaagcatgctatttaacaggatgtgtttatacccgctattctgatgatataactattagtggctcaatcagaaaagatgtagttaaaatggtaaaattagccacgcatttattaaataaatctggattttccgtcaataacaaaaagaccagaatagcttcgagcaatagtaggcaagtagtaacagggatattagttaatggcgtcattaggccaactagaaaatacaggaaaagagtaagatctgcatttgatcacgcaattaaagataatgattgcagcaaagagactatttataaactaagtggctacattaattaccttaaatcatttcaacaatatggttatgaagtaaacaccattcaatatgaattaatcttaaaatatttaaggcgtaagggcatatataataaccattgcatttaa

SEQ ID NO: 107356 - DNA, 450 bp, Enterobacter aerogenes
atgttacataacgggccgtggcagctgacttcgcagctgattcgctaccaatacgatccgaagaacccggcgggcgtcagcgacgataccattctgatgggcggcaacggcctgacgccggcctacctgatcccggcgaaagcgacgaccgcgtcgctgaacgtcgcccgcgatgtcgacgtgaagtggggcggcgtatcgaagctgcgtttttacaacgactacagcgtgctgtggaaagataaaagcggctggagcgattcgcagatgaatacccttggcgtacaggtctttgcgctgccggtgatgttctgggtcgatctcagctgggcgaagaacgttaatccgtggggcggcgcgctgaacgccaccggctggaccagcacccagtccgagggcagcggcaaatggtactttcgcactaacgttaatattggctattacttctga

SEQ ID NO: 107357 - DNA, 654 bp, Enterobacter aerogenes
atgcgtaaaatactcctttcgctgctgctggctgccgtgaccagcgggctggcgctggcggacgacggcaagccgttcccgcatatcggctggcgcagcgcggataatcttgccgggctggatttcggcggcgcgctgcgggcaaattatcgctatgaagactggaaaggcagtaattatcgcaacccgccgcatctgcgttttgatactttccgtatcgacagcagcggcttttatgataattatttctttgatgccgggttctggttccaggatcaccgtaaatacgccatcgaccgcgcttacgtagggtaccgcttcgacaataataataatatccaactggggatccctggcaaaccatttggccttgaaccttatccgcaatttggctggtcctatggtattccgttttatttaggctttggcgtgagcgccggtagcggcgtgaactatcaatatcatgataataactggtcgctggatgtggcctatttcccgtggatggaaccggagaatttgcgctatgcgccggacgttggcgattacgatcggctgaaaaacactatctatccgactcagcatcagcagcataatgaaaagcgggaccaggtgaatgtgcgtattgcgcgggattttcacggcggcggctag

SEQ ID NO: 107358 - DNA, 402 bp, Enterobacter aerogenes
atgactgatatcaccgaactggcgcagagagccagaatcaacgctgaatgtggtgagcatttgtccccatcagagaccattgagctggtagaggcgctggagaaggcgcagcagcaaattcagactcatgagcgtgccgaattaacatggatgaatgcgctggaactaccagacgatgcaacacgtaacgacattcttccggctatccatgcggaaaaatatacgcttcgagctgcaaataagcgcatcgccgagctggagtcccgcaccgtcaccgtgaagctgccgcatcggaacctggggcacgaaaagttattccttctttgcccgttcccttactacgacgctgaggatatggaggcggctttggccgccgctggcatcaaggtggaggctgagtag

SEQ ID NO: 107359 - DNA, 189 bp, Enterobacter aerogenes
atgaaaatgggtgaacacatggagccggttgtcgagctcctggaagaactgaacggcaacaacactgacgcaaaattgaaactactcgcccttgttatctcggaatacatgcttaatgcggatgttactggctttgaggtcacggcggggaagatgaaagtttccgtagatataagcgtggaggaatag

SEQ ID NO: 107360 - DNA, 201 bp, Enterobacter aerogenes
atggacaggattgattatgattatatcatcttgcaagaattggcttcccgtattgagcaaaacccaaataacgctggctggtatatgcatagagcctacatgcttggtagtggctgcggcgcggacgaggcgcttgagcatcctccacgagactattccaggccaattttgcatgtgattattgggagtaaagatgcctaa

SEQ ID NO: 107361 - DNA, 168 bp, Enterobacter aerogenes
atgagcagccttctcgcaaaagtaatggagcgcggcatcttccgcgtgcctgctcgccgcaagcgcaaggtagaagttaagccttccgatatccccacctttcactatacggctcacctggcggatgtctgctggctgcgccgcgctgccagaaggaaaattgcatga

SEQ ID NO: 107362 - DNA, 669 bp, Enterobacter aerogenes
atgagcatctatcaacgcatcaacggcgctgactggcgcaatatctgggtagtcggcgatctgcatggctgctacacgaacctcatgacccaactcggcagggtggatttcgacccggagcaggacctgcttatctccgttggcgacctcatcgaccgcggatcagaaaacgttgagtgcctggagctgatcactatgccgtggttccgcgccgttcgtggaaaccatgagcagatgatgattgatggcctgtcagcgcatggcaatgttaatcactgggtggcaaacggcggcgggtggttcttctatctggactacgacaaagagattctggctaaagcgctggctcacaaagccactgagctgccgctgatcatcgaactggtgaccggcgatcgcaaagtggtcatctgtcatgctgactacccgcacaacgaatatgagttcgacaagccagtaccagaggaaatggtcatctggaaccgggatcgggtgagtgatgcgcaggacggaaacgttagtgaaatcactggtgccgacctgtttatcttcggtcacaccccggcgctccagcccctcaagttcgccaaccagatgtatatcgacactggggctgtgttctgcggccgcctgaccttggtgcagatccagggtgatgagaatgcttaa

SEQ ID NO: 107363 - DNA, 858 bp, Enterobacter aerogenes
gtgctgtactactggccaaaagagacgctggcagatttttaccagcaggcggcaaattgtagcgctgacaccatttatctgggcgaagcggtatgcagcaaacgccgtgccactaaagtcggcgattggatcgaaatggcgaaagcgctggccggcagcggcaagcaggtggtgctctccaccctcgcgctggtgcaggcctcatccgaactgggcgagctgaagcgctatgtcgagaacggcgaattcctgattgaagccagcgacctcggcgtggtcaatctctgtgccgaacgcaagttgcccttcgtcgcgggtcatgcgctgaactgctacaacgccgtcaccctgcgcctgctgctgaaacagggcatggtgcgctggtgtatgccggttgaactctcccgcgactggctggctaatttgctgacccagtgcgaagagctgggtattcgcaaccagtttgaagtcgaagtgctgagctacggccatctgccgctggcctattccgcgcgctgctttaccgcccgctcggaagaccggccaaaagacgaatgcgaaacctgctgcatcaagtacccaaccgggcgcagcatgctgtcgcaggagaaccagcaggtgtttgtgcttaacggcattcagacgatgagcggctacgtctataaccttggcaacgagttaacctcgatgcacggtctggtggatatggtgcgcctgtcgccgatgggtagcgagaccttcgccatgctcgacgccttccgcgccaatgaaaatggcgctgcgccgctggatctcaccgctaacagcgattgcaatggctactggaaacggctggccgggctggagctgcaggcgtaa

SEQ ID NO: 107364 - DNA, 1080 bp, Enterobacter aerogenes
atggagctgctctgccccgccggtaacctcccggcacttaaggcggccatcgaaaacggcgccgatgccgtctatatcgggctgaaagatgacaccaatgcccgccactttgccggccttaatttcaccgaaaagaaattacaggaagccgtcagctttgtgcaccagcatcgccgcaagctacatatcgcgattaacaccttcgcccatcccgacggttatgcccgttggcagcgtgctgtggatatggccgcgcaattgggcgccgacgcgctgatcctcgccgatatcgccatgctggagtacgctgcggaacgctatccgcacattgaacgtcacgtttcagtgcaggcgtccgccactaacgaagaggcgatacgtttttatcaccgtaactttgacgtcgcccgcgtcgtactaccgcgggtgttatccattcaccaggtgaaacagttagcgcgcgccacgccggttccacttgaagtcttcgccttcggtagcttatgcatcatggcggaaggccgctgctatctctcgtcgtatctcaccggcgaatcgccaaataccgtcggcgcctgttcgcccgcgcgcttcgtccgctggcagcaaacgccgcaggggctggagtcacgccttaacgaagtgctgatcgatcgctatcaggatggcgagaatgccggttatccgacgctgtgcaaaggccgctacctggtcgacggcgagcgctaccacgcgctggaagaacccaccagcctcaacaccctggaactgttgccagaactgatggccgccaatatcgcttcggtaaaaattgaaggccgccagcgcagcccggcatacgtcacccaggtagcgaaagtctggcgtcaggcgatcgctgtaaagccgatccgcagaacttcgtgccgcaatctgcatggatggaagcccttggttcgatgtccgaaggaacgcaaaccacccttggcgcctatcaccgtaaatggcagtgagaaacatgaaatattcattagggccggtgctgtactactggccaaaagagacgctggcagatttttaccagcaggcggcaaattgtag

SEQ ID NO: 107365 - DNA, 408 bp, Enterobacter aerogenes
atgaaaatggataaaaaacaattaattgtctctttaatgaaaagagaaattgatatctcaaaattttataatgatttcaatgcattttacggtgaacttaacatatgctatgaacttgaattagctcgtcaaaatagagatgctgaattagttgatgtttttttatatttgtcagctcttattaattatgattttaagtggactagtgttgaatacttatatcaagcggcgttgttagaactaaattatagagactatgatgaggattatgttctggcagataaatgtattagggcgctagccaaaataaacaataaaaactcaatcgaaaaattggaaaaattggctatggtagaaaatgaaaaaataaaaaaaagcgcaatgaaacaattaagtaaaattagttga

SEQ ID NO: 107366 - DNA, 930 bp, Enterobacter aerogenes
gtggcgccggtggtgttcgatcgccacccggaaatcggcggcttgctgactttcggtattccgcctttcaagctggataaatcattgctggcccgtcggcgcgagattttcagccaaatgggcatccgctttgaactgaactgcgaggtgggcaaagacatcgaactcgctcaactgcttgcagactatgacgcggttttcgtcggcgccggtacctatcgctcgatgaaagccgatctgcccaatgaggaggcgccgggcgtgtatgaagcgctgccgttccttatcgccaacactaaacaagtgatggggctggaagcgctggccgatgaaccttatatcgataccgctgggctgaatgttgtcgtgctggggggcggcgatacggcgatggactgcgtgcgtaccgcgctgcgccacggcgcgcaacgggtcacctgcgcctatcgtcgggatgaagctaacatgccggggtcgaaaaaagaggtcaaaaacgcccgcgaagagggggcgaactttgaattcaatgttcagccgatcacccttgagctcggcgagggcggccgggtcagcggcgtgcgttttctgcgtacccggcttggcgaaccggacgctcagggccgccgcagcccgtcgccgatccccggcagcgaatttgtgatgcctgccgatgcggtcattatggcgtttggtttccacccgcattcgatgccgtggctggaagccgcaggggtacagctggacagtcgcgggcggatcaaggcgaacgtggagagccgctatcgttaccagaccagtaatcagaagatctttgccggcggcgacgcggtacgcggcgcggatttggtggtgacggcgatggcggaagggcggcatgccgcgcaggggatcatggactatcttggtgtcgcttccgcactgccgcactaa

SEQ ID NO: 107367 - DNA, 534 bp, Enterobacter aerogenes
ttgctgaaagaagccggtttcccgaacggctttagcaccacgctgtggtcatcgcataatcacagcaccgcgcagaaggtgctgcagtttacccagcagcagctggcgcaggtgggtattaaagcgcaggtgacggcgatggatgccggacagcgtgcggcgcaggttgaaggcaaggggcagaaagagagcggggtgcggatgttctacaccggctggtcagcgtcgactggcgaagccgactgggcgctgtcgccgctattcgcctcacaaaactggccgccgaccctgtttaacaccgcgttttacagcaatccgcaggtcgataaagacctgagcgaggcgctgaaaacgaccgatgcgcaacagaagaccacactctataaagatgcgcaggacattatctggaaagagtcgccgtgggtgccgctggtggtggaaaagctggtatcggcgcatagcaaaaacctgaccgggttttatattcagccggataccggttttagcttcgagcaggcggatctgacgcagtga

SEQ ID NO: 107368 - DNA, 3450 bp, Enterobacter aerogenes
atgttaagggtgtaccactcaaaccgtctggatgtgcttgaagcgttgatggagtttatcgtcgagcgccagcggctggatgaccctttcatgccggaaatggtgctggtgcaaagtaccggtatggcgcaatggttgcagatgacgctggcaaagcgcttcggtattgcggcgaatatcgagtttccgctgccggccagctttatctgggatatgttcgttcgcgtgctagacgatattcccggcgagagcgccttcagtaaacagagcatgagctggaagctgatgaccctgctgccgcagtatctcgacgatgacgccttcacattgctgcgccactatctgagcgatgacagcgacaagcgtaagctattccagctagccgcgcgggtagccgatctgtatgaccagtatctggtctatcgcccggagtggctgatgcgctgggaggctgatgaacgggttgacgggctgggcgacgctcagcagtggcaggctccgctgtggaaagcattagtcgaatacaccgcggagcttgggcaaccgctgtggcaccgcgctaatctgtaccagcgctttatcagcgcgctggaaaatgctgaccagccgccagccgggctgccgtcgcgggtctttatctgcggcatctccgcgctgccgccggtgtatttgcaggccctgcaggcgctgggcaagcacgttgatgtctatgtactcttcactaacccctgtcgctactactggggcgatattaaagatccggcgtttcttgccaaactgatgtcgcgccagcgccgccaccaccgcgaggcgcgcgagctgccgctgttccgcgacaccgaacaggtgccggggttgtttaatgatgatggcgagcaggatgttggcaacccgctgctggcctcgtggggcaagctcgggcgcgattatatctatctgttggccgggctggagcgctatgaagagctggacgcctttgtcgatatcgcccccgataacctgctgcataaccttcaggccgatattctggatctgcgcaacgccgcggtggcagggcgcaccgcgcaagagttcgccagcagtaagagcaagcgtccgctggcgactgacgaccgcagcctggctatccacgtctgccatagcccgcaacgcgaagtggaagtgctgcatgaccggctgctggcgatgctggaagaagacccggagctgacgccgcgcgatattatcgtcatggtcgccgatatcgacagctacagtccctatattcaggcggtattcggcgcagcgcgcggcgaacgctggctgccgtgggcgatttccgaccgtcgggcgcgggaatctcacccggcgctacaggcgtttatcacgttgctttctctgccggatagccgtttcgccagtgaagatgtgctggcgctgctggatgtgccagtgctggcggcgcgcttcaatatcaatgaagaggggctacgctatctgcgccagtgggtcaatgaatccggcgtacgatggggtatggatgacgacaacgtgcgcgaaatggatctcccggcgaccggtcagcacacctggcgtttcggtttaacacgtatgctgctgggatatgcgatggacagcagccagggcgagtggcagtcggtgctgccctatgatgaatccagcgggctgattgccgaactggtggggaatctcgcttcgctgctgatgcagctcaatctgtggcgccgcggtctggcacaggatcgcccgctgacagagtggctgccggtgtgccgcgatctgctcacggatttcttcctgccagacagtgaaaccgaagcggcgctggcgctgattgaacagcaatggcaagccatcatcgatggcgggttggatgcgcagtacggggctgccgtgccgctatcgctgctgcgcgatgagctggcgcagcgcctcgatcagcagcgcatcagccagcgtttcctggccgggccggtgaatatctgcaccctgatgccgatgcgttctattcccttcaaagttgtctgcctgctggggatgaacgacggcgtctacccacgcaccctcgcgccgctgggttttgatttaatgagccaaaaaccgcagcgcggcgaccgtagccgtcgcgacgacgaccgctatctgttcctggaagcgctgatgtcggccgaacagaagctatacatcagctatatcggccgctctattcaggataatagcgagcgctatccttcggtgctggtacaggaactggcggactatatcggtcagagccactgccttgaaggcgatgaagcgctggactgcgatgccagcgaacgccgcgttaaagagcacattacccatctgcatacgcggatgccttttgatgccgccaattacctgccggatgaagatcagagctatgcaagagagtggctggccgccgccagccagcagggagaggcgcatagtgaatttatccagccgcttgcgccgctcgatatcgacacgctgccgttcgaacagctgttacgcttttggcagcatccagtgcgcgctttcttccagcagcgtctgcgggtgaatttccgctctgaagagagcgagatccccgaagatgagccttttgtgcttgaagggctaagccgttaccagttgaaccaacagttgctgaatacgctgattgaacaacaggatgcgtcagcgatgtatcgtcgttttcgtgcggcgggtgagctaccttatggcgcgtttggcgaactggcgtgggaggcgcagcgtcaggaaatgcagaacctggctgagcgggttatcgccagtcgtcaacccgcgcaaagtatggagattgacctacagtgcaacggtatcaatctcaccggctggctacagcaggtacagccggatgggctattgcgctggcgtccgtcgctgctgagcgtctctcagggcgtgcaactttggctggaacatcttgtctattgtgctagcggcggtctcggcgaaagtcgcttgttcgtgcgcaaggaaggcgaatggcgtttcccgccgctggcggctgagcaggcgcagacgtatctaaatgagctggtagaaggctacctgcaggggatgtcaaaaccgctactgctgttgccggaaagcggcggcgcgtggctaaaagcctgttacgacgcggaaaaggatgtcatgttaatggatgacgaaacgcaacaaaaagcgcgtagcaagttccttcaggcctacgaaggtaatatggtggtgagcggcgaaggtgccgatatctggtaccagcgcctgtggcgcacccttgagcctgcgtactatgaagagattatcgcgcaggcgcagcgttatctgttgccgatatttcgtttccatcagtccgaatataattgtaatagtataaaaattgcgcaaaagaaggttgttcatttattatgcgcagcgaatcacggactgatgttttaa

SEQ ID NO: 107369 - DNA, 219 bp, Enterobacter aerogenes
atgagcatctactatggaagctggctctttagtcagctccttagtaactgtggtaaccgtagctacccggtttgcgccaagttcttctgtgattttccgaataccagttactgctttgttatgagcttgaaagtcagtaaggatgcgattcttgttatggacagcttcattcccatcgagcgagaccgagaaggtgatattccgctctttaacccatga

SEQ ID NO: 107370 - DNA, 1155 bp, Enterobacter aerogenes
gtggatcagggtaacaaccattttgatgttgtcgcccggcattaccatctctacgccttccggcagttcgatggtaccagtcacgtcagtagtacggaagtagaactgcggacggtagcctttgaagaacggagtatgacggccgccttcgtctttggacaggatgtacacttcagattcgaacttggtgtgcggcttgatgctgcccggcttagccagtacctgaccacgttcgatttcttcacgtttgataccacgcagcagaacgcctacgttctcaccagcacggccttcgtccagcagtttgcggaacatttcaacgccagtacaggtggttttcgcggtttctttgataccaacgatttcaacttcttcaccaactttgatgataccgcgctctacacgaccggtaacaacggtaccacgaccggagatggagaatacgtcttcgatcggcagcaggaacggcttgtcaatcgcacgctctggttctgggatgtaagaatccaggaagccagccagttcgatgattttcgcttcccactctgcgtcgccttccagcgctttcagagcagaaccacgaacgatcggagtgtcgtcgcccgggaaatcgtactgagacagcagttcacgaacttccatctcaaccagttccagcagctcttcgtcatcaaccatgtcgcatttgttcaggaacacgatgatgtacggaacgcctacctgacgacccagcaggatgtgctcacgagtctgcggcatcgggccgtcagtcgcagcaacaaccaggatcgcgccatccatctgagcagcaccggtgatcatgtttttaacatagtcggcgtggcccgggcagtctacgtgtgcgtagtggcgagtcggggtgtcatattcaacgtgggaagtgttgatggtgataccacgagctttttcttccggcgcgttatcgatctggtcgaatgcgcgagcagcaccgccgtaggttttagccagtacggtggtgattgcagcggtcagagtagttttaccatggtcaacgtggccgatagtaccaacgttgacgtgcggttttgtacgttcaaatttttctttagacacggctatattccttactatagtgctctcccctcaggagagagcacgggacttaggttttaa

SEQ ID NO: 107371 - DNA, 504 bp, Enterobacter aerogenes
atgcgtaaaatactcctttcgctgctgctggctgccgcgaccagtgggctggcgctggcggacgacggcaagccgttcccgcatatcggctggcgcagcgcggataatcttgccgggctggatttcggcggcgcgctgcgggcaaactatcgctatgaagactggaaaggcagtaattatcgcaacccgccgcatctgcgttttgataccttccgtatcgacagcagtggcttctatgataattatttctttgatgccgggttctggtttcaggatcaccgtaaatacgccatcgaccgcgcttacgtagggtatcgcttcgacaataataataatatccaactggggatccccggcaaaccatttggccttgaaccttatccgcaatttggctggtcctacggtattccgttttatttaggctttggcgtgagcgccggtagcggcgtgaactatcaatatcatgataataactggtcgctggatgtggcctatttcccgtga

SEQ ID NO: 107372 - DNA, 2115 bp, Enterobacter aerogenes; identical to SEQ ID NO: 87835

SEQ ID NO: 107373 - DNA, 471 bp, Enterobacter aerogenes; identical to SEQ ID NO: 87834

SEQ ID NO: 107374 - DNA, 375 bp, Enterobacter aerogenes; identical to SEQ ID NO: 87833

SEQ ID NO: 107375 - DNA, 288 bp, Enterobacter aerogenes
atgctccacactctaagcgtctctccctggcatgtcgatatagacgcgatgctgcgtctggtgaagccaggcgacgatctgctcctgctctccgatggcgtggtcgcggcgattgacggcggccgtttccttgaaatcctgcaatccgcccccataaccctacatgctctgcaagacgatatcgaagcccgcgggctggctggtcaaattgcggacagtgtcgtcagggttgactatactgatttcgtcagtcttacggtcaaacatgaaggtcagttggcctggtaa

SEQ ID NO: 107376 - DNA, 360 bp, Enterobacter aerogenes
atgaaacacgtggctttcgtattttcttccgcgccgcacggcagcgcagccggcagggaagggctggacgccttactggcgacctcggcgcttaccgatgacctcggcgtcttttttgtcggcgacggcgtgtttcagattatccctggccagcagccgggaaaaatcctcgcccgtgattatatcgccaccttcaagctgttatcgctgtatgacatcgaacagtgttggttatgcgcggcgtctgcccgcgaacgcggcctgaccgccgatacgccgtgggtggtggatgtcgaaagcctcgagccagaagcgctgcgcgcccggcttgatgaattcaacgtgattttacgattctga

SEQ ID NO: 107377 - DNA, 387 bp, Enterobacter aerogenes
atgcgttttgccatcaccgtaaccgggcctgcctacggtactcagcaggccagtagcgcgtggcagtttgcgcaggcggttattaacgcaggacacgaactggcctgcgtatttttctatcgtgaaggagtctacaacgccaatcagctgacggctcccgccagcgatgaggtagacctggtgcgtcactggcagcgcctgcatgatgaacatgccgttgcgctgcacatttgcgtggcagcggcgctacgccgcggcgtgaccgatgaacgcgaagcgcagcagcttggtttgccggcgcataatctgcagacgggatttaccttaagcgggttaggcgcgctggctgaagcgtcgttaacctgcgatagaatggtgcagttctga

SEQ ID NO: 107378 - DNA, 723 bp, Enterobacter aerogenes
atgtccaggtcgcttttaaccaacgaaaccagcgagcttgacctgctggatcaacgtcctttcgaccagaccgacttcgatatcctaaaatcctatgaagcggtggtggacgggttagcgatgctcattggttcccattgtgaaatcgtgctgcactcactgcaggatttaaaatgctccgctattcgtatcgctaacggtgaacacaccggccgccaaattggctcgccgattaccgatctggcgttacgtatgctgcacgatatgacgggagcggatagcagcgtatcgaagtgctattttacccgcgcgaaaagcggtgtgctgatgaaatcggtgactatcgccattcgcaaccgggaacatcgggtgattggtctgctttgtatcaacatgaaccttgatgttccgttctcgcagattatgagtactttcattccgccggagacgccggaagtcaactcgcaggtcaacttcgcctcgtcggtggatgatctggtggcgcaaacgctggagttcaccattgaagaggtgaatgccgatcgcaacgtatcgaataacgcgaaaaaccgccaaatcgtgttaaatctatacgagaaaggcatcttcgatatcaaagatgcgattaaccaggtagccgatcgcctgaatatctctaaacacacggtgtacctctacatccgccagtttaaaagcggagatttccaggggctcgataagtaa

SEQ ID NO: 107379 - DNA, 819 bp, Enterobacter aerogenes
atgaaatcactgtttaaagtaacgctgctggcgaccacgatggccgttgccctgaatgcaccgctgacctttgctgccgataccgcagcgaaagccgcaccggcggcggacagcaaatcggcatttaaaaatgacgatcaaaaatccgcttatgcgctgggtgcatccctcggccgttacatggaaaactccctgaaagaacaagagaagctgggtatcaaactggataaagaccagctgatcgccggtgtgcaggatgcgtttgccgataagagcaaactgtccgacaaagaaattgaaaccactctgcagtcctttgagacccgcgtgaaaaccgccgctcagcagaagatggaaaaagatgcgaccgagaacgatgccaaaggcaaagcgttccgtgacgccttcgctaaagagaagggcgtgaaaacctctaaatccggcctgatgtataaagtcgagaaagccggtactggcgatgcgccgaaagacagcgataccgtcgtggtgaactacaaaggtacgctgatcgacggtaaagagttcgataactcttacacccgcggcgagccgctctctttccgtcttgatggcgttattcctggctggaccgaaggcctgaaaaacatcaaaaaaggcggcaaaatcaagctggttatcccaccagatctggcctacggcaaaactggcgttccgggtatcccggctaactctacgttggtattcgatgtagaactgctggacatcaaaccggctccgaaggctgatgctaagccagaagccgctgccgaagctccggctgcagacgctaagaagtaa

SEQ ID NO: 107380 - DNA, 219 bp, Enterobacter aerogenes
atgaacgatagcacaatggagacgcgtctggcggaactggaaagccgactggcgtttcaggagatcaccatcgaggacctcaacaaaaccgtcacggcgcatgaaatagaaatggccaaaatgcgcgaacatatgcgcttgatgatcgaaaaattgaaagcgacacagccgtcgcacatcgcgtcacagtctgaagagacgccgccaccgcattattga

SEQ ID NO: 107381 - DNA, 591 bp, Enterobacter aerogenes
atgaaagtagcaaaagacctggtggtcagcctggcctatcaggtacgtacagaagacggtgtgttggttgatgagtctccggtgagtgcgccgctggactacctgcatggtcacggttccctgatttccggcctggaaaacgcattaaacggccacgaagtgggcgacaaatttgatgtcgaagtcggcgcgaatgacgcgtacggccagtatgacgaaaacctggttcagcgcgttcctaaagacgttttcatgggcgttgacgaactgcaggttggcatgcgcttcctggctgaaaccgaccagggtccggtaccggtagaaatcaccgaagtcggcgacgatttcgtggtggttgacggcaaccacatgctggctggccagaatctgaagttcaacgtagaagttgtcgccctgcgcgaagccactgcagaagagctggagcacggtcacgtacacggcgctcatggccacgatcacgatcatgaccacggtcatgacggttgctgcggcggccacggccacgatcatggtcacgaccatgaacacggcaaaggtggttgtggtaacggtggttgcggttgccactaa

SEQ ID NO: 107382 - DNA, 201 bp, Enterobacter aerogenes; identical to SEQ ID NO: 87825

SEQ ID NO: 107383 - DNA, 1806 bp, Enterobacter aerogenes
atggcgggagctgatttgctattagcaggtgtactgtttttgtttgccgccgtggtggcggtaccgctggcggcccggctgggcattggcgccgtgctcggctacctgctggccgggattgcaattggcccgtgggggcttggctttattagcgatgtggatgaaattcttcacttttccgagcttggcgttgtattcctgatgttcatcatcggccttgagcttaatccggccaaactgtggcaactgcgcaactcgatattcggcgtcggcgcggcgcaggtgctgtttagcgcggcgatcctcggcggattgctggtggtcaccgggttttcgtggcaggcggccgtggtgggcggtattgggttagcaatgtcctctaccgcgatggcgctgcagctgatgcgcgagaagggaatgagccgtaacgaatccggccagttgggcttttcagtactgttatttcaggatttagcggtgatcccggcgctggcgctggtcccgctgctcgccggacacggcgacgataacttcaactggatgtcggtggggatgaaggtgctggcattcgccggcatgctgattggcggccgttttctgctgcgcccggtattccgttttatcgccggttccggcgtgcgtgaggtatttaccgccgccacgctgctgctggtgctgggttccgcgctgtttatggacgccctggggctgtcgatggcgctggggacgtttatcgccggcgtgctgctggcggaaagcgaatatcgccacgagctggaaatcgctattgagccgtttaaaggcttgctgctggggctgttttttatctccgtcggcatggcgctgaatcttggagtgctatatacccatctgttgtgggtcgcgctgagcgtcgccgcgctggtggcggttaaagcgttggtgctttatgtattggcccggctatatggtttgcgcagctccgagcgcacgcagttcgccggcgtattgagccagggcggcgagttcgcctttgttctcttttccatgccggcttcgcagaagctgttccataacgatcaaatggcgctgctgctggttaccgtaaccttatcgatgatgaccacgccgctcctgatgaaggtcattgataaagtgctgtcgcgacggcttaacccggcggaggataccgatgaggcgccgtgggtcgaggatgataagccacaggtgattatcgttggcttcgggcgttttggtcaggtgattgggcgcctgctgatggccaataaaatgcgtattaccgtgcttgaacgcgatatcagcgcggtcaacctgatgcgcaaatatggctacaaagtctatttcggcgatgcgacgcagcttgagctgctgcgttcggcgggggcggaagaggcgcagtctattgtgattacctgcaacgagccggaagataccatgaagctggtggagatgtgccaacagcattttccccacctccatattctggcgcgtgcgcgggggcgcgtagaggcgcatgagctattacaggccggcgtgacgcagttctcgcgagaaaccttctccagcgccctggaattggggcgcaaggcgctggtgaccctgggaatgcatccgcatcaggcgcagcgcgcgcagttgcactttcgacgcctcgatatgcgaatgctgcgcgagttaatgccagtgcatactgataccgtacagatatcccgcgtgcgggaagcccggcgggagctggaagagatttttgagcgtgaaatgcagaaagaaagccggcagctggacggctgggacgagtttgaatag

SEQ ID NO: 107384 - DNA, 561 bp, Enterobacter aerogenes
atgtctcagacagcgaaagtgttgctgctgtatgcccacccagaatctcaggattccgtggccaaccgggttttgcttgaaccggccttacagttgccgaatgtcaccgtgcacgatctttatgcgcactatccggatttttttattgatatcgcccatgagcaggatctcctgcgtcagcatcaggtgattgttttccaacatccactgtatacgtggagctgcccggcattgttgaaagagtggctggaccgggtgctgagccgcggcttcgccagcggcgcgggaggaaatcaactggcgggaaagtactggcgtagcgtgatcaccaccggcgagccggagagcgcttaccgccgcgatgctaatcgctatccgatgaatgatattctgcgcccttttgagttaacggccggcatgtgccgcatgcactggctgagtccgattattgtctactgggcgcgccgacagcggccggaagatttgcaaagccacgcccgcgcatatcgcgattggctcgcgaatcctgttgctacaggaggcgtcaatggcgggagctga

SEQ ID NO: 107385 - DNA, 1905 bp, Enterobacter aerogenes
atgattgttttctcctcgttacaaattcgtcgcggcgtacgcgtcctgctggacaacgccaccgccaccatcaatcctggccagaaggtcggtctggtgggtaaaaacggctgcggtaaatctacgttgctttcgcttttgaaaaacgagataagcgccgacggcggctccatgaccttcccgagcaactggcagctggcgtgggttaatcaggaaacgccggccctgccgcaaccggctattgattatgttattgatggcgatcgcgagttccgcaagctggaagccgatttacagcaggccaatgagcgcgacgatggccacgccatcgctaccgtccacggtaagctggatgccattgacgcctggacgattcgttcccgtgccgccagcctgctacacggccttggtttcagtaacgagcagcttgagcgcccggtcagtgatttctccggcggctggcgtatgcgcttaaacctcgcgcaggcgctgatctgccgttccgacctgctgttgctcgacgaaccgaccaaccacctcgatcttgatgcggtgatctggctggaaaaatggctgaaaggctataccggtacgctgatcctgatttcccacgatcgtgatttcctcgatccgatcgtcgataaaattattcatatcgaacagcaaacgatgttcgaatacaccggtaactacagctcgtttgaaatccagcgcgcgacccgcctgtcgcagcagcaggccatgtatgaaagccagcagcagcgcgtagcccacttgcagagctatatcgaccgcttccgcgccaaggccaccaaagcgaagcaggcgcagagccgtatcaaaatgcttgagcgcatggagcttatcgccccggcgcacgtcgataacccgttccacttcagcttccgcgcgccggaaagcctgccgaacccgttactcaagatggaaaaagtcagcgccggctacggcgaacggattattctcgactccatcaagctgaacctggtgcccggttcgcgtatcggtctgctggggcgcaacggcgccggtaaatcaacgctgattaagctactggccggtgaattacagccgctgtccggtgaaattggcctggcgaaagggattaagctcggttacttcgcccagcatcagctcgaattcctgcgcgccgatgagtcgccgatacagcatctggcccgcctggcgccgcaggagctggaacaaaaactgcgcgactacctcggcggctttggattccagggggataaagtcagcgaagagacccgccgtttctccggcggtgaaaaagcgcgcctggtgctggcgttaatcgtctggcagcgccctaacctattgctgctcgatgaaccgaccaaccaccttgatcttgatatgcgtcaggccttaaccgaagcgctgatcgacttcgaaggggcgctggtcgtggtctcgcacgatcgtcacctgatccgctccaccactgacgatctgtacctcgtacacgacggtaaagttgaaccgtttgatggcgatctggaagattatcagcagtggctgagtgattcgcagaagcaggaaaaccaggcctctgaagcgccgaaggataacggcaacagcgcgcaggcgcgtaaggatcaaaaacgtcgcgaagccgaactgcgcacgcaaacgcaaccgctgcgtaaagagatcgcccggctggaaaaagagatggataaactcaacgcgcagctggcgcaggcggaagagaaactgggcgacagcgagttatatgacgcctcgcgcaaagcggaattaaccgcgtgcctgcagcagcaggcgagcgccaaatcagggctcgaagagtgtgaaatggcgtggctggacgcgcaggaacagctggagcggatgctgcaggaaggttaa

SEQ ID NO: 107386 - DNA, 156 bp, Enterobacter aerogenes; identical to SEQ ID NO: 87821

SEQ ID NO: 107387 - DNA, 1023 bp, Enterobacter aerogenes
atggttgaaataaccccgacagcagtgacgccccccgataacgattcgcgcgaattccatccgatgcgcggcgtgggcaatcgtcatctgcaaaccatgctgccgcggatcatccgccgcaagctccgatttacgccgcactggcagcgccttgagctgccggatggcgatttcgtcgatctggcctggagcgaagatcccgccggcgcgcgccacaaaccgcggctggtggtttttcacggtctggaaggcagcctgcacagcccttacgcccacggtttaattcacgccgccatgcagcgcggctggctcggggtggtgatgcattttcgcggctgcagcggcgagccgaatcgcaacagtcgtatttatcactctggcgaaacggaagacggcacctggttcctgcactggttgcggcgtgaattcggcgccgcgccgacggcggcggtaggctattcgcttggcggcaacatgctgggctgtctgctggcgaaagaaggcgacaatattccgctcgatgcggccgtcattgtctcggcgccctttatgctggaagcctgcagctaccatatggataaaggattttcgcgcgtctatcagcgttacctgctcaacctgctgaaagccaacgcctcgcgcaagctgaaagcctatccaggctcgctgccggtggatcttcgccagctcaaaagcatgcgccgcatccgcgaattcgacgacatgatcaccgccaaaatccacggtttcgccgatgcgctagactattaccgacagtgcagcgcgatgccgcgcttaagcgatatcaccaagccgacgctgatcattcacgcaaaagacgatccatttatggaccatcattcaataccgccgcaggaacagctgccggctaatgtcgaatatcagctcacggaacaaggcggccacgttggctttgtcggcggtacgctgcgaaaaccgcaaatgtggctggagcaacgtattccggattggttaacccgctggctgggaggacaagcatga

SEQ ID NO: 107388 - DNA, 219 bp, Enterobacter aerogenes; identical to SEQ ID NO: 87819

SEQ ID NO: 107389 - DNA, 870 bp, Enterobacter aerogenes
atgtctgccaaacatccagtgatcgcagtcacgggctccagcggcgcgggcaccaccaccaccagcctcgcgtttcgcaaaattttctcgcagctgaacctgcatgccgcggaggtcgaaggggatagcttccatcgctatactcgcccggaaatggacatggcgatccgcaaagcgcgcgatcagggcaaacacatcagctacttcggcccggaagccaacgacttcagcctgcttgaacgcacctttttagagtacggcgaattcggcaagggccagtcgcgaaaatatctccatacctatgatgaagcggttccctggaatcaggttcccggcacctttaccccgtggcagccgctgcctgaaccgaccgacgtgctgttttatgaggggctgcacggcggcgtggtgacgccgcagcatgacgtggcgaaacatgtcgacctgctggtcggcgtggtgccgatcgtcaacctcgaatggattcagaagctcattcgcgataccagcgaacggggccattcgcgcgaagcggtgatggactcagtggtgcgttcgatggaggactacatcaatttcatcaccccccagttctcacgtacccatatcaacttccagcgcgtgccgacggtggatacctcgaatccgtttgccgccaaaggtattccatcgctcgacgaaagcttcgtggtgattcacttccgcaatttgcaggggattgattatccctggctgttggcgatgttacaggggtcgtttatctcgcatatgaacaccctggtggtgccgggcggtaagatggggctggcgatggagctcattatggcgccgctggtcgagcgcttgatggaaggcaaaaccattagttaa

SEQ ID NO: 107390 - DNA, 405 bp, Enterobacter aerogenes
atgcaagcgcgtgtgaaatgggtggaaggtctaaccttcatcggtgagtcggcctccggccaccagattttaatggatggcaactccggagacaaagcgcccagcccgatggagatggtgttaatggcggcgggcggctgtagcgcaattgacgtggtgtctatcctgcaaaaagggcgtcaaaacgtcactaactgcgaagtgaagctgacctccgaacgccgtgaagaggcgccgcgcctgttcactcatatcaatctgcactttatcgtcaccggtaaagaactgaaggatgcggcggtgtcccgtgcggtggatttatccgcggagaagtactgctcggtggcgttgatgctggaaaaggcggtcaacatcacccactcttacgaagtcatcgaagcctga

SEQ ID NO: 107391 - DNA, 633 bp, Enterobacter aerogenes; identical to SEQ ID NO: 87816

SEQ ID NO: 107392 - DNA, 2079 bp, Enterobacter aerogenes
atgtggcgcaggctgatttaccacccggaagtcaactatgcactgcggcaaacgctggtgctgtgtctacctgtggccatcgggcttctgctcggccatctgcagcaagggctgctgttctctttagttcccgcctgttgcaatattgccggtctcgacaccccgcataaacgttttttcaaacgcctgatcgttggcggctgcctgtttgccggcagcagcctgattgtgcaattgcttctggcgcgcgacatcccgttgccgcttatcctcagcgcgctggcgctgattctcggcgtgacggcggaaatcagctcgctacacgctcgcctgttgccggcatcgcttatcgccgccatttttaccttaagcctggctggcaatatgcccatctgggagccgctgcttatctatgcgctgggaaccttgtggtacggactctttaactggttctggttttggctctggcgagagcagccgctgcgcgagtcgttaagcctgctttaccgcgaactggctaattattgcgaggccaaatatagcctcctgacgcagcacactgacccgacgacctccctgccgccgctgcttacccgccagcagaaggtggtcgatttaattacccagtgctatcagcagatgcatatgttagccgccaaccagcgtagcgatcataagcgactgctgcgcgcgttccaggttgggctggatctgcaggaacatatttcagtgagcctgcaccagccggaagaggtgcaaaaactggtggagcgcagccatgcggaagcggtcatccgctggaacgcgcagaccgtcgccgctcgtctgcgggtgctggcggatgatattctctaccaccgctacccgcgccgctttcagatggataagcaaatcggcgcgctggaaaaaatcgcctatcagcatcccgataacccagttggccagttctgcgcctggcacttcagtcgtatcgcccgcgtgctacgtactcagcgcccgctgtacgcacgtaacctgatggcggacaaagaacgacgcctgccgctgctaccggcgctgaagaactacctgtcattgaaatccccggcactgcgcaacgccgcgcgcatcagcgtaatgttgagcatcgccagcctgatgggcagcgccctgcacctgccgaagccttactggatcctgatgaccgtgctgttcgtgacgcaaaacggttacggcgccacccgcgtgcggattgtccaccgggcggcaggcaccctggcgggcctggtgatcgcctggctgaccttacacttccacgtaccggagagctatacgttaagcggtatgttgttcatcacgctgctgagctatctcatcattcgtaaacactacggctgggcgatggtgggctttaccgtcaccgcggtatataccctgcagttgctaacgcttaacggcgagcagttcatcgtcgcccgctttatcgataccatcattggctgtctgatcgcctttggcgggatggtctggctatggccgcaatggcagagcggcctgctgcgtaaaaacgcccacgatgctctggaggccgatcaggaggctattcggctgatacttagcgccgatccgcaagccccggcgttggcctaccagcgtatgcgcgtcaaccaggcgcacaacgccctgtataactcgcttaaccaggcgatgcaggaaccgggttttaactcgcactatctggaagatatgaagctgtgggtaacccatagccagtttatcgttgaacatatcaacgccatgaccacgctggcgcgcgagcatacgatgctaacgcctgacctggcgcagcggtatctggaatcttgtgaaattgcgctgcagcgctgtcagcagcgtctggattcagacgggccgggcagcgcgggcgatgtaaatattatggaatcccaggacggggaagtgttgcgtgggccgctcagcacccttgagcagcatctgcagcggatcctcggccatctgaacaccatgcacaccatttcgtcggtggcatggcgtcagcgtccgcatcacggcatctggctacgcacgactaggcgctaa

SEQ ID NO: 107393 - DNA, 1221 bp, Enterobacter aerogenes
atggcaacagagcaaccggcaatcacccgcgccacattcgatgaagtcattctgccgatttatgcaccggcggagtttattccggtgaaggggaaaggcagccgcgtttgggatcagcagggcaaagagtacgttgattttgccggcgggattgcggtgaccgcgttgggccactgccacccggcgctggtggcggcgctgcacgagcagggcgaaaccctgtggcacaccagcaacgtttttaccaacgagccggcgctgcgcctgggtcgccaactggtggacgccacttttgccgaacgcgtggtgtttatgaactccggtacggaagccaatgaaacggcgttcaagctggcgcgtcattacgcaatcactcgccatagcccgtacaaaaccaaaatcatcgctttccataatgccttccacggacggtcgctgttcaccgtctcggtcggcggtcagccgaaatactctgacggtttcgggccgaaaccggcagatatcgtgcatgtcccatttaacgatctcgaggcggtgaaagcggtgatcgatgaccatacctgcgcggtggtggttgagccgattcagggcgagggcggggtgatggcggcgacgccggcgttcctgcaggggctgcgcgaactgtgcgacaagcatcaggcgctgctggtatttgatgaagtgcagtgcggtatgggccgtaccggttcgctgttcgcctatatgcattacggcgtgactccggatatcctgaccagcgcgaaagcactcggcggcggtttcccgattagcgcgatgttgaccaccaatgaaattgccagcgccttccatgccggttcccatggctccacctacggcggcaatccgctggcctgcgcggtggcgaccgcggctttcaacctgattaacacgccgcaggtgctggagggcgtgaatgccaaacgggcgctgtttgtcgaacacctgcagcagatcgatgcgcagtttgatctgttcagcgacatccgcggcatggggctgttaatcggcgccgcgcttaagccgcagcatcatggacgcgcgcgcgatttcctctatgccgcggcggaggccggggtgatggtattaaacgccgggccggacgtaatgcgctttgtgccgtcgctggtgattgatgatagcgatatcgccgaagggatggcgcgctttgcacaggcggttaaaaacgtgcttagcgcctag

SEQ ID NO: 107394 - DNA, 564 bp, Enterobacter aerogenes
atgatcctgctaattgataactatgactctttcacctggaatctgtaccagtacttttgcgaactgggggcggaggtgctggttaagcgtaacgatgagttaacgctggcagagatagcgtcgctggcgccggagaaaatcgttatttcgccgggcccctgcacgcccgatgagtcaggtatttcgctggacgttatccgccgctatgccggaaaaaccccgctgctcggcgtgtgtctgggtcatcaggctatcgcccaggtcttcggcgccgccatcgtacgcgccgctcaggtcatgcatggtaaaacgtcgcttattgagcacaacggcgagggcgtttttaaggggttaaacaacccgctcaccgttacgcgttaccattcgttagttatcgacccgccaacccttcccgcggattttatcgttaccgcccgcagcgccagcggtgaaatcatgggtatccgccatcgccagtgggatctcgaaggcgtgcagttccacccggagagtattcttagcgaacagggacaccaactgctggaaaacttccttaaacgctga

SEQ ID NO: 107395 - DNA, 603 bp, Enterobacter aerogenes; identical to SEQ ID NO: 87812

SEQ ID NO: 107396 - DNA, 168 bp, Enterobacter aerogenes
atgcgtttactcaccgataaacaaaaatcccggctctgggaacagacccgcaatgccaattttcaggccagccgacgccttgaaggcgcgacggtaccgctcgttaccttgacggctgaggaagcgctggcgcgtcttgccgagctgaggaggcgtcatgagcgctaa

SEQ ID NO: 107397 - DNA, 570 bp, Enterobacter aerogenes
atgctcaaatccactctggcggcgatggctgccgtattcgccatttcagcattctcccccgccatggcggccaagggcgacccgcacgtactgctgaccacttctgctggcaacatcgagttggagctgaatagccagaaggcgccgatttctgtcgataacttcctgaagtacgtgaacagcggtttctataacaacacgaccttccaccgggtgatcccaggctttatggtgcagggcggtggctttaacgagcagatgcagcaaaagcagccgaacccgccgattaaaaacgaagccgacaacggcctgcgtaatacccgcgggacaatcgccatggcgcgtaccgccgatcaggacagcgcgaccagccagttcttcatcaacgtggctgataacgctttcctcgaccacgggcagcgtgattttggctacgcggtatttggtaaagtggtgaagggaatggacgtcgccgacaaaatttctcaggttccgacccacaacgtcggcccataccaaaatgttccgtccaaaccggtcgttattctctcggcgaaagtgctgccgtaa

SEQ ID NO: 107398 - DNA, 1179 bp, Enterobacter aerogenes
atgactaacagcaatcgtatcaagctcacatggatcagctttttctcctacgccctgaccggcgcgttggtgatcgtcaccgggatggtgatggggaacatcgcggattatttccatctgccggtgtccagtatgagtaacacctttaccttcctcaatgccggtattctgatttctatcttcctcaatgcctggctgatggagatcgtgccgctgaaaacccagctgcgcttcggctttatcctgatgctgttagctatcgccggactgatgttcggccacagcctgacgctgttctccgcgtcgatgttcgtgctcggtctggtcagcgggatcaccatgtcgatcggtactttcctgattacccacatgtatgaaggccgccagcgcggcgcgcgtctgctgttcacggactccttcttcagcatggcagggatgatcttcccgatggtcgccgccgttctgctggcgcgcagcatcgagtggtactgggtttacgcctgtatcggcctggtctacgttgctattttcgtgctgactttcggctgtgagttcccggtgcttggcaacaaagcgctggcggaaaacagccagccggtagtgaaagagaaatggggcatcggcgtgctgttcctttccatcgccgcgctgtgctacatactcggccagttgggctttatctcctgggtaccggaatatgccaaaggcctcggcatgagcctcggcgacgccggtaagttggtcagcgatttctggatgtcctatatgatcggcatgtggtcgttcagcttcatcctgcgcttcttcgacctgcagcgcatcctgaccgtgctggcgggcctggcgacagtcctgatgtatctgttcattaacggttcgccggagcatatgccgtggttcatcctgacccttggcttcttctccagcgccatctatacctcgatcattactctgggctcgcagcagactaaagtcgcttcaccgaagctggtgaacttcattctgacctgcggcactatcggcaccatgctgaccttcgtggtgaccgggccgatcgtcgcggccagcggcccgctggccgcgctgcacaccgcgaacggcctctatgccgtggtattcgtgatgtgtctgctccttggcttcgtttcccgccaccgtcagaacgcgtcggcgcactaa

SEQ ID NO: 107399 - DNA, 1323 bp, Enterobacter aerogenes
atgtcgacaacgccgttgtggttaattcagaacgtccatctgccacagaaggaagggctgtggcagattgcgattgataaagggcgattcggcgacattacgccgatgggagaggcgcgcagcgagagctacgaagtgcttaacgcccgcggcggattggccatcccgccgtttatcgaaccgcacattcatctcgataccacgcagacggcgggagaaccgaactggaaccagtccggaacgttgttcgaagggattgagcgttgggccgagcgtaaagcgctgctaagccatgaggatgtgaaagcccgcgcgtggaaaaccctgcgctggcaaatcgctaacggcatccagtttgtccgcacccatgtcgatgtttccgacccaacgttgaccgcgctgaaagcgatgctggaagtcaaacaagaggtagcgccgtgggtcgatttgcagatagtcgccttcccccaggaggggattttatcctaccccaatggtgagggtttgctggaggaggcgttacggctgggcgccgatgtggtcggggcaatcccgcattttgaatttactcgtgaatacggggtggaatcgctgcatatcgccttccgtctggcgcagaaataccagcgtccgctggatatccactgtgatgaaattgacgatgaacagtcgcgctttgtcgaaacggtcgccgcgctggcgttaaaagagggaattggcccccgggtgaccgcgagccataccaccgcgatgcactcctataatggcgcttatacctcacggctgttccgcctgttaaaactctcgggcattaacttcgtcgccaacccgctggtcaatattcatctgcaggggcgttttgatgactatccgaagcggcgcggcgtgacgcgggtcaaggagctgatggcggccggcattaatgtctgttttggccacgatgatgtgttcgacccgtggtatccgttgggaaccggcaacatgctacaggtgctgcatatggggttgcacgtttgccagttgatgggctatcagcagattaacgacagtctgcagctgattacccacaacagcgccagaacctttgggctcaatgattacggcattgctaccggcaacccggccaatctggtgatcttgccggcggaaaacggttttgaagccgtacgctgccaggtgccggtacgttggtcaattcgtcagggaagggtcattgcgactacgcagctggcgcagacgtggatacagaccgataaaggcggcgaggagttgttttttaccaaaaatagcccctttgccgaagcaaaggggcctaaggcttag

SEQ ID NO: 107400 - DNA, 2544 bp, Enterobacter aerogenes
atgagcaaagtcagaatcgctattatcggtaacggcatggtcggccatcgctttatcgaagagcttcttgataaggcgcctgccggacaattcgacattaccgtgttctgtgaagagccgcgtatcgcctatgaccgtgtccacctgtcgtcttacttctcccatcacactgcggaagagctgtcgctggtacgcgaaggtttctatgagaaacacggcgtcaaggtactggtcggcgaacgcgcgattaccatcaaccgtcaggaaaaggtgatccactccagcgctggccgtaccgttttctacgacaagctgattatggcgactggctcatacccgtggatcccgccgattaaaggcgcggaaacccaggattgcttcgtctatcgtactattgaagatcttaacgccatcgaatcctgcgcccgtcgcagcaaacgcggcgcggtggtcggcggcggtctgctcggcctggaagcggctggcgcgctgaaaaatctcggcgtggaaacccacgtgatcgagtttgcgccgatgctgatggccgagcagctcgaccagatgggcggcgagcagctgaagcgtaagattgaaagcatgggcgtgaaggttcacaccagcaaaaataccaaagagatcgttcagcagggcaccgaggcacgcaaaacgatgcgcttcgccgacggtagcgaactgcaggtcgatttcatcgtcttctctaccggtatccgtccgcgcgacaagctggctacccagtgcggtctcgccgtcgcccaacgcggcggcatcatggtcaacgatagctgccagacctccgatccggatatctacgctatcggcgaatgcgccagctggaataaccgcgtatacggtcttgtcgccccgggctacaaaatggcgcaggttaccgttgaccatatcctcggcaacgacaatctgttcaccggcgccgacctcagcgccaagctgaagctgctcggcgtggacgttggcggtatcggcgacgcccacgggcgcacgccgggcgcgcgtagctacgtctatctcgacgaaagcaaagaggtctacaaacggctcattgtcagcgcagacaataaaaccctgctcggcgcggtactggtcggcgataccagcgattacggcaacctgctgcagttggtgctgaatgccatcgagctgccggaaaacccggattcgctgatcctcccggcccacgccggcagcggcaagccatccatcggcgtggataaactgccggacagcgcgcagatttgttcctgcttcgacgtcagcaaaggcgacctgatcgccgctatcaataaaggctgccacaccgtggcggcgctgaaagcggaaaccaaagccggaaccggctgcggcggctgtattccgctggtgacgcaggtactcaacgccgagctggcgaaacagggtatcgaagtgaacaacaatctgtgtgagcacttcgcctactctcgccaggagctgttccacctgatccgcgtggaaggcatcaaaaccttcgacgaactgctggaaaaacatggtcagggctacggctgtgaagtctgtaagccgaccgtcggttccctgctggcctcctgctggaatgagtacatcctcaaaccacagcacacgccgctgcaggacaccaacgataacttcctcgccaacatccagaaagatggcacctactcggttatcccgcgctccgcaggcggcgaaataacgccagaaggcctggttgccgtcggtcgcatcgcgcgcgaatttaatctgtataccaaaatcaccggttcacagcgtatcggcctgttcggcgcgcaaaaagacgacctgccggaaatctggcgtcaactgattgaagccggcttcgaaaccggccatgcgtacgccaaagcgttacgtatggcgaaaacctgcgtcggcagtacctggtgccgctacggcgtcggcgatagcgtcggcttcggcgtagaactggaaaaccgctataaaggtatccgtaccccgcacaaaatgaagttcggcgtctcaggttgtacccgtgaatgcgcggaagcgcagggtaaagacgttgggatcatcgccaccgagaaaggctggaacctgtacgtgtgcggtaacggcgggatgaaaccacgccacgccgatctgctggccgcggacctcgatcgcgatacgctcatcaaatatctcgaccgctttatgatgttctacatccgcaccgccgataagctgacccgtaccgcgccgtggctggacaacatggaaggcggcatcgactatctgcgcagcgtcatcatcgacgataagctgggcctgaacgatcaccttgaagaagagctggctcgcctgcgcgccgcttttgcctgcgaatggaccgagaccgtcaataacccggcggcacagacgcgcttcaaacactttatcaacagcgatcagcgcgacccgaacgttcaggtggtgccggaacgtgaccagcatcgcccggccacgccctatgagcgcatcccggtcacgctggtggaggaaaacgtatga

SEQ ID NO: 107401 - DNA, 327 bp, Enterobacter aerogenes
atgagccagtgggtaaacatctgcaaaattgacgacatcctgccggcgaccggcgtctgtgcgctgctggggcaacagcaggtagctatcttccgtccgtaccatgacgacagagtgttcgccatcagcaatatcgatccgttcttcaatgccagcgtgctgtcccgcgggattatcgctgagcatgacggcgcgctgtgggttgccagcccgctgaaaaagcagcgcttccgcctcagcgacgggctgtgcatggaagatgagagccactccatcgcccactacgaagcccgtgttaaagatggcaaagtgcagctgaaagcctga

SEQ ID NO: 107402 - DNA, 1374 bp, Enterobacter aerogenes
gtggaccacttacctattttttgccaactacgcgatcgcgactgcttgctggtcggcggcggcgatgtcgctgaacgcaaggcgcgtctgttgctcgacgcaggcgcccggttaacggtgaactcacgccagtttactccgcagtttcaggtgtgggccgaggcgcaaatgctgacgctggcgcagggcgatttcaatcctgcgctgctcgataactgctggctggcgatcgccgccaccgacgatgatgtcgttaatcagcaggtcagcgaggccgctgaatcacggcgtattttctgcaacgtggtggatgcgccccgtcaggccagctttatcatgccgtcaattatcgaccgctcgccgctgatggtcgccgtgtcttccggcggtacctccccggtgctggcgcgcctgctgcgtgaaaagctcgaatcgctgctgccgctgcacctcgggcaaatcgcccgctatgccgggcagttgcgctcaagggtgaaaaaacagttcgctaccgtcggcgagcgccgccgcttctgggaaaagctgtttgttaacgatcgtctcgcccaatcgctggcgaacgatgatcgtcaggccgttgccgacaccacggaacagttattgaatgagccgctggaacatcgcggcgaagtggtgctggtgggcgccggtccgggcgatgccgggctgctcaccctcaagggactgcagcagatccagcaggccgatgtagtggtttatgaccgactggtctccgacgacattatgaacctggtgcgccgtgacgccgatcgggtgtttgtcggcaaacgtgcaggctatcactgcgtgccgcaggaggagattaaccaaatcctgctgcgcgaagcgcaaagcggcaaacgtgttgtacgtctgaaaggcggcgatccgtttatttttggccgcggcggcgaagagctggagaccctctgcgcggcaggtattccgttctcggtggtgccggggatcaccgccgcctccggctgctcggcctactccggcattccgctcacccaccgcgatttcgcccagggcgtacgcctgatcaccggccatctgaaaaccggtagcgatctcgactggcaaaatctggcggcggaaaaacagacgctggtgttctatatggggctaaaccaggcggcggcgatccgcgaaaaactgatcgcccacggcatggcggcggatatgccggccgctatcgtcgaaaacggcaccgcggtcaaccagaaggtcgtcaccggcactctggatcggctggatatcctggcgcagcagatggccagcccggcgttgattatcgtgggccgcgtggtggcgctacgcgacaagctgaactggttttctcaccattaa

SEQ ID NO: 107403 - DNA, 1005 bp, Enterobacter aerogenes
atgactaagcccatcgtttttagtggcgcacagccctcaggtgaattgaccattggcaactatatgggtgcgctgcgtcaatgggtaaacatgcaggatgactatcactgtatttactgcatcgttgaccagcacgcgatcaccgtgcgtcaggatccgcagaacctgcgtaaagcaacgctggatacgctggcgctgtatctggcctgcggtatcgatccgcaaaagagcaccattttcgtccagtctcacgtgccggaacacgcacagctgggctgggcgctcaactgctacacctatttcggcgaactgagccgtatgacccagtttaaggacaagtccgcgcgctacgccgagaacatcaacgccggtctgtttgactacccggtactgatggccgctgacatcctgctgtaccagaccaaccaggtaccggtaggcgaagatcagaaacagcatcttgagctgagccgcgacgttgcgcagcgctttaacgctatctatggcgatatctttaaagtgcctgagccgtttattcctaagtccggcgcgcgcgtcatgtcgctgctggagccgaccaagaagatgtccaagtccgatgacaaccgcaacaacgtcattggcctgctggaagacccgaaatcggtagttaagaagatcaaacgcgcggtgaccgattccgacgagccgccggttgtccgttacgatgtgcaaaacaaagcgggcgtttccaacctgctggatatcctctccgccgtcaccggccagagcattccggagctggaacagcactttgaaggtaaaatgtacggccatctgaaaggtgaagtcgccgaagccgtttccggtatgctgaccgagctgcaggagcgctatcaccgtttccgcaacgacgaagcgttccttaatcaggtgatgaaagagggcgccgagaaggccagcgcgcacgcttctaagactctgaaagcggtatatgaagcgattggctttgtcgctaagccgtaa

SEQ ID NO: 107404 - DNA, 762 bp, Enterobacter aerogenes
atggataaattacaggccatccgcggcgtggcattcgacctggacggtacgctggtcgatagcgcgccgggtttaaccgccgccgttgatagcgcgctttacgcgctggaactgccggtggcaggtgaagaacgcgtcgtgacctggattggcaacggcgcagacgtcctgatggagcgggcgctgacctgggctcgccaggagcgcgccacgttacgcgcggcgatggggaaaccttccgtcgacgatcatgatataccgcaagacgaacagctacgcgttttgcgtaaactgttcgaccgctattacaccgaagcggcggaagaaggcagtttcttgttcccggcggtggccgatacgctcggcgcgctgcatgccaaaggcctgccgctggcgctggtcaccaacaaaccaacgccgttcgtggcgcccttgctcgaggcgctggatatcgcgaaatactttagcgtggtgatcggcggcgacgatgtgcagaacaaaaagccgcatccggatccgctgctgctggtggcgcaaaagctctctctgacgcctgccgaactcttgttcgtcggggattcgcgcaatgatattcaggcggcgaaagcggcaggttgccgctctatcggtctgacttacggctataactacggcgagccgatagcgctgagcgagccggattttatctttgaccaatttaatgaactcttgcccgctcttgggctaccgtacagtgaaactcaggaattaaaaaatgactaa

SEQ ID NO: 107405 - DNA, 678 bp, Enterobacter aerogenes
atgaagcagtatttgattgccccttcgattctgtcggctgattttgcccgtttgggcgaggataccgctaaggcactggcggcgggcgcggatgtcgtacacttcgacgtcatggacaaccactatgtgccgaatctgacgattggcccgatggtgctgaagtcgctgcgcaactacggcattaccgcgccgatcgatgtgcacctgatggtaaagccggtcgaccgcatcattcctgattttgccgaagccggcgccagcattatcactttccacccggaagcctctgaacacgtcgaccgcagcctgcagcttatcaaagagcatggctgtaaagcggggctggtattcaacccggcgacaccgctaagttacctcgattacgttatggataagctggatgtgatcctgctgatgtcggttaacccaggctttggcggccagtcctttattccgcacacccttgaaaaactgcgtcaggtgcgtcagcttatcgatcaatccggctacgacattcgccttgaagtcgatggcggcgtgaaagccagcaatattggtgaaattgccgccgccggtgcggatatgtttgtcgcgggttcggcgatcttcggccagccggactacaaaaaagttattgatcaaatgcgtagtgaattagcgaaggttagtcatggataa

SEQ ID NO: 107406 - DNA, 828 bp, Enterobacter aerogenes
atgaaaaagaatcgcgcttttctgaagtgggcaggggggaaataccccctgcttgacgatattaaaaagcatttgccggaaggtgaatgcttgattgagcccttcgtgggcgccgggtcggtattcctgaataccgacttttctcgttatatcctcgcggatatcaatagcgacctaatcggtctgtataacatcgtcaaattgcgcaccgacgaatacgtcagcgcggcacgtgagatgtttacgccggaaaataactccgcggagcgctactaccagtaccgtgatgaattcaaccagagtcaggatcccctgcgtcgcgcggtgctgttcctgtatctgaatcgtcatggctacaacggcctgtgtcgctacaacctgcgcggcgagttcaacgtgccgtttggccgctacaaaaagccctatttccccgaggctgagctctatcacttcgccgccaaggcgcagaacgccgagttttactgcgaatcttatgaagagtgtatgaagcgcgccgatagccgggcggtggtctattgcgatccgccgtacgcgccgctgacggcgacggcgaattttaccgcctaccacaccaacagcttcaaccttgatcagcaggtaatgctggcgaaaaaggcggaatcgttgatgaaaaagcggatcccggtgcttatctcaaaccaccgcacgccgctgacgcaggagtggtataaaaacgcggcggaaacgcatattgtgaaggttcggcgcagcatcagcagcaacggtggtacgcgtaaaaaggtggacgagctcttagcgctgtaccgtccgccgaagaccaaataa

SEQ ID NO: 107407 - DNA, 1287 bp, Enterobacter aerogenes
atggatgatttcaaaccagaagacgatatgaaagccgatcgcaacgatcgtcgtgctggtcgttcccgtcagtcttccgagcgtgacgccgatccgcagatcaatttcgacgatctcgatcttgaggccgatgaaggccgtccgacgcgcgcgaacaaagcccgtcgtgaacgcgatgaagaagagtacgaagaggacctcgagtccgaagaagaagtagaagaagagcagcaggttgaacgccgcccgcgtaaacgcaaaaaggcccctgctaagccggcttcccgccagtatgtcatgatgggcgtcggggtgctggtactcctgctgctgattgtcggcgtgggttcggcgctgaaatcgccatcttcttccaatgaatccgcttctggtgagaagagcgttaatctgtcaggcgatcaaagcatgaccgctgaccagaacaacaatgctgcgcagccggtcgatcaaactgcgggcaacaccaaccaacaacagtcgcaggacgtttctctgccgccgatcgcctctaatccgactcagggtcaacccgcctccgagccgcagggtcagcagcgtgtggaagttcagggcgacctgaacaatgcgctgactcaacagcagggtcaactggatagcgccgttgctaactccaccttaccgaccgaacctgcgaccgttgcgccgatgcgtaatggcgccgcgccgcgtcaaacgaccgaacgccagacggccgccacgccgcgtcctgttgagcgtaaacaggtggtgattgaaccgaaaccgcaaagcaagccgcaggctaccgccaaagcgccggttgaaactaagcctaagcacgtagagagcgcgccggcggctaccgccagcaagcctgtcgccactgcgcagactaaacctgctgcgacaaccgcgccaacggctaccgcgactgcgactgcgccggccgcaacgacctccgccccggctgccaccgcgcctgcggctggcagcaaaacggctggcgatgttggttcgatgaagtctgcgccgtctggcaactatacgttgcagctcagcagctcctctaactacaacaacctgaacaattgggcgaagaaagagaagctggaaaaatatgttgtctatgagacgactcgcaacggccaaccgtggtatgtgctggttagcggcatctacgcttcgaaagatgaagcgaaacgtgctgtcgccacgctccctgcggatgttcaggcgaaaaatccatgggcaaaaccgctgcaccaggtacaagctgacctgaagtaa

SEQ ID NO: 107408 - DNA, 1095 bp, Enterobacter aerogenes
atggagaagctgactgtaactctcggggaacgtagttacccgattaccatcgcggctggtttgtttaacgatccagcttcttttctgccactgaaatcaggcgaccaggtcatgctggtcaccaatgaaacgctggcgccgctttatcttgataccgttcgctccgtactggagcaagcgggtgtcaacgttgacagcgtgatcctgccggatggcgagcagtataaaagcctggcggtgatggatacggtatttaccgcgctgttgcaaaaaccacatggccgcgacaccacactcgtggcgctcggcggcggcgtggttggcgatttaaccggttttgccgctgcgagctatcagcgcggcgtacgttttattcaagttcccaccacgctgctttcgcaggtggactcttcggttggcggcaaaacggccgtaaaccatcccctcggtaaaaatatgattggcgccttctggcagccggtttccgtggtcgtcgaccttaattgtctcaaaaccttgccgaagcgtgagctctcctccggcctggctgaggttattaagtacggcattatcctcgacggcgagttcttctgctggcttgaagacaacatcgatgcgctgatggcgctggatgaatcagcgatggcgtactgtattcgccgttgttgtgagctaaaagccgaagttgtcgctgctgacgagcgcgaaaccgggttacgtgctttactgaatctgggacatacatttggccatgctatcgaagctgaaatgggctacggtaactggctacatggcgaagctgtggcggcaggaatggtcatggcggcgcatacgtccgagcgtttagggcagtttagcgcgcaggatacgcagcgtatgattgcgctgttgcaacgtgcagggttgccggtacgcgggccgcaggaaatgtctgcagaagcgtatttgcctcacatgatgcgtgataaaaaggtactggcaggcgaaatgcgcctggtattaccgctcgctataggaaagagcgaggtccgcggcggagtgtcgcacgatgtagttcttggcgcgattgctgatactcagcaggcgcaacaataa

SEQ ID NO: 107409 - DNA, 522 bp, Enterobacter aerogenes
atggcagagaaacgcaatatctttctggttgggcctatgggtgccggcaaaagcactattgggcgccagttagcccaacagctcaacatggaattttacgattctgatcaagagattgagaaacgcactggcgcagacgtcggctgggtcttcgatgtcgaaggcgaagaaggcttccgcgatcgtgaagaaaaaatcatcaatgagttgacggaaaaacagggaatcgtactcgccactggcggcggctcagtaaaatcccgtgaaacgcgtaaccgtctctccgcccgcggcgtggtggtctatttggaaacaacgatcgaaaaacaacttgctcgtacgcagcgcgataaaaagcgtcctttattacaagtagatgcgccgccacgtgaagttcttgaagcgttggcagatgaacgtaatccactgtatgaagagatcgccgatgtcactatccgcaccgacgatcaaagcgcgaaagtcgttgcaaaccagattattcatatgctggaaagcaactaa

SEQ ID NO: 107410 - DNA, 1242 bp, Enterobacter aerogenes
atgcgaaggataagcccgttgctacttctgctgctgccgttgctggccgcggcgacgaaaaaagaaccgccggtgtcgctggtggtcgatgatgtaccggtggtccaggtactgcaaagcctggcggaaatgcaaaatcttaatgtaatcgtggcaccggaggttagtggtacattgtcgctccacttaaacagcgttccctggcgacaggcgctccagtcggttgtcgatagcgccgggctgacaatggcccggcagggcacggtgttgtacatccatacacaggcgtggcagcaagcaaaacgggcgcagcaggaagccgagcaggccagacgctggcagaatctgccattacgtaaccacagtatcccgttgcgctatgccgatgcagacgaactggcgaagtccgggggcaagctgttgagcgcccgcggcacgatgactgtcgatcggcgtactaatcgtctgctaatccgcgacgacgatcgtcatttgccggcgctgaaggcgtgggctgaagagatggatctgccggtcgggcaggtggaactggcggcgcacattgtgtcaatgagcgcgaccagcctgcgtgagcttggcgtgaagtggagcctggcggaggccagcagtacgccggggatggggaaaatgaccaacctgagtagcaacctggcggtgtcagacgcaaccacccgcggcggctttaatatcggccggatcaacgggcgattactggagctggagctttccgcgctggagcaaaagcagcaggtggacatcatcgccagtccacgcctgctggcgtcgcatatgcaacccgctagtatcaaacagggcagcgaaatcccctatcaggtctccagcggagaaagcggcgccacctcggttgagtttaaagaggcggtcctggggatggaagtgacgccgacggtgctacagcaggatcgcgtgcgcctgaagctgcgcattagcgaaaatacgccaggccaggtactgcagcaggagaatggcgaagcgttggcaattgataagcaagaaattgaaaccttagtcgaggtgaaaagcggcgagaccctggcgctgggcggtattttttcgcaaaagaataagtcggcgcgcgacagcgtgccgttgcttggcgaaatccccttgctcgggcagctgtttcgccatgatggtaaagataatgaacgacgtgaactggttgtcttcatcacgccgcgtattctggcagtacattaa

SEQ ID NO: 107411 - DNA, 438 bp, Enterobacter aerogenes
atgtgggtagcgattgaacgcctgctggcgctgcgtgggtggtcgttgacgttactctgcggcgcagtgttggctgcggcaatgtgtctggcgttttcgcttgctgctgtcagcgtttcaccgcccgcgaatgtgccgctacaggcgcaatggcggcgaatattgccgctgcgcgccacgctgcagcaacgcgtagtccatagttggactacccggcgtttttcgccgctggagccgcctgtcgccggcgtcgccttacaggcctggcaaccgagggggcgcggtggcgaaatgcttgctgtggttgactggcaggcggtgccgccgctgtttgcctggcttgccgattgcggggtacaccctggcgctttttcattgaatgccgaaaaaggagcgttgcagttgtcgctgcagctggagagggacgatgaaacataa

SEQ ID NO: 107412 - DNA, 540 bp, Enterobacter aerogenes
atggcgcagcagattaatcttctgccgtggcgcgagacgcgacggcggcaacgcttgcgcctgggcgggctgctggcggcggcgatggcgctaagcatcgccaccctgacgatagcgacgcgcacgttacgtcagatggacgtggcgcagcaggtaatgcgcatccaggccgacaatctgatttattccgcgctgttgcaacgcgagcgggagatgcgtgaggaaatacagcgcggtgagcggcaggcacggcgagcgcagcggcgggcggcgacgcgtgcctggcagccgcggctgctatcgctggctgcactattgccggagccgctgtggctgaccaggctggactaccagccgcagggaatcaccctcaacggcctggcgctgaacctcaaggcggtggcggcgctggaaaaagcgctcagcaagctgaaggattttcaaccggttacgccaggagcgacgcggcgtgatgcacaggggcgctggtcattcagctttttccttgcaggagaaaccaccgatgtgggtagcgattga

SEQ ID NO: 107413 - DNA, 786 bp, Enterobacter aerogenes
atgactttcagaaattggcgtataggaattcacattcaacaggatagcgtcgccatcgtggcgctgttatacgaacgcgggcgctgggctttgcgtcgctggtggcgaattccgctgccgcccggcctggtggcgcagggcagcatcgttgaccttagtgagatggtgaagcggttacgtgaatggcgccgcgagctgccgttacagcatcaggtgtgcattgcgcttcctgccagccgtacgctgcaaaagcagttgcccgcgccacaggtgtcgctgcgggaaagcgaaagagcgacatggatagcgggcacgatggcgcgtcagctggaaatgcctgcctcttcgctgtgtatcgattacgccgcccgcgcggcaaacgatggctggcaggcgacggcggctcagcgtttggatatcgacgccctgcgtcagctggcgcggaggcttaagctgcgcctggcggctatcgtaccggatgcggctgcactcacttctttttttccctggcttactgacgcgactcagggcctggtctggcagggggacgcgcagtggttatgggcgacccaggagcgctggggctattgtccttgcgctgaagccccctctttctcgcacttaacctcgcgcctcaatgatgaacagttccagctctgtagcagcctgccgttggcggaaaatagcttcgattgctggagcgtgatccaccgcctgcaaccgccgcttcccgcctgcggcgatcgctttgctatcgcgcttggtttggcgctgggaggtaaataa

SEQ ID NO: 107414 - DNA, 2559 bp, Enterobacter aerogenes
gtgaagttcgtaaagtatctttttatccttgcagtttgttgcgttctgctgggagcaggctcgatttatggcctctacaaatttatagagccgcaactccccgatgtcgcgaccttaaaggatgtgcgcttgcagatcccgatgcaggtttatagcgcggacggcgagcttattgcgcaatatggcgaaaagcgccgcatccccgtcactctgcagcagatgccgccggagctgataaaagcgtttatcgcgactgaagatagccgcttctatgagcatcatggcgtcgatccggtggggattttccgcgccgccagcgtggcgatgttctcaggccatgcctcgcagggcgccagtaccatcactcagcagctcgcacgtaactttttcctcagtccggaaaaaacgataacgcgtaagatcaaagaagttttcctcgcaatccgcatcgaacagctgcttaataaagacgaaattctcgatctttacctcaacaaaatttacctcggctaccgtgcctatggcgtcggcgccgccgcgcaggtttacttcggtaaatcagtcgatcagctgacgctgagcgaaatggcggttatcgccggtctgccgaaagcgccttccacctttaacccgctctattcgctggaccgcgcgaccgcgcgtcgcaacgtggtgctgtcgcgaatgttaagcgaaggctatatcactcaggcacagtacgatcaggcgcgcagcgaagcgattgacgccagctaccatacgccggaaatcgccttctccgctccgtatctgagcgaaatggtgcgtcaggagatggtcaaccgctacggcgagcaagcctacgaagacggctatcgcgtctacaccaccatcacgcgtaaaaaccagcaggccgcccagcagtcggtgcgtaaaaacgtgctcgattacgacatgcgccacggctatcgtggcccggccaatgtgttgtggaaagttggcgagaccccgtgggataacaaaaaaatcctcgatacgctgaaaaaactgccgggcgtcggcccgctggccccggcggtagtcacctccgcgaacccgcaggaagcggtcgcgttgctgggcaacggcacgtcggtggcgttaacgatggatggcgtccgctgggcgcgtcgctacgtttccgatacgcaacaaggctcgacgccgcgcaaagtgaccgacgtcattcagaccgggcagcaaatttgggtgcgcaaagagggcgacaaatggtggctgtcgcaggtgccggaagtaaactccgcgctggtatctatcaacccgcaaaatggcgcgattatcgctctggtcggcggctttgacttcaatcagagtaagttcaaccgcgctacccaggcgctgcgtcaggttggctccaatatcaagccgttcctttataccgcggcgatggacaaaggcttaaccctcgccagtatgcttaacgatgtgccgatctcccgctgggatgccggcgcgggctccgactggcggccgaaaaactcgccgccgcagtacgccggccctattcgtctgcgtcagggattaggccagtcgaagaacgtggtgatggtgcgcgcgatgcgcgcaatgggcgtcgattatgcggcagagtatctgcagcgtttcggcttcccggcgcagaacatcgtccataccgaatcactggcgctgggttctgcttcctttaccccgctacaggtcgcccgcggctattcggtaatggccaacggcggcttcctgattaatccgtactttattagcaagattgagaacgatcagggcggcgtgctgtttgaagagcggcctaagatcgcctgtccgcagtgtaattcgccagtgatctacggcgatacgccgaaatccaatgtgctggaaaaccaggatgttgaagaggtcgccacctctcaggagccgcaaaacggcgacgttccgccgcagccgcagcttgagcaggctaatcagtcgctggtcgcgcaaagcggcgcgccggagtatgccccgcatgtcatcaacacgccgttggccttcctgattaagagcgcgctgaataccaatattttcggcgaaccgggctggatgggcaccggctggcgtgcgggccgcgacctgcagcgtcatgatatcggcggcaaaaccggtaccaccaacagctcaaaagacgcgtggttctccggctacggtcctggcgtcgtgacgtcggtgtggattggcttcgatgaccaccgccgcgatttgggccgtaccaccgcttccggcgcgattaaagatcagatttcgggttatgaaggcggcgctaaaagcgcccaaccggcctgggatgactttatgaaacgggtacttgaaggcgtgccagaagagccgttaacgccgccgccgggtattgtgacggtgaatatcgaccgcagcacaggtcaactggctaacggcggcaacagccgcgccgagtacttcatcgagggcacgcagcctacccatcaggcggtgcgcgaagttggcaccaccattaccgacagcggtggcgaaacccacgagttgttctaa

SEQ ID NO: 107415 - DNA, 195 bp, Enterobacter aerogenes
atgatgaccttctatcattgctatctcagacaaaaaaaggcttactgttctaaaaaacttccgatgtccctttccatggaaacaactaagacaaggattttttatgtcaagaaaactagctcctggttactgtatcgtcgaacagccgggctctatatctcttcaagctgggttgttattccgaaaccgcaatag

SEQ ID NO: 107416 - DNA, 399 bp, Enterobacter aerogenes
atgcaatacctgagctatgcgttattgatttgttgtgtgataggcatcctgttaatgatcgtctcgtatttcatattcatttctcacagaaaagaatatagtgccatcttagaaagttatttagcaagcaagcttgaatttccaatcctatacaacatccaatcgatgactggtttttttggagcttatcctgtatcacgtttctttctgggattaaaagaaaataaaaaaatccttttcatcacaaaagaaagcaacgcatattcattcttcttacaaaaaccaacattatcaatagaatggatgaagaaactctgttttttctggaagacatctgtaatgttagttcttattccttgtattaccgcttcaattattcacgtactaagtttggcataa

SEQ ID NO: 107417 - DNA, 561 bp, Enterobacter aerogenes
atgagcaaatcattacaaaaacccaccattctcaacgttgaaacggtagcgcgttcgcgtctttttaatgttgaaagcgtggacctggagttcagcaacggcgtgcgtcgcgtttatgaacgcatgcggcccaccgcgcgtgaagccgtaatgattgtgccgattgttgatgaccacattattttaatccgcgaatatgcggtcggtaccgaatcctacgaattgggtttctccaaagggcttatcgaccccggcgagacggccatggaagccgccaaccgcgagctgaaagaagaggtgggtttcggcgcccgtcaattgaccttcctgaagaagctcagcatggcgccatcttatttctccagcaaaatgaacattatggttgcggaagatctctatccggaatcgctgccgggcgatgagccggaaccgctgccgcaggtgcgctggccgctgtcgcagctgatgtcgctactggaagaagaagacttcaatgaagcgcgtaacgtcagcgcgctgtttctggtgcgtgaatggctacaggcgcaggggcgtttgtaa

SEQ ID NO: 107418 - DNA, 2130 bp, Enterobacter aerogenes
atgggcacctttctgacctttttcacagctctgctactctgtgtcttgcttatcgggtggtggtatcgatctcatgccagacgtcgtcgcctccccttactgcaagcctttagcgacgcgacgacccgcaagctttctgatgatgaacgccaggcggtcgaaaagtatctcgatggcctcagccagtcgcaacaggtaccggcgaccggcgccagcgtcgcgcctgtcgccctgaaactgaatgagcagagcgacaccgtttataccgtcacccgcgccgtcacccgctatggcatttcgtctgatgagcccaacaaatggcgatacttcctcgactcggtggaggttcacctgccgccgttctgggaacagcatatcaacgacgagaacagcgtctcgctgatcccaaccgacagcctgccgctggtgattgttctcaatgaccacaccttgcgcgactatccgcaggaagcccgcagctacgcgcttgaacgcgcatcggctacccaggcgtcgattcgcggtgaggagagcgagcaggtcgagctgctgaacatccgccaggaaactcaggaagagcatgctctcagccgtcctgacagcctgcgcgaagggattatgatcgtcgcagccttcctgctgttctattgctgcctgatctcccctgacgtctttgcgccgtggctgctcggcggcggcgtactattgttggcagcgggcttatggggcatctatgcgccgccgctggccggttcgctacgcgagatccactgcctgcgcggaatgccgaaacgctggggactgtttggcgagaacgatcaggaacacgtcaataatatttcgctggggattatcgaccttatctatccgcgccactggcaaccgtggatcgcccaggacctggggcagcaaaccgatattgatatttatcttaaccgccatgtggttcgccaggggcgcttcctgtcgctgcacgatgaagtgaaaaacttcccgctgcagtactggctacgcagcgcgattatcgccgccggcgcgctgctggtcgtcatcatgctgtggattagcgtcccgctgaatatgccctttaaattcacactctcctggcttaagggggcgcagaccatcgaagccaccaccgtcggccagcttgagaaggcgaaagtccgcatcggcgacacgctgcagttaaaaggtaccggaatgtgcaacatccgtacgccgggcgcctggagcgcgaaagaagcctcaccgtttacgccgttcgattgttcgcagatcatctggaacgacgcgcctcccctgccgctgccggagtccgatatcgtcggtaaagccatggcgctggtccaggcggtacagcgccagttgcatcctgacccggacgacgattcacacgttagcccggcattacgttcggcaattcaaaaatcaggaatggtactgctggatgacttcggcgatatcgtgctaaaaaccaacgatctctgctcggcgaaagatgattgcgtgcgtctgaagaacgcgctggtcaaccttggcaatacccgcaactgggaagcactaaccaaacgcgccaccgccggtaagctcgatggggtaaacgtgttgctgcgcccggtgagcgccgaatcgctggagaatctggtgaccacctcaaccgcgccgtttgtgatgcgtgaaacctcccgcgcggcgcaggcgttaaatagcccggcccctggcggattcctgatcgccagcgatgaaggcagcgaactggtcaatcagccgtggccggctatcagcctgtacgattatcccgcccacgagcagtggggagagctacagcgtctggcgggtatgctgatgcatacaccattccatgcggaggggattgtcaccaatctttataccgacgccaatggcacccagcatatcaacctgcaccgcattcccgatcgcagcgggctgtggcgctatcttggcaccactctgctgctgctggcgatgcttggctgtatgtcgtggcacggcgtgcaggcgatccgccgctatcagcgccagcgtcagcgcatggaagaaattcaaaaatattatgaaagctgcctgaatccggttctcatcccttccccggatcatcaagattaa

SEQ ID NO: 107419 - DNA, 684 bp, Enterobacter aerogenes
atgcaaatcaatatcgcgtggcaggaggttgataccgttctgctggatatggatggcacgctgctcgacctcgccttcgacaactacttctggcaaaaactggtcccggaaacctggggcgccgcgcgcggactcaacctgcaggaagccaaagcggcaatgcatcaggagtatcacgccgtgcagcatacgctaaactggtactgtcttgattactggagcgagcgactgggtttggatatttgtgcgatgaccagcgagcaagggccgcgggcaaaactgcgggaagataccgtgccattccttgatgcgctacgggccagcggcaagcgccgcatcctgttgaccaacgcgcacccgcataatctggcggtgaagctcaagcacaccggtctggacgcgcaccttgatttattactttccacccacacatttggttatccgaaagaggatcagcgcctgtggcgcgcggtggcggaagaaaccggccttgatgcgcgcaaaacgctgtttgtcgatgacagcgaggctatcctggacgcggcggcgcagttcggcattcgttattgcctgggcgtcaccaatccggattccggcctggcggaaaaacagtatgcccgccatcctggcgtgaacgattaccggcggctgatcccttccctgattccggaggagaggccatga

SEQ ID NO: 107420 - DNA, 402 bp, Enterobacter aerogenes
atgaaagataagcccgctgaaagcgtcaggctcgacaaatggctttgggcagcccgcttttataaaacccgcgccattgcacgcgagatggttgaaggcggcaaagtgcactacaacggacaacgtagtaagccgagcaaaatcgtcgagttgaatgccaccctgaccctgcgtcagggcaacgacgagcgtaccgttatcgtcaaaaacgttaccgaacagcgcaggccagccagcgaagccgtcatgctgtacgaagagacggcggagagtatcgagaaacgcgagaaagtggcgctggcgcgtaagctgaatgcgctcacgatgccgcacccagacagacgtccggacaaaaaagagcgccgcgacctgatgagatttaaacacggcgacagcgaatag

SEQ ID NO: 107421 - DNA, 879 bp, Enterobacter aerogenes
atgactcaacacgatcaattacatcgttatctgtttgaaaactatgccgtgcgcggtgaactggtcaccgtatcggacacgttggaacagatcctggccaaccatagctacccgcagccggttaaaaccgtgctgtcggagctgctggtcgccaccagcctgctgaccgccacgctgaagttcgccggcgatattaccgttcagctgcagggcgacggcccgctctcgctggcggtaatcaacggcaataaccagcagcagctgcgcggcgtcgctcgcgttcagggcgaaatcccggaaggcgcggacctgaaaacgctggtcggcaacggctacctggtcattaccatctctccacaggaaggcgagcgctatcagggcgttgttggcctggaaggcgataccctggcggcatgcctggaagattacttccagcgttccgaacagctgccgacccgactgttcattcgtaccggcgagcacgacggtaaagcggtggctggcggcatgctgttgcaggtgatgccggctcaggacgcgcagcttaacgacttcgagcatctggcgaccctgaccgagaccatcaaggcggaagagctgttcaccctgccggcgaccgatgtattatggcgcctgtaccatgaggaagaggtgacggtatacgacccgcaagacgtcgagttcaaatgcacctgttctcgccagcgctgcgccgatgcgctgaagacgctgccggatgaagaagtcgacagcatcctcgccgacgaaggcgaaattgatatgcattgcgactactgcggtaatcattatctgttcaacgcgatggatatcgccgagatccgcaataacgcctcgccggcggatccgcaggtacactaa

SEQ ID NO: 107422 - DNA, 1620 bp, Enterobacter aerogenes
atgcgcgttaatagtttaaccccgcaggatctcaaggcttacggtatcaatgacgtccaggaaattgtccacaacccgagcttcgatacgctgtatcaggaagagctcgacccgaaactggaaggttatgagcgtggcgtattaaccaatcttggcgccatcgccgtcgataccggcattttcaccggccgttcgccgaaagataaatatatcgtccgtgacgataccactcgcgataccgtgtggtggtctgataaaggcaatggcaagaacgataacaagccgctctcccaggaaacctggcagcacctgaaaggcctggtgactcaccagctgtcgggcaaacgcctgtttatcgtcgacgccttctgcggcgccaacgccgacacccgcctcagcgtgcgcttcattactgaagtcgcctggcaggcacactttgttaagaacatgttcattcgcccgagcgaagaagagctggcagccttcgagccggactttatcgtcatgaacggcgcgaagtgcaccaacccgcagtggaaagagcagggtctgaactccgaaaacttcgtggctttcaacctgaccgagcgcatccagctcatcggcggcacctggtacggcggcgaaatgaagaaagggatgttctcgatcatgaactacctgctgccgctgcagggcatcgcttcgatgcactgctccgctaacgtcggcgaaaaaggcgatgtcgccgtgttcttcggcctctccggcaccggtaaaaccaccctctccaccgacccgaaacgccgcctgattggcgatgacgagcacggatgggatgatgacggcgtgtttaacttcgaaggcggctgctacgcgaagaccattaagctgtcggaagccaacgagccggatatctatcacgcgatccgccgcgatgcgctgctggaaaacgtcgtggtacgggctgacggcagcatcgattttgatgacggttcgaagaccgagaacacccgcgtctcctacccgatcgaccatatcgaaaatatcgttaagccggtgtcgaaagccggtcacgccaccaaggttatcttcctgaccgccgacgcctttggcgtattgccgccggtttcacgcctgaccgctgaccagacccagtaccacttcctgtctggctttaccgccaagctggccggtaccgagcgcggcgtcaccgagccgaccccaaccttctccgcctgcttcggcgccgcgttcctgtcgctgcacccgacgcagtacgctgaagtgctggtgaaacgcatgcaggcttccggcgcccaggcttacctggtcaacaccggctggaacggtaccggtaaacgtatctcaattaaagatacccgcgcgattatcgacgccatcctcgacggttcgctggataatgccgaaaccttcaccctgccgatgttcaacctgcagatcccaaccgagctgccgggcgtcgatacccatatcctcgacccgcgtaatacctacggttctccggagcagtggcaggagaaagccgatcagctggcgaaactgtttattgagaacttcgagaaatataccgataccccggccggcgctgcgctggttgcggccggtccgaagcgttaa

SEQ ID NO: 107423 - DNA, 1362 bp, Enterobacter aerogenes
atgaagcgcgtgcgtttttcgccgcgaagctcatttgcccgcaccctgttactgatcgtcaccctgctgttcgtcagcctggtgacgacctatctggtggtgctgaatttcgcgatcctgccgagtctgcagcagtttaataaggtgctggcatacgaagtccgtatgctgatgaccgataaactgcagctggaagacggcacccaactggtggttccgccggcgtttcgccgcgaaatttaccgcgagctggggatttcgctctattccaatgaggcggcggaagacgcagggctgcgctgggcgcagcattatgaattcttaagccagcagatggcgcaccagcttggcgggccgaccgaagtgcgggttgaggtcaacaaaagctcgccggtggtgtggctgaagacctggctttcgccgaatatctgggtgcgggtgccgctgactgaaatccatcagggcgatttctcgccgctattccgttatacgctggcgataatgctgctggccattggcggcgcgtggttattcattcgtatccagaaccgaccgctggtcgatctggagcacgccgcgctgcaggtcggacgtgggattattccgccgcccctacgcgagtacggcgcgtcggaagtgcgttcggtgacccgcgccttcaaccatatggccgccggggtcaaacagctggcggatgaccgtacgctgctgatggccggggtcagccacgatttgcgcacgccgttgacgcggatccggctggcgacggagatgatgggcgaacaggacggctatcttgccgagtcgatcaataaagatatcgaagagtgcaacgccatcatcgagcagtttattgattacctgcgcaccggccaggagatgccgatggagcttgcggatctcaacgccgtgttaggcgaagtgatcgccgccgaaagcggctacgagcgggaaatcgccaccgatctgcaggccggagaaattccgctgcgcctgcatccgctatcgattaaacgcgcgttagccaatatggtggtgaacgccgctcgttacggtaagggctggattaaagtcagcagcggcagcgaagccagccgtgcctggttccaggtggaagatgacggcccgggaattaaaccggaacagcgcgaacatctgttccagccgtttgtgcgtggcgatagcgcccgtagcaccagcggcaccgggctggggctggcgatagtgcagcgtattatcgacaatcataacggtcgcctggagattggcaccagcgaacgcggcggcctgctgatccgcgcctggctaccaattccggtgcatcgcgcgctgtcgccggcgaagcctgccaaagagagttga

SEQ ID NO: 107424 - DNA, 720 bp, Enterobacter aerogenes
atgcaagagaattataagattctggttgtggatgacgacatgcgcctgcgcgcgctgctggaacgttatctgaccgagcagggcttccaggttcgtagcgtggcgaacgctgaacagatggatcgcctgctgacccgtgaatccttccacctgatggtgctggatctgatgctgccgggcgaagatggtttatctatctgccgccgtctgcgtagtcagagcaacccgatgccgatcattatggtgacggcgaaaggggaagaagtggaccgtatcgtggggctggaaatcggcgccgatgactacattcctaaaccgtttaacccgcgtgaactgctggcccgtatccgcgccgtgctgcgccgccaggcgaacgagctgccgggcgcgccatcgcaagaagaagcggtgatcgcttttggcaaatttaaactgaacctcggcacccgcgagatgttccgtgaagatgagccgatgccgctcaccagcggtgagttcgcggtattaaaagcgctggttagccatccgcgtgaaccgctgtcccgcgataagctgatgaaccttgcccgcggccgcgagtactcggcgatggagcgttccatcgacgtacaaatctcccgcctgcgtcgcatggtggaagaagatccggcgcatccgcgctacatccagaccgtttggggactgggctacgtcttcgtgccggacggttctaaggcatga

SEQ ID NO: 107425 - DNA, 1224 bp, Enterobacter aerogenes
atgctagtgaataaaacggcggagccactggcggcccgcgccggggcgacccctaatctgcgctgggcatttatgctggtcaccagcctgttctttatgtgggggctctcttacggcctgctcgatgttctcaataaacattttcaggagaccctgcacgtcaccaaagcgcagtccggtttactgcaggcggcctattttggcgcctacttcctggtggcgctgcccgccggctactttatggataaacgcggttataaagcggggatcctggtcggcttgtgcctgtatgcgcttggcgcgctgctgtttgtgccggcggcgagcgtgaatagctttgcgctgttcctgttcgcgctgtttgtgattgcctgtggattaggttgtcttgagaccgcggcgaacccttatgcgacggtacttggcgatagtaaaggcgccgagcggcggttgaatctggcgcagtcgtttaacggactggggcaatttattggcccgctgatcggcggcacgctgttcttttcagctactcagggcgataccggcgatcagagctcggtaaaaatcacctatgtcgctatcgccgtgctggtgctggccatcgcgttgctgttccgccgcacgccgatgccggatattcgcgaagaggagggcagtcagcaagaagcggcgcaggggctgtggcagcatcgccactttaccggcggggttatcgcccagttcttttatgttgccgcgcaggtcggcgtgggtgcgttctttatcaactatgcgaccgagcactggcatggcgtgacaaaccagcacgcttcctatctgctgtcgattgcgatgattagctttatggtcggtcgtttcttcagtacctggctgatggggcgggtgcaggcggcgacgctactgatggtgtattcgttggtcaatatcgtgctctgcggtctggtgatgatgagtatcgacggcgtgtcggtggtggcgctgattgcggtcttcttttttatgtcgattatgttcccgaccattttcgcgctgggcgttaaaaatatgggcagccataccaaacgcgccagctcgtttatgattatggccatcgtcggcggggcgattatgccttacttcatgggggcgctggccgaccgctacagcaccgcgctggcctatgggttgccgctgttatgcttcctggtggtgctgtggtacggcatgagccaacgacgcgcgtaa

SEQ ID NO: 107426 - DNA, 357 bp, Enterobacter aerogenes; identical to SEQ ID NO: 87781

SEQ ID NO: 107427 - DNA, 777 bp, Enterobacter aerogenes
gtggatctatttcttaaagacaaagtggttatcgtcaccggcggcggctcggggatcggcgcggcggtaacgcaactgctggcggaagagggggcggtgccggtcatcgtcactaacgcccagccagagcaggggtttatggataggctgaagcaaatcgcgccgcaaagtgagctgattatcgccgacctgtgccaggaggctgaatgtgccggggcggtaggccaggttctggcgcgctttggccgcattgatgcgctggtgaataacgccggagtgaacgatggcgtagggctcgaggccgggcgtgaggcgtttctcggatcgcttgagaaaaacctgatccactactaccaaatggcccacctgtgccgcgaggcgctggaggcagcgcggggggctatcgtcaatatcgcctcgaaaaccgcgctcagcggccagggcggcaccagcggctataccgcggcgaaaggggcggtgctggcattaacccgtgaatgggcggtatcgctgcgcgagagcggcgtgcgggtcaacgcggtggtgccggcagaagtgctgacgccgcagtaccagcgctggataaataccttccctgacccgcagcggcagatggcggcgattaaccaacgcatcccgctgggcaaacgcatgaccacgccggaagagatcgctaataccgtggtgtttcttatctcctcgcgcgcgtcgcacactaccgggcagtggctatcggtggatggcgggtatttgcatctcgacagggcgctgtcatga

SEQ ID NO: 107428 - DNA, 852 bp, Enterobacter aerogenes
atgttgcgcattgacgcccaccaccactactggcgctatcagccacaggattacccgtggattgatgacgacatgccgcaactgcgccgggatttttaccccccgcagctccagccgctgctggcgcagcaccggctcgatggcgcggtggtggtgcaggcgcgtcatgatgaaaacgaaaccgcctggctggtggaacaggtttctcaaacggtaggcgtatgcggcgtggtgggctggctggatattaccgccgcggatctcgaagacaagctgacgcagtggcgcgaccagctgtgcgggttgcgccatcaggtgcaggatgaagccgacccggcagcgtggcttgagcgcgaggcggtctcgcgaggaatgcagcagttgcagcgccagggctatagctgggatctgttggttacccatcgtcatctcgcggcggcggcacgctttgccgcccgccacgatgatcactggctggtactcgaccatttcggcaagccggatatcgcgcgcggcgcggcctactgggctgaacaggcgcggccgctggcggcgctaccgcacgtggcgcttaagctatctggtctggtgaccgaggccgcgggcggatgctggaccgagcagcaactgctgcctttcttcgacgccgcgctggagctgtttggcccgcagcggctgatgtttggttccgactggccggtatgcctgctggcggcggagtaccgccaggtttaccagctgtgcgaaacggcgctggccccgctgacggaaacgcagcggtcagctatctggggcggcactgcctgtcgggtttatggtttaacggaggcgaagcgtggatctatttcttaa

SEQ ID NO: 107429 - DNA, 1296 bp, Enterobacter aerogenes
atgacgcaaattaccgccctgcgggtagaggatattcgcttccccacttcgcagcagttggacggctccgatgcgatgaatcccgatccggattactccgccgcctacgtgatcctcgaaaccgacaatcctaagctcaccggtcacgggttgaccttcaccattggccgcggcaacgaaatttgctgcgcggcgattcaggcgctggagcatttaatcgtcggcgagcaactcgagacgatcgccgccgatatgggcgccttctggcggcgctttaccagcgatagccagctgcgctggattggcccggacaaaggggcgattcacctggcgaccggcgcggtggtcaatgcggtgtgggatctgtgggcgaaggccgaaggcaaaccggtctggcgactggtcgccgatatgagcccggccgagctggtacgctgtatcgattttcgctacatcaccgactgcattaccccggaggaggcgctgcgcctgctggaaagccgtgaagagggcaaagcccagcgtctcgaacagctacaggcgcagggttatccgtgctacaccacctcagcgggctggctgggatacggtgatgaaaaactgcgtcgcctttgtcagcaggcggtggacgccggtttctcgcatatcaagctgaaggtcgggcgcgatattgaagatgatatccgccgcgtgcgcattgcccgggaagtgattggccccgagcggaaattgatgattgatgccaaccaggtatgggaagtggacgccgccattccatgggtcaaagcgttggccttcgccaacccgtggtttatcgaagagccgaccagcccggatgatatcgaaggccaccgcaagatccgcgaaaacatcggcgcggtgaaggtcgccaccggcgagatgtgccagaaccggattatgttcaaacaattcattatgcgcggcgcgattgacgtggtgcagatcgatgcctgccggttaggtggcgtcaacgaagtgctggcggtgatgctgatggcggcgaagtacaacctgccggtttgcccgcacgccggcggcgtcggactgtgcgaatacgtccagcacctgtcgatgattgactacctgtgcatcgccggtacccatgaagggcgggtgattgagtttgttgaccatctgcacgagcacttcctgcacccttgcgaaatccgcggcgcagcttatatgccgccgcaggcgccgggctactcgattgaaatgcatcaggcttctatcgagcagtaccgctaccgtggagaagcgcatgttgcgcattga

SEQ ID NO: 107430 - DNA, 852 bp, Enterobacter aerogenes
atgaaattacttcgttttggcaatcccggcagcgagcgtccgggcgtactcgataacgacggccgcttgcgcgacctatcgaactatgtgaccgatctgcgcggcgacgcgctgctgccggagagtctggcgcgtctgcgccagctggatctctacagcctgccgctggttgatggcaatccgcgtattggcgcctgcgttggcggtatcggtaagtttatctgcatcggcctgaactatgccgatcacgccgcggagaccggcgccgatattccgcaggagccggtggtattcagcaagtggaccagcgcggtggtcgggcctaacgacaacgtgattatcccgcgcggttcgcaaaagaccgactgggaagtcgaattaggggtagtgattggcaaaggcgggcgctatatcgacgagcgcgacgccatgcagcacgttgctggctactgcgtgattaatgacgtctccgaacgtgaatatcaaattgagcgcggcggcacctgggataagggcaaaggctgcgacacgttcgggccgaccggcccctggctggtcaccgccgatgaaatccccgatcccaacgcgcttaacctgtggctggaggtcgacggcaagcgctatcaggacggcaacacccgcaccatgattttcaaagtgccctatatcatcagctacctgagccgctttatgagcctgcagccgggcgatgtcatctccaccggtacgccgcctggggtgggtatgggccagaaaccgcagccggtttatttacgcgccggccagactattcgtttgggcattgaagggttgggcgaacagcagcagctgaccgtggaggacaaacaatga

SEQ ID NO: 107431 - DNA, 741 bp, Enterobacter aerogenes
atggaactaaccggaaaacgcgttctgattaccgccgcagggcaggggattggcaatagctgcgcgcggctatttgccgccgccggcgcggaagtgattgccagcgatatcaacattgccggattgagcgatatccccggcgtacagccgctgcagctggatgtcacccgcgcggatgcgattgccgccgccgcggaaacgctgggcccgctggatgtgttgttcaactgcgccggggtggtgcatagcggcagcattcttgaatgtagcgagcgggagtggcagttcgccctcgatctgaatgtcaccgccatgttccacacgattcgcgcctttttgccggcgatgatcgcccgcggcggcggctcgattatcaacatgtcatcggtagcttccagcgtgaaaggagtaccaaaccgcttcgcctacagcgccagtaaagcggcggtcattggcctgacccgctcggtagcggcggatttcgtcacccagggcattcgttgtaatgcgatttgtccgggtaccgtcgattcaccttcactacgcggacgtattgccgagcaggcgcgcgagcaggggctgagcgaagaggcggtttatgaggcgtttgtcgcccgccagcccattggccgcatcggcaagccggaagagatcgcccaactggcgctgtacctggcttccgacgccagcgcctacaccaccggcacggtgcagattattgacggcggttggagcaactaa

SEQ ID NO: 107432 - DNA, 759 bp, Enterobacter aerogenes
atgccgattaccagactggaaaacccaaggatttacagacagatagcagaccaactcaagcgattaattgagaacaacgaatttccgcccggcagtcgtcttccgtctgagcgagatttagcccagcaattgaacgtcagccgcgcatcggtacgcgaagcgctgattgcgttggaggtgattggcctggtggacgtgcgcgtcggcaacggggtaatcgtcaaatcgcaaacgccgctcgtcgccaccaaagagccggtgatggcgcaggccggtcgcgaccagtggacggagatcgacgacgaactcaacatagacctcgattttaacgccgaactaccgcccttttctctgctgcaggcgcgcctgttaatcgaaccggaaaccgccgcgctggcggcacgccacgccagccccgaagagctggccgctatccgcgaggcctttgagcaaaactgtcgcgataaccgcgccggttcaaccacccatcccggcgaccgcctgttccatatccgtatcgctcaggccagcggcaacccggcgtacgcgtttatcatcggccacctgctcggccaccgctacggcagtatgttccgcatgctgcagcgccattacaccccggacgatatgccgcatcgctcggaacaggagcatcgcgcgatccttgaagccattgaggcccacgacgtacgtgcggcaaagaaagcaatgaaaaatcatattgatcaggtgattaccatttttacccgcagccagtag

SEQ ID NO: 107433 - DNA, 474 bp, Enterobacter aerogenes
atgaaaacgccgctgatcacccgtgaagggtatgaaaaactgaagcaagagatggattacttgtggcgtacagagcgcccggaagtcaccaagaaagtgacctgggcggcgagtcttggcgaccgcagtgaaaacgccgattatcagtacaataaaaagcgcctgcgcgaaattgaccgccgggtgcgttatctcaccaagtgtctggaaaatctcaaaatcgtcgattattccccgcagcaggaaggcaaagtgttcttcggcgcgtgggtggagatcgagaacgacgatggtgataccaagcgctttcgcattgtcggctacgatgaaatcttcggccgcaaagactatatctccatcgattcgccaatggcgcgcgctttactgaagaaagaggtgggcgacctggctatcgttaacactccagcgggcgaagccagctggtacgtcaatgaaattgaatacgtgaaatag

SEQ ID NO: 107434 - DNA, 2331 bp, Enterobacter aerogenes
atgatgaatgattcgctctgccgcattattgcgggtgaacttcaggccagagccgaacaggtagaagctgccgttcgcctgcttgatgaagggaacaccgtgccgtttattgcacgttatcgtaaggaagtcaccggcggtctggatgacacgcagctgcgtaatctggaaactcgcctcgggtatctgcgcgaactggaagatcgccgccaggcgatcctcaaatcgatcggcgaacagggcaagctcagcgaagcgctggaaaaagccatcaacgccaccctcagcaaaaccgagctcgaagatctctacctgccgtacaaacccaaacgccgcacccgcgggcaaatcgccattgaagccggtctcgaaccgctggccgatctgctgtggaatgagccttcccacgatccggaaaccgaagcggcaaactatatcgatgccgataaaggcgtggcggatagcaaagccgctctcgacggcgcgcgctatatcctgatggaacgcttcgcggaagacgccgccctgctggcgaaagtacgtgattatctgtggaaaaacgcccatctggtggccagcgtcgtcagcggcaaggaagaagaaggcgctaaattccgcgattactttgaccaccatgaaccgatcgcttccgtgccgtcgcaccgcgcgctggcgatgttccgcgggcgcaatgagggcgtgctgcagctgtcgctcaacgccgacccgcagtttgatgagccgccgaaagagagccactgcgagcagatcattatcgatcatctcggcctgcgcctgaataacgccccggcggacagctggcgcaaaggcgtcgtcagctggacctggcgcatcaaggtgctgatgcacctcgaaaccgaattaatgggcaccgtgcgcgaacgtgcggaagacgaagcgattaacgtattcgcccgtaaccttcatgacctgctgatggccgcgcctgccggcctgcgcgccaccatgggacttgacccaggcctgcgtaccggcgtcaaagtggcggtagtcgacggcaccggcaaactggtggccaccgataccatctacccgcataccggccaggcggctaaagccgccgtcgtggtggcggcgctgtgcgagaaacataacgttgagctggtggctatcggcaacggtaccgcttcccgcgagaccgagcgtttcttcctcgacgtgcaaaaacagttcccgaaagtgaccgcccagaaggtgatcgtcagcgaagccggcgcgtcggtctactcggcttccgaactggcggcgcaagagttcccggacctcgatgtttccctacgcggcgcggtctctatcgcccgccgtctgcaggatccgctggccgagctggtgaaaatcgatccgaaatcaatcggcgtcggccagtatcagcatgacgttagccagacgcagctggcgcgtaagctggatgcggtagtagaagactgcgtaaacgccgttggcgtcgaccttaacaccgcctcggtggcgctgttgacccgcgtcgcgggcctgacccgtatgatggcgcagaatatcgtcgcctggcgcgacgagaacggccagttccacaaccgccagcagttgctgaaggtaagccgtctggggccaaaagcctttgaacagtgcgccggcttcctgcgcattaaccacggcgacaacccgctggacgcctcgaccgttcacccggaagcctacccggtggtcgagcgtattctggccgctacccagcaggcgctgaaagatctgatgggcaacagcagcgagctgcgcaacctgaaagcctctgattttaccgatgataagttcggggtgccgacggtatctgatatcatcaaagagctggaaaaaccaggccgcgatccgcgccctgagtttaaaaccgcccagttcgccgacggcgttgagacgatgaacgacctgctgccggggatgattctggaaggtgcggttaccaacgttaccaactttggtgccttcgtcgatatcggcgtgcaccaggatggcctggtccacatctcttcgctgtcgaataagttcgttgaagacccgcataccgtggtcaaagcaggcgatatcgtcaaagtgaaggtgatggaagtggacctgccgcgtaaacgcatcgcgttaacgatgcgcctcgatgaacaaccgggcgacagcaacgcgcgccgcggcggcggcaacgatcgcccgcagggtaaccgcccggcggcaaaagcggcgaagccgcgcggtcgcgatgctcagccagccggcaacagcgcgatgatggatgcgctggccgccgcgatgggcaaaaaacgctaa

SEQ ID NO: 107435 - DNA, 228 bp, Enterobacter aerogenes
atgcaattcactcctgatagtgcgtggaaaatcaccggtttttcccgcgatattagcccggcttatcggcagaaactgctctccctgggaatgttgcccggttcttcgtttcatgtcgtgcgcgtggcgccactgggcgatcctattcatattgagacccggcgcgtgagcctggtattacgtaaaaaagacctcgcgttaattgaactggaagcggttgcgcaataa

SEQ ID NO: 107436 - DNA, 2319 bp, Enterobacter aerogenes
atgaaaaaattaaccgttggtttaattggtaatcctaattccggcaaaacaacgttatttaatcagctaaccggcgcgcgccagcgggtgggtaactgggcgggggtcaccgttgagcgtaaagaaggcgccttcaccaccaccgaccaccaggttactctggttgacctgccgggcacctattcgctgaccaccatctcctcgcaaacatcgctcgatgaacaaattgcctgtcactatattctcagcggcgatgccgacctgctgattaacgtcatcgacgcctcgaacctggaacgtaacctctatctgaccctgcagctgctggagttgggtattccctgcgtcgtcgcgctaaacatgctcgatattgccgaaaaacagcaaattcgcatcgacgtcgacgcgctggcggcccgtctcggctgcccggtgattccgctggtctccacccgcggtcgcggcatcgaagcgctgaaaatggcgcttgaccgccatgagcaaaatcagccgctggaactggtgcactatccgcaatccctgcagcgcgaagccgatatgctggcgcaggcgatgcctgctgatatgccgctgcgtcagcgccgctggctggggctgcagatgctggaaggcgatatttacagccgcgcctttgccggcaacgccgccgacaaactggatctggcgctggccaacctgagcggcgagatggacgatccggcgctctatatcgccgatgcccgctatcaaagtatcgccgcggtatgcgatgccgtcagtaacaccctgaccgctgagccgagccggttcaccacggcgatggataaaattatccttaaccgcttcctcggcttaccgatcttcctgttcgtgatgtacctgatgttcctgctggctatcaacatcggcggcgccctgcagccgattttcgacgccggttcggtggctatcttcattcacggcatccagtggctgggctacactctgcacttcccggactggctgaccgtgttcctcgcgcaagggctgggcggcggtatcaataccgtgctgccgctggtgccgcaaatcggcatgatgtacctgttcctctctttccttgaggactccgggtatatggcgcgcgcggccttcgtaatggaccgcctgatgcaggcgttaggcctgccggggaaatccttcgtgccgctgatcgttggttttggctgtaacgtgccttccgttatgggcgcccgtacgctggatgcgccgcgtgaacggctgatgactatcatgatggcgccgtttatgtcctgcggcgcccgattggcgattttcgcggtctttgccgccgccttcttcggccagaacggcgcgctggcggtcttctcactgtacgtactgggcatcgtgatggcgatcctcaccggcctgatgctcaaatacaccattatgcgcggtgaagcctcgccgttcgtgatggagctgccggtgtatcacgtaccgcacatcaagagcctggttatccagacctggcagcgcctgaaaggcttcgtcctgcgcgccggtaaggtcattgtgattgtcagtattttcctcagcgcgctgaacagcttctcgctcagcggcaaagtggtcgataacatcaacgactcggcgctggcttcggttagccgagtgattaccccggtgtttaagcccattggcgtgcacgaagataactggcaggcaaccgtcggcctgtttaccggcgcgatggcgaaagaagtggtggtcggtacgctgaacaccctctacaccgcggaagatatccagaatgaagagtttaacccacaggagtttagccttggcgacgagctgttagccgccgtcgatgaaacctggcaggggctgaaagacacctttagcctgagcgtgctggcgaacccgattgaagcaagcaaaggcgacggcgaaatggaaaccggcgccatgggggtgatgggcagtaaattcggcagcgccgccgccgcgtacagctacctgatcttcgtcctgctctatattccatgcatttccgtgatgggagcgattgcccgtgagtccagccgcggttggatgatgttctcggtgttgtgggggttgaatatcgcctactcgctatcgacgctgtactaccagaccgtgagctttagccaacacccgcgctacagcctggtgtgtattctggcggtaattctgtttaacgtcgtggtctttggcctgttgcgtcgggcgcgtagccgggtggatgtttccctgctggcgacgcgtaaaaccccgacgtcctgctgccagagtccggccggcgactgccactaa

SEQ ID NO: 107437 - DNA, 237 bp, Enterobacter aerogenes; identical to SEQ ID NO: 87770

SEQ ID NO: 107438 - DNA, 270 bp, Enterobacter aerogenes
atgaaacttgttacaggtattgttgcatctctggtgataggttccctctcttttggcgcgttcgcggcgaaagagattcaaaaagatgaagtcgcgaagatgaatctgaccaaggtcggtagcatcacgacttcccgtaccacgtcgccgatggacgcgaagcgcgatctgtcgaagaaagcggatgagttgggtggtaagtacttcgtagtgattgccggcgagaagaacgagaagacagttcacgcgaacgccgacgtgtataagtaa

SEQ ID NO: 107439 - DNA, 783 bp, Enterobacter aerogenes
atgaatgacatctggtggcaaaccacgggcgaaggaaattgtcatcttgtgctgctgcacggctgggggctgaatgccaacgtatgggattgcattacgccggaactggctacgcattttaccctgcacctggtggatctaccgggctatggccgcagcggtggttttggcgccttaacgcttgaagagatggcgcagcaggtcgttgcaaaagcgccggagcaggctatctggcttggctggagcctgggcgggctggtagcgagcctggtggcgctgcagcacccgcaacgcgtgcaggcgctggtgaccgtcgcttcttcgccgtgttttggcgcgcgcgatcagtggccggggattaaaccggaagtgctgagcggcttccagcaacagctgagtgaagatttccagcgtaccgtcgagcgttttcttgccctgcaaaccatgggcaccgaaagcgcgcgccaggacgcccgggcgctgaaaagcaccgttctgtcgctgccgatgccgcctgctgaggttctcaacggcgggctggaaatcctcaaaaccgccgatttgcgtcaaccgctcgccgcgctgaccatgccgtttttgcgcctctatggccgactggatgggctggtgccgcgtaaaatcgttcctctgttggatgagcagtggccgcaaagtgagtctgttgtctttgaaaaggcggcccacgcgccgtttatttcgcatccccagccattctgtgagcctctcatcgcgctgaaaaaccggctgaataattatttttag

SEQ ID NO: 107440 - DNA, 675 bp, Enterobacter aerogenes
atgctaacagcacacagcttatgctggctatgccaaatgcctctggccatggctcactgggggatgtgctcgcgctgcaccgcctcgctgctcgtcacgccatcgctctgcccgcagtgcggtttaccggcattggcgcccgccttgccctgtggacgctgcctgcaaaaaccaccgccctggcagcggctggtgacggtgaatagctatgccccaccgctaagcgggctggtacaccagtttaagtttgcccgtcatccggaactcgcggcggcgctggcgcgactgcttcttttacgcctgcgccttaattgcgggctgccgccagtggatcggattgtcagcgtgccgctttggcagcgccgtcattggcgtcggggatttaaccaaagcgaggcgctatgtcgcccgctggcgcgctggatgggctgcgcctggcgcggcgatgcgctgacgcgaagccggcgtaccgcaacgcagcatcagttaagcgccagattacgtaagcagaacctgaaaaatgctttccaggttgaattatccgttcggggcctccatatcgccattgtggatgatgtcgtcacaaccggaagcaccgtcgccgagatttcccgcctgcttttgcgaaacggcgccgcgacggttcaggtatggtgtttgtgccgtaccttgtag

SEQ ID NO: 107441 - DNA, 576 bp, Enterobacter aerogenes; identical to SEQ ID NO: 87766

SEQ ID NO: 107442 - DNA, 1317 bp, Enterobacter aerogenes; identical to SEQ ID NO: 87765

SEQ ID NO: 107443 - DNA, 2076 bp, Enterobacter aerogenes
atggagaataaacgccttgataatgccgcgctggcggcggggatcagccccagctatatcaacgcgcacggccagccgcagtcgatcgcggcggccaccaaacaacgtttgctggatgctatgcatcgtacgtctactgccgcgaaagcggcagtagaaccgctgcccagcgtcaaggtttttacccacggtaaaaaaatgcagttgccggtagcgggaagcggcgcgtttcactggctgctgacgaccgaagaaggtaagcagtatcagggtgagacgcgcggcggcgaaacgctcgctttgcctgggcgattgccgacgggctatcacaccctgaccctcacgcgggacggcgaacgctggcactgccgggcgatcgtcgccccggcgcgctgctacgaaccgcaggcgctcaaagagggcaaaaagctatggggcgcctgcgtccagctctacaccctacgttctgagaataactggggcatcggcgacttcggcgatctacgcgccatgctgccggaaatcgcccgtcgcggcggcgcgtttatcggcctcaacccgattcacgcgctctatccggcgaacccggagagcgccagtccgtacagtccgtcctcgcgccgctggcttaacgtcatctatatcgacgttaacgcggtggaggatttccagcgtagccctgccgcgcaggcatggtggcagcttgcggaaacccagcaggccttgcaggccgcgcggcagaccgctgatgtcgactataccgctgtcaccgcgctgaagctgaccgcgctgcgtctggcgtgggccgagttttctacgcgtgaagatgagcaaatggcggagttccgtcagttcgtgctgcgcgagggcgaaagtctctactggcaggcggcgtttgatgcgctgcatgcctggcaaagccgtcaggatccgatgcgctggggctggccggcatggccggaagcgtatcagagcacgagcagcccgcaggtgaaaaccttctgtacggagcatgccgatgaggtgagtttctatctgtggctgcagtggctggcatatacgcagttcgccgcctgttggcacaccagccagcaggacgggatgccgattggcctgtatcgcgatctggcggtcggcgtcgccgaaggcggatcggagacgtggtgcgatcgcgagctgtattgcctcaaggcttccgtcggcgcgccgccggacatcctcggcccgctgggacagaactggggcctgccgccgatggatccgcatgtaatggttgcccgcgcctacgagccgtttatcgaactgctacgggcgaatatgcaaaactgcggcgcattgcgtattgaccacgtgatgtcggtgctgcgtttgtggtggataccgtatggcgaaaccgccgaccatggcgcctatgtgcagtatcccgtggatgacctgctggcgatcctggcgctggagagccagcggcaccgctgcatggtcattggcgaagacctcggtaccgtaccggttgaaatcgtcggcaagctgcgcaaaagcggcgtttactcgtataaagtgctctatttcgaaaatggccctgataaaacgttccgcgcgccgaaggcttatccgcagcagtcgatggcggtcgcaacgacccacgatctcccgacgctgcgcggctattgggagagcggtgatttgacgctcgggaagacgctgggtctgtatccggatgaagtggtgctgcgcggcttatatgccgatcgcgaacaagcaaagcaggggttgctggatgcgctgcatcggcacggctgtttgccgaagcgcgccggacataaagcctcgctgatggcgatgacctcaacgctcaatcgcgggatgcagcgctacatcgccgacagcaacagcgccctgcttgggctgcagccggaagattggctggagatggcttcgccggtcaacatcccgggcaccagtaccgagtatcccaactggcggcgtaagcttagcgtgacgctcgagcagatgtttgccgatgcgcaggtgaataagctgattaaagatctggataagcgccgcaaagcccgctaa

SEQ ID NO: 107444 - DNA, 2391 bp, Enterobacter aerogenes
atgtcacagacttcttttaaccaggctcagtttcaggctgcactgacgcgtcagtggcagcgtttcggtttatcgtcagccgcagagatgacccaacgccagtggtggcgtgcggtcagcggcgcgctggcggagcttttggcggcgcaaccggcggcggaaaccgttaaaggacagcgccacgttaactacatttcgatggagttcctgatcggtcgcctgaccggtaataacctgctcaacctgggctggtatgaaggagtgagcgagacgctgaaggcgtacgacatccagttgaccgacctgctggaagaagagaccgatccggcgctgggcaacggcggcctgggccgtctggcggcctgcttcctggattctatggccaccgtcggccagtcggcaaccggttacggcctgaactaccagtacggtctgttccgtcaatccttcgctgacggtcagcagatggaagcgccggatgattggggacgcggcagctatccgtggttccgccacaacgaagcgctggatgtgcaggtgggcatcggcggtaaagtcagcaaaagcggcgaatggcaaccggctttcgtgattaccggcgaagcctgggatctgccggtgcttggctatcgcaataacgtcgcgcagccgctgcgtctgtggcaggcaaaacatgcccatccgttcaacctgaccaaattcaacgacggcgatttcctgcgcgcggagcagcaaggtatcgacgccgaaaaattgaccaaggtgctgtatccgaatgacaaccatctggcggggaaaaaactgcgcctgatgcagcagtacttccagtgcgcctgctcggtggccgatattctgcgtcgtcaccatctggctggccgcaagctgcatgagctggcggattatgaagtgatccagttgaacgacacccacccgaccatcgccatcccggagctgctgcgcgtgctgcttgatgagcaccagatgagctgggacgatgcgtgggccatcaccagcaaaaccttcgcttacaccaaccatactctgatgccggaagcgctggagtgctgggatgagaagctggtcaaggcgctgctgccgcgccacatgcagataatcaaagagattaacgacagatttaaactgctggtggagaaaacctggccgggcgataagcaggtgtgggcgaagctggcggtggtccatgataaacaggttcgcatggccaacatgtgcgtggtgagcggctttgcggtgaacggcgtcgcggcgctgcactccgatttggtggtgaaggatctgttcccggaatatcaccagctgtggccgaacaaattccataacgtgaccaacggcattacgccgcgtcgctggattaaacagtgtaatccggcgctggctgccctgcttgataagacgctgaagaaagagtgggccaacgatctcgaccagctgatcaagctggagaagtacgccgacgatgccaaattccgtcaggtttatcgtgacattaagcaggcgaataaagtgcgtctcgctgagttcgtgaagcggcgtaccggtatcgacatcaacccgcaggcgattttcgatatccagattaagcgcctgcacgaatacaaacgccagcatctcaacctgctgaatattctggcgcagtataaagagatccgcgaaaacccgcaggccgaccgtgtaccgcgcgtcttcctgtttggcgctaaagccgcgccgggctactacctggcgaagaatattattctggcgatcaacaaagtggccgaggcgatcaataacgatccgctggtgggcgataagctgaaagtggtcttcctgccggattactgcgtatcggcggcggaaatgctgatcccggcggctgacgtctccgagcagatttccacggcgggtaaagaggcctccggtaccggcaacatgaagctggcgctgaacggcgcgttgaccgtcggcactcttgacggcgccaacgttgaaatcgctgagcaggttggcgaggacaatatctttatcttcggccataccgtggaagaagttaaggcgttgaaggcgaaaggctacgatccgctgaaatggcgcaaaaaagataagctgctggacgcggtgctgaaagagctggaaagcggtaaatatagcggcggcgacaaacacgcctttgatcagatgctgcatagcctgctgcaaggcggcgatccttacctggtgctggctgactttagcgcttacgtcgcggcgcagaagcaggtagacgaactgtatcgcgaccaggaagcctggacccgtgcggcgatcctcaacaccgcgcgctgcggcatgttcagctccgaccgctctattcgtgattatcagcaacgtatctggcaggcaaaacgctaa

SEQ ID NO: 107445 - DNA, 2706 bp, Enterobacter aerogenes
atgttgattccgtcaaaattaagtcgtccatcccgtcttgaacacactgtggttcgcgaacggttgctggcgaaactttccggcgcgaacaattatcgtctcgcgttggtgaccagcccggcaggttacggcaaaaccacgctcgtttcgcagtgggcttcgggtaaacatgaccttggctggttttcgcttgatgaaggcgataatcaacaagagcgcttcgccagctatctgattgcggcgattcaacaggcgacaggcggccactgcgccgccagcgaagccatggtgcaaaagcgccagtacgccagcctgccgtcgctgtttgcgcagctgtttattgagcttgccgactggcagcgtccgctgtacctggtcattgatgattatcacctgattaccaatccggtgatccacgatgccatgcgcttcttcttgcgccatcagccagagaccatgacgctggtagtgctgtcgcgcaacctgccgcagttggggatcgccaacctacgggtgcgcgagcagttactggaaatcggcagccaacagttggcttttactcatcaggaggcgaaacagttctttgactgccgcctcgcctcccccattgaagccgatgacagcagtcgcctgtgcgatgacgtcgccggctgggccaccgccctgcagctcatcgccctctccgcccggcagaaaaacacctcagcccagcactccgcccgtcgtctcgccgggattaacgccagccacctttccgactatctggtcgatgaagtgctggataacgtcgatgcccgtacccgcagcttcttgttaaaaagctcgctgctgcgctcgatgaatgacgcgcttatcgtccgcgtcaccggcgaagagaacggccagatgcaactggaagagatcgaacgtcaggggctgttcctgcaccggatggatgactccggcgagtggttccgctatcacccgctattcggcaacttcctgcgccagcgctgtcagtgggaaatggccaccgagctaccggaaattcaccgcgccgccgctgaagcgtggatggcgcaggggttccccaccgaagctatccatcatgcgcttgccgccggcgatgccgccatgctgcgcgatattttgctcaaccacgcctggggcatgttcaaccatagcgagttgggtctgctggaacaatcgctggcggcgctgccgtggtcgaacctgctggaaaacccgcggctgatcctgttacaggcctggctgatgcagagccagcatcgctatagcgaagtgaataccctgctggcccgcgccgagcaggagatggatgtcgaaatggataccgcgatgcacggcgatttcaacgccctgcgcgcgcaggtcgcaatcaacgccggcgatcaggacgaagccgagcgtctggcaatggtggcgctggatgaactgccgctggcgagctattacagccgcatcgtcgccacttccgtccatggcgaagtgctgcactgcaaaggccacttgagtaaatcgctggcggtgatgcagcaaacagaacagatggctcgtcgtcatgacgtctggcactacgccctgtggagcatgattcagcagagcgagattctgtttgcccagggcttcctgcaggcggcatgggagattcaggataaagctttccagcttatccgcgatcagcatcttgaacagctgccgatgcatgagttcctgttgcgcatccgcgcgcagctgctgtgggcgtgggcgcgtcttgatgaagctgaagaaagcgcccgcagcggcatcgcggtactggcaaactaccagccgcagcagcagttgcagtgcctggcgttgatggtgcagtgctcgctggcgcgcggcgatctcgacaacgcacgcagcttattaaaccgtctggaaaatctgctgggcaacggccactatcacagcgattgggtctctaacgccgacaaagtgcgggtgatctactggcagatgaccggtgataaaaccgcagcggccaactggctgcgccagacgccgaaacctgaattcgccaataaccacttcctgcaaagccagtggcgcaacattgcccgtgcgcagatcctgctcggtgattttgattccgccgaaatggtactggaagagttaaatgaaaatgcccgctcgctgcggctgatgagcgatatcaaccgtaacctgctgctgttgaaccagctgtactggcaggcggagcgcaagggcgaggcgcaaaaagtgttaatggaagccttaaccctggctaaccgcaccggcttcattaaccacttcgtgattgaaggcgaagccatggcccagcagctgcgtcagctgattcaactgaatacgctgccggagctggagcagcaccgcgcccagcgcatcctacgcgatattaaccagcatcatcgacataaattcgcccatttcgacgagagcttcgtcgaacggctgctgaaccacccggaagtgccggagcttatccgcaccagtccgctgacccagcgcgagtggcaggtgttagggcttatctattccggttacagcaacgagcagatcgccggcgaactggatgtcgcggccaccacgattaaaacgcatattcgcaatctatatcagaaactgggcgtcgcgcaccgccaggatgccgttcagcatgcccagcggttgctcaaaatgatgggatacggcgtataa

SEQ ID NO: 107446 - DNA, 759 bp, Enterobacter aerogenes
atgaaacaaacacaacgtcatgacgcgattatcgagctggtaaaaaaacagggatacgtcagtaccgaagagctggtggagcagtttgccgtcagcccgcagactattcgtcgcgatctgaatgatttagcggaacaaaaaatgatcctgcgccaccacggcggcgcggcgatgccttcaagctcggtcaacacctcgtggcacgacaggaaagcgacccagacggcggaaaaagagcgcatcgcgcggaaagtggcgagcgaaatacccgacggcgcaaccctgtttatcgacattggcacgacgccggaagcggtggcccatgcgttgctcgatcataatgacctgcggattgtgaccaacaatctcaacgtcgcgaatacgctgatggtgaaagacgattttcgcattatcctcgccggtggcgagctgcgtagccgcgacggcgggatcatcggcgaagcgacgctcgattttatctcccagttccgcctcgacttcggcattcttggtattagcggtattgatagcgacggttcgctgctggagtttgattaccatgaagtgcgcaccaagcgggcgattatcgaaaactcgcgccacgtgatgctggtggtggatcactcgaagtttggccgtaatgcgatggtgaacatgggcagcattagtctggtcgatgcggtttataccgatatcatgccgcccgcaggcgtgctgaaggtgattaaagacaacaacctgcagctggagctgtgctaa

SEQ ID NO: 107447 - DNA, 831 bp, Enterobacter aerogenes
atgttaatgattacctcttttgccaacccgcgcgtggcccaggcgtttgtcgactatatggcgacgcagggggtcatcctgactatccaacagcacacgcagagcgatgtctggctggctgatgaaagccaggccgcgcgggtgcaggccgagctggcccgttttctcgaaaacccggccgacccgcgctatctcgccgccagctggcaatcggggcataccaatagcggattgcattatcaacgcttcccgtttttagctaccttgcgtaacaacgccgggccgtttacgtgggcgattttgctggcctgtatcctggtcttcatactgcaaaacgttctgggcgatcagacgatgatgatctggcttgcctggccctacgatccatcgctgaaattcgaagcctggcgctatcttacccatgctttcatgcacttctcgctgatgcatattctgtttaacctgctatggtggtggtacctcggcggtgcggtggagaagcgcatcggtagcggcaaactggtggtgattaccattatcagcgctctgctgagcggattcgtccagcatcaggttagcggcccgtggttcggcggtttgtcgggagtggtctatgcattaatgggctatgtctggctgcgtggcgagcgcgacccgcagagcggtatttatctgcaacgcggtctgatcctcttctctttagtgtggttagtggctggatggtttgatgttttcggcatgtcgatcgccaatggcgcgcacgtggcgggcctggcagtcgggctggcgatggcgtttgtcgatacgctaaatgtgcgaaaacgaacgtag

SEQ ID NO: 107448 - DNA, 330 bp, Enterobacter aerogenes
atggaacaatttgaatgtatcaatgtagaagaagcgcatcagaaactgcatcagcagaaggcggtgctggtcgatatccgcgatccgcaaagctatgccatggggcacacgccgggcgcgtttcatctgaccaacgataccctgggcgcttttatgcgcgataacgattttgagacgccggtgatggtgatgtgctaccacggcaacagcagtaaaggcgccgcgcagtatctgctgcagcagggcttcgagaacgtctacagcgtcgatggcggttttgacgcctggcatcgtcatttcccggcggaagtcgcgcacggctcgctataa

SEQ ID NO: 107449 - DNA, 1509 bp, Enterobacter aerogenes
gtggaaatcaaagatctgattgtgataggcggaggcatcaacggtgccggtatcgcggcagacgccgccgggcgcggtttatccgtgctgatgctggaagcgagagaccttgcctgcgccacctcgagcgccagctcaaaactgattcacggcggcctgcgctacctggaacactacgaattccgcctggtcagcgaagcgctggcggagcgcgaggtgttattaaaaatggcgccgcatttggccttcccgatgcgctttcgcttaccacatcgcccgcatctgcgcccggcgtggatgattcgtatcggtctgtttttatacgatcacctcggcaaacgtaccagcctgccgggctcgaccggtttgcgctttggcgcggaatcggtacttaagccggaaatcgtgcgcggtttcgaatattccgactgctgggtcgacgatgcgcgtctggttcttgccaacgcccagatggtggtacgtaaaggcggcgaggttcgcacccgcacccgcgctatctcggcaaaacgcgaaaacggcctgtgggtggtggaagcggaagatatcgatagcggcgaaaaattcacctggcacgcgcgcggcctggttaacgccaccggcccgtgggtgaaacatttcttcgacgaaggcatgcatctgcgctcgccgtatggcatccgtctgatcaaaggcagccatatcgtggtgccgcgcgtgcacacccagaagcaggcctatatcctgcaaaacgaagataaacgtatcgtgtttgtcatcccgtggatggatgagttctcaattatcggcaccaccgacgtcgagtacaacggcgatccaaaagaggtggcgatcgatgataaagagatcaactacctgctgaacgtctacaacgcgcactttaaaaagacgctgtcgcgcgacgatatcgtctggacttactccggcgtgcgtccgctgtgcgacgatgaatccgactcgccgcaggcgattacccgcgactataccctcgatattcacgatgagaacggtcaggcgccgctgctgtcggtattcggcggcaagctcaccacctaccgtaaactggcggaacatgcgctggaaaaactgacgccgtattatcaggggattggcccggcgtggaccaaaaccgccgttctgcccggcggcgatatcggcggcgaccgcgacgactacgcggcgaaactgcgccgtcgcttcgcgtttatcagcgaatcaatggcccgccactacgcccgcacctacggtagcaacagcgagtggatccttggcgaagcgacttcgcttgccgatctgggagaagattttggccacgagttttatgaagccgagctgaagtacctggtcgaacacgagtgggttcgcagcctggatgacgctatctggcgccgtaccaaacaggggatgtggctgaatgccgagcagcagacgcgtatcagcgagtggctggcgcaacatacgggaaagtctgaactgtcgttagcgtcctga

SEQ ID NO: 107450 - DNA, 2448 bp, Enterobacter aerogenes
atgaatgcaccctttagttatgcatcacccacgctgagcgttgaggcgttaaagcattctatcgcgtataagctgatgtttatcatcggcaaagatccggcgatcgccaacaaacacgaatggctgaacgccaccctgttcgccgttcgcgaccgcatggtcgagcgctggctgcgttcaaaccgcgcccagctgtcgcaggaagtgcggcaggtttactatctgtcgatggagtttttgattggccgcaccctctctaacgcgctgctgtcgttagggatttatgaagatgtgaataatgcgctggccgatatggggctcgatctggaagagcttattgatgaagaaaacgaccccggtttaggcaacggcggtttagggcgcctggccgcctgcttcctcgattctctggcaacgctgggcctgccgggccgcggctacggtatccgctacgactatgggatgtttaagcagaacattgtcgacgggcggcagaaagagtcgccggattactggctggagtacggcaacccgtgggagttcgaacggcacaatacgcgctataaagtgcgtttcggcggccgcgtgcagcaggaagggaaaaatacccgctggatagagaccgaagagattatcgccgaagcctacgatcagattatccccggtttcgataccgatgccactaacaccctgcgtctgtggagcgcgcaggccagtagcgaaatcaacctcggtaaattcaaccagggcgactactttgcggcggtggaagataagaaccactccgagaacgtttcgcgggtgctgtacccggatgactccacctattccgggcgcgagctgcgcctgcgtcaggagtatttcctggtctcggcgacggtgcaggatatcctcagccgccactaccagctgcaccgcacctacgacaatctggcggcgaaaatcgccattcacctcaatgacacccacccggtgctgtcgatccctgagctgatgcgtctgctgatcgatgagcacaaatttagctgggatgaagccttcgaggtgacctgtcaggtcttctcctataccaaccatacgttgatgagcgaagcgctggagacctggccggtcgatatgctggggaaaatcctgccgcgccatctgcagattatcttcgagattaacgattacttcctcaagacgctgcaggagcagtatcccaacgataccgcgctgctgagccgtacctcgatcattgatgaatccaatgggcgccgggtgcgtatggcgtggctggcggttgtcgtcagccataaagtcaacggtgtgtcagagctgcattcgcgcttaatggtcgagtcgctgtttgccgagtttgcgaagattttcccgatgcgctttaccaacgtcaccaacggcgtcacgccgcggcgctggctggcgttggcgaacccgccgctgtcgcaggtgctggatgagaatatcggccacacctggcgcaccgacttaagccaactaagcgatctgcagcagcatattgattatccgacggtgaaccaggcggtgcgccgcgccaagcttgagaataagcagcggctggcgaactatatcgcccagcagttgaacgtggtggtcaatcccagggcgctgtttgatgtgcagatcaaacgcatccacgaatataaacgccagctgatgaatatcctgcacgtcatcacccgctacaataggatcaaagccgatccgcaggcggagtgggtgccgcgggtgaatatcttcgccggcaaggccgcgtcggcttactacatggcgaagcatattattcatctgatcaacgatgtagcggcggtggtaaacaacgatccgcagattggcgataagctaaaagtggtgtttatccccaactacagtgtgagcctggcgcagctgattatcccggcggcggatctctccgagcagatttcgttggcgggaacggaagcgtccggtaccagcaatatgaagtttgcgctcaacggggcgctaaccattggtacgctggatggcgctaacgttgagatgctggagcacgtcggcgaggacaatatctttatcttcggtaataccgcggaacaggtagaagccctgcgcagcaacggctataaaccgcgcgactattatgagcaggatgaggagctgcatcaggcgttgacgcagattggcaccggcctgttcagtccttcggagcctggccgctaccgcgacctgctggattcgctgatcaactttggcgaccactatcaggtactggcggactaccgcagctacgttgattgccaggataaggtggacgagctgtaccgccatccggaggagtgggccaataaagcgatgatgaacatcgccaacatgggctatttctcatccgatcgcacaatccaggagtacgccaaacatatctggcatatcgacccggttcgtttgtaa

SEQ ID NO: 107451 - DNA, 1434 bp, Enterobacter aerogenes
atgcaggttttacacgtatgttcagagatgttcccgttgttaaaaaccggcggtctggctgacgttatcggcgcgctgcctgcggcgcagatcgcagacggcgtggatacccgcgtgctgctgccggggtatccggatatccgccgcgggattaccgacgcgcaggtcgtcacccgccgggatacctttgccgggcgcatcaccctgctgttcggccattttaacggcgtcggtatctatctgatcgacgcgccgcatctctacgatcgtccggggagcccgtatcacgacgccaacatgaacgcctataccgacaacgtgctgcgctttgcgctgctcggctgggtggggagcgaaatggcctgcgggctggatccattctggcgcccggaggtggtgcacgcccatgactggcacgcgggcctgacgccggcctatctggcggcgcgcggccgtccggcgaaatcggtgtttacggtgcacaatctcgcctaccagggaatgttttactcctggcatatgaatgagatagaactgccgtggtcgttctataacatgcacggcctcgaatttaacggccagatctcgttcctcaaagccgggctgtactatgccgaccatatcacggcggtgagcccaacctacgcgagggaaattacccaaccgcaatatgcctacggcatggaagggctgctgcgccagcgccaacatgagggccgcttgtccggcatccttaacggcgtcgatgatgctatctggaatccgcaaagcgatctgctgctggcggcgcgctatgaccgagatagcctggaagagaaagccgagaataaacggcagctgcaaatcgccatggggctgaaggtggatgacaaagcgccgctgttcgccgtggtgagccgcctgaccagccaaaaagggctggatctggtgctggaggcgctgccgggcctgctggagcagggcgggcaactggcgctgctgggcgccggcgatccggtcctgcaagagggcttcctcgccgccgccgccgaacatccgggccaggtcggcgtgcagattggctatcacgaggcgttttcgcaccgcatcatgggcggcgccgatgtgattctggttcccagccgctttgaaccgtgcggcctgactcagctgtatggcctgaaatacggcaccctgccgttggtgcgccgcaccggcggtctcgccgataccgtggccgactgttcgctggaaaacctcgccgacggcgtcgccagcggctttgtctttgaggacagtaacgcggtgtcgttgctgcgggccatccggcgcacctttgtgttgtggtcgcggccatcgctgtggcgctacgttcagcgtcaggcgatgaatatggactttagctggcaggtggcggcgaaatcctatcgtgaactctatcaacgcttgatgtaa

SEQ ID NO: 107452 - DNA, 1296 bp, Enterobacter aerogenes; identical to SEQ ID NO: 87755

SEQ ID NO: 107453 - DNA, 1977 bp, Enterobacter aerogenes
atgacgacgcttgccgcaggaaaaccgacgcctttgggcgccagctatgacggcaaaggggtgaacttcaccctgttttccgcccacgccgagcgggtggagctctgcgtgttcgaccatcagggcaacgagcggcgctacgacctcccggcgcgcagcggcgatatctggcacggctggctggccgatgcgcgtccggggctacgctacggttatcgggtgcacgggccgtgggatccggcgcaggggcatcgcttcaatccggccaagctgctgctcgacccttgcgcgcatcaggtggcgggcgaactgctggacgacgagcgtctgcatggcggtatgtatgagccggatgcccgcgatagcgcagccattgcgccaaaatcccaggtggtcgatctgcattacgactggctcggtgataaaccgccgcgcacgccttggggcgaaacggtcatttatgaagcccacgtcaaagggttgacctggctgcatccggagctgccggaggcgatccgcggcacctatcaggcgctgggccatccgctgatgatcgattattttcgccgtctgggtattaccgcgctggagctgatgccggtggcgcagttcgccagcgaacctcgcctgcagcggatggggctgagcaactactggggctacaacccgctggcgctgtttgcgctggagccgcgctacgccagccagccgcagcgggcgctcgatgagttccgcgatgcggtgaaggcgctgcacgcggcgggcatcgaggtgatcctcgatatcgtgctgaaccatagcgcggaaatcgatcttgaagggccgacagtctccctgcgcggtatcgataaccgcagctattattggatcagggacgacggcgattatcacaactggaccggctgcggtaacacgctcaacctcagtcatcccggcgtggtggagtatgccctgcagtgcctgcgcttttgggttgatgaatgccacgtcgacggttttcgcttcgacctggcgtcggtgatggggcgtacgccggaatttcgtcaggacgcgccgctgtttgaggccattcgccgcgacccggtattgtcggcgctcaagctgattgccgaaccctgggatattggccagggcggttatcaggttgggaatttcccaccgctgtttgccgaatggaacgaccattttcgcgataccgcgcgccgtttctggttgcaacaaaacgtgtcgttgggtgacttcgcccagcgcttcgccgcctccagcgatctctttgcccgcgatggcaaacggcctgcggcgacgatcaatctgatcacggcgcatgatggattcaccctacgtgattgcgtctgtttcaatcagaaacacaatcaggcgaacggcgaagagaatcgcgatgggactaacaataactacagcaataatcatggtatagagggattagaagccaatcttgccgtgattgagcggcggcgcgatagcgtacatgcgctcctgaccacgctgctgctgtcgcaaggaacgccgatgctgctggcgggcgatgagcatggccacagccagcatggcaacaataatgcgtattgtcaggacaatgccttgacctggctggactggcggcgggcaaatcacgggttaaccgcttttgtcgccgcgcttatccacctgcgtcggcgcattccggcattaacccgtaatcagtggtggcaggagcaggacggcaacgtgagctggctcaatcagcgcggagaaccgttaaacgccgacgagtggcaacatggcgccgcgcggctgcaaatcctgttatccgatcgctggctgatcgcgctgaatgccaccgcggaggtggcggatatggttttacccgcgggggagtggcgcgccattcctccattcgccggagaggataatccggtcatcatggctgtctggcatgggcccgcgcacggagtttgcgtatttcaaaggtcgtag

SEQ ID NO: 107454 - DNA, 2184 bp, Enterobacter aerogenes
atgtcgaatcgaatcgatagagacgtgattaatgcgctgattgcaggtcatttcgcggatcccttttccgtgcttggcatgcaccgcaccgaggcggggctggaagttcgcgcattattaccagatgccaccgaagtgtgggttattgaaccgaaaaccgggcgtaaagtcggcaaactcgaatgcctcgactcgcgcggattctttagcggcctgctgccgcggcgtaaaaacgcttttcgctaccagctggccgtcacctggcacggacagcaaaacctgattgacgacccttaccgttttggcccgctgctgcaggacgttgatgcctggctgttgtccgagggaacgcacttgcgcccttacgaaaccctgggcgcgcacgccgacactatggatggcgtcaccggtacgcgcttttcggtctgggcgccaaacgcccgccgggtctcggtggtggggcaatttaactactgggatggccgacgccatcccatgcgcctgcgtaaagagtccggtatctgggaactcttcattcccggcgcgcttaatggccagctgtataaattcgagctgatcgacgctcatggcaatctacgcgtcaaagccgatccttacgcctttgagtcgcagatgcgcccggaaagcgcgtcgcttatctgcgatttgccgccaaaagtcgaacagccggcggcgcgcaaagccgcgaaccagtttgatgcgccgatctctatttatgaagtgcacctcggttcctggcgccgccataccgacaataacttctggcttagctaccgcgaactggcggaccaactggtgccttacgcaaaatggatgggtttcacccacctcgaactgctgccggtgaacgaacacccgttcgacggcagctggggctaccagccgaccggcctctacgcgccgacacgccgcttcggcacccgtgaagatttccgctatttcatcgatgccgcccacgccgcaggccttaacgtgatactcgattgggttccgggtcattttccggcggatgattttgcgctggcctcatttgacggcacctcgctgtatgaacacagcgatccgcgcgaaggttatcaccaggactggaatactcttatctataactacggccgccgcgaagtcagcaattacctggtgggtaacgcgctgtactggatcgagcgcttcggcattgatgcgctgcgcgtcgacgcggtggcgtcgatgatctaccgcgactatagccgtaaagcgggcgagtggatccccaacgaatacggcgggcgggaaaatctcgaagcgatcgagtttctgcgtaacaccaaccgtattctcggcgagcagacgccaggggcggtaacgatggcggaagagtccaccgattttgccggcgtgacgcgcccgcccgccgacggcggcctcggcttctggttcaaatggaatctcggttggatgcacgacacgctggactatatgaagctcgatcctgtccatcgtcgctaccatcacgacaaaatgaccttcggcatgctctacaactacaccgagaacttcgtgctgccgctctcccacgatgaagtggtgcacggcaaaaaatcgattctcgaccgcatgccgggggacgcatggcagcgctttgccaacctgcgcgcctactacggctggctgtttgcctttccgggcaaaaagctgctgtttatgggcaatgaattcgcccagggccgcgagtggaaccacgacgccagtctcgactggcatctgctggagggcggcgacaactggcaccacggcgtccagcgactggtgcgcgacctgaaccacacctaccgtcaccataaagcgctgcacgagcttgatttcgatccctacggcttcgaatggctggtggtcgacgatcatgagcgttcggtatttatctttgtgcgccgcgataaagccggcaatgagattatcgtcgccagcaactttaccccggtgccgcggcacaactaccgtttcggcatcaaccagccgggacgctggcgcgaagaattgaacaccgactcgatgcattatcacggcagtaacgccggaaatggcggagtggttgagagcgagcccgtcgccagccatggccgtcagcattcgttgtcgattaccctgccgccgctggcgaccatctggctggtacgggaggcctga

SEQ ID NO: 107455 - DNA, 1107 bp, Enterobacter aerogenes; identical to SEQ ID NO: 87752

SEQ ID NO: 107456 - DNA, 1341 bp, Enterobacter aerogenes
gtgagtactttaacgcttgttttaacagcagtcggctcggtattgctgctgctgtttttagtcatgaaggcgcgtatgcacgccttcgtggctttgatggtggtttctattggcgcaggtctcttttccggtatgccgctggataaaatcgcggcgacgatggaaaaagggatgggcggcacgctgggcttcctggcgatagtcgtcgcgctgggcgcgatgttcggtaaaattttgcatgaaaccggcgcggtcgaccaaattgcggtgaaaatgctgaagtccttcggccacaaccgcgcgcactatgctattggcctggccggccttatctgcgcgctgccgctgttcttcgaagtggcgatcgtgctgctgattagcgtcgcgttctccatggcgcgccataccggcactaacctcgtgaagctggtgatcccgctgttcgccggcgtagccgccgccgcggcattcctgctgccggggcccgcgccgatgctgctggcttcgcagatgcacgccgatttcggctggatgatcctgattggtctctgcgccgctattccggggatgattatcgccggcccgctgtggggtaacttcatcagccgctacgttgagctgcacattcctgacgatatcagcgaaccgcatctcggcgaaggtaaaatgccgtccttcggctttagcctttcgctgattctgctgccgctggtgctggtcggcctgaaaaccatcgccgcgcgctttgtgccggtgggatccaccgcctatgaatggttcgagtttatcggccacccattcaccgcgattctggttgcctgcctggtagcgatttacggcctggcggtacgtcaggggatggcgaaagatcgcgtgatggagatctgcggcgcggcgctgcagccggcgggtattattctgctggtgattggcgcaggcggcgtcttcaagcaggtgctggttgactccggcgtcggcccggcgctcggcgaagcgctgactggcctgggtctgccgattgcgattacctgcttcgtgctggcggctgccgtacgtattattcagggctccgcgaccgtggcgtgtctgacggcggtcggcctggtaatgccggtcattgagcaactgaactacagcggcgcgcaaatggcggctctctccatctgtatcgcgggtggttcgatcgtagtgagccacgtgaacgatgccggcttctggctgttcggtaagtttaccggcgccagcgaagcgcagacgctgaaaacctggacgatgatggaaaccatccttggcaccaccggcgccatcgtcgggatgattgccttccagctgctgagctaa

SEQ ID NO: 107457 - DNA, 531 bp, Enterobacter aerogenes
ttgagcacgactaaccatgatcaccacgtctatgtcctgatgggcgtttccggcagtggtaaatccgccgtcgccagcgaagtggcgcatcaattgaaagccgcgtttctcgatggcgattttctgcatccgcgcagcaacatcaccaagatggcttccggcgagccgctgaacgacgatgatcgcaccccgtggctgcaggcgttgaatgacgcggcatttgccatgcagcgcaccaacaaagtttcgctgatcgtctgctcagcgctgaaaaaaagctaccgcgacattctgcgcaagggcaacccgaacctctcctttatctacctgaaaggcgacttcgacgtgattgaaagccgtctgaaggcgcgtaaagggcacttcttcaaaacccaaatgttggtgacgcagtttgaaacactgcaggaaccaggcgctgacgaaagcgatgtgcttatcgtcgatatcgaccagtcactggaaggcgtggtcgccagcaccattgaggtgattaacaaaggcagtaactag

SEQ ID NO: 107458 - DNA, 996 bp, Enterobacter aerogenes
atgaaaaagaaaagacccgtacttcaggatgtagccgatcttgtcggcgtgaccaaaatgacggtcagtcgctatttacgtaacccggaacaggtttctgaggccctgcgtggcaagattgccgttgcactcgatgagctgggttatattcccaatcgcgctcctgatattctctccaacgccaccagccgcgccatcggcgtactgctgccctcgttaaccaaccaggtcttctcggaagtgctacgcggcattgaaagcgtcaccgacgccttcggttatcaaaccatgctggcgcactacggctataagccggaaatggaagagaagcgtctcgaatcgatgctctcctggaatattgacggcctgatcctcactgaacgtacccacacgccgcgcacgttgaaaatgattgaagtggcggggatcccggtggttgagctgatggacagccagtcgccgtgcctcgacattgccgtcggtttcgataacttcgaagcggcgcggcagatgacggcggcgattatcgcccgcggtcaccgccacgttgcttatctcggcgcgcgtctggatgaacgtactatcatcaaacagaaggggtacgagcaggcgatgctcgatgccggcatgacgccctacagcgtgatggtggagcaatcctcttcctactcgtcagggattgagctgatgcgtcaggcgcgtcgcgaatatccgcagctcgacggcatcttctgcaccaacgatgacctcgcggtcggtgcggcgttcgagtgccagcgtctggggctgaaaatcccggacgacatggcgatagccggtttccacggtcacgatatcggtcaggtgatggagccgcgtctcgccagcgtactgaccccgcgtgagcgcatggggcgcatcggcgccgagcgtctgctggcgcgcatccgcggtgagacgattacccctaagatgttagatttaggtttcacattgtcaccgggtggatctatttaa

SEQ ID NO: 107459 - DNA, 696 bp, Enterobacter aerogenes
atgatctacttacgcaaagctaacgaacgtggccacgctaaccatggctggctggattcctggcatactttctctttcgccaactactacgacccgaactttatgggtttctccgcgctgcgcgtgattaacgatgacgtaatcgacgccggccaggggtttggcacccacccgcacaaagacatggaaatcctgacttatgtgctggaaggcgcggttgagcaccaggacagcatgggtaacaaagagcaggttccggctggcgagttccagatcatgagcgcgggtaccggcgtgcgtcactctgagtacaacccgagcagcaccgaccgcctgcgtttgtatcagatctggattattccagaagaaaccggcattacgccgcgctacgagcagcgccgctttgatgccgcgcagggcaaacagctggtgctgtcgccagatgcgcgcgaagggtcgctgaaagtgcatcaggatatggaactgtatcgctgggcgctgctgaaagatgagcagtcggttcaccagattgccgcggaacgtcgcgtgtggatccaggtagtgaaaggcgaagtgacgattaacggcaccaaagccaccaccagcgatggtctggcgatttggggcgagcaggcgatttcggttcacgccgacagcgatagcgaaattttgctgttcgatctgccgccggtttga

SEQ ID NO: 107460 - DNA, 1038 bp, Enterobacter aerogenes
atgattctgcactgcgcatttattggcttcggtaaaagcacgacccgctatcaccttccttacgtcctgcatcgcaaagaccgctggcacgtcgcgcatatttatcgccgcagcgccaggccggaagaacaggcgccggcgtattcccatatccacttcaccagcgacctcgatgaagtgctgaacgacccgcaggtcaaactggtggtggtctgcacccatgccgatagccacttcgaatatgcgaagcgggcgctggaagcggggaaaaacgtactggtcgaaaagccctttaccccgacgctggcagaggcgaaagccctgtttacgctggcgaaaagcaaagggttgacggtgacgccttatcagaaccgccgcttcgactcctgtttcctgaccaccaaaaaggtgattgaaagcggtaagctcggcgaactggtggaaattgaaagtcattttgataactaccgaccggtggcggaaaccatccaggggggaccacaaagcggcgatttctatggcctcggggtgcataccatggaccagatcatttcgctgtttggtcgcccggatcatgtttcctacgatctgcgctcactacgtaataaagccaatcccgatgacacgtttgaagctcaactgttttatggcgacctgaaagcgatcgtcaaaaccagccatctggtgcagattgactacccgaaatttatcgttcatggccataaaggctcgtttgtgaaatacggcattgaccagcaggagaccagcctgaaggccaacattatgccgggcgacgcggggttcggcgctgatgacagcgtagggcaactggtctacatcaacgaggcgggcgtggaggtacgtgaagaggtgccgctggaaaccggcgactacggacgagtgtatgacgcgctgtatgacaccctcgttaacggccagccgaattacgtcaaggaatctgaagttctcaccaatatggagattctgcagcgcggctttgaacaaccttctccggctactattaccctcgcaaaataa

SEQ ID NO: 107461 - DNA, 648 bp, Enterobacter aerogenes
atggaaaaaaagtacctcgccataaactgtgccatgtgtttctggcttctcgctttgatcgcctggtttagcgatgagattgcgctagcgcgccttgcggccgcctgtaccctcttcgcattccttattcatacccaaagggaaaaaattaacgctatgtttatgaagaaaaataaaaccgaagcgcaggctactgaagtcgctgcgccaaccgtggcgacaacagagccagaaacagcaagcgtcaaaaaacaggaaaccacggtgatcgccagcggcgtgcatttcgtcggcaacatcgtcgcctacggccatgtctatatccacggccaggtcaccggcaacattgaggccaaagaacatctgattaaggtgatgcgcgaaggtcaggttgagggcaatatccactgccgcgagctgatcgtcgacggcaaagtacacggccagtgccgtggcgatagcatcgctattgaggaacatggcaacatcgacggcaccctcgcctatcgcgcgctggcgattaaaaagggcggcctgtttaccggcagcgcggaggtgttggccgcggcggaaagcaaaaacaaaagcaatatcgtcggcctgatcccggaagaaggaacgaaacccgtaaaatcgcaacacgcctga

SEQ ID NO: 107462 - DNA, 489 bp, Enterobacter aerogenes
atgagtgatatcgtgatacgccatgctgaaccgaaagatgttgacgcgattcgtcaaattcacgcccagccggaggtgtatcacaacacgctacaggtccctcatccatccgagcatatgtggcgggagcggctaaccgatacgcctggcgtgaagcaactggtggcctgtatcgatgggcaagtcgtcggccatttatgcattgccgtcatccaacgtccccgccgtagtcacgttgccgattttggtatcagcgtggattcgcgctggcacaaccgcggcgtcgccagcgcgctgatgcgcaccatgattgatatgtgcgacaactggctgcgcgtcgagcgcattgagctgacggtgttcgccgataacgccccggcagtcgcggtgtataagaagtacggctttgagatcgaaggcaccgccaggcgttacgcattgcgcaacggcgagtatgtggatgcgtattatatggcgagaatgaagtag

SEQ ID NO: 107463 - DNA, 1746 bp, Enterobacter aerogenes
atgataaaaacaacaatatggcgtcaggtggtcatcgcagcgttactggcggggggcagctttaccgtcgccgccaatccgccgcccccgccgccggtctcgtatggcgttgaggaagatgtgtttcacccggtgcgcgcccagcaggggatggtggcctcggtggatgcgctggcgacccgcgtcggcgtggatattttgcgtcagggcggcaacgccgtcgatgcagcggtggctgtcggctacgcgctggcggtcacgcatccgcaggccggtaatatcggcggcggcgggtttatgatgctgcgtactaaagacggtaaaaccacggcgatcgatttccgcgagatggccccggaacaggccacccgcgatatgttcctcgatgaacatggcaatccggacagtaaaaaatcgctgacttcacatctcgcttccggtacgccaggcagcgtcgcgggcttctctctcgcgctggaaaaatacggcaccatgccgctgaataaggtgatccgcccggcgattaagctggcggaagagggctttatcgttaacgatgcgctggctgacgatttaaaaacctatggcagcgaagtgatcccgcagcatgaaaacagcaaagcgattttctggaagagcggcgagccgctgaaaaaaggcgaccggctggtgcaaaagaatctggggaaaagcctggagctgattgccgagcacggcccggacgccttctataaaggggctatcgccgaccagattgccggtgagatgaaaaaacacggcgggcttatcaccaaagccgacctcgccaactacagggccgtggagcgtatgccaattagcggtgaatatcgcggctatgaggtttactccatgccgccgccgtcctctggcgggatccacatcgtgcagatcctcaatatcctcgaaaacttcgatatgcagaaatatggctttggcagcgccgacgccatgcaggtgatggcggaggcggagaaacatgcctatgccgaccgttcggaatatctcggtgatcctgacttcgtcaaagtgccgtggcaggcgctgaccagcaaagcttacgctaaagcgatagccgccgagattgatgtgaataaggcgaagccttccagccagatccgtccgggcaagctggcgccgtatgaaagcaaccaaaccacccacttctcggtggtcgataaagacggcaatgcggtggcggtgacttatacgttgaataccacctttggtaccggcatcgtggccggcgactccggcattatactcaacaaccagatggatgatttctcggcgaaacccggcgtgcctaacgtctatgggctggtgggcggcgacgccaacgcggtagggccgaaaaagcgtccgctgtcgtcgatgtcgccaactatcgtggtaaaagacgggaagacttggctggtgaccggtagcccgggcggtagccgaattatcaccaccgtgctgcaaatggtggtcaacaccattgattttgggatgaacgtcgcggaggccaccaatgcgccgcgcttccaccaccagtggctgccggatgaactgcgggtggagaaaggttttagcccggataccgtgaaattgctggaagcgaaagggcagaaagtcgcgctgaaagaggcgatgggcagtacccagagcattatggtggggccggatggtacgctgtatggcgcttccgatccgcgttcacccggtgatttgaccgcggggtattga

SEQ ID NO: 107464 - DNA, 321 bp, Enterobacter aerogenes
atgaaagcgattttattcctggcggcgctgatgccgctcggcgttttagcacagccgattaacatcgataacaaccctaaccagccgggttatgtggtgcccagccagcagcgaatgcaaaatgagatgaagatgcagcaacagcagcagcaaagcatgctgaagcagaatctgaataatcagacccgttcgcagcagcagcatttgcagaaccagttgcaaaccaatcagcagcgcgcggcgcagggcggcaatctcaattcgcagccgcaggtactgccgaacaacaacggcgggatgctgcggcagactaacccgtaa

SEQ ID NO: 107465 - DNA, 741 bp, Enterobacter aerogenes
atgagtaactggccttatccccacatcgtcgcccatcgcggcggcggtaaactggcgccggagaacaccctggcggctatcgacgtcggcgcccgctacgggcacacgatgattgaatttgacgccaagctgtcgaaggacgggcagatctttctgctgcacgacgataatctcgaacgcaccagcaacggctggggcgtggcgggcgagctgtcgtgggacgatctgctgaaggtcgatgccggcagctggtacagccgtgaatttaagggcgaaccgctgccactgctctcccaggtggcggaacgctgccgccgtcacggcatgatggccaatatcgaaattaagccgaccaccgggcaggggccgcagaccggcaaagtggtggcgctggccgcgcgcgatctgtgggccgatatgaccgcgccgctactctcatcctttgaaatcgacgcgctggaagcggcgcaggaagccgcgcccgagctgccgcgcgggctgctgctggatgagtggcgcgatgactggcgcgaattgaccgcccggctgggctgcgtatccattcatctcaaccacaagctgctggatgcggctcgggtagcgagcctgaaacaggccggcctgcatattctggtgtatacggtcaataaaccccagcgcgccgccgaactgctgcgctggggcgtagattgcatctgcaccgatgctattgacgtcatcgggccgaatttccagccttaa

SEQ ID NO: 107466 - DNA, 1071 bp, Enterobacter aerogenes
atggctggtttaaaactacaagcagtaagcaaaagctgggatggcaaaacccaggtaattcaaccgctaacgctggacgtggcggacggggagtttatcgtcatggtcggcccgtcgggctgcgggaaatcaacgctgctgcggatggttgccggacttgaacgggtgaccagcggcgatatctggattgatcgtaaacgggtgaccgagatggagccgaaggatcgcggtatcgcgatggtgttccagaactatgcgctttatccacatatgagcgtggaagagaacatggcgtggggtctgaagattcgcggcatgggtaagggattgatcgccgagcgcgtacaggaggcggcgcgtattcttgagctggatggcctgctcaagcgccgcccgcgggaactgtccggcggtcagtgccagcgcgtggcgatgggccgcgctatcgtgcgtgacccggcggtattcctgttcgacgaaccgttgtcaaacctcgacgccaagctgcgcgtgcagatgcgtctggaactgcaacagctgcatcggcgcttgaaaacgacttcgctgtatgtcacccacgatcaggtcgaagcgatgacccttgcccagcgggtgatggtaatgaataaggggattgccgagcagatcggcacgccggtcgaagtgtacgaaaagcccgccagccgctttgtggcgagctttatcggcagcccggccatgaacctgctggaggggcgggtgagcgatgatggcggccgctttgagctggaaggcggcatacagctaccgatgaatcacgagcatcggcgttacgccgggcgtaaaatgactctcggtatccgcccggagcactttattttaagctcgcaggcgcaaggcggcattccgctgctgatggatacgctggaaattttaggtgccgataacctcgcccacgggcgctggggcgagcagaagctggtggtcagattgccgcatcagcagcgcccggcgggcggcagcatgctatggctgcatctgcctttggaacatctgcacctctttgatggtgaaacaggacaacgcgcatga

SEQ ID NO: 107467 - DNA, 846 bp, Enterobacter aerogenes
atgattgagaaccgtcgcgggctgacgattttcagccacaccatgctcattctgggtattgccgtcattttattcccgctgtatgtcgccttcgtggcggcgacgctggataacaaatcggtgtttgaaacgccgatgacgctgatccccggcggacatctgctggagaacatgaagaccatctgggtgaacggcgtcggcgtcaacagcgcgccgttctggctgatgatgctcaacagcttcatcatggcgttcgccattacggtaggcaaaatcgtggtgtcgatgctttcggctttcgccatcgtctggttccgctttccgctgcgtaacctgttcttctggatgatcttcatcactctgatgctgccggtcgaggtgcgtattttcccgacggtggaagtgatcgccaacctcaaaatgctcgacagttatgccgggttaacgctgccgttgatggcttcggctaccgccaccttcctgttccgccagttctttatgactctgccggacgagctgattgaagcggcgcgtatcgatggcgcttcgccgatgcgcttcttccgcgacatcgtgttgccgctgtcgaaaaccaacctcgccgcgctgttcgtcatcacctttatctacggctggaaccagtatctatggccgttgctgattattcaggatgtgaatcttggcaccgccgtcgccggtattaaaggcatgatcgccaccggtgaaggtactacccagtggaatcaggtgatggcggcgatgctgttgaccctgatcccgccggtcgtcatcgttttagccatgcagcgcgcgtttgtgcgcggcctggtcgatagtgagaaataa

SEQ ID NO: 107468 - DNA, 888 bp, Enterobacter aerogenes
atgtcatcatcccgtccggtattccgctcgcgctggctgccctatgtgctggtcgcgccgcagctgattatcacgctgattttctttatctggcccgcgggcgaagcgctgtggtactcgctgcagagcgtcgatccgtttggcctttccagccagtttgtcggcctggataacttcgtcacgctattccacgacccgtactatctggactctttctggacgaccataaaattcagtaccctggtaaccgtcagcggcctgcttatttcgctgttttttgccgcgctggtcgactatgtggtgcgcggcagccgcttttatcaaacgctgatgctgctgccgtatgccgtggctcccgccgtcgcggcggtgctgtggatcttcctcttcaatcccggacgcgggctgatcactcatttcctcggcgaattgggttacgactggaaccacgcgcagaacagcggccaggcgatgtttctggtggtcttcgcctcggtctggaagcagataagctacaacttcctgttctttttcgccgcgctgcagtcgatcccgcgttcgctggttgaggccgccgccatcgacggcgccgggccgattcgtcgcttcttcaagctggcgctgccgctgattgcgccggtgagtttcttcctgctggtggtcaacctggtttacgccttcttcgataccttcccggtgatcgatgccgccaccgccggcggcccggtgcaggcgaccaccaccctaatctacaaaatttatcgcgaaggtttcgccgggctcgatctttccgcttccgccgcgcagtcggtggtgctgatgttcctcgtcattatcctgacggtggtgcagttccgttacgttgaaagtaaggtgcgttaccaatga

SEQ ID NO: 107469 - DNA, 1317 bp, Enterobacter aerogenes
atgatatcgttacgacatacagctttaggactggcgctgagcctggcatttgctggccaggcactggcagtaaccaccatccctttctggcactcgatggaaggggaactgggtaaagaagttgattctctggcgcaacgtttcaacgcggccaatcctgattacaaaattgttccgatgtacaaaggcaactacgagcagagcctgagcgccggtatcgccgccttccgtaccggtaacgcgccggcgattctgcaggtgtatgaagtcggcaccgccaccatgatggcgtcaaaagctattaagccggtgtaccaggtctttagcgatgcgggtattaagttcgatgaatcgcagttcgtaccgacggtgtccggttattacaccgattcaaaaaccggccatctgctctcccagccgtttaacagctccacgccggtgctgtactacaacaaagacgccttcaagaaagcgggtctggaccctgagcagccgccgaaaacctggcaggatttggcggcttacaccgccaaactgaaagcggccggaatgaagtgcggctacgccagcggttggcagggctggatccagattgagaacttcagcgcctggaacggcctgccggtcgccacgaaaaataacggctttgacggtaccgacgcggttcttgagttcaacaagccggagcaggtgaagcatatcgcgctgctcgaagagatgaacaagaaaggcgatttcagctatttcgggcgtaaggatgaatccaccgagaagttctataacggcgactgcgcgatgactaccgcctcatccggctcgctggcggatattcgtcagtacgcgaaattcaactacggcgtcggcatgatgccttacgacgctgatgtgaaaggcgcgccgcagaacgctatcatcggcggggccagcctgtgggtgatgcagggcaaggacaaagagacctacaccggcgtggcgaagttcctcgacttcctgaccaaaccggaaaacgccgccgagtggcaccagaaaaccggctatctgccgattaccaccgcggcctacgatctgacgcgccagcagggcttctatgataagaacccaggcgctgatatcgccactcgccagatgctgaacaagccgccgttgccgttcaccaaaggcctgcgcctgggcaacatgccgcaaattcgcaccatcgttgatgaagagctggagagcgtgtggaccggcaagaaaactccgcaacaggcgctggactccgccgttcagcgcgggaatcaactgctgcgccgtttcgagcaagcaaccaaatcgtaa

SEQ ID NO: 107470 - DNA, 732 bp, Enterobacter aerogenes
atggtggtgacgcataagatggaaaaagcgatgttaacttttgacaatgtcagcgcccactacggcaagattcaggcgctgcacaacgtcagcctgcatatcaaacagggtgagatagtcacgcttatcggcgccaacggcgcagggaaaaccaccctacttggtacgctgtgcggcgatccgcgggcttccagcgggcgcattgtctttgacggcaaggatattaccgactggcagacggcgaaaatcatgcgtgaagcggtggcgatcgtgccggaagggcggcgcgtcttttcgcgcatgacggtggaagagaacctggcgatgggcggtttttttgccgaccgcgaccagttccatacccgcatccaatgggtgtatgagctgttcccgcgtctgcatgaacgccgtattcagcgcgccggcaccatgtccggcggcgagcagcagatgctggcgatcggtcgcgctctgatgagccagccgcgcctgctgctgcttgatgagccctcattggggctggcgccgattatcattcagcagattttcgataccatcgaacagctgcgtgagcaggggatgacgatcttcctggttgagcagaacgccaaccaggcgctgaagctggccgatcgcggctacgtactggaaaacggtcacgtggtgctggaggataccggcgacgcgctgttggccaacgaggcggtgcgcagcgcctatctcggcggttag

SEQ ID NO: 107471 - DNA, 768 bp, Enterobacter aerogenes
atgagtcagccaatattatccgtgaacggcctgatgatgcgttttggcggcctgctggcggtcaataacgtctcccttgagctgcgcccgcaggagatcgtttccttaattggcccaaacggcgcgggaaaaaccaccgtttttaactgcctgaccggtttctataaacctaccggcggcaccattatgctgcgcgaccagcatctggaagggctgccggggcagcagattgcacggatgggggtggtacgaaccttccagcacgtgcgtctgttccgcgaaatgacggtgattgaaaatctgctggtggcgcagcatcaacagctgaaaaccggcgtcttctccggtctgctgaaaacgccggccttccgtcgcgcgcagagcgaagcgctggatcgggccgccacctggcttgagcgtatcggcctgctggagcatgccaaccgtcaggccagcaacctggcctacggcgaccagcgccggctggagattgcccgctgtatggtgacgcagccggagatcctgatgcttgatgaaccggcggcggggcttaacccgaaagagaccaaagagctggatgagcttatcgccgagctgcgtagccatcacaacaccaccatcctgcttatcgaacatgatatgaagctggtgatgggcatttccgatcgcatctacgtcgtgaaccaggggacgccgctggccaacgggacgccggaagagattcgtaataacccggacgtgatccgcgcctatttaggtgaagcataa

SEQ ID NO: 107472 - DNA, 1278 bp, Enterobacter aerogenes
atgaaaccgatgcaaattgcgatggcgctgctttccgccgcgatgttctttgttctggcgggcgtctttatgggcgtgcagctggagctgaatggcaccaaactggtggtcgataccgccgccgatattcgttggcagtggattttcatcggcaccgcggtggtctttttcttccaactgctgcgcccgctgttccagaaagcggttaagaacgtttccgggccgaaatttattatgccggcgattgacgggtcgacggtcaagcagaagctgtttctgatagccctgctggtcattgccgtggcctggccgtttatggtgtcgcgcggtacggtggatatcgccaccttgacgatgatttatatcatccttggtctcggactgaacgtggtggttgggctttccggcctgctggtattgggctacggcgggttttacgccatcggcgcctatacctttgcgctgcttaaccactattacggtctcggcttctggacctgcctgccgctggccggcctggtttccgcggcggccggcttcctgctgggcttcccggtgctgcgtctgcgcggcgattatctggcgattgtgaccttaggcttcggcgagatcgtgcgtattctgctgctcaacaataccgagatcaccggcggaccgaacggtatcagccagatcccgaaaccgactttctttggtcttgaatttagccgtaccgcccgtgaaggcggctgggataccttcagcaacttcttcggtctgaagtacgatcccagcgatagggtgattttcctctatctggtagcgttgctgctggtggtgctcagcctgttcgttattaaccgtctgctgcggatgccgctcgggcgggcgtgggaagcgctgcgtgaagatgaaatcgcctgtcgttcgctgggtctgagcccgacgcgcatcaagctgaccgcctttactatcagcgccgcgtttgccgggtttgccggcacgctgttcgccgcgcgccagggcttcgtgagcccggagtcctttaccttcgccgagtcggcctttgtgctggcgatcgtggtgctgggtggtatgggctcgcagtttgcagtgatcctggcggctattctgctggtggtatcgcgcgagctgatgcgtgatttcaacgaatacagcatgttaatgctcggtgggttgatggtgctgatgatgatctggcgcccgcaggggctgctgccgatgacgcgcccgcagctgaagctgaaaaacggtcaggcgaaaggagagcaggcatga

SEQ ID NO: 107473 - DNA, 927 bp, Enterobacter aerogenes
atgtccgagcagtttctctattttctgcagcagatgtttaacggcgtcacgctgggcagtacctatgcgctgatcgctatcggctatacgatggtgtacggcattatcggcatgattaacttcgcccacggcgaggtctacatgatcggcagctacgtctcgttcatgattatcgccgccctgatgatgctggggatcgataccggctggctgctggtcgccgcaggctttattggcgccatcattatcgccagcgcctacggctggagtatcgagcgcgtggcctatcggccagtgcgcagctccaaacgtctgatcgcgctgatttccgccatcgggatgtcgatattcctgcagaactttgtcagcctgaccgaaggctcgcgcgatgtcgcgctgccgagtctctttaacggccagtggattgtcggccacagcgataatttctccgccactatcactaccatgcagctggtcatctgggtcgttacctttatcgccatgctggcgctgacgctgtttattcgctattcgcgaatgggccgcgcctgccgcgcctgtgcggaagatctgaaaatggcgagcctgctgggcatcaataccgaccgcgttattgcgctgaccttcgtcattggcgcagcgatggcggcggtcgcgggcgtcctgctggggcagttctacggcgtaattaacccctacatcggctttatggccgggatgaaggcctttaccgcagctgtgctcggcggtatcggcagtatccctggcgcgatgatcggcggcctgattctgggtatcgccgaggcgctctcttctgcctatctcagcaccgaatataaggacgtcgtctccttcgcgctgctgattctggtgctgttagtaatgccgaccggcattctgggccgcccggaggtagaaaaagtatga

SEQ ID NO: 107474 - DNA, 1110 bp, Enterobacter aerogenes
atgaaaaggaacgcgaaaacgatcatcgcgggagtcgttgcattagcgatttcccacgcggcgttggcaaaggatattaaagtcgccgtcgtcggcgcgatgtctggcccggttgcccagtggggcgatatggaattcaacggcgcgcgccaggcgattaaagacattaacgccagcggcggcattaaaggcgacaaactggttggcgtcgaatatgacgacgcctgcgatccgaaacaagcggtcgcggtcgccaacaaaatcgtcaatgatggcattcagtacgttattggccacctctgttcctcctccacccagccggcgtctgacatctatgaagatgaaggcatcctgatgatctcccccggggcgaccaacccggaactcacccagcgtggctaccagtacattatgcgtaccgcaggtcttgactcttcccaggggccgaccgccgcgaaatatatcctcgaacaggtgaagccgcagcgtattgcgattattcatgacaagcagcagtacggcgaagggctggcgcgttccgtgcaggacaacctgaagaaagccggcgccaatatcgtcttctttgatggcatcaccgccggcgagaaagacttctccgcgctgctggcgcgcctgaagaaagagaatatcgacttcgtctactacggcggctactacccggaaatggggcagatgctgcgccaggcgcgctccgtcggcctgaaaacgcagtttatggggccggaaggcgtcggtaacgcctcgctgtccaacatcgccggcgcggcggcggaaggtatgctggtgacgatgccaaaacgctatgaccaggatccgtccaacagcgctattgttgatgcgctgaaagcggataaaaaagatccgagtggtccatacgtctggatcacctatgccgccgttcagtcgctggcgcaagcgatggacagaaccggcagccagcagccgctggatttaattaaagatttgaaagctcacggcgcgaagaccgtgattgggccgctgaattgggatgaaaaaggcgatctgaagggatttgaatttggtgtcttccagtggcacgcggatggttcatccaccgtcgctaagtaa

SEQ ID NO: 107475 - DNA, 384 bp, Enterobacter aerogenes
atgaagctcaccattatccgtttacagcacttcagcgatcaggatcgcattgatttaggcaaaatctggccgtcgcaggatcctgcggcgctgatgctggatgaaaaccatcgtatttacgccgcccgctttaacgaacgtctgctcggcgccgtacgcgttaccctgcgcggcgtcgaaggcgagctcagcgatctgtgcgtgcgtgaagtcacccgccgccgcggcgtggggcaatatttagtggaagagacgttaagcgataacccgaatatcaatagctggcgcgttgccgataggggggtggaagactgcggcgtgatggcggcgtttatgcaggcgctcggtttcagcgcccagcagaatggttgggagaagcattaa

SEQ ID NO: 107476 - DNA, 1098 bp, Enterobacter aerogenes
atgaagggtaaagcgttactggcaggatgtattgctttaattatgagcggttcagcgctggcggaagacattaaaattgccgtcgtgggagcgatgtccggcccggttgcccagtatggcgaccaggaatttaccggcgctgagcaggcggtggccgatatcaacgccaagggcggtatcaagggcaacaaactgcagatcgtaaaatatgacgatgcctgtgacccgaaacaagcggtggcggtcgcgaacaaagtagtgaatgacggcattaaatacgttatcggtcacctgtgttcctcatccacccagccagcgtctgacatctatgaagacgaaggcatcctgatgattaccccggcggcaaccgcaccggagctgacggcgcgcggctataagctgattctgcgcaccaccggtctcgactccgatcagggcccgacggcggcgaaatatattctcggcacggtgaagccgcagcgcatcgctgtggttcatgacaaacagcaatatggcgaagggctggcgcgctcagttcaggaaaacctgaagaaaggcggcgccaatgtggtgttctttgacgggatcaccgccggtgagaaagatttctctaccctcgtggcgcgcctgaagaaagaaaatatcgacttcgtctactacggcggttatcacccggaaatggggcagatcctgcgccaggcgcgcgcagccggtctgaaaacccagtttatgggcccggaaggcgtggctaacgtttccctgtctaatatcgccggcgagtcggcagaaggcctgctggtcaccaaaccgaagaactacgatcaggttccggcgaacaaaccaattgtggatgctatcaaagcgaagaaacaggatccgagcggcgccttcgtgtggaccacctatgcggcactgcagtcgctgcaggcggggttaaatcagtctgaagatccggcggaaatcgcgaaatacctgaaaggggcgaaggtggataccgtcatggggccgctgtcgtgggatgagaaaggcgacctgaaagggttcgagttcggcgtgtttacctggcatgctaacggtacggcaaccgacgccaaataa

SEQ ID NO: 107477 - DNA, 855 bp, Enterobacter aerogenes
atgaccaaagaaatgcaaactttagctttagcccccgttggtaacctggaatcgtacatccgggctgctaacacttggccgatgttatcggctgatgaagagcgggagcttgctgaaaagctgcattaccagggcgatctggaagcagcgaaaaagctgattctgtctcacctgcgctttgttgttcatattgctcgtaactactcgggctatggcctgccgcaggcggacctgattcaggaaggcaacatcggtctgatgaaagccgtacgtcgtttcaacccggaagtgggtgtgcgactggtttccttcgccgtgcactggattaaagcggaaatccacgaatacgtgctgcgtaactggcgtatcgttaaagtcgcaaccaccaaagcgcagcgtaagctgttcttcaacctgcgtaaaaccaagcagcgtctgggctggtttaaccaggacgaagtagagatggttgcccgcgagctgggtgtgtcgagcaaagacgtacgtgagatggaatcgcgtatggcagcgcaggacatgacctttgatatgtcgtccgatgacgaatccgatagccagccgatggcgccggtgctctatctgcaggacaaaacgtctaactttgccgacggcatcgaagacgataactgggaagagcaggctgctaataaactgactgatgcgatgcagggcctggacgagcgtagccaggacatcatccgcgctcgctggctggacgaggacaacaagtccacgctgcaggagctggcggatcgttatggcgtctcagctgaacgtgttcgtcagctggaaaagaacgcgatgaaaaaactgcgtgccgctatcgaagcttaa

SEQ ID NO: 107478 - DNA, 1056 bp, Enterobacter aerogenes
gtgaataagcgcgacgcagtgaaccagattcgccagttcggcagcaagttcgatcgtctccgtaacgccaccggcggcggcaacggcgggcgcaatgcgccaaaacggccaaaagcggcgccgaacccggcatcgcggaagagtaacgtctttaacgagcaggtgcgctacgcctggcacggcgcgttacaggatttaaaaagcacgccgctggcgacctttctcaccattatggtgatcgctatttcgctgacgctgccgagcgtctgctatatggtctacaaaaacgtcaacagcgcggcgtcgcagtattatccgtcgccgcagatcaccgtctatctggaaaaaacgctggatgacgatgcggcggcgcgggtggttggccaactgcaggcggagcagggcgttgagaaggtaaattatctgtcgcgcgatgaggcgctgggcgagttccgcaactggtccgggtttggcggcgcgctggatatgctggaagagaacccgttgccggcggtagcgattgtggtgccgaagctcgatttccagaataccgattcgcttaacaccctgcgcgatcgcgtctcccgtattcagggggtcgacgaagtgcgcatggatgatagctggtttgcgcgcctggcgtcgctgaccggactggtcggccgggtgtcggcgatgatcggcgtgctgatgatcgccgcggtgttcctggtgattggcaacagcgtacgtctgagcatcttcgcccgtcgcgataccattaacgtccagaagctgatcggtgctaccgacggtttcatcctgcgtccgttcctctatggcggcgcgctgttgggcttcgccggggcgtttttgtcgctgatcctgtcggagattctggtgatgcgcctctcctcggcggtgaccgaagtggcgaaagtgtttggtactaaatttgaactcagcggcttaggcttcgatgagtgtctgctgatgctaatcgtctgctcgatgattggctgggtcgcggcctggctggcgacggtgcaacatttacgtcactttacccccgactaa

SEQ ID NO: 107479 - DNA, 669 bp, Enterobacter aerogenes
atgattcgctttgaacaagtcagcaaagcctatctcggtgggagacaagcgctgcagggggtgacgttccacctgcagcagggcgagatggcgttcctgaccggccattccggcgcggggaaaagtaccctgctgaagcttatctgtggtatcgaacggccgagcgccgggaaaattctgttcagcggccatgatatcagccgcctgaagagccgcgaggtgccgttcctgcgccgccaaatcggcatgattttccaggaccaccacctgctgatggatcgcaccgtgttcgataatgtggcgatcccgctgattatcgccggcgccagcggcgatgatattcgccgccgcgtatccgcagcgctggataaagtcgggctgctggacaaagcgaaaaatttccccatccaactctccggcggtgagcaacagcgtgtgggcattgcccgcgcggtggtcaacaagccggcggtgctgctggcggatgaaccgaccggtaacctcgatgaggcgctctcggaagggattttacgtctgtttgaagagtttaaccgcgtaggggtgacggtactgatggcgacgcacgacctggggcttatttccagccgtccgtaccgtgtcctgacgctaagcgacggtcatatgcatggaggccatcggggtgaataa

SEQ ID NO: 107480 - DNA, 1494 bp, Enterobacter aerogenes
atggcaaaagagaaaaaacgtggcttcttttcctggctgggctttgggcaaaaagaacaggctcaggaaagcgaaacagaacaaaaagtagaagaacaacaagaggttgtggaacagactccggcggcggaaatgcctgcggaaaccgtacccgcggcggaaacggtaaaagaagacccggaggcctttgccgccgaggtcgtagaggttaccgaacaagttgttgaaagcgaactgtcgcatccggtggcggaagagagcgcggcgtcggaaatcgtagttgaagaagcgccggttgttcctgcggtagaagaaaaagtcgctgaaccgctggttgaagaggtgatagccgagccggttatcgccgaagcggtcgctgaacagacgccggaagaggttatcgtcgcggagcctgaggtcatcgaagatgagctcctcccggaagagcccgaagccgaactaagcgatgaagagctcgaagcacaagctctggcggtgcaagacgtagaagaggcgccggaagaagaagcggaaactcaggaagcggcgccgcaggagcaggaaaaaccgaccaaagaaggtttcttcgcccgcttaaaacgcagcctggtgaaaaccaaacagaatctgggttccggatttatcagcctgttccgcggtaaaaaaatcgacgacgatctgtttgaagagctggaagaacagctgctgattgccgacgttggggtggaaaccacgcgtaagattattaccaatcttaccgagggggccagccgtaagcagctgcgtgatgccgaggcgttatacggtctgctgaaagaagagatgagcgagatcctgacgaaagttgaggaaccgctgaatgttgaagggaaaacgccatttgttattctgatggtcggcgttaacggcgtgggtaaaaccaccaccatcggtaagctggcgcgtcagtttgagcagcagggtaaatccgtgatgctggcggcgggggataccttccgcgcggcggcggtggaacagttacaggtctggggccagcgtaacgagatcccggtgattgcccagcataccggcgctgattcagcctcggttatttttgacgccattcaggcggcgaaagcgcgcaatattgatgtgctgattgccgataccgcgggtcgtctgcagaataaatcgcatctgatggaagaactgaagaagattgtccgcgtaatgaagaaactggatgtcgacgcgccgcatgaagtcatgctgaccatcgacgccagcaccgggcagaacgcgataagccaggccaaactgttccacgaagccgtggggctgaccggcattacgttgactaagcttgacggaaccgcgaagggcggggttatcttctcagtggctgaccagttcagtattccgattcgctatattggcgtcggcgaacgtattgaagatctgcgtccgtttaatgcgggcgactttattgaggcactttttgcccgagaggattaa

SEQ ID NO: 107481 - DNA, 597 bp, Enterobacter aerogenes
atgaagaaaccaaatcacgcaggcagcggccagatccgcattatcggcggacagtggcggggccgtaaattaccggtgccggagagcccgggtctgcgcccgaccaccgaccgggttcgggaaacgctatttaactggctggcgccgtcgatgatcgacgcccactgccttgactgcttcgccggcagcggcgcgctggggctggaagcgctgtcacgctatgccgccagcaccacgctactggagatggagcgcagcgtcgcgcagcagctacaaaaaaatctcgcgacgctgaaagccaacaacggcaaggtggtcaacaccaacacgctggcgtttctcagccagccgggtacgccgcaccatattgtcttcgtcgatcctcccttccgcaaagggctgctggaagaaacgctcagcctgctggaaaaaaaccactggctcgcagatgaagcgctgatttatgtcgagagcgaagtagaaaacggactaccgccggttccggcaaactggcagctgtatcgcgaaaaagtcgccggacaggtcgcctaccgcctgtatcaacgcgaggcacaaggagaaaaccatgctgattaa

SEQ ID NO: 107482 - DNA, 279 bp, Enterobacter aerogenes
atgctgattaatttaggccgcctgctgatgctatgcgtttgggcgtttttgctgttgaacctgtttcaacctttcccaaaaccgctgaatatcttcgttaacgtggcgctgatttttatgattctgatgcatggcctgcagctgacgctgttgaaagcgacgcagacgaaagatgcgccgccgctgagccgctttgagcagattcgtattttcatcttcggcgtatttgaactggtggcctggcagaaaaagctgaaggccacgctgaagaagaagtaa

SEQ ID NO: 107483 - DNA, 372 bp, Enterobacter aerogenes
atgggtacgcaaatgagtaaagttccgctattttttgtgctggtggtcgcggtgattgtggtggcggcctcgtttcgctacgtgcagcagcgccgggagaaaatggataacgacgccgcgccgctgctgcagaagcgggtggtggtcagcaataagcgggaaaaggtgattaacgatcgccgctcgcgccagcagacggtgacgccagccggcagcgagatgcgttatgaagcgagcttccgcccggaaaatggcggactggaagtggtgttccgccttgatgcgccgcaataccacgcgctgagcgttggcgaccggggaatgctgagctataagggctcaaaattcgtcgagttcgtcgccgataactga

SEQ ID NO: 107484 - DNA, 627 bp, Enterobacter aerogenes
atgctttggtcgtttattgctgtctgtttctccgcatggctttacgtcgatgcgtcctatcgtgggccggcctggcagcgctgggtctttaaaccggtcaccctgcttctgttgctgctgttagcctggcaggcgccaatgttcaacgctattagctacctggtgctggcgggcctgtgcgcttcgctgctcggcgatgccttaaccctgctgccgcgccagcgggtgatgtacgcggttggcgcattcttcctctctcatctgctgtatacgatctggttcgccagccagatgacgctttcgttcttctggccgctgccgctggtactgctggtgctcggcgcgctgctgctggcgattatctggacccgactggaagagatgcgcatgccggtgctgacctttatcggtatgactctggtgatggtgtggctggcgggcgaactgtggttcgtgcggccgaccgataccgcgctctccggcttccttggcgccgcttcgctgctgttgggtaacgccgtctggctgattagccactatcgccgtcgcttccgcgccgataacgccatttccgcggccttctactttgccgggcacttcctgatcgttcgcgcactgtatctgtaa

SEQ ID NO: 107485 - DNA, 2208 bp, Enterobacter aerogenes
atgtcgacaccagaatctcaggacaaaaaagtcccccagttctcgtcattcaaatttaccccggcgacagcgcccgcggaaagctgctgtaccgatcataactgcgccggagaaaccgcctccgctgagcagccgctcaatggcgcccgctatagctggcaggtggaagggatggactgcgcggcctgcgcccgtaaggtggagaccgccgtgcgccaaatcgacggcgtcagccaggtacaggtgctattcgccaccgagaaactgctggtcaatgccgacagcgatatccgttcgcaggttgaaaacgcggtacgcgccgcgggttataccctgcgcgatgctgacgcgccgcaggaagagaaaccgcaaggttcatggctgcaggaaaacctggcgttattgagtctggtagtgatgatggcgctcagctgggggctggagcagtttaaccacccgttcggcaagctggcgtttgtcgccactaccctcgtcggcctgtggccggttgcccgtcaggcgctgcggttaattaaaagcggcagctggtttgccatcgaaacgctgatgagcgtcgccgccattggcgcgctgtttatcggcgccaccgccgaagcggcgatggtgctgctgctgttcctgatcggcgaacgacttgaaggctgggccgccagccgcgcgcgtcagggtgtgagcgccctgatggcgctcaaacctgataccgccgttcgcctgcgcaacggcgagcgtgagaccgtctcccagcgcgacctgcgtcctggcgacgtgattgaggtcgccgccggcgggcgtctgccggccgatggcgagctgctatcgccgtttgccagctttgacgaaagcgcgctgaccggcgaatcggtaccggtggaacgtaaagccggcgagcgcgtagccgctggcgccaccagcgtcgatcggctggtgcaattgagcgttatctccgaaccgggagacagcgccattgaccggatcctcaaactgattgaagaagccgaggagcgccgggcgccgattgagcgcttcatcgatcgcttcagccgaatctacactccggccattatggtggtcgccctgctggttgccatcgtaccgccgctattcttcgccagcgcctggctgccgtggatctataaaggcttaacgttgctgctgatcggctgtccttgcgcgctggtcatttctaccccggcggcgattacctccggcctggcggtcgccgcacggcgcggggcgctgattaaaggcggcgcggcactggaacaattgggccaggtgcgccaggtggcgttcgataaaaccggtactctgaccatcggccaaccgcaggtcacccacgttatcaccaccgccgacgttgatgaaaacggcctgctggcgctggcggcagcagttgaacaaggctccagtcatccgctggcgcaggctatcgtccgcgaagcgcagcagcgtaagctgactcttcccgctgcgcgcaaccagcgggcgctggccggttccgggatagaagccgaggtcaacggcagccgcatcttaatctgcgcggccagtaaggctgcacctgctgaacatgaggcgcagatccagcaactggagagcgccggacagacggtggtgctggtgatgcgcgatgataccttgttcggcattctggcgctgcgcgataccctgcgcgacgatgcgcgtcaggcggtggaagagctgcatcaattgggcgtacaaggggtgatcctcaccggggataacccgcgcgctgcggcggctatcgccaatgaactgggtctgcagttccgcgccggattgctgccggcggacaaagtgaacgcggtgatggcgcttaacgccaacgcgccgctggcaatggtcggcgacggtatcaacgatgccccggcgatgaaagcggcgaccatcggtattgcgatgggcagcggcaccgatgtagcgctggagaccgccgacgcggcgctgacccataaccgcctcaccggcctggcgcagatgatttctctggcgcgcgccacccatgccaatattcgccagaatatcgccatcgctttagggttgaaggggattttcctcgtcacgacccttctcggcctgacggggttgtggctggcggtgttggcagataccggcgcgacggtgctggtaacggctaacgccctgcggttattgcgtaaaaagtaa

SEQ ID NO: 107486 - DNA, 246 bp, Enterobacter aerogenes
atgagcgaacttttttccagtcctgaccatacgctggacgcccttgggctccgctgcccggagccggtgatgatggtgcgtaaaaccgtgcgtaccatgccggtgggcgagaccctgctgattattgccgacgatccggccaccacccgcgatattcccggtttttgcctctttatggagcatgaactggtggcgcaggaaaccgaagccctgccgtaccgctacctgatccgcaaaagccactga

SEQ ID NO: 107487 - DNA, 666 bp, Enterobacter aerogenes
atgaatccctttactaccgtacagcgtaagaaagcgctcgtctggctttcgctatttcatctgctggtgatcacctccagcaactatctggtccagctgccgatctccattttcggtttccataccacctggggcgcgttcagttttccctttattttcctcgccaccgatctgacggtacgcattttcggcgccccgctggcgcgacgcatcatcttcgcggtgatgatcccggcgctgattatttcctatggcatttcggcgctgttttatatgggcgagtggcagggctttgccgcgctgggcacctttaatctgttcgtcgcccgtatcgccgccgccagctttatggcttatgcgctggggcaaattctcgacgtccacgttttcaaccgcctgcgtcagaatcgtcgctggtggctggcgccgacggcgtcgaccttgttcggtaacgtcagcgataccctggccttcttcttcatcgccttctggcgcagcccggatccgtttatggccgcccactggggagaaattgccatggtcgactactgcttcaaagtgcttatcagcattgtcttcttcttgccgatgtacggcgtgctgttgaatatgctgttgaaaaaactggcggataaatctgatttgtcggcattgcagccaggttaa

SEQ ID NO: 107488 - DNA, 558 bp, Enterobacter aerogenes
atgcgcaatttggttaaatatgtcggtattggcctgctggttatgggacttgcggcctgtgataacagcgattcaaaagcgccgaccgtcggggcggcagcagagagcaataccagcggccaggcgattagcctgctggatggtaaactgagcttcactctgcccgcgggcatggccgaccagagtggtaagctcggtacccaggccaacaatatgcatgtctattctgacgccaccggccagaaagcggtgattgtgattgtcggcgacaacactaatgaagatctggcggtgctgtccaaacgtctggaagatcagcagcgcagccgcgacccgcagctgcaggttgtgtctaacaaatcgattgagattaaaggccacaccttacagcaactggacagcatcatctccgccaaaggtcagaccgcgtggtcttccgtactgctcggtaagatcgatgacaaactgctgaccctgcaggtcactctgccagcggacaaccagcagcaggcgcagaccgaagcggaaagcatcgtcaacacgctggtcattaactaa

SEQ ID NO: 107489 - DNA, 1221 bp, Enterobacter aerogenes
atgcccgaacccgtcgccgaaccggcgctcaatggactgcgccttaatctgcggattgtctccgtcgttattttcaactttgccagctatctcactatcggcctgccgttggcggttctgccgggctacgttcacgatgtgatgggttttagcgccttctgggccgggctggtgattagtctccagtatttcgccacgctgctgagccgaccgcacgccgggcgctacgccgatctgctcgggccgaaaaagattgtcgttttcggcctgtgcggctgtttcctgagtggtttgagctacctgctggcagcctggagcagcagctggccgctgctgagtctgctgctgttatgccttggacgagcgatcctcggcattggccagagctttgccggcacggggtcgacgctatggggcgtaggcgttgtcggctcgctgcatatcgggcgggtgatttcgtggaacggcattgtgacctacggcgcgatggcgatgggcgcgccgctgggcgtgctgtgctattcatatattggcctcagtggcctggcgatggtcattatggcggttgctctggtggctatcatttgcgcgctaccgcgaacggcggtgaaggcaacgaaagggaaggcgatgtcatttcgcgcggtgctgggccgggtttggccttacggcatggcgctggcgttggcttctgccggctttggggttatcgcgacctttattaccctgttttatgacgcgaaaggctgggacggcgcggcctttgcgttaacgctgttcagctgcgcgtttgtcggcacgcggctgctttttcccaacggtattaaccgcctcggcggcctgaacgtggcaatgctctgttttagcgtggaggttattggcctgctgctggtgggctttgcacagacgccgctgatggcgaaagtcgggactttcctcaccggcgcggggttctcgctggtcttcccggcgctgggcgtggtggcggtaaaagccgtgccgcagcacaatcagggctcggcgctggcgacctataccgtatttatggatttgtcgttggggataaccgggccgctggccgggcttttgatggcgtggaccgggataccgacgatttatctggcggcggcagggttggtgatggccgcgctactgctgggctggcggttaaaaaaacggcccccggtggttgaaccggaggccgctgcatcagggcaataa

SEQ ID NO: 107490 - DNA, 723 bp, Enterobacter aerogenes
atgaattttaccctgaacataatcgactggcaggcgagagcgcctgggctttgcgaagccgagcagtggcagcaatggtcacgggattcacacgccatcgatccggcggccccggcggccaaactcaacgaactgccaatgatgaccgctcgccgacttagctccggcagcaagctggcggttgagtgcgggctggcgatgctgcgccgccatgagatcgacgccgttctctataccagccgtcacggcgaactagagcgcaactatcggatcctccacgccctggcgatggagcaagcggtttcgcctaccgatttcgccttatcggtacataattccgccgttggtaatctgacgattgcggcgaaaaaacccattgtatcatcatcgctttctgccgggcgcgacactttccagcagggattatacgaagtcatggggcttctgcaggcaggttatcaacgcgtgttgatggttgattttgatggttttctgccggagttttaccattcgcagctgccgacggctatgccgacctggccctatgcgacggcctgggttattgagtccggcggcgaatggcagtgccaggccgagcgccatgatgccgttcctgaaagccccctaccgcaaagcctgctgtttttacggcactatctgcagaattcccgtacgttcaccctgcccggcgagcgcgtgcagtggcgctggagccgcgcatga

SEQ ID NO: 107491 - DNA, 816 bp, Enterobacter aerogenes
atgacgccgcttttccaacggttaaatcgcctgtggcgcgcggcgatgaccggattctgtttcgcactgtttggcgtcggtgggctgctgctctcactgatctggttcaatctgctgctgatcgtagtgcgcgatagcacccgccgtcgtcatctcgcgcggcgcagcatttccgccagctttcgcgtttttcttaacgtcgtgaaagccgtcggcgtactggactaccagattaaagggcgcgagattttacgtcaggagcgcggttgcctggtggtcgctaatcatcccagcctcatcgactacgtgatgctggcctcggtgatgccggaaaccgactgcctggtgaaaagcgcgttgctgaaaaacccatttgtcagcggcgtgatccgcgcggcggattatttgattaacgatcgcgccgataccctgcttccggccagtcggcaacgcttacagcagggcgatactattttgattttcccggaaggaacccgaacggtgccgggagaaaaaatgcagctgcagcgcggcgcggccaatatcgccgtgcgctgcggcagcgatttacgcgtcgtcgttatccgctgtaccgagcatatgctgggcaaacagagcaaatggtacgacccgccgcgaacgaagccgttatttaccgttgaagtcggagaacggctacgaatagaccaattttacgatgccaacacacaagaaccggcgctggccgcacggcagttaaaccggcatattttgcttaaattagaatcaggcgttgcgcctgaaacaggaattaatgatggaagcgctctatcttga

SEQ ID NO: 107492 - DNA, 258 bp, Enterobacter aerogenes; identical to SEQ ID NO: 87713

SEQ ID NO: 107493 - DNA, 252 bp, Enterobacter aerogenes; identical to SEQ ID NO: 87712

SEQ ID NO: 107494 - DNA, 582 bp, Enterobacter aerogenes
gtgtcgggcatccgctcgctgccggtcgtttcaattatgacggggttattactgctgacctggccatttttgatctggtttggcctcgcgcataacagcctgccatggctgttgccgctaatggcgctactgctgtttttacgctttcgccagacccggcgacagtcagggccgttgagcgtggtcactcagatcgttgcggtagccggcatgacgctgtgcattgccagctacctgctaaagacccatcagctactgctattttacccggtggtggtgagcggcgtgatgctggcggtgtttggcggttcgctgtggtcaagtatgcctgtagtcgagcgcctggcgcggttgcgggacccggttcttcctgagcaagccgtgcgctacacccgccgggtcacccaaatctggtgcgcctttttcatcggcaacggcggtatagcgctggttaccgcgttatacggcgatatgtcgctatggacggcgtggaacggcatgatttcctatctgctgatgggcatgttgatggccggagagtggctggtgcgccagcgggtgattaaacgagataaaccatga

SEQ ID NO: 107495 - DNA, 1350 bp, Enterobacter aerogenes
atgatgcagcccctcacgctggcccagtggctcagcgccccgcgtccgccgcaaacgctgattgcgtggcaggaagcgcacagctggacgctggcgcatctgcgctatgatgtcgctcacctgcttaacaacctgcaacaacagccaggcgagcgttgggcgctctgttttgacaacagctacctgtttttggtcgcgctgttggccacgctgcatgcggggaaaacgccagtgctccctggccatagtcgagcggcgctattacacgaacagcgagcgcttttcgacggcatcctgagcgataagccgctgccatggcgcgggccgctgcgggttatccagtccgccatggcgaccgcatcccacgaatacgcgttcccggcgatcggcgataacgcctgcattgagctttttacctccggttctaccggtgaaccaaagcgaattagtaagcccgttaagagtctcgaccgcgaggcggcgctgatagccgcgcactatgccgggcgcctggcaggcagtcgagtagtggcatcggtcgcgccgcagcacttatacggcctgacgttccgtctgttcctgccaatggcgctggggttgccgctgcacgcggcgatgattgagtacgccgagcagttggcggcattaagccatgaccatcattatttatttatcagtagcccggcttttctcaaacgtctcgactatcggcttaccccgccgccggtcgcgatgattttgtccgccggcggcaagctgccctggcaggatgccgtgcacaccgctaactggttcaatacctggccggatgaaatctacggcagcacggaaagcggggttatcgcctgccgccagcgcctgcaagataatgcgccgtggcagccgttcccaggcatccgctttcagccgcagggcaacacaattcgtctattttcgccgcttatcgccgacgataacggcctggttatcgatgatattttgcatttcaatgaaagcggtcaattccagctggcaggtcgtcgcgaccgggtagtgaaaattgaagagaagcgcatttcgctaagcgaagtggaataccggttactgcaactggatggcattcttgaggccgccgtcctgccgattacccgcggcagccgccagagcgttggcgcgttgttagtgctcgatcatgacgcccgtcgccgctgggggaaaagccaggaattacaatggcggaaagcgctgcgcgcctcgctggaacctgtggccatccctcgctactggcgggtggttgacgagatccccgttaatagcatgaataagcgtgtctacgcgcaattacaggagttatttcatgaagccccatga

SEQ ID NO: 107496 - DNA, 354 bp, Enterobacter aerogenes; identical to SEQ ID NO: 87709

SEQ ID NO: 107497 - DNA, 1692 bp, Enterobacter aerogenes
atgccgctagctttctctccctgcgtgctgatcccctgctataaccacggcaccatgatgccacgggtgctggcgcgcctgcagccctttggcctgccttgcatcgtggtggacgacggcagcgatagcagtacgcggcagcagttggagcggctggcggcggaaaccgctaatctgaccttaatccgcttaccacagaacgcgggcaaaggcgcagcggtgatccgtgggctacaggccgcagcgcaatccgggttcagccacgcggtgcaggtcgatgccgatggtcagcacgccatcgaagatattccgcaactgttggcgctggcgcaggcccatcccgaagcgctgatttccgggcaaccgatttacgacgactccatcccgcgttcccgcctctacgggcgctggataacccacgtctgggtatggattgaaacgctgtcgctgcagttgaaagacagcatgtgcggttttcgcgtctacccggtgacgccaacgctacagctggcgcagcgcgtgtcgctcggccagcgaatggattttgataccgaagtgatggtgcgcctctactggcagggaaataccagctattttgtgccaacccgcgtgacctacccgccggacggtttgtcgcattttgatgccatcaaagataactgccgcatctcgctgatgcacacgcgtctgttcctcggcatgctgccgcggatcccctcgctgttgtttcgccgcgcctcgccgcactgggcgcgtcagcaggaggtaaaaggattatggggaatgcgcctgatgctactggtgtggcggctgctggggcgcaaggcgttctcgctgctgctttatccggtggtcggcgtgtactggctgacggccgcgacggcccgccgtgcttcgcaacaatggataacccgcgtgcgcgaacagctcgccgctcgccagatgccgataccgccaacgctaaccagctatcggcacttccagcgcttcggcgaggcgatgctggataaaatcgccagctggcgcggcgaattgcagttcggccgcgacgtggtttttaccgcaggcgccgaggagacgctaaatatcagcgatccgcgggggaagctgctgttggtttcgcatctcggcgatgtcgaagcctgccgcgcgctggcgcaactacagggcggcaaaaccatcaacgctctggtattcagcgaaaatgcgcaacgttttaaacagattatgacagaaatggcccctcaggccgggctcaacctgatgccggtgaacgatatcggcccggataccgccatcctgttgcaagaaaagctggatcgcggcgagtggatcgcgattgtcggcgaccgtattgcggttaacccacagcgcggcggcgaatggcgtgtctgctggagccgttttatggggcaagccgcccccttcccgcaggggccatttatcctcgccgccattttgcgctgcccggttaatttgcttttcgctctccgccagcagggcaaactgcgcatttactgcgagccgttcgccgacccgctgctattaccgcgcgccgatcgccaacaggcattgcaacacatcatcgaccgctacgccgaacggctggaacactacgcgctgcagtcgccgctcgactggtttaactttttcgatttctggcgtctgccggatcccaaagacaaggagtaa

SEQ ID NO: 107498 - DNA, 423 bp, Enterobacter aerogenes
gtgcttaacgatccccgttttactgctgaagtagagctgactattccgtttcatgacatcgatatgatgggcgtcgtgtggcatggcaactatttccgctacttcgaaattgcccgtgaggcgctgcttaaccagttcaactacggctaccggcagatgaaagcctcaggctatttgtggccggtggtcgatacccgcgtgaaataccgcgacgttatcaccttcgagcagcgcattcgcgtgcgcgcgcggatagaagagtttgagaaccgcctacgcattggctacgaaatttttgatgtcgatagcggcaagcgcaccaccaccggctacaccatccaggttgcggtggatgaaaacagccgcgagatgtgtttcgtcagcccggatatcctgtttgtacgcatgggggttacgccatga

SEQ ID NO: 107499 - DNA, 606 bp, Enterobacter aerogenes
atgagattactgctgctgttagggctgtttatcagcccgctggtcagcgccctcacgcttgatgatctgcaaaaacaatttagcgaacagccggtggtacgcgcccacttcgatcaggttcgcacgattaaggatctgccgcagccgctgcgatcccaggggcagatgttgatcgcccgcgataaggggttgctgtgggatcaaacctcgccattcccgatgcagctgttgctggatgacaaacggatggtgcaggcgatcaacggccagccgccgcaaaccattactgccgaaaacaatccgcagatgttccagttcaaccatttgctgcgcgcgctgttccaggcggatcgaaaagtcctggaggataacttccgcgtggaatttgccgataaaggcgaaggccagtggacgctgcgcctgacgcccaccactacgccgctggataagatttttgcccgcatcgatttggccgggaaagactatctggaacatattcaactcaacgacaagcaaggcgatcgcaccgatatcaccctttcccaacaccaattgacgcctgcgcaactgaccgatgacgaacgccaacgctttgccgcccagtaa

SEQ ID NO: 107500 - DNA, 2319 bp, Enterobacter aerogenes
atgacgaacgccaacgctttgccgcccagtaaacgccccgcgctgttatgggccgtcgtctgcctgctcctggcgggcgcgctgctggcgctgctgccgcaggcccggctcaacagcagcgtactggcgatgctgccgaagcagacgcttggcgcaatcccgcccagcctgaacgacggttttatgcagcgccttgaccgccagttggtttggctggtcagtcccggtaaacaggccgatccgcaggtagccggcgactggctgcgtctgctgcaaacctcgaaggcgctggcagacgtcaaaggcccaatgaatgccgataatcagcaggcctgggggacatttttctggcagcatcgtaacggtttaattgaccccgctacccgcgcgcgcctgcaaaacggcggcgaggcgcaggcgcaatggatcctctcacagctctattcggcattttccggcgtcagcggtaaagaactgcaaaacgatccgctgatgctgatgcgcggctcgcagctggcgatggcgaaaggcggccagcggatgcaactgcaggatggctggctggtgaccaaagatgcccagggcaacctctggtatctgttgcatggcgaactggcgggttcctcattcgatatgcagcagacgcaccggctggtcactacgctcggcgagctggagaagcagtggaaaacgcagcatccgcaggcgcagctgctgtcgcgcggcaccgtgttctatagcgattacgccagtcagcaggcgaagcacgatatttctacactcggcgcggcgacgctgttcggcgtaatcctgcttatcgtcgcgacatttcgctcgctgcgcccgctgctgctgtgcctgatttccatcgccatcggcgcgctggccggcaccgtcgtcacgctgctgctatttggcgagctgcatctgatgaccctggtgatgagcatgagcatcatcggcatctccgccgactatacgctctattatctgaccgaacggatggtgcatggcgcggaatcaaccccgtggcaaagcctcgccaaagtgcgtcatgcgttgctgctggcgctacttactaccgtggcggcttatctgattatgatgctggccccctttccggcgattcgccagatggcgctcttcgcggcggtcggcctgagcgcctcgtgtctgacggtaattttctggcatccatggttgtgccgtggacttcccgtgcgcccggtgccggcgatggcattgttgttacgctggcttgccgcctggcgacgccataaaaagctgtccatcggcctccccgtcgcgctggccctgttctcgctggcgggtctcgcgacgctgcgggtggatgatgatatttcgcagctccaggcgttgccgcaggatatcctggcccaggaaaaagccatcaccgcgctcaccgggcaaagcgtcgatcaaaagtggtttgtgatttacggcaaaacggcccagcagacgctgcagcgcctggaggcatttatgcccgcgctgacgcaggcgcaaagcgacggcctgctcggcggatatcgcgctatccccctgaattcactcgctcgccaacagcaggatcttgccctgctgcaacgcgccgcgcccaccgtcagtaacgtgctgaaccacgccggactggcaacgatcaatcccgatctcaacccgatgccagtgaccgtcgacgtctggcttgccagcccggccagcgaaggctggcgactgctgtggctgacgctgccggatggcgaaagcggcgtactggttccggtaagcggcgtgaaagacagcgcggcgctaaaaacgcttagtacacaacaggctggcgttgcgtgggtcgatcgcaaaagcgatttcgaccagttgttcgcgctctaccgccacattctaaccggcctgctgggcgttgcgctggcggtgattgcctgcggcgctatgctccgccttggctggcgcaaagggctggttagcctggtgccgtcggtattgtcgctgggatgcgggctggcggtgctggcatttagcggccacgcggttaacctgttctccttgctggcgctggtgctggtactgggcatcggcattaactacacgctgtttttcagcaacccgcgcggtacgccgctgacatcgctgctggcggtcaccctggcgatgatgaccaccttattgacgctcggcatgttggtgtttagcgccacgcaggccattagcagttttggtattgttttggtaagcggcattttcgccgccttcctgctttcgccgttagcgatgccgaccaaaaaagagaaaaagagacgatga

SEQ ID NO: 107501 - DNA, 585 bp, Enterobacter aerogenes
atgagaagaccatcattctggcgcgccttcgcgctactcgccgccttattgctggccggctgcagccgttcgcagccggagccgcaaggccgcccgcaggcgtggctggaaccgggtacgcgcgttacgttgccgccgcctggtatctcgccggctatcagctcgcaacagttgctcaccggcagcttcaacggccaaacccagtcgctgctggtcatgctcaatgccgatgataaaaagctcacgctggcgggtctgtcgtccgtcggtatccgcctgttcctggtgacctatgatgaaagagggctgcgcgctgaacagtcgatggtggttccgcaactgccgccagccagccaggtgctggccgatgtgatgctcagccactggccggttagcgcatggctgccgcagttgccaaaagggtggacgttgaccgagcgcggcgacaaacgcgaactacgtaacgcgcgcgggaagctggtcaccgaaatcacctatatcaaccgcaaaggccagcgcgtgccgatcagcatcgaacagcacgtctttaaataccacatcaccattcaatacctgggtgactga

SEQ ID NO: 107502 - DNA, 1170 bp, Enterobacter aerogenes
atgatctacatttccgccgtcggcatgattaacgccctgggccgcgataacgatgaaatcgccgccaatttggctcgcggtattgcgcccggcatgcgtccgcgcgaggggtggctacaggggcatccgcaggcggtgttcgcgggcgtggacggcgaattgcccgccattcccgatacctttagcgcccatcgttcgcgcaataatcagctgctgctggcggcgctggcgcaaattcagccgcaggtggatcgcgccatcgcccgatacggacgagagcgcgtggccgtggtgctcggcaccagcacctcggggctggatgagggtgacgcgcatgtcaccctgacgcttggcggcaaggaaagcgcggcctggcaatatccgcaacaggagctgggcgacccatcgcgttttctcagccactggctggcgctggatggcccggcatttacgctgtcaaccgcctgctcctccagcgccagagcgattatcagcggacgccgactaattgaagccggtctggcggatgtggcgatcgtcggcggcgcggacaccctcagccgaatgccgatcaacggctttcacagtctggaatcgctctccacgacgcagtgccagccatttgcccgcgaccgtaacggcatcactatcggcgaaggggcggcgctgatgctgttgacccgcgaaccgcagccagtcgcgctactgggtatcggcgagtccagcgacgcctggcatatttccgccccgcatcctgaaggagagggggcggtccgcgccatccagcaggcgctgggggatgcgggcatcgcccctgaacaagtgggttatatcaacctgcacggcaccgccacgccgcttaacgatagaatagagtctcacgtcatcaacgcgctatttggcgttcgggtaccctgtagttcaacgaaacacctgaccggacacacgctgggcgccgcggggatcaccgaagccgccatcggcatgctgattctgcagcgaaacctgccgctgccagcgcaggatttcagccagtcgccgcgcgatgaaacactaccgccatgcgggatcatcgaacatccccagccgctgccgcgaccgattatcctgtcgaactcttttgcttttggcggtaacaacgccagcatcctgctcgggagcattcaatga

SEQ ID NO: 107503 - DNA, 477 bp, Enterobacter aerogenes
atgaaccactatttatcgcccggcgactatctaccgcacgatgcaccgatgctgctgctggaagaggtcgtcaatgtgaccgacgaaaccgcgacctgccgggtcacggtctcgccccatagcgtcctggcgccatttctcgatgccgagggcaatctccccggttggttcgcccttgaattaatggcgcaaaccgtcggcgtctggtccggctggcaccgcctgcaaaaagggcaagcgtccatctcattaggtatggtgcttggcgcgcgagaattagtctgcgcggccggctccctgccgcgcggcaaagcactgtccattaccgttaaactgctcatgcaggacgagcgtttcgctagcttcgaaggcgccgtgatggcggacgatgacctgctggccagcggaagggttaataccttccagccaacgccaacagaacttaacaccctatttcaacaaggagcgtcagaatga

SEQ ID NO: 107504 - DNA, 732 bp, Enterobacter aerogenes
atgagtcgttcagttttggttaccggcgccagcaaaggtatcggtcgcgccatcgcctgccagctggcggcggacggttttatggtaggcgtccactatcatcgcgacacgtcaggcgcgcagcagacgctggaggcgattaccgccgccggcggcgcggggcgtctgctgagctttgacgtcgccaatcgcacgcaatgccgcgaagtccttgagcaggatatggccgaacacggcgcgtggtacggcattgtcagcaacgccggcatcgcccgcgacggcgccttcccggcgctcggcgaagacgactgggacgcggtgatccacaccaacctcgacagcttctacaacgtcattcatccgtgcatcatgccgatgattagcgcacgccagggcgggcgtatcatcacgctctcgtccgtatccggcgtgatgggcaaccgcggtcaggtcaactatagcgccgccaaggcggggatcatcggcgccaccaaagcgctggcgattgaactggcgaagcgcaaaatcaccgtgaactgcatcgcccccgggcttatcgacaccgggatgatcgaaatggaagaggccgcgttgaaagaggcgatgtcgatgatcccaatgaaacgcatgggacaggcggaagaagtggcggggctggcgagttatttaatgtcggatgtggcgggttatgtcacccggcaggtcatttccatcaatggagggatgttatga

SEQ ID NO: 107505 - DNA, 1230 bp, Enterobacter aerogenes
atgacacgccgtgtggtcattaccgggatgggcggcgtcaccgcatttggcgaaaaatggcaggatgtctcggcggggctgaagagatataaaaacgccgtacgcgccatgccggagtggcgtatttacgacgggctgcatacgctgctgggcgcgccgatcgatgatttcaccctgcccgaccactatacccgcaagcgcattcgcgcgatggggcgcgtatcgttgctctccacccgcgccactgaactggcgctggagcaggccgggctaatcgacgatgccatactgagtaacggcgaaaccggcatcgcctacggttcatcaaccggcagtaccgccccgatgagcgaattcgccaccatgttgacggaaaagcacaccaataatattactgctaccacctacgtgcagatgatgccgcataccaccgccgtcaatacgggcctgttttttggcctgcgcggccgcgtgatcccgacgtccagcgcctgtacctccggaagccaggcgattggttacgcctgggaagcgattcgccacggctatcaaacggtgatggtcgccggcggcgcggaagagctttgcccgtcggaggccgcggtattcgatactctgtttgccaccagccagcgcaatgagcagcccgacattaccccctccccctttgatgtgctgcgcgatgggctggtgattggcgaaggggccggtactctcattctggaagaactggagcacgccaaagcacgcggggcgaccatttacggcgaaatcatcggcttcgccaccaactgcgatgctgcgcatatcactcaaccgcagcgtgaaaccatgcagatctgcatggaacaatcattaaaaatagcaggcctgagcgcccgggatatcggctacatttcggcccacggcaccgcgaccgacctcggcgatatcgccgaaagccaggcgacggcggcgatttacggcgatagcgtgccgatctcctcgctgaaaagctatttcggccatacccttggcgcctgcggggcgctggaagcgtggatgagtctgcagatgatgcgcgagggctggttcgcgccaacgctgaatttgcataatccggacgccaattgcggagaactggattacatcatgggcgaagcgcgccagattgattgtgaattcctgcagagtaacaacttcgccttcggcggtattaacacctcaatgattattcagcgctggtcctga

SEQ ID NO: 107506 - DNA, 588 bp, Enterobacter aerogenes
atgtatcagcttatccttggccaaatctcaacgcttagcgccctgccgttaccgactgggttagcggcccaggcccctgacggcccacggcgggcaagctggcttgccgggcgcgcgctgctggcgcatgcggcggccccgctggcggatattgcgtatggcgagcagggcaaaccggctttcccgcccggctgcgggcggtggtttaaccttagccacagcggcgaccatattgccctgctgctgagcgatgaaggcgaggttggctgcgatatcgaagtgattcgtccgcgcaacggctggcagcggttggctaacgccctgtttagcgagggcgagcatcaggaactggagcgcgaaccgccggagcggcagctagccgccttttggcgaatctggacgcgcaaagaagcgctggtaaagcaacgcggcggcagcgcctggcagatggcctctgttgacagcgcctttcgcggcgcgctgtcattaagccagattcagtatcaagggttaagtattgcggtctgtacgccaacgccgttctcgctgacggcggcgcacattcaaggtttcaacggcgcggcttga

SEQ ID NO: 107507 - DNA, 384 bp, Enterobacter aerogenes
atggggttaatctgggcgttattgagcgtcgggctggtcagcggcgcgcagctgttactgcgcagcgcgatggttgagctgccgccattgaccgatatcctggctttcctcaatcatctactgcatatgcgcaccggtaccttcagcctgggttttggcctggttggctatctgctgtcgatggtctgctggtatttcgcgctacaccgcttgccgttggccaaagcttacgcgctgctcagcctgagctacattctggtgtgggccgccgccatctggctgcccggttggcacgagccgttttactggcaatcgctgctgggcgtgctgattattatcgccggcgtgctgactatcttctggccggtcaagccgcgccgttga

SEQ ID NO: 107508 - DNA, 339 bp, Enterobacter aerogenes
atgagtgtctggttctgtctgatactcgccagtctgcttagctgcgccggtcagctgtgccagaagcaggcgacccggccgtcccgtagcgggcggcgcgggcggcatattttgctgtggctgggcttagccctgttggcgctcggcggcggtatgctgctgtggctgggggtgctgcaggcgatcccggtcggtatcgcttatccgatgctgagcctcaactttgtctgggtaacgctggcggcatggggtatctggcgcgagccggtggcgcgccgccactggcttggcgtcgggctgatcgtcgtcggcatcgccgttctggggagtagcgtctga

SEQ ID NO: 107509 - DNA, 1656 bp, Enterobacter aerogenes
atgaaaagcattcgttatggcatctctctggttgtactctttgcgctgtattacttattgccgttaaatttccgtttgctgtggcagcctgatgaaacccgctatgccgagatcagtcgtgaaatgctggcctccggcgactgggtggtgccgcatctgctgggcctgcgttactttgaaaagccgattgccggttactggattaacagtattggccagtggctatttggtcataataactttggcgtgcgtttcggttcggtcttcgccattaccgtcagcgcgttgctggtggcgtggctggcgtggcgtattttccgtgataaacgcgtggcgatcctgtcgccggttatcttcctgaccgcgatgctggtatacggtatcggaacctatgcggtgctggatccgatgatcaccatgtggctggcgctggcgatgtgcagcttctggggagcctcccaggcgcagagccgcagcgggaagatgttgggttatgtcctgctgggagtcgcctgcggtatgggggtgatgaccaagggcttcctggcgctggcggtaccggtggttggcgtgctgccgtgggtgatggcgcgtaaacgctggcgcgaagtgctgacctacggctggctggcggtggcggtctgtacgttggtggtgctgccgtggggattggctattgccaatcgcgaacccgatttctggcgctatttcttctgggtcgagcatattcagcgtttcgctgagaaagacgcgcagcataaagcgccgttctggtactacattccgttcctgattgccggcagcctgccgtggttggcgctgttaccgggcgcgctgaagcgcggctggagcgagcgcgatgatgcccgcggcgcgctgtatctgctaggctggatagcgatgccgttcctgttcttcagcatcgccaagggaaaactgccgacctacattctgccgtgctttatgccgctgtcgattttgatggcccgctacgcgctggatgccgcgaaggcgggggcgaaagcgctgcgcatcaacggcatgatcaacctcggttttggtctgatcggcctggtcgccgtgctggtggtctcgccgtggggcgtcatgcataagccggtgtggacgaagatcgagctgtataaatgtctgctggcggcgattgcctttgccgtatgggcgctgatgggctggctggcaataaaagacaacggtcgtcgctggacgctggccgccatctgtccgctgggagtggcgctgctggtgggcttcgctatcccggatcgggttatcgacagcaaacagccgcagtttctggtggatattgttagcgaatcgctggcgccaagccgctatgtactgaccaacagcgtcggtatcggagcggggctggcgtgggagctcaagcgtgacgacatcatcctgtatgaaaggcagggggagctaaaatatggcctcggctggccggatgcgcagagcaaattcgtgtcgactcaagcttttgctgattggctggcggcgcaccgccagcagggaccgatctcactggtgctgctgatggataaaggtgaaacgatgaacgaactggcgttaccgaaacctgataactcctacgagctggggcgcgtggtgtttattcagtatctgccgcaatga

SEQ ID NO: 107510 - DNA, 903 bp, Enterobacter aerogenes
atgaaacaagtcggcttacgcatagatgtcgatacctttcgcgggacgcgtgatggcgtaccgcggctgctggccctgctgggcaagcacgggattcaggcaagcttctttttcagcgtcgggccggacaatatggggcgccatttatggcgcctggtaaaaccgaagtttctgtggaaaatgctgcgctccaacgcggcctcgctgtatggctgggatattctgctggccggcaccgcgtggccggggcgcaggattggcgcgggtaacgaagaggttattcgcgccgccgcgcacatccatgaagtgggcctgcacgcctgggaccactacagctggcaagcgtggagcggcgtctggccgcaggaacgtctgacgctggaaattgaacgcggtctgctcgaactggaacgcattatcggccgcccggtgacctgctccgccgtcgccggctggcgtgccgaccagcgggtggtaaaagcgaaagaatccttcgatttcctctacaacagcgattgtcgcggcacgcggccattcctgccgcagattggcggcggggcctccggcaccgtacaaattccggtgacgcttcccacctgggatgaagtcgtcggtagcgctgtggataccgccggcttcaaccgctatctgctggactgcattcatcgtgacaagggaacgccggtctataccatccacgccgaagtggaaggcattgcctacgccgatcagttcgatgcgctgctgaccatggcggaggaagaagaaatacaattttgcccactgagccagctgctgcccgctgactttagcgagctgccgtcaggcaaagtggtccgtggtgagctggctggccgggaaggttggcttggacgtgaacaattactgggctcgggtgtatga

SEQ ID NO: 107511 - DNA, 1986 bp, Enterobacter aerogenes; identical to SEQ ID NO: 105882

SEQ ID NO: 107512 - DNA, 984 bp, Enterobacter aerogenes; identical to SEQ ID NO: 87693

SEQ ID NO: 107513 - DNA, 1140 bp, Enterobacter aerogenes; identical to SEQ ID NO: 87692

SEQ ID NO: 107514 - DNA, 504 bp, Enterobacter aerogenes; identical to SEQ ID NO: 87691

SEQ ID NO: 107515 - DNA, 861 bp, Enterobacter aerogenes
atgcacaagaccacgctggaacaatgggcgctattggaaaaggtgattgagctgggcagttttgccaaagccgcggaagagaccaaccgcagccagtcttcggtgagctataacctggcgctgctgcaggaacgtttaggggtggcgctgctggcgccgtccgggcgacgggcggtgctgacgcccgctggcgaactgctgcttaatcaggtgaaaccgctactgaaggccttttcgtgggttgagacccacgccgcgacgctgcgcaacggcgcgcgcacccgcctggatctggtcgtcgacagcatttttccccgccagcggctcttcgccattttgcgacagtttcagcaacgctacccgcaaactcaggtccggctgaccgaagtgctggaaaacatcgatgaggctagcgccgcccgcagcgaggccgacgtgatggtcttaacccgtcgccaggatattaccggacgcggcgaatggctgatgaatatcgattttatcgcggtcgcccatcgcgaccatccgctgtcgcaatcggaagaaccgctggacgacaacgcgctggccccctggccgctgatccgcattgccgaccgtagcggcgacgcctcatccacgcgcgatgcctggaccttttctaccattgatgccgctatcgatgcggtgctgtatcaggtgggattcggttggttgccggaggaacgaatccgcgcacacctggaacagggcgtgctgaaagcgctgccgttgagccatggcgctcgccgcgccacgccgctgcatttgatagtgaagcgggatctggcgccgctcgatgaacaggtcaccaccctgctggatttgttcagacaatcgtaa

SEQ ID NO: 107516 - DNA, 1569 bp, Enterobacter aerogenes; identical to SEQ ID NO: 87689

SEQ ID NO: 107517 - DNA, 948 bp, Enterobacter aerogenes; identical to SEQ ID NO: 87688

SEQ ID NO: 107518 - DNA, 834 bp, Enterobacter aerogenes; identical to SEQ ID NO: 87687

SEQ ID NO: 107519 - DNA, 765 bp, Enterobacter aerogenes
atgccgcaaaagatccaactggaacaactttcgctcgtcgccgaccgtccgctggtcagcgacgtttccctaaccctgcgtcgcggtcaggtactggcgctgctcggcagtagcggcagcggtaaatcgctgacctgcgccgccacgctcggcattttaccgcccggcgtcagacaaaccgcgggccgggtgctgctcgacggtatcccggtatacggtgaacagctgcgcggcgcgaccatcgccaccattatgcaaaacccgcgcagcgcctttaatccgctgcactccatggcggcgcatgcgcgggaaacctgccgggcaacgggccacgaggccaataacgtcgcgctgctggcagcgatggaagaggtggggctggaaaatccgctctcgctgctcaagcgctatcccttcgagatgagcgggggcatgctgcagcggatgatggtggccctggccctgctcagtcgcgcgccgtttatcatcgccgacgaaccgaccaccgaccttgatgccgtcgcccaggcgcgcattctcgacctgctggcggatatcgtcgccaaccgcgggcaggggctgctgctggtgacccatgatatgggcgttgtcgcccggctggcgcatgacgtggcggtgatggaaaacggccgtcttgttgaacgctgcgacgttaacacgctatttagcgccccacagcacccgctcagccagcgcctgctggccgcccatctggcgctatatggcctggagaaaacaccatga

SEQ ID NO: 107520 - DNA, 792 bp, Enterobacter aerogenes; identical to SEQ ID NO: 105891

SEQ ID NO: 107521 - DNA, 402 bp, Enterobacter aerogenes
atgcagcgcgtaaccctgactctggatgatgatctgctggccgcgctcgacgctcacagcgcccaccgcgggtaccacaaccgctcggaagcggtgcgcgatattctgcgtgacgcgctccaccacaatccgctacagcaggcggcgcagcgcggctatgcggtcctgtcgtacgtgtatgagcatgaaaaacgcgaactggcgagccggctggtcgcctcttcgcatcagcatcacgatctctcggtcgccacgttacatgtccacatcaatcatgatgactgtctggagatcgcggtgctaaaaggcaacatggacgaagtacagcattttgccgacgaggtgattgcccagcgcggcgtgcggcatgggcatttgcagtgtttagcggatgataattaa

SEQ ID NO: 107522 - DNA, 360 bp, Enterobacter aerogenes
atgatcaaacctaaaacgccaaattcaatggagattgccgggcagcctgctgttattaactacgtgcctgaacttaatgcattccgcggtaagttcctgggattatcaggatattgcgattttgtttccgatagcattcaagggttacaacaggagggcgagatatcattacaggaatatcttgctgattgtcgtgaagcgggcatcgagccttatgctcagccggaaaagctgaaaaccttcacattgcgctatcctgaatcatttggtgagcgtcttagctccgccgctgcagaggagcaggtttccgtaaatacctggatccttgagacgctcaatgaacgtctcaaacaggcttaa

SEQ ID NO: 107523 - DNA, 276 bp, Enterobacter aerogenes
atggagcagcaggttttatctttacgtaaaaaacagcgcaacacgctggagcagctgtttaaaacccccgtgccgcagggtattaaatgggccgacattgaatcgctaattaaagcgttaggtggggagattaaagaaggacgcggctcgcgctgtaaatttttgttgaaccacagcattgccagctttcacaggcctcacccttcgccggatactgacaaaggcgccgtggagagcgtgcgcgattggttaatcactataggggtaaaaccatga

SEQ ID NO: 107524 - DNA, 1014 bp, Enterobacter aerogenes; identical to SEQ ID NO: 87681

SEQ ID NO: 107525 - DNA, 1194 bp, Enterobacter aerogenes
gtggaaaggtttgatgccattgtgatcggcgccggtgcggcgggaatgttttgtgcggcgcaggcggggcagttgggctgccgggtgctgctgctcgataatggcaaaaagccggggcgcaaaatcctgatgtccggcggcggccgctgcaactttactaacatgtatgtcgaacccgcggcatatctcagccaaaacccgcatttttgcaaatctgcgctggcgcgctatacccagtgggactttatcgaactggttggcaaatatggtattgcctggcatgagaagaccttaggtcagctgttttgcgatgattccgcggagcaaatcgtcaatctgctgctgtcggaatgtgaaaaaggcggcgtacagatccgtctgcgtagcgaaattctcagcgtcgaacgcgatgaacaaggctaccggctacaggtgaacggcgaaatgctgacggcgaagaagctggtgatcgcctccggtggcctgtcgatgccggggctgggcgcatcgccgtttggttataaggtggccgaacagttcggcctgaaggtgctgccgacccgcgccgggctggtgccgtttaccctgcataaaccgctgcttgagcagttgcaggtgctttccggcgtttcggtgccttctacgattaccgccgagaacggtacgctgtttcgcgaaaatttgctgtttacccatcgtggcctttccggcccggcggtgctgcagatttccagctactggcagcccggcgagtttgtcaccgtcaacctgctgccggactgtgatcttgaggcgttcttcaacgagcagcggggcgctcatcccaaccaaagcctgaaaaacaccctcgcgatgcagctgccgaagcggctggtcgaatgtttacagcagcttgggcagatacctgatgtgacactgaagcaactgaacgttcgcgatcagcaggcgctggtggagacgctaaccgcgtggcgcgtgcagccgaacggaactgaaggttatcgtaccgcggaagtgaccctcggcggcgtggataccaatgagctttcgtcacgcaccatggaggcgcgcaaagcgccggggctttactttatcggtgaagtgatggacgtcaccggctggcttggcggctataacttccagtgggcgtggtcaagcgcctgggcctgcgcgcaggcgctggcggaagcttaa

SEQ ID NO: 107526 - DNA, 1497 bp, Enterobacter aerogenes
atgctacatttatttgccggtctggatttacataccggactattattattgcttgctttagcttttgtactgttttacgaagcgattaacggttttcatgataccgcaaacgcagttgcaacggtgatttacactcgcgcaatgcggtcgcagcttgctgttgcgatggcggcactcttcaactttttcggcgttctgctgggcggtctcagcgtagcctatgccatcgtgcatatgctgccaacggacctgctgcttaacatgggttccgcacatggcctcgccatggtgttctctatgctgctggcggcaatcatctggaacctcggaacctggtatttcggcctaccggcctccagttctcacaccctgattggcgccatcatcggtattggtttaaccaatgcgctgatgaccggtacttcagtggtggatgcgctgaatatcccgaaagtcatcggcatttttgcctcgcttatcgtctcgccgattgttggcctggtggtagcgggcggcctgattttcattctgcgtcgttactggagcggtaccaaaaaacgcgctcgtatacacctgaccccagcggaacgcgaaaagaaagacggtaagaaaaaaccgccgttctggacccgtattgcgctgatcctgtccgctatcggcgtgtcgttctcgcacggcgccaacgatgggcagaaaggcattggtctggtcatgctggtactgattggcgtcgcgccggcgggcttcgtggtcaacatgaacgcgtctggttacgaaatcactcgtacccgcgatgcagtcaacaacgtggaaaccttcttccaacagcgccctgagctgctgaagaaagccaccggcgttgatcaactggttccgtcaccggaaaccaataccgcggccaacggcgagtttcactgccatccggcgaacaccatcaacgcgcttgaccgcgtgaagacaatgctcaccggtacggaaagctacgatacgctgtcagtggatcagcgcggccagctgcgtcgcattatgctctgcatctccgacaccaccgacaaagtggccaaactgccggatgtgagcactgacgaccagcgcctgctgaagaaactgaaaaccgatatgctgagcaccatcgagtacgcgccaatctggatcattatggcggtcgcgctggcgctgggtattggcaccatgatcggctggcgccgcgtggcgaccactatcggcgagaagattggtaagaagggtatgacctacgcgcaaggtatgtccgcccagatgaccgccgcggtttctatcggccttgccagctacaccggcatgccggtttccaccacccacgtgctctcttcctcggttgcggggacgatgctcgttgatggcggcggtctgcagaagaaaaccgtcaccagcatcctgatggcatgggtactcaccctgccggcagccattttgctgtcaggcgtgctgtactggctggctctgaagcttatctaa

SEQ ID NO: 107527 - DNA, 336 bp, Enterobacter aerogenes
atgatcagcactgttgcgctgttttgggccctgtgtatcgtttgtgtggtgaatatggcacgttacttctcatcgttgcgtgcattattggttgtgctacgtggttgcgatcccttgctctatcaatatgttgatggcggaggttttttcacctcgcatgggcagcccagtaaacaaatgcggctggtttggtatatctatgcccaacgatatcgcgatcatcatgatgacgagtttattcgtcgctgtgagcgtgttcgccggcagttcatcctgaccagcgcgctgtgtggtctggtgctggtgagtatgatagcactgcttatctggcattga

SEQ ID NO: 107528 - DNA, 438 bp, Enterobacter aerogenes
atggcttacaaacacattcttattgcagtagacctatcaccggaaagcaaagtgctggtagagaaagcggtttctatggcgcgtccctacaatgcgaaagtttccctgattcacgtggatgtgaattactccgacctctacaccggtcttatcgatgtcaatctgggcgacatgcagaaacgcatctctgaagagacgcaccacgcgctgaccgagctttccaccaacgctggctacccgattaccgaaaccctgagcggcagcggcgatctgggacaggtgctggtcgatgcgattaaaaaatatgatatggacctggtggtctgcggtcaccatcaggacttctggagcaagctgatgtcctccgcgcgtcagctgatcaacaccgttcacgttgatatgctgatcgtaccgctgcgcgacgaagaagacgaataa

SEQ ID NO: 107529 - DNA, 1473 bp, Enterobacter aerogenes
atgaaaacaactgcacctacgggcttgctgcagcaaccccggccgttcttcatgatcttttttgtagagttatgggagcgttttggctattacggcgtccagggcatcctggctgtgttctttgttaaacagcttggtttctctcaggaacaggcatttatcacctttggcgcctttgcggcgctggtctacggcctcatttccatcggcggctatgtcggtgaccatctgcttggaaccaaacgcacgctggtgctcggcgccatcgtgttggcaatcggctattttatgaccggtctgtcgctgctcaaacccgaccttatctttatcgcgcttggcactatcgccgtcggcaacgggctgtttaaagccaatcccgcgagcctgctatcaaaatgctatccgcctaaagacgcccgtctcgacggcgccttcaccctgttttatatgtcgattaacatcggttcgctgctgtcgctgtcgctggcgccggtgattgccgataagttcggctatgcggtgacctacaatctgtgcggcgccgggcttatcgtcgcgctgctggtctacttcgcctgccgcggaatggtgaaagatatcggttcaaccccggatcatcagccgctgagttttcgtaatctgctgtatgtgctggttggcaccgtggtgatgattttcctctgcgcctggctgatgcataacgttaaaatcgccaacctggtgctgattgtgctgtccatcgtggtgacgattttcttcttccgcgaagcttttcgcctcgataaaaccggccgcaacaagatgttcgtcgccttcatcctgatgctcgaagcggtagtgttttatatcctgtatgcccagatgccaacctcgctcaacttcttcgccatcaataacgtgcatcacgacattctcggcatcgcgattaacccggtgagtttccaggcattgaacccgttctgggtggtggtcgccagcccggtactggcggctatctacacccgtcttggcaacaaaggtaaagacctgaccatgccgatgaaattcactctcggcatgttcctctgcgcgctgggcttcctgaccgccgcggcggccgggatgtggtttgccgacccgcaggggctcacctcgccgtggtttatcgtgctggtttatctgttccagagtctcggcgaactgctgattagcgccctgggcctggcgatggttgctgcgctggttccgcagcggctgatgggctttattctggggatgtggttcctgactcaggccgccgcgttcctgatgggcggctatgtcgcgaccttcaccgcggtaccagaaaatataaccgacccgctgcagacgctgccgatctacaccaacgtgtttagtaaaattggtctcgtgaccctggcggtgacggtggtgatggcctttatggtgccgtggctgaaccggatgattaataccccgaccagcgccgagtaa

SEQ ID NO: 107530 - DNA, 504 bp, Enterobacter aerogenes; identical to SEQ ID NO: 92129

SEQ ID NO: 107531 - DNA, 1203 bp, Enterobacter aerogenes; identical to SEQ ID NO: 92130

SEQ ID NO: 107532 - DNA, 753 bp, Enterobacter aerogenes
gtgaaaatctgcttaattgatgaaacaggcgccggtgacggcgccttatctgttttggccgcccgttgggggctggagcatgatgctgagaacccgatggcgctggtgctgacggacgagcatctggagctgcgtaagcgcgatgagccaaagcttggcggcatctttgtcgatttcgtcggcggcgtgatggctcatcgccgcaagtttggcggcggccgcggtgaagcggtagccaaagcggtgggtattaaaggcgattatctgccggatgtggttgacgccaccgctggcctggggcgcgatgccttcgtgctggcgtcggtcggctgccgcgtgcggatgcttgagcgtaacccggtggtcgccgcgctgctcgacgatggtttgaaacgtggctatgccgatgcggagatcggcggctggctgcaggagcgcttacagttgattcatgcatccagcctcaatgcgttgaccgatatcaccccgcgcccacaggtggtgtatctggatccgatgtttccccataagcagaaaagcgcgctggtcaaaaaagagatgcgggtatttcagtcgctggtggggccggatttagacgccgatggtctgttggcgccggctcgacagctggcaaccaaacgagtggtggtgaagcgtccggactatgcgccgccgttggcggatgtcgccacgcctaacgcggtagtgaccaaaggacatcggtttgatatttacgccggtactccggcgtaa

SEQ ID NO: 107533 - DNA, 2043 bp, Enterobacter aerogenes; identical to SEQ ID NO: 87674

SEQ ID NO: 107534 - DNA, 843 bp, Enterobacter aerogenes
atgctcagttatcgccacagctttcacgcaggcaaccacgccgacgtccttaaacacaccgttcagagtttgatcattgaatcgctgaaagagaaagaaaaaccgtttctctacctggacacccacgccggcgcgggccgctatcagctgagcggcgagcacgccgaacgtaccggcgaataccttgaaggcatcgcccgtatctggcagcaggacgatctaccgaccgaactggagccgtatatttcggtcgtcgagcacttcaaccgcagcggtcaactgcgctactaccctggttcgccgcttatcgcgcgccagctgctgcgcgagcaggacagcctgcagatgacagaactgcacccgagcgatttcccgctgctgcgcgccgagttccagaaagacagccgcgcgcgcgtcgataaagccgatggctatcagcagctgaaggccaagctgccgccggtttctcgccgcggtctgattcttatcgacccgccgtacgaaattaaaaccgattatcaggcggtggtcaccgggatcaacgaaggttataaacgcttcgccaccggcacctacgcgctgtggtatccggtggtgctgcgcgcgcaaatcaaacgcatgatcaaagatttagaagccacaggtatccgcaaaattctgcaaatcgagctggcggtgcgtccggacagcgaccagcgcggcatgaccgcctccgggatgatcgtcatcaacccgccgtggaagctggaacagcagatgaataacgtgctgccgtggctgcacagcaaactggttccagccggtaccggtcacgcgaccgtgagttggatcgtaccggagtaa

SEQ ID NO: 107535 - DNA, 1353 bp, Enterobacter aerogenes
atgagcaaacattatgattacctcgccatcggcggcggcagcggcggtatcgcctcgattaaccgtgcggcgatgtacggccagaagtgcgcgctgattgaagccaaagagctgggcggcacctgcgttaacgtcggctgcgtgccgaaaaaagtgatgtggcatgcggcgcagatccgcgaagcaatccacctgtatggcccggattacggtttcgataccaccatcaaccatttcgactgggataagctggttgccagccgcagcgcctatatcgaccgtattcatacctcttacgacaacgtgctgggtaagaataaagttgatgttatcaaaggtttcgcgcgctttgtcgatgcccataccgtggaagtcaacggcgagaccattaccgccgatcatatcctgatcgccaccggcggccgcccgagccacccgaacattccaggtgtggaatacggtattgattccgacggtttcttcgaactgccggcgctgccgaagcgcgtagcggtagtcggcgcgggctatattgccgttgaactggccggcgtgattaacggcctgggcgccgaaacccacctgttcgtgcgtaaacacgcgccgctgcgtagcttcgatccgctgatcgttgagactctggtggaagtgatgaacgccgaaggcccgcagctgcacacgaacgcaattccgaaggctgtagtcaagaatgccgacggcagcctgactctggcgctggaagatggccgcagccagaccgtagattgcctgatttgggcgattggccgcgaaccggcgaccgataacttcaacctggcggcaacgggcgttaaaaccaacgataaaggctacatcatcgttgataagttccagaacaccaatgtgccgggcatctacgcggtgggcgataataccggcgccgttgagctgacgccggtcgccgtggccgcaggccgtcgtctgtccgaacgcctgtttaacaacaagccggaagagcacctcgactacagcaatatcccgaccgtggtcttcagccacccgccaatcggcaccgtcggcttaaccgagccgcaggcgcgcgagcagtacggcgacgacgccgtgaaggtgtacaaatcgtccttcaccgcaatgtataccgccgtgacctctcaccgccagccgtgccgcatgaagctggtctgcgtcggcccggaagagaagattgtcggtattcacggtatcggcttcggaatggatgagatgctgcagggctttgcggtggcgctgaaaatgggcgccaccaaaaaagacttcgacaataccgtcgccattcacccgaccgcagcggaagagtttgtcactatgcgttaa

SEQ ID NO: 107536 - DNA, 1149 bp, Enterobacter aerogenes; identical to SEQ ID NO: 87671

SEQ ID NO: 107537 - DNA, 1410 bp, Enterobacter aerogenes; identical to SEQ ID NO: 87670

SEQ ID NO: 107538 - DNA, 1308 bp, Enterobacter aerogenes; identical to SEQ ID NO: 87669

SEQ ID NO: 107539 - DNA, 1017 bp, Enterobacter aerogenes; identical to SEQ ID NO: 87668

SEQ ID NO: 107540 - DNA, 624 bp, Enterobacter aerogenes; identical to SEQ ID NO: 87667

SEQ ID NO: 107541 - DNA, 1149 bp, Enterobacter aerogenes; identical to SEQ ID NO: 87666

SEQ ID NO: 107542 - DNA, 1659 bp, Enterobacter aerogenes; identical to SEQ ID NO: 87665

SEQ ID NO: 107543 - DNA, 528 bp, Enterobacter aerogenes; identical to SEQ ID NO: 105912

SEQ ID NO: 107544 - DNA, 423 bp, Enterobacter aerogenes; identical to SEQ ID NO: 87663

SEQ ID NO: 107545 - DNA, 609 bp, Enterobacter aerogenes; identical to SEQ ID NO: 87662

SEQ ID NO: 107546 - DNA, 759 bp, Enterobacter aerogenes; identical to SEQ ID NO: 105915

SEQ ID NO: 107547 - DNA, 900 bp, Enterobacter aerogenes; identical to SEQ ID NO: 87660

SEQ ID NO: 107548 - DNA, 1032 bp, Enterobacter aerogenes; identical to SEQ ID NO: 87659

SEQ ID NO: 107549 - DNA, 1323 bp, Enterobacter aerogenes; identical to SEQ ID NO: 105918

SEQ ID NO: 107550 - DNA, 2052 bp, Enterobacter aerogenes; identical to SEQ ID NO: 105919

SEQ ID NO: 107551 - DNA, 930 bp, Enterobacter aerogenes; identical to SEQ ID NO: 87656

SEQ ID NO: 107552 - DNA, 1500 bp, Enterobacter aerogenes; identical to SEQ ID NO: 87655

SEQ ID NO: 107553 - DNA, 1287 bp, Enterobacter aerogenes
atgaaactctctctcttcaaaagcctctatgtccaggttttatcggccatagctatcggtattttgctgggccatttctacccggaacttggcgcgcagatgaaaccgttcggcgacgccttcgtaaaactgattaaaatggtcattgctccggttatcttctgtaccgttgtaacagggattgccgggatggaaagcatgaaggccgtcggtcgtaccggtgcggtggcgctactctactttgaagtggtgagtaccattgcgttgattatcggtcttatcatcgtcaacgtagtgcaacccggcgcgggcatgaacgtcgatcccgcgacgctggacgcgcacgcggtggcagtctacgccgagcaggctaaagatcagggtgttgtcgcctttctactcgatattattccgggcagcgtgattggcgctttcgccagcggtaatattctgcaggtgctgatgtttgccgtcctgtttggctttgcgctgcatcgtttaggcagcaaaggccagctgattttcaacgtcattgagagcttctcgcaggtcattttcggcatcattaacatgattatgcgtctggcgccgatcggcgctttcggggccatggccttcaccatcggtaaatacggcgtcggtaccctggtacagctgggccaactgattatctgcttctacatcacctgtatcctgttcgtggtgctggtactgggttctatcgcgcgggccactggatttagtatcttcaaattcattcgctatatccgcgaagagctgctgattgtactggggacctcttcgtccgaatccgcgctgccgcgaatgctggataagatggagaagttgggttgccgtaaatcagtggtggggctggtgataccgaccggctactcctttaacctcgatggcacctccatctacctgacgatggcggcggtgttcatcgcccaggccaccaatagccatatggatatcttccatcagatcaccctgctggtggtgctgctgctctcttcgaaaggggccgcgggcgtcaccgggagcggatttatcgtgctggcggcgaccatctctgcggtagggcatctgccggtggcgggcctggcgctgattctcggtatcgaccgctttatgtccgaagcgcgcgcgttgaccaacctggtgggtaacggcgtggcgaccgtggttgtcgcgaaatgggtgaaagaactcgatgccaaacagctcgatgatgtgttgaataaccgcgttcccgcggacaaatcgcaagaattatcctcgtaa

SEQ ID NO: 107554 - DNA, 2007 bp, Enterobacter aerogenes
ttgcgcgtcagccgctcacttacaattaaacagatggcgatggtcgcgagcgtgtccatggcgtttgtcctggtcttttgctctattttgctgtttcacttcgtgcaacagagtcgctataccacggccacgcaattagaaagtatcgcccgttccgttcgcgagcccctgtcggcggcaattttgaaagccgatattcccgaagcggaagccattctgggccgcattcagcctgctgggatcgtcagccgggcggatgtggtgctaccaaatcaatttcaggcgctgcggatgcgctttattcccgaacgcccggtgccggtgatgatcactcgcctgtttgaactgccggtacagatatccctgccgatttactcgcttgaacgcccggcaaatccgcagccgctggcctatctggtgctgcaggcggattcctatcgcatgtataaattcgtcatgagcgcgctcgcgacgttagtgaccacttacttacttttggtgcttattttgacggtggcgcttacctggtgcattaaccggctgattgttcgcccgctgcgcgccatcgcccgcgagcttaacgatattccgccgcaggagcggctcggacatcagctgagcctgccgcgactgcaccaggatgatgaaatcggcatgctggtgcgttgctacaatcgcaaccagcagtctttgctgcgtcagcatgatgagctatcgctgcaatcgacccgtttcccggtgtctgagctccccaacaaagcctttttgatggcgatgctggagcagaccacaacccgtccacaaccctcggcgctgctggtggtagcctgtgagaccttgcaagatgccgcaggcgtcctgaaagagagccagcgcgagatgctgctcctgacgctggttgagaagctgaaagcggttatcccacccaatatggtgctgacgcaggtgagcggttacgatttcgctattttcgcccccggactcagcaagccgtgggaagcggtgtcgttaagtaagcaagtgcttacttctattagcgagcgattgccgctgcacggtgtccagctgcggccctgcgccagcgttggtatcgcgatgtttaatagcgaactgagcgccgaacagttttatcgtcgggcggtttccgccgcggtgacggcgcggcgcaagggcaaaaatcagatcgagttctttgaccccgagcagatggaaaaagcccagcgtcggttaatggaagagcatgacatcctcaccgcgctcgagaatcagcagttcgccatctggtttcaaccgcaggtggatattgccagtggcgatatttgcggtgcggaagttctgcttcgccagcgacaggccgatggcggttggtcgctgccgtgcgatctgattgagcgtattgaaaactgcgggctgatggtgccggtaggctattgggtgatggaagaagcctgccgccagctggcagcctggcagcagcaggggatcatgctgccgttgtcggtgaatgtctcgttactgcagttgctgcatcctgaccgcggcgttgagttgctggcactcatagaacgctatcgtatcgccccgggcaccctggtgctggaggtgacggaaagctgccgtctcgacgatccgcaggcggtgattgacctgctgcgcccgctgcgcgacgccggcacgcgtattgcgctggatgatttcggcatgggttatgccgggttgcgccagttgcaacatatgaaatcgctgccggttgatatcctgaaaatcgacaaggcgtttattgatatgttgccggatgataccagtatggtcccggcgataattcagctcgcacgcgggctcaagctgcggatcgttgctgagggcgttgaaaaagaagaacagttgaaatggttgcaagcggctggcgtggatgtcgctcagggttacctgtttggttgcgccttgccgctggaaagctttatgcagcgcttcctgcaggccgataagaacgatgcaagtttgtaa

SEQ ID NO: 107555 - DNA, 3486 bp, Enterobacter aerogenes
atgcgcaagttctcactaagcttcatcacgctgtctgtcggccttggcctgttgccgctagcgcaggcggagaatacccctgcgcagcagcatctgctggaacaagtgcgtctcggcgaggccagcagtcgtgaggacctggtgcgtcagtcactttataggctggaactgatcgacccgaataaccctgattatcttgccgcgcggacgcgctatctgctgcgccagggcgacaccgccggcgcgcaaaagcaactcgatctgctggcaaagctggccccggaatcgtcggcgctacaagcgacgcgcaacgagatgaagatcagtaccggtagcggtcgccaggcgttgcagcaggcgcgattgctcggcgttgccgggaaggtcgatgaagccgtcgccgcctatgaaaagctcttcggcggcgtcccaacggataccgaagccgctatcgaatactggacgctggtggcgcgattgcccgctcgccatagcgaaggcgtcagccagctgaaaaaactcaatgccagtactccggataacgtcacgctattgacctcgctggcgaagcagatgttttcagataacaagccgcaggagggcttcgcctatctggaacagatggcgcgttcggcctcaggccgcggaattgcggctgatatgtggctcggcgaaattaaaagtatgccggtcagcagaggcagcgttcaggcactacagcgattcctgctccagttccccgccggttccgctgccgctaacgcccgggtgttgctggcgcagcagcaaactcaactgcaagacccagccttcctcgccaaaagcgaagggctggcggcggtgaaatccgggaatgcggcgcaggcggtggccgatctgcagcaggcggtacgcgccgatgcccgcgatagcgatgccgtcggcgcgctgggcgccgcctactcacagcgcggcgatcgggcgcgggcggtggcgcagcttaataaagcgatcgcgatggatccgaaaagcccgaatcgcgataagtgggacagtttgctgaagaccaaccgctattggttgttgattaaacagggcgataacgcgctgaaagcaggccaactggcgcaggcgcaaaatgcgtacgcccaggcgcagcgggtggataacaccgacagctacgcggttctggggttaggcgatgtcgccgcggcgcgcaaagatgacgccgccgccgaacgctactatcgccaggcgttacgcatggatcgcgacaataatctcgccgtacgcggtctggcgaatgtttatcgtcgtgaatcgccggaaaaagccagcgcctatattgccagcctccccgccagccagcggcgcagtattgatgatatcgaacgcagtcttaccaacgatcggctggaaaaacaggccgaagcgctggaaagccagggcagctgggcgcaggccgcggaggtgcagcggcggcgtctggctctggatcctgaaagcgtgtggataacctatcggttggcgaaagatctggtcagcgccggccagcggccggaagcggacgcgctgatgcgtaacatggccaaccgcaagccgggcgatgctgaacgggtttacgcctacggcctctatttgtccggtaataatcaggatgatagggcgctggcgcaaattaacgcgctgccgcgcggacagtggaccgataatattcgtgaactggaagggcgtctgcaaagcgacaaagtgatgcgcgaggccaaccaacttcgcgatagcgggcaggaagcgcaggccattgccttgattaaacagcagccggaatcgatccgctacgatctggcgttggcggattgggcgcagcagcgcggcgatagcgcagaggcgatagcccagtaccatcgggtgctgagccagcaggctgataatggcgatgcgcgtcttggcctggcggaagtctatctcgccgagggcgataaaaacgccgcccgcgcgcaggtcgcgcagttgaaggatgcggatacggaatcgatcaacatgcagcgccgggtagcgctggcccgcgccggatttgacgataccgcgggcgcgcaacaaatatttgaccgcatcgtgccgcaggcgaaaagccagccgccgtcgatggaaagcgcgctggtgctgcgtgatgccgcgcgtttccagacgcaaagcgagcaaccacagcaggccctggaaagctataaagacgcgatggtggccgctggcgtgacccgcgttcgcccgcaggataatgacacctttacccgcctgacccgtaacgatagtcaggatgactggctgaagcgcgggatccgcagcgacgccgccgatctttatcgccagcaggatcttaacgttacccttgagcacgactattggggatcgagcggcaccggcggttattcagacctcaaagcgcacactaccatgttgcaggtggacgcgccgttgtatgacgggcggatgttcttccgtaccgatgtggtgaatatgaacgccgggtcgttttccactaatagcgatggcggttattcgccgagttggggaacctgtggtgaaattagctgctatggcggcagtaaaaatcagagcgatggcggcgccagcgtagcggttggctggaagaacgacacctggagcggcgatatcggcaccacgccgatgggctttaacgtggtggatgtcgtggggggactgagttatagcggcgatgccggcccggtcggctataccgtcaacgtccaccggcgacccatttccagctcgttgctctccttcggcgggcaaaaagataatcctaacgacggccataccggcactacctggggcggcgtccgcgccgccggcggcggcatcagcctcagctacgataaaggcgaggctaacggcatctggtcatcgctgggggctgaccaactcaccggcaaaaacgtcgaggacaactggcgcgtacgctggatgaccggttactactataaagcgatcaatgaaaataatcgccgggtgaccgtcggcctgaccaatatgatctggcactacgacaaagacctcagcggttacacgctgggccagggcggttactacagcccgcaggagtatctctccttctcggtgccggtcatctggcgtcagcgtaccgaaaactggtcgtgggaactcggcgggtcggtgtcgtggtcccattcgcgtacgcaaactcatgcgcgctatccgttgctgaatttgattccttcacagtatcgctacgatgccagccagcaaaaagaagagggcggcagcagccagggtttcggttataccgcaagggcgctggtggaacggcgagtcaccggcaactggtttgtcggcgcggctgtggatattcagcaggctaaagattacaccccgagccacgcgctgttgtacgtgcgctattctgcttccggctggcagggcgacatggatatgccgccgcagccgttggtgccttatgcggattggtag

SEQ ID NO: 107556 - DNA, 1107 bp, Enterobacter aerogenes
atgaacgcatttcgtggggtacttctctcggtattgatgctggcggcggggcaggttagcgccgcctgccagtggcccgcctgggagcagtttaaaaaagcgtatgtcagcgccgaagggcgggtcatcgaccccagcgatgcgcgcaaaatcaccacctccgaagggcaaagctatgcgctgttcttcgctctcgcggccaacgatcgccagggcttcgataagctgttccagtggacgcagaacaacctggcgcagggcgatctgcgcgcccatctgccgggatggctatgggggaaaaagagcgaggatgaatggacggtgctggacagcaattcagctgcggattctgatttgtggattgcctgggcgctgctggaagccggacgcctgtggaaggttgataactatactgaggtaggaaaagcgctgctggcgcggattgccgatgaagaagtcgctgatgttccggggctcgggccgtcggtactgccggggaaagttggtttcgcggacgacaagggctggcgctttaatccaagttatctgccgccgcagctcgccacctactttacccgctttggcgcgccgtggccgaagatccgcgacagcaatctgcgactgctgctggaaacggcgccaaaaggcttctcgccggactgggtgcgctatgagaaaggtagcggctggcagttgaaaaccgataaaccgattattggcagctatgacgctatccgcgtctatctgtgggtcggaatgctcaataacgccgataaacaaaaagcgccgctgttggcgcgtttcaaaccgatggcggttcagacgatcaaacagggattaccgccggaaaaaaccaatatcgccagcgggaaaacgactggcgaggggccggttggcttctccgcagccatgctgccgtttttacaagatgacgacgcccgcgcgctacaacgccaacgggtcgccgatcattatcccgacgcggacgcctactacagcgcggtgctgacgctgttcggccaggggtgggatcaacatcgttttcgtttcgccgcgggtggcgaattacaacctgactggaaccaggcatgcgcaagttctcactaa

SEQ ID NO: 107557 - DNA, 2316 bp, Enterobacter aerogenes
atgagcagttggtaccccttcgcaacattttcggctccggcgacgtcgccggaggccgtggttgccggagttccagcgacagcgggagctgttcagccagcgccggtcgttaacgatggccagccaacggcgacggttatcgattctgccgccgcgccggtggtggtggcggacaacattccctctcgcgatgtgaagctgacttttgcgcaaatcgcgccgccgccggggagcatggtgctgcgcggttcgcatcctgagggcgccgtagagttcggtatgcgcagcgatgaggtggtcgccaaagcgctgctcaatcttgactacacgccgtcgccatcgctgctgccggtgcagtctcaactgaaggtttatcttaacgacgagctgatgggcgtactgccggtcaccaaagagcaactgggtaaaaaagtgagcgcccagatccccgtcgatccgctgtatatcaccgattttaaccgcgtgcggctggagttcgtcggccactatcgcgacgtttgcgaaaacccggcgagcagtacgttgtggcttgatatcggtcgtgagagctcgctggatttaacctatcagtcgctgcaggtccgtaacgatctctcccacttcccggtgccgttctacgactcgcgcgacaaccgtccgctgacgttgccgatggtttttgctgctgcgcctgacgtcatacaacagcaggcggcggcgattgtcgcctcctggtttggcagcaaggctggctggcgcggccagcagttcccggtccacttcaatgagataccggaacgtaacgctatcatcttcgcgaccaacgataagcgtccggacttcctgcgcgaccatccgccggtgaaagcgccgactatcgaaatggtcaaccatccgagcaacccgtacgtcaagctgctggtgatcttcggtcgcaacgatcaagacctgctgttggcggccaagggcattgcccaggggaatattttgttccgcggcgatagtgtcgtcgtggatggcgtgaaagagttgaaggcccgccagccctatgacgcgccgaactgggttcgtaccgacaggccggtgactttcggcgagctgaaaacctatgaacagcaactgcaatcaagcggcctggtgccagattcgattaacgtggcgctgaatctgccgccggatctgtatctgctgcgcgctaacggcatcgatatggacctgaagtatcgctataccatgccgccgatcaaagatagctcgcggatggatatcagcctaaacgatcagttcctgcagtcgttcagcctcaatagctcgcaggatgtgaataagctgattttacgcctaccggtgctgcaggggttactggacggccagaaccaggtgaccatacccgcgctgcgcctgggcgcgatgaaccagctgcgcttcgatttccagtacatgaacccgatgcccggcggcaacatcgataactgcattaccttccagccggtgcagaatcacgtggtcatcggcgatgactccaccatcgatttttcgaagtattaccacttcctggcgatgccggatctgcgcgtcttcgccaacgccggtttcccgtatacccgcatggccgatctctctcagacgctgatcgtggtgccgaaaacgcctgatgcgggccaggtggagacgctactgcaggcggtaggtggcatcggcgcgcagagcgggctggcggctatcaacttgcagatgaccgatgacggtaaccagattaagggcaaagatgccgacctgatgctgattggcgctattccgccatcgctgaaagacgacagcaaaatcaatctgctggttgaggcgaccaaaagctgggtgaaaacgccgatgcgtcactatgacctggccagcatctacccggacgatgacgcccgcacgccgcatacgcgaaccgacatcacctcttccgggccaatggcggcgattatcggcttccagtcgccatacaacgaccagcgcagcgtgatcgccctgatggccgatagcccacgcggcaacgagctgcttacaaacgccttaaatgacagcggcaaacgggcggcgatgttcggttcggtggcggtgattcgcgaatccggcgtcaatagcctgcgggttggcgatatctattatgtcggccatctgccgtggttcgagcgcatctggtttgcgctctccagccatccgatactgttggcgattctggcggccgtcagcattgtgctgctggcgtgggtgctgtggcgcatgctgcgtattctcagccgtcgccgtcttgatcctgatgatgagtaa

SEQ ID NO: 107558 - DNA, 2619 bp, Enterobacter aerogenes
atgatccgcctgagtacgttgctgctggcgccgccggtgggcgagcgcttgagtgaacgttatgatgactatcgtcagcatggcgcgtcggtgctctcggcttttctcggttgcctgtgggcgtcgctggcgtgggcattcatgccgcttgagacgccgcgctggcaagctattcgcgaacaccatggcgactattttccgcatattaatccgcatcgcccacgcccgttagatccgctgcgctatttgctgcagtcgctctggctgctggcgacccgggtgccggaagcggataaaaaaataaactggcgctcgctggcggcgctggaaggggttcacgggcgctacgcgcagtggctggaaaaattaccggagaaggtcaacacccgtaccggccacctcgataagcagaaagagcttgaacatctgcatccgcagttgcggcggctggtacttggcaccattaccttcttctcgctgattctggcgcttctgtgtatcacccagccgtttaacccgctgtcgcagtttatcttcctgctgttactgtggggcgtcgcgctgctggtgcgacgtattccggggcgtttctccgccctgatgttgatcgtgttgtcattgaccgtttcttgtcgctatatctggtggcgctatacctccacgctgaactggaacgatccggtcagtctggtgtgcgggctgattttgctgtttgccgaaacctacgcctggattgtgctggtactgggctatttccaggtggtgtggccgctgaatcgccagccggtgccgctaccggaagatatgaacgaatggccgacggtggatatcttcgtgccgacctacaacgaagatctcagcgtggtgaaaaataccatctacgcttcgcagggtatcgactggccgaaggataagctcaatatctggatccttgatgacggcgggcgcgaagagtttcgccagttcgcaaaagatgtcggcgtacattacatcgcgcgtaccagccacgaacatgccaaggccggtaatatcaacaatgcgctgaagtatgcgaaaggcgagttcgtctctattttcgactgtgaccacgtgcccacccgctcgttcctgcagatgaccatgggctggttcctgaaggataaaaagctggcgatgatgcagacgccgcaccactttttctcgccggatccgttcgaacgcaacctgggccgttttcgtaaaacgccaaatgaagggacgctgttttacggcctggtgcaggacggcaacgacatgtgggatgcgacctttttctgcggttcctgcgcggtaattcgccgcggcccgctggatgaaatcggcggtatcgccgttgaaacggtcaccgaggatgctcacacttcactgcgcctgcatcgtcgtggccatacctccgcctatatgcgcatcccgcaggcggcggggctggcgacggaaagtttgtcggcgcatatcggccagcgtattcgctgggcgcgcgggatggtgcagattttccgtctcgataaccccttattcggtaaagggttgaagctggcgcagcgtatctgctacgtcaacgcgatgttgcactttttgtccggtataccgcggcttatcttcctcaccgcgccgctggccttcctgctactgcacgcctatatcatctatgcgccggcgctgatgatcgccttgttcgtgctgccgcatatgattcatgccagcctgaccaactcgaagatccagggcaagtaccgccactctttctggagtgaaatctacgaaacggtgttggcctggtatatcgcgccgccgaccttcgtcgcgctgattaacccgcataaaggcaagtttaacgtcaccgccaaaggcggactggtgaaggatgagtatgtcgattgggttatctcccgcccctatatttatctggtgttgctcaatctggtgggcgtggcggtcggcatctggcgctttatgtacgggcccgagaacgaaattttgaccgtctgggtcagtatcatctgggtgttttataacttaatcatcctcggcggcgccgtggcggtgtcggtggagagcaaacaggtgcggcgttcgcaccgcgtagagatgtcgatgccggcggcgattgcccgcccggatggccacctgttctcctgtaccgttcatgactactcggacggcggcctggggataaaaattcacggtgaagcgcgggtactggaagggcaacacgtgaatctgctgctcaaacgcggacagcaagaatatgacttcccggtacgcgtcgcgcgggtgaacggcggcgaagtcggtctgcaattgctgccgctgacaaaccagcaacatattgattttgtgcagtgtacgtttgcccgcgctgatacgtgggcgctttggcaggatagcttcccggaagataagccgatggaaagcctgctggatatcctcaagctggggttccgtggatatcgtcacctggcggagttctcgccgccgtcggtgaaggttattttccgctcgctcacctcgctggtggcctggattgtatcgtttttaccgcgccgtcccgaacgcgccgcggcggtgctttcggcagaaccggcaatggctcaacaatga

SEQ ID NO: 107559 - DNA, 738 bp, Enterobacter aerogenes
atggcgattctgggattacaaggcatacgcggcggcgtaggcaccacctccattaccgccgcactagcctgggcgctacagctgctcggcgaaacggtgctggtggtcgatgccagcccggacaatatgctgcgcttttttttcaacgttgatttcgaccatcacaacggctgggcgcgctcgttgattgacggtcgcgactggcgcgacgccggactgcgctacaccgcgcatatcgatcttctgccgtttggccgcctgacccctggcgaacgcgagcacgttgataaactgagtccgaccctggaacccatcgcagcgcaaatcaaattgctcgatcagcaggggagccaccgctggctgctgcttgatattccggagggctactctccgcttacccgcgaactgctgagcgtctgcgatcgtgcgctacaggttgtgcaccccgacggtaacagtcatatacgtctgcatcagcaggcactgcctgccaacgcggatattttgattaacgacctgcgcgtcggcagccagctgcaggaagatctctatcaactgtggctggaaagccagcggcgtattttgccggtcacgattcaccgcgatgaagcgatggcggagtgtctggcggcgaaacagcctcttggcgaatatcgccaggattcgctggcggcggaagaggtgttaacgctggccaactggtgcctgctgcactatgccagggagggggcggcatga

SEQ ID NO: 107560 - DNA, 189 bp, Enterobacter aerogenes; identical to SEQ ID NO: 87647

SEQ ID NO: 107561 - DNA, 1557 bp, Enterobacter aerogenes
gtggatattgtatatacgttgggtatttcatcgttatgggacgaagtatgccatatgcccgttggcggggtgtggtggcttaatgtcgaccgctatgccgacgccgtcagcctgatgaatcaaacgctggaaagccaggcgcaggacagcaaagtcgccgccatagtgatgggaaaaaaccctaaagaagtcatgtcattaaaaaaagatcgcggccctaataaaatcgcattattcaccatgcccgatcgcccggaaggcctgaaggagttgcaccgcgacctgctttgttcggtagatcctggcaattatttatttattctgctatgtacagaaaattcctggcaaaatataaaaacagaagaattactccattgggtagaaaaatcgaatcgatgggccaaatatcataactgctctcttatgatacttaattctgctaacgataccgacaaacaactttccccgttattacgccagtatcgagccctttccgggctggcgagcattcgttatcagggtgatagccatctatttgatatcgcatggtggggcagtgagaaaggtattagcgcgcagcaacagttggttattttacacgatgatgagggctggcgactggcgcaaaacgaagaagcggtggtacagccgcgcagcgacgaaaaaatcgtcctcagtaatttgcgcgtgctggaaggggcccccgcgctttccgaatactggacgctgttcgaaaccaatgatgccgtctttgaagccggtcgtaccgcacaagcggccaccttgctattttccatcacccagaacgaacaaatagagcagctcggccgctatatccataccctgcgtcgccagcgcggcagcgccctaaaaatcgtggtacgtgaacaaacgccgagcctgcgcgccactgatgaacgcttgctgctaagcagcggcgccaacatggtgatcccctgcagcgccgggctttcacgctgcctgacgctcattgaaagcgtgcaaaagcagaaatttactcgtcacgttccggaagacttcaacacgttgttgacctggagccggccgcttaaacttcgcggctatcaaaagtgggacgccttctgtgaagcagtcggtaatatcatggccaacacgctgctgccgccggatagcaaaggggtgatggtggcgttacgccctgcgccggggctacgcgttgaacaggcattaaccctgtgtaaacctaaccgcatgggcgatatcgtgacgatcggcaataatcgattagtgctgttcttatcgttttgccgggtaaatgacctcgacactgcattaaaccatatcttcccattaccgaccggagacattttctctaaccgtatgatttggtttgaagacaagcaaatttcagcggaaatcctgttgatgcgaggcctctccccggacaactggaacacgccgctgccaattaccataggcaaaaacgaagcccttaacgttaagcacgatgggcgccagtggcggcgaatcccggaaccctggcggctctccaccgacggagaaccgcggtcatga

SEQ ID NO: 107562 - DNA, 198 bp, Enterobacter aerogenes; identical to SEQ ID NO: 87645

SEQ ID NO: 107563 - DNA, 1680 bp, Enterobacter aerogenes
atgaccaaagcaaaaactaccgctacgccgcttccgctatggcagtactggcgcggcctgtctggctggaacttctattttctggtgaagtttgccctgctgtgggcggggtacctgaacttccatccgatgcttaacctggtgttcctcgcctttctgctggtgccgatcccccgagaaaaactgcaccgggtacgccactggatagcgattccgctcggctttgccctgttctggcatgatacctggttaccgggtccggaaagcatcatgagccagggttcgcaaattgccggtttcagcgccgattacatctgggatctgatcacccgctttattaactggaatatggtcggcgccttctttgtgctgctggtgctgtggctattcatcagccagtggctacgcgttaccgtatttgtttcggctatcatggtctggctggttatcagcccgctgctgccctccttcaccttatggcctgccggtcagccgaccacggcagcggccacgccggcggcaacaaccggtggaaccacaacagccgcggcatccaccagcgctgccgccagcggcgatatcccaccgcagaccgaaccgccaacctcggctaacctcagcaactggctgaaaactttctatgcttctgaacagaaaagaaaaacgtcattccccgctcagcttcctgaggatgcgcagccgtttgatctgctggtgatcaacatctgttccctgtcatggtcggacatcgaggctgccgggctgatggatcacccgctgtggaaacatttcgatattgtcttcaaaaacttcaactccgcgacctcctacagcggcccggcagcggttcgcctgctgcgcgccagctgcggccagctatctcatagcaacctgtatcagccatcgggcagcgagtgctatctgttcgaaaatctggcgaaactgggctttacccaacagctgatgctggggcataacggcgtattcggcgacttcctcaaagaggttcgctcactcggcggcatgcaaagtccattgatggatcagagcggtttgccggttatcctgcaaggcttcgacggatcgccggtttacgacgaccaggcgacgctcgatcgctggctacagtccaccgagaagcttaacacgccgcgtaccgcgaccttctacaacacgctgccgctgcacgatggcaaccattatcccggccaaagcaaaacggcagactacaaagctcgcgcgcagaaattctttgatgagctggacgccttcttcaccgaactggaaaaatcggggcgtaaagtgatggtggtggtggtgccggaacacggcgccgcgctgaagggggataagatgcaggtttccgggctgcgcgatatcccaagcccatcgattaccaacgtccctgcggcggtgaaattcttcggcatgaaggcgccgcaccagggcgccgcggtggaaatcacacagccttccagctacctcgcggtttctgaactggtggtgcgcgccctggacggcaagatgtttaccgaggataacgtcaactggcagcagtacaccgctaacctgccgcagaccgcggcggtatcggaaaactccaacgctattgttattcagtatcagggcaaaccctacgtgcaactcaacggcggcagttgggtgccatatccgcagtaa

SEQ ID NO: 107564 - DNA, 1014 bp, Enterobacter aerogenes
atgagtacgcaaaaggccgccacgcaacaaccgctgttgcaggccattgatctgaaaaaacactatccggtgaagaaggggctgtttgctccggaacggctggtgaaagcgctggacggcgtctcctttactcttgagcgcggtaaaacgctggcggtagtgggggagtcgggctgcggtaaatcgacgctgggtcgtttgctgacgatgattgaaattcccactggcggcgagttgtattatcaggggcaggatctgctcaagcacgacccgcaggcgcaaaagctgcggcggcaaaaaatccagattgtgttccagaacccgtatggttcgctgaacccgcgtaaaaaagtggggcagattctggaagagccgctgttgattaacagcagcctgagcaaagagcagcggcgtgaaaaggcgctggcgatgatggcgaaggtgggcctgaaaacggagcattacgatcgctacccgcatatgttctccggcggtcagcgccagcgtatcgccattgcccgcgggctgatgctggatccggatgtggtgattgccgatgagccggtctcggcgctggatgtttcggtacgcgcccaggtgctgaacctgatgatggatttgcagcaggatttagggctgtcctacgtgtttatctcccacgacctgtcggtcgtcgagcacatcgctgatgaagtcatggtgatgtatcttggccgctgcgtagagaaggggaccaaggatcagatctttaataacccgcgtcatccgtatactcaggcgctgctgtcggcgacgccgcgactgaacccggacgatcggcgcgagcgcatcaagctgaccggcgaactgccgagcccgctgaatccgccgccgggctgcgcctttaatgcgcgttgccgccgacgctttggcccatgcacccagcttcaaccgcagcttaaggattacggcggccaactggtggcctgctttgccgttgatcaggatgagaatccggagaaagcgcgggcgtga

SEQ ID NO: 107565 - DNA, 984 bp, Enterobacter aerogenes
atggcgttattaaatgtagataagttatcggtgcatttcggcgatgagaatgcgccgttccgcgccgtagaccgcatcagctatagcgtgaagcagggcgaagtggtcggcatcgtgggggaatcgggttccggtaagtcggtgagctcgctggcgatcatgggactgattgattaccccggccgggtgatggcggacaaactggaatttaacggccgcgatttgcagcgtatttcggaaaaagagcggcgccagctggtgggggcggaagtggcgatgatcttccaggatccgatgaccagcctcaacccgtgctttaccgtcggctaccagattatggaagcgattaaggtccatcagggcggcaataagcaaacccgccgccagcgggcgatcgacttgctgaacctggtgggtattcctgacccggcgtcgcggctggatgtttacccgcaccagctttccggcgggatgagccagcgcgtgatgatcgcgatggcgatcgcctgccggccaaaactgctgattgccgatgaaccgaccaccgcgctggatgtgaccattcaggcgcagattatcgaactgctgctggagttgcagcagcaagagaatatggcgctggtgctgattacccacgatctggcgctggtggcggaagccgcgcataaaattatcgtcatgtacgcgggtcaggtggtggagaccggtgatgcgaaagatatcttccgcgcgccgcgtcatccttacacccaggcgttgctgcgggcgctgccggagtttgcccaggataaggcgcgtctggcctcgctaccgggtgtggtgccgggtaaatacgatcgtcctaacggctgcctgctgaacccgcgctgcccctacgcaacggataaatgccggagcgaagagcccgcgcttgcggatctcgacggcgaccgtcagtcaaaatgccactacccactcgatgatgccgggaggcctggattatga

SEQ ID NO: 107566 - DNA, 903 bp, Enterobacter aerogenes
atgtcacaaattacagaaaataaagttgtcgccgcaccggtgccaatgaccccgctgcaggagttctggcactatttcaaacgcaataagggtgccgtcgtcgggttggtgtatgtggcggtgatgatcatcatcgcggtattcgccaactttctcgccccttataacccggcggatcagttccgtgattcgctgctggcgccgccgttctggcaggatggcggcagcctggcgcatctgctgggcaccgatgacgtgggtcgcgacattctctcacgcctgatgtacggcgcgcgcctgtcgctgctggtgggctgtctggtggtagtactgtcgctgatcctcggcgtggtgctggggctgattgctggctatttcggcggggtggtggactccatcatcatgcgcgtggtcgatatcatgctggcgctgcctagcctgctgctggcgttggtgctggtggcaatcttcgggccgtcaatcgtcaatgcttcgctggcgctcacctttgttgccctaccgcactatgtgcgtctgacgcgcgcggcggtgctggtggaagtgcaccgcgattacgttaccgcttcccgtgtggcgggcgccggcgcgatgcgccagatgttcgttaatattctccctaactgtcttgcgccgctgattgttcaggcgtcgctgggcttctctaacgccattctcgacatggcagcgctggggttcctcggtatgggcgcgcagccgccgacgcctgagtggggcactatgctttccgacgtattgcagttcgcgcaaagcgcctggtgggtagtgaccttcccgggtgtggcgatcctgctgacggtgctggcatttaacctgatgggtgacggtctgcgtgacgcgctcgatcccaaactgaagcagtaa

SEQ ID NO: 107567 - DNA, 1020 bp, Enterobacter aerogenes
atgttgcagtttattctccgacgtttgggactcgtcatcccgacatttatcggtattacccttctcacctttgctttcgttcatatgatccccggcgatccggtgatgattatggcgggcgaacgtggtatttcccccgaacgtcacgcgcagctgctggccgaaatgggccttgataagccgctgtggcagcaatatgcccattatatttggggcgtactgcacggtgatttagggatctcgctgaaaagccgaattcccgtgtggcaagagtttgtgcctcgcttcaaggccaccctcgaactgggcgtctgcgcgatgattttcgccgtcgccgtcggtattccggtgggcgtgctggctgcggtaaaacgcggctccatctttgaccacactgctgtggggctggcgctgaccggctactcgatgcctatcttctggtggggcatgatgctgattatgctggtttcggtgcagctgaatctgacgccggtctccgggcgtatcagcgatacggtattctttgacgataccctgccgctgaccggttttatgctgattgacaccgccatctggggcgagcagggcgactttattgatgccttaatgcatatgatcctacccgccatcgtgctgggtacgattccgctggcggttatcgtgcgtatgacccgctcatcgatgctggaagtgcttggcgaggattacatccgtaccgcacgcgctaaggggttgacccgcatgcgggtgattgtcatccatgcgctacgcaacgcgatgctgccggtggtgacggtgattggtctccaggtgggcacgctgctggcgggcgccattctgaccgaaaccattttttcgtggccaggtttaggccgctggcttatcgatgcgctacagcgccgcgattatccagttgtgcagggcggggttctgctggtggcgacgatgattattctcgtcaacctgctagtcgacctgctgtacggcgtggtgaacccgcgtatccggcataagaagtaa

SEQ ID NO: 107568 - DNA, 1608 bp, Enterobacter aerogenes
atgagtatttccttgaaacagtcagggatgctgaagcttggtctgagcctggtcgccatgaccgttgccgcaagcgtacaagctaaaaccctggtttattgttctgaaggttcgccggaaggctttaacccacagctcttcacctcgggtaccacctatgacgctagttcggtgcctatttacaaccgtctggttgaattcaaaaccggtacgactgaagttattcctggtcttgctgagaagtgggatgtcagcgaggacggtaaaacctataccttccacctgcgtaaaggcgtgaagtggcaggataataaagactttaaaccaacgcgcgagctgaatgccgacgacgtggtgttctccttcgaccgccagaaaaatgacaaaaacccgtaccataaagtctctggcggcagctatgagtacttcgaagggatgggtctgcaggacctgattagcgaagtgaagaaagtggacgataataccgtccagttcgtgctgactcgcccggaagcgccgttcctcgctgacctggcgatggactttgcttctattctgtcgaaagaatatgccgacaacatgctgaaagccggcacgccggaaaaagtagaccttaacccaatcggcaccggcccattccagctgctgcagtatcagaaagactcgcgcattctgtataaagccttcccgggctactggggcaccaagccgcagatcgatcgtctggtcttctccatcactccggacgcttccgtacgctacgccaagctgcagaaaaacgagtgccaggtgatgccgtatccgaacccggctgacatcgcgcgcatgaaggaagataaaaacatcaacctgctggaacagccgggtctgaacgtgggttatctatctttcaacaccgagaaaaaaccgctggataacgtcaaagttcgccaggcgctgacctacgcggtgaacaaagaagcgatcatcaaagccgtttatcagggcgcaggccagtcggcgaagaacctgatcccgccgaccatgtggggctataacgatgatgttaaagactacacctacgatcctgagaaggcgaagcagctgctgaaagaagcgggcatggaaaaaggcttcaccatcgacctgtgggcaatgccggtacagcgtccgtataacccgaacgcgcgccgtatggctgaaatgatccaggccgactgggcgaaagtcggcgtacaggccaagatagttacctacgagtggggcgagtacctgaaacgtgcgaaagcgggcgagcatcagaccgtgatgatgggctggaccggcgacaacggggatccggataacttctttgcgaccctgttcagctgcgctgcggcgaaagacggctctaactactctcgctggtgctacaagccgtttgaagacctcattcaaccggcacgcgccaccgacgaccacaacaagcgtattgaactgtacaaacaggctcaggtagtgatgcatgaccaggctccggcgctgatcatcgcccactccaccgtttacgagccagtgcgtaaagaagtcaaaggctatgtggttgatccgcttggcaaacaccacttcgataacgtctctgtcgaataa

SEQ ID NO: 107569 - DNA, 1692 bp, Enterobacter aerogenes
atgaaatacattaaaacgatgtcgcagcagaagctaagtttttggcttgcgctgtacatcggctggtttatgaacgccgcggtgttttgccgccgcttcgatggctacgctcaagagtttaccgtctggaaagggttgtccgggttggtggaactggtagcgacggttctggttactttcttccttctgcgcctgctgtcgttattcggccgccgggtatggcgcatattagcgacgctggtggtgctgttttccgcggcggcaagctattacatgaccttcctcaacgtggtcattggctacggtattatcgcttcggtgatgaccaccgatattgacctgtcgaaagaggtcattggctggcatctgatcctgtggctggccgcggttagcgctttaccgctactgcttatctggagcaaccgctgccgtaagacgctgctacagcaggtgaaaacgccaggtcagcgggcgaaaaatatcctgatagtcgtgctggccgggctgatggtctgggggccgattcgcctgctggaagtgcgccagaagaacgtcgagcgcaattcagaagtcgatatgccgagctacggcggcgtgattgccaactcttacctaccttctaactggctgtcggcgctcgggctgtacgcctgggcgcaggtggatgagtcgtccgataataaatcgctgattaaccccgcgaaaaaattcacctacgtagcgccgcaggatcttgatgatacttatgtggtgtttattatcggcgagaccacccgctgggatcatatgggtattctcggctataaccgtaataccacgccgaagctggcgcaggagaagaatcttgtcgccttccgcggtacctcttgcgataccgccaccaagctgtcgttgcgttgtatgttcgtgcgcgagggcggggcggatgataatccgcagcggacgctgaaagagcagaatgtgtttgctgttctgcaccagttaggctttgccggcgacctgtacgcgatgcagagcgagatgtggttctacagcaatacgatggccaacaatatcgcctatcgcgagcagatcggcgccgagccgcacaaccgcggcaagaacgtggatgatatgctgctggtcgatgaaatgaagcgcggcatggagcaaaacccgagcggcaagcgtctgattattctccataccaaggggtcgcattttaactatacccagcgatatccacgcagctttgcgcagtggaaaccagaatgtgtaggggtggacagcaaatgttcgaaggccgagttgattaactcctacgataacagcgtcacttatgtggatcactttatcgtcagcgtgctggaccaactgcgggataaaaaggctatcgtgttctacgccgccgatcacggcgagtcgattaatgaacacgaacatctgcacggcacgccgcgtatgatggcgccgccggagcagttccgcgtgccgatgatggtctggatgtcggataagtatctggcgaatccggatcacgccgcctcctttgcgcgcctcaagcagcaggcggcaatgaaggttccgcaccgtcacgttgagctgtatgacaccattatgggttgtcttggttatacctcgccggatggtgggattaatgagaacaacaactggtgtcgcgtgccggcagcggcgaaagcggcgaaggaatag

SEQ ID NO: 107570 - DNA, 1206 bp, Enterobacter aerogenes
atgaacgctgcaaacactcaatatacccgttggctcacgctgattggcacgatcattacgcaattcgcactgggatcggtttatacatggagtttgtttaatagttctctggccaacaaactggacgagccagtaagccaggtggcattttccttcggcctgttaagtctcgggctggcattatcctcttccgttgccggtaaattgcaggaacgctttggcgtgaaacgcgtcaccatggcctccggtatcctgcttggcgccggctttttcctcactgcccatgccaacagcctgatgatgctgtggctgagcgctggcctgctggtcggtctggcggacggcgcgggctatttactgacgttatctaactgcgtgaagtggttcccggagcgtaaaggtctgatttccgccttctcgattggcgcttatggccttggcagcctcggttttaaatttatcgatagtcacctgttggcgacggtcgggctggaaaaaacctttgttatctggggcgctatcgtgctggtgatgattgtctttggcgcgatgctgatgaaagatgcgcctaatcatcccgcgacgaccaccgcgaacggcgttgtcgaaaatgatttcaccctcgctgaatccatgcgtaaaccacagtactggatgctggcggtgatgttcctgacggcctgcatgagcggcctgtatgtgattggcgtcgccaaagatatcgcgcagggcatggtacatctcgacgtggcgacggcggcgaatgcggttaccgtgatttctatcgccaacctgagcggccgtctggttctgggcatcctgtctgataagatctcccgtatccgcgtgattactatcggtcaggtggtctctctggtcggtatggcggccctgctgttcgccccgctgaatgcaatgaccttctttgcggcgattgcctgcgtggcctttaacttcggcggcaccattaccgtcttcccgtcgctggtgagcgaattctttggcctcaataatctggcgaaaaactatggcgtgatttacctcggcttcggtattggtagtatctgcggttcgctgattgcctccgtgttcggcggcttctatgtcaccttctgcgtcatcttcgctctgctgattttgtcgctggcgctctccaccactattcgccagccgaaaagcgaaatttatcatcaagcacacgcctga

SEQ ID NO: 107571 - DNA, 648 bp, Enterobacter aerogenes
atgataataaagaaatgcaatggcctccggggtgggttggtcccggcgtgcatcactatctgggtgtcgtgtgtttcaggtgctcatgcctggcaacaggaatatatcgctaacgatacaaaaagtaatacgtctgaacgctatacatgggatagcgatcaccaaccgcgttatgaagatattctcgccgagcgaatgagagcgtcagaagccccagcagggctggcgttgaatcaggccctggcgccgcctgatttgagtcacggcatgagcgtcggatggaactattcactggccagcggcgtgacctccgggccggtcgccagcttgcgtagcgatctcaatccgccgccagcgacgcgtcgcgcgggcgaaagtatttacgtcaacacgctcggctggcgtatggactatcagcagctgtggggcgtgcatccatgggcgcaggtgagctataaccagtctatctctatcgacaacaatgcgtcgattagccgtggcaaagacggtagctggggcgacgttacgctaggcgccgatatgccgctgggttcgcatctggcggcatgggccacgctttcgcaggcagataatgtgccatcgggtgaaaatacgctgtatctgatgggggtcagcgccaatttctaa

SEQ ID NO: 107572 - DNA, 564 bp, Enterobacter aerogenes
atgcaacgttgcggatgggtaagccaggatcctctttatatccagtatcacgataacgaatggggagtcgccgagagaacgccgcaaaagctgtttgaaatgatctgcctcgaaggccagcaggcggggctctcgtggatcacggttctgaaaaaacgtgaaaactatcgtcaggcctttcaccagttcgacccggttcgcgtagcggccatggatgaagcggacgttgagcgcctgctgcaggatgcgggcattatccgccatcggggaaaaatccaggccatcatcggtaatgcgcaggcgtttctcgccatggaagccaacggtgaagcattcagcgatttcgtctggtcttttgtcgataatcagccgcaagttacccatgcggcgacgctcgccgaaattcccaccaccacaccagcctccgatgcgctatctaaggcgctaaaaaagcgcggctttaaattcgtcggctccactatctgttattcatttatgcaggcctgcgggttagtcaacgatcacgtgaccggttgctgttgctaccccgggagaccagcatga

SEQ ID NO: 107573 - DNA, 441 bp, Enterobacter aerogenes
atgatccaaaaatgggatgccacggagaccggcccgctactcgagttatggctggaaagcacgatttacgcgcatccgttcattgctgaaagctactggcgggaaagcctggaagttgtgcgcgatgtctatcttcccgccgccgccacctgggtgtggcaggagaatgacgcactgaaagggtttatcagcgtgatggattcgcgcttcgtcggggcgcttttcgtcgccccgcaagcgatccgccacggtatcggccgcgcgctgcttgatgaggtcaagcagcactacgactggttaagcctggaggtctatcagaaaaacgtgcgggcggtaaatttctaccacgcgcagggcttccgcatagaagactgcgcatggcaggacgacacccagcacccaacctggattatgcattggccggcggatcaaatgcgctga

SEQ ID NO: 107574 - DNA, 2331 bp, Enterobacter aerogenes
ttgccaacttcatctgcaactaaaaccatcttaaccgcggcccactgggggccaatgctggtggagacggatggtgaaaatgtgatttcgtcccgcggcgcgctggacacccccttcgccaactcgctgcaaacagcggtgcgcgaacaggtgcacagtaaaactcgcgttcgctatccgatggtgcgaaaaggctatctcgcctcgccgcaacagccgcagggcgtacgcggccaggatgaattcgtgcgggtaagctgggagcaggcacttgatctgattgatgcccagcatcgacggatccgcgaaagctacggcccgcagtcgattttcgccggttcctatggctggcgttctaacggcgtgttgcataaggcggcaaccctgctgcagcgctatatgagtcttgccgggggctataccggacacctcggcgattattcaaccggcgcggcgcaggcgatcatgccttatgtggttggcggtaatgaagtttatcaacagcaaaccagctggccgcttatcctggagcacagcgaggtggtggtgttgtggagcgctaatccgctgaatacgctgaaaatcgcctggaacgcctcggatgaacaggggatcccctggtttgatcgcctgcgccagagcggcaagcggctgatctgtatcgatcctatgcgatcggaaagcgttgatttctttggcgaattgatggaatggatcgcgccgcatatgggcactgacgttgcgttgatgctggggatcgcccataccctggtagagcatggctggcaggacgatgaattcctcgcccgctgtaccagcggttatgacattttcgcccgctatttgagtggtgaaagcgatggcgtcgccaaaaccgccgaatgggcggcggcaatctgcggcgtagcggcggaaaaaatccgcgaactggcgaaacttttccacgaaaacaccaccatgctgatgtccggctggggcatgcagcgccagcagtttggcgagcaaaaacactggatgctggtgacgctggcggcgatgctggggcagattggcacgcccggcggcggttttggtctttcttaccactttgccaacggcggcaaccccacgcgccgcgccgcggtgctggcctccatgcagggtagcgtagcgggcggcgtagacgcggtggaaaaaatcccggttgcccgcatcgttgaggccctggaaaaccccggcgcaagctatcagcacaacgggatgacgcggcgctttcccgacatccgctttatctggtgggcgggcggcgccaactttacccatcatcaggataccaaccgcctgattcaggcctggcagaagccggagctgattgtgatttccgaatgcttctggaccgccgccgcgcgccatgctgatatcgtcttaccggcgaccacttcgtttgagcgtaacgatctgaccatgaccggcgactacagcaatcagcatctggtgccgatgaagcgggtggtcgcgccgcgcgatgaagcgcgcgacgatttcgatgtttttgccgatctgagcgaacgctgggaggcgggcggccgcgaacgcttcaccgaaggaaaaaacgatttgcaatggctggagaccttctaccagattgccgcccagcgtggggcgcagcagcaagtgacgctgccgctgtttgccgaattctggcaagcgaaccagctaattgaaatgccggaaaatccggataacgcccgtttctcccgcttcgcggcatttcgcgcagacccgcaggctaatccgttaaaaactgcgagcggaaaaattgaaattcactcgccgaccattgccgggtttggctatgccgattgtccgccgcacccgatgtggctcgaacctgacgagtggcacggcaacgccgaggtgggtcagctgcagatactttccgcccatccggcgcaccgcctgcatagccagttgaaccagacctcgctgcgagaacgctacgccgtcgccgggcgtgaaccgctgactatccatccgctggacgcgcaggcgcgcaatatcgccgacggcgatctggtgcgggtgtggaattcacgtggtcaggtactggccggcgcggtggtcacggaaggtattcgtccgggggtgatttgcctgcatgaaggcgcgtggccggatatcgaccccgatgccggaatatgcaaaaacggcgcggtgaacgtgctgacgaaagatattccgacctcgcgtctgggcaacggttgcgccgggaatacggcgctggcatggctggaaaaatatgatgggcccgcgctggcgctcagcgcatttgatccgccggccaatgcataa

SEQ ID NO: 107575 - DNA, 663 bp, Enterobacter aerogenes
atgaaaaaacgcgtactcatgattgctgctatcgttagcggcacactggctatttctggttgtactaccaacccttataccggcgaacgcgaagcgggaaaatccggcatcggcgcgggtatcggctccttagtaggcgcaggcgtcggcgcgctctcctcttccaaacatgaccgcggcaaaggcgcgctgattggcgcagcggcaggcgcggcgctcggcggcggcatcggttactacatggacgtgcaggaagcgaaactgcgcgaaaaaatgcagggaaccggcgtcagcgtgacgcgaaatggcgacaacatcgtgcttaacatgccgaataacgtcacctttgacagcagcagcgccaacctgaaacctgcaggggccaacaccctgaccggcgtcgcgatggtactgaaagagtacgagaaaaccgccgttaacgtcgtcggctacaccgacagcaccggcagcaacgatctgaacatgcgtctgtcgcaacagcgtgccgacagcgtcgccagcgcgctcatcactcagggcgtagcggccaaccgtattcgcactaccggcatgggcccggcgaacccgatcgccagcaacagcacggcggaaggcaaagcgcagaaccgtcgcgtggaaattaccctcagcccgctgcagtaa

SEQ ID NO: 107576 - DNA, 1017 bp, Enterobacter aerogenes
atggcgaaagcggcgcgagcaaccatcagcgacgtggcgaaagccgcgaagaccggtaaaaccagcatttcacgctatctcaacggcgaaaagcatctgctttccgacgatctgctggcgcggattgaaaaagcgattgccgagctcaactaccgtcccagcctgatggcccgtggtctcaaacatggccgtacccgcctgattggcctgatcatcgccgatatcaccaacccttactccgtgaacgtgttaagcgggattgaagccgcctgccgcgaaaaaggcttcaccttgctggtatgtaataccaacaacgaggtcgatcaggagctgcattaccttgacctgctgcgtagctatcaggttgaagggattgtggttaatgcagtcggcatgcgcgaagaaggcctcaaccgcctgcagcaatcctcgctaccgatggtgcttatcgaccgtaaaatccccgatttcgcctgtgatgtcgtggggctggataacactcaggccgccaccaccgccaccgaacatctggtggaaaagggttttgaagcgctgttgtttttaagcgagccaatcggctccgtaaacacccgccgcgagcgcctcgacgcctttcgcgcgaccctacagcgctatgctggcgtggtggcggaaaacgccgaggtgccgctcaacgacggcgccatgatggataacgtcctgcgccagttccacgcccgccaccgcggaatgcgcaaagcggtgatttccgccaatggcgccctgacgttacaggtcgcccgctcgctgaagcgcgttgacctcatctggggcagcgatatcggcctgctgggcttcgatgagctggaatgggcggagctggcgggcgtcggtattaccaccctcaaacagccaacctggcagattggctatgcttcggtcgaacaggtcgtcaggcgtatcgaaggcggcagcgaccccatctgcgagcgggtcttctccggcgagcttattgtccggggatcaacgtctcgttaa

SEQ ID NO: 107577 - DNA, 750 bp, Enterobacter aerogenes
atggccagaaaaatcattgtcgtcaccgccgcttatggcaacgaccacgttaaagcgcttggcgggcagtccgccgtattaccctttatcgccggttccggcgccgatggcgtggaaattcgccgcgagttgttcagcgcggcggaactgaagcagttgccgacgctggcggccgacattgaaaaacaggggctgctggcctgctactccgcgccacaagcgctgttcaccaacaacggcgagctcaatccccatctcccgtcgttacttgaagaagcgcaaaccctcaacgccctgtggctgaagctctccctcggtaatttcatccataaccaacagctggagacgctgcgcgacattctgagcgccagcggcatggcgctggtggtggaaaatgaccagaccgattgcggccaactggcgccaatgcagcgcttcaaagccgcctgccgggtccatcagatgccggtgacgctgactttcgacatgggaaactggctgtgggttggcgattcgccggaagaagccgcgcgccatctcgcccccgctgtcagctatattcatgtgaaggcggcggagcctcatcatgagaagtatcgcgccgtcccaccggaccaggcggacgctcgctggctggcgctgctcgataacctgcccgccgacgcgccgcgcggtattgaattcccgctggtcggcgacgacctgaccgccgtcacccgccattacgttgatctgttacgcgaggattaa

SEQ ID NO: 107578 - DNA, 936 bp, Enterobacter aerogenes
atggaaaacttagatgtcattaccattggcgaagccatggcgatgtttgtcgccaccgaaaccggcgaactggcggaggttgaacgctttatcaaacgcgtcgccggcgctgaactgaacgtggcgaccggcctggcgcgcctggggctgaaggtgggctgggtgagccgcgtcggcaacgatagctttggccgcttcgtgctgaattcgctggccaaagaaggcatcgacgcgcgcggcgtggccgttgacgagcgctacgctaccggcttccagatgaaatctaaagtcgaaaatggaaccgatcccatcgtggaatatttccgtaaaggatcggctgccagccatctgtcgacggaagatttccgcgctgattacttcaccagcgcccgccatttgcacttaagcggcgtcgccgccgcgctgtccgacagctcgtatgcattgctggaacatgcggccagggtgatgaaagccgaagggaaaaccctctcatttgatccaaacctgcgcccggtactgtggaaaagcgaagccgagatggtggagaaactgaaccgcctcgccttccaggctgactgggttttgccaggcttaaaagagggcgtgattcttaccggccagcagacgccggaaggtatcgctgatttctatctgtcgcgcggcgttaaggcggtggtgattaaaaccggctgcgacggcgcatggttcaagaccgccaacggcgaacagggcgccatcgcagccattaaagtcgacaacgtggtggataccgtcggcgcgggtgatggctttgccgttggcgtaatcagcgcgctgctggaaggcaaaacgctgacgcaagccgtgaaccgcggtaacaaaattggctcgctggccattcaggtacagggcgatagcgaagggctgcccacccgcgaagcgctgggcgaataa

SEQ ID NO: 107579 - DNA, 1281 bp, Enterobacter aerogenes
atgaacagttcaacaaatgcagcaaaacgttggtggtacatcatgcctatcgtgtttatcacgtatagcctggcgtaccttgaccgcgccaacttcagcttcgcatcggccgcgggcattaccgaagaccttggcatcaccaaaggcatctcatcgctgcttggcgcccttttctttcttggatacttcttcttccagatcccaggagcgatttacgctgaacgccgcagcgtgcgtaaacttatctttatctgccttatcctgtggggcggctgcgcctcgctaaccggcgtggtgcataacatcccggcgctggcggccatccgctttatccttggcgtggtggaagcggcggtcatgccggcgatgctgatttacatcagtaactggttcaccaaatcagagcgttcacgcgctaacactttcctgatcctcggtaacccggtcaccgtactgtggatgtcggtcgtatcgggttatctgatccaggcctttggctggcgtgaaatgtttatcattgaagggatccctgctgtgatttgggccttctgctggtgggtactggtgaaagacaaaccgtcgcaggtgaactggctggcggaaagtgaaaaagcggcgctgcaggaacaactggagcgcgaacagcagggcatcaaagcggtacgtaactatggcgaagccttccgttcacgcaacgtggtgctgctgtgtatgcaatatttcgcctggagcatcggcgtgtacggtttcgtactgtggctgccgtcaatcatccgcagcggcggcgaaaacatggggatggtcgaagtaggctggctctcttcagtaccctatctggcggcaacgattgcgatgattgccgtctcctgggcttccgataagatgcagaaccgtaagctgtttgtctggccgctgctgctcattggcgggctggcgttcatcggctcctgggccgtcggcgccaaccatttctgggtctcttataccctgctggtgatcgctggcgcggccatgtatgccccgtatggcccgttctttgcgattatcccggagatgctgccacgcaacgtcgccggcggcgcgatggcgctgatcaacagtatgggagcgctgggttctttctttggttcgtggttcgtcggctatctcaacggcgcaaccggcagcccgtccgcctcgtacattttcatgggtgtggcgcttttcgcctcggtatggcttactttaattgttaagcctgctaagaatcaaaaacttccgcttggcgctcatcacgcctga

SEQ ID NO: 107580 - DNA, 972 bp, Enterobacter aerogenes
atgaagccgtctgtcattctctataaaacgctccccgacgatctgttacaccgtctggaggaacacttttccgtcacccaggtgaaaaacctgcgtccggaaaccgtttcacagcacgcggaggccttcgcccaggcggaaggtttactgggttcgagtgaaaaggttgacgccgcgttactggagaaaatgccgaagctgcgtgcgacctctaccgtgtctgtcggctacgacaattttgatgtcgatgcgttgaacgcgcgcaagattttgctgatgcatacgccgaccgtgctaaccgaaaccgtcgccgatacggtgatggcgctggtgctgagcaccgcgcgtcgggtggttgaggtcgctgaacgcgtgaaagcgggcgaatggaccaggagcatcgggccggactggttcggctgcgatgtacaccataaaaccctgggcatcgtcggcatgggccgcattggcatggcgctggcgcagcgcgcccacttcggtttcggcatgccgattctgtataacgctcgccggcaacatccgcaggcggaagagcgcttcaatgcgcgctactgcgatctcgataccctgttacaggaagcggatttcgtctgcctcattctgccgctgagcgaagagacccaccacctgttcggcgaagcgcagtttgccaaaatgaaatcttccgccatcttcattaacgccgggcgcggtccggtcgttgacgagcaggcgctgattgcggcgctgcaggccggtgagatccacgctgccggtcttgacgtctttgaacatgaaccactggcaaaagattcgccgctgctgacgctgccgaacgtggtcgcgctaccgcacattggttccgccacccacgagacccgctataacatggcggcctgcgcggtagataacctgattgacgcattgaacggcaaggttgagaagaactgcgtgaacccgcaggtgaagtaa

SEQ ID NO: 107581 - DNA, 711 bp, Enterobacter aerogenes
atggcgacaggaaagtcctgctctcgctggtttgcggccgttgcggccatattaatggtggttagcctgagtgggtgttttgataaagaaggcgatcagcgcaaagcgttcatcgacttcctgcagaatacggcaatgcgtagcggcgaacgtctgcctacgctgaccgccgatcagaaaaaacagttcggccccttcgtgtccgattatgcggtgatttacgcttattcacagcaggtcagccaggcgatggatgcgggtctgcgcccggtggttgatagcgttaacgccattcgcgtggcgcaggattataccactcagcgtgagccgctgcggcaggctaacggcgcgctgggcgtgctgagccagcagctggaaaacgccaaaatgcaggcggatgccgcgcatggcgcgctgaagcaggctgatgatcttaagccggtttatgaccaggtgtttaataaagtcgtgacggcgccggcgaatgcgctgcagccgctgattccggccgcgcaggtctttactcagcaactggtccaggtgggtgattttgtcgctcagcaggggacgcaggtgagcttcgtggctaacggtattcagttcccgacgtctcagcaggcaagccagtacaatgcgctgattgctccgctggccgctcagcatcaggcctttaatcaggcctggacggcggcggttaacgccacgcgttaa

SEQ ID NO: 107582 - DNA, 1359 bp, Enterobacter aerogenes
atgaagaaaacaaccatcgatattcaggcttttatcaacgaacatccattcaccaagtaccaatggatgattctcgccttatgttttattaccgtcgcgatggacggatttgataccgcgattattggttttatcgcctcagacctggtacaggaatggggggttgagaaatccgcgctgggcccggtaatgagcgccgctctggtcgggctcgccgtcggcgcgctgacggccgggccgctcgccgatcgtattggccgcaagaaagtgctgattatgtcgatcctggttttcggcggctttagtttgttaaccgcgtttgccagcagccttaaccaactgacattattgcgcttcctcaccgggttgggcttaggcgcggcaatgccgaatgccgcgacgctaatgagcgaatatgctccggaacgccgccgcgcgctgatggtaaacctgatgttcgtcggcttcccaatggggtcgtcgctgggaggctttctgtcggcctggatgatcccgcattatggctggcaaagcgtgctggtgcttggcggcgtgatgccgctgctgctggccgtggcgttaatgttcctgctaccggaatccgcacgctatatggtcgtgaaacggcagccggcgcagcggatcgccgccatcctgaagcgtatcgcgccgttgccggatgcggttgaatttgagctacgtgaagcaggccaggtgaaggaaaagtcagccattggcgtgattttctccccgcgctacgccgtgggcaccgtgatgctgtgcctgacctattttatgggattgctgattttctatctgctgaccagttggctgccgctgcttatccgcgagaccggcgcctcgatgagccaggcttctatcatcaccgctctgttcccgctcggcggcgggattggcgtgctgatcctcggcgcgctaatggataagatcaaccctaacaaagtggttgccgtcggctggctgctcaccggcgtctttgtttgcctggtgggtttctcaaccagcaatctgctgttgatgggggtaatggtgtttatcgctggcagcattatgaacggcgcgcaatcatcaatgccggcgctggctgccgggttctatccaacccagggccgcgccaccggcgttgcctggatgctcggtatcggccgcttcggcgggatcctcggcgccttcagcggcgctttcctgatgcaggcgcaattgtcgtttgaaaccatcttcaccatgctggcgatcccggcgtttttatccgccatcgctctggtagtgaaatacaaactgagccagcgccaacctgccgttaagccaaatgacggtaaaaacctacagaaagcctaa

SEQ ID NO: 107583 - DNA, 291 bp, Enterobacter aerogenes; identical to SEQ ID NO: 105951

SEQ ID NO: 107584 - DNA, 213 bp, Enterobacter aerogenes; identical to SEQ ID NO: 87623

SEQ ID NO: 107585 - DNA, 1620 bp, Enterobacter aerogenes; identical to SEQ ID NO: 105953

SEQ ID NO: 107586 - DNA, 2070 bp, Enterobacter aerogenes
atgtctgagaaaactttcctggtggagatcggcaccgaagagctgccaccaaaagcactgcgcagcctggctgaatccttcgctgccaactttactgcggaactggacaacgctggcctcgcgcacggcgccgtcgaatggtttgccgcgccgcgccgtctggcgctgaaagtggcgaatctggccgcctcgcagccggatcgtgaagtcgaaaaacgcggcccggccattgcccaggcgtttgacgctgaaggtaaaccaagcaaagcggccgaaggctgggcgcgcggctgtggtattaccgtcgatcaggctgaacgtttgaccaccgataaaggcgaatggctgttgtatcgcgcccacgttaagggggaaagcgcgcaaacgctgctgccgaacatggttgcgacctcgctggctaagctgccgatcccgaaactgatgcgctggggcgcttctgacgttcactttgtgcgtccggttcacaccgtgaccctgctgttgggcgatcaggttgtcccggcgaccattctgggtatcgcttccgaccgtatcatccgcgggcaccgttttatgggcgagccggaattcaccatcgacaatgcagaccagtatccgcagattctgctggagcgcggtaaagtgatggccgactacgccgagcgtaaagccaaaatcaaagcggatgctgaagcggcggcgcgtaagattggcggtaatgctgacctgagcgaaagtctgctggaagaagtgacctcgctggtcgaatggccggtagtgctgacggcgaagtttgaagagaaattcctcgcggtgccatccgaagcgctggtttacaccatgaagggcgaccagaagtacttcccggtctatgcaaacgacggcaaactgctgccgaacttcatcttcgtggcgaatatcgagtccaaagatccacagcagatcatctccggtaacgagaaggtcgttcgtccgcgtctggccgatgccgagttcttcttcaataccgaccgtaaaaaacgtctggaagataacctgccgcgtctggaaaccgtgctgttccaacagcagctgggtaccctgcgcgataagaccgatcgtattcaggcgctggcgggctggattgccgaacaaattggcgctgacgttaaccatgcgacccgcgcgggcctgctgtccaagtgcgacctgatgaccaacatggttttcgagttcaccgacacgcagggcgtgatggggatgcactacgcgcgccatgacggcgaagcggaagatgttgcggtcgcgctgaacgagcagtatcagccgcgttttgccggcgatgcgctgccgtctaacccggttgcctgcgcggtggctattgccgacaagatggacactctggcgggtatcttcggtatcggtcagcatccgaaaggcgataaagacccgtttgcgctgcgccgcgccgcgctgggcgtactgcgtatcatcgttgagaagaacctgaatctcgatttgcaaacgctgaccgaagaagcggtgcgtctgtatggtgagaagctgactaacgccaacgtcgttgatgacgtcatcgacttcatgctgggccgcttccgcgcctggtatcaggacgaaggctatggtgttgatactattcaggcggtactggcgcgtcgtccgacccgcccggcggatttcgatgcgcgcatgaaggctgtgtcgcacttccgtacgctggaagagtcctccgccctggcggcggcaaacaagcgcgtatccaacatcctggcgaaatccgacgagaccctgaacgatatcgttcatgcctcggtgctgaaagaagcggcggaaattaagctggccggtaatctggtggtgctgcgtgataaactccagccttacttcgccgaaggccgttatcaggatgcgctgattgagctggctgcgctgcgcgagccggttgatgagttcttcgaaaatgtgatggttaacgctgaagacaaagatgtccgcatcaaccgtctgacgctgctgtccaaactgcgcgagctgttcctgcaggttgcggatatttcactgctgcagtaa

SEQ ID NO: 107587 - DNA, 912 bp, Enterobacter aerogenes; identical to SEQ ID NO: 105955

SEQ ID NO: 107588 - DNA, 300 bp, Enterobacter aerogenes; identical to SEQ ID NO: 87619

SEQ ID NO: 107589 - DNA, 996 bp, Enterobacter aerogenes; identical to SEQ ID NO: 105957

SEQ ID NO: 107590 - DNA, 378 bp, Enterobacter aerogenes; identical to SEQ ID NO: 105958

SEQ ID NO: 107591 - DNA, 1455 bp, Enterobacter aerogenes; identical to SEQ ID NO: 105959

SEQ ID NO: 107592 - DNA, 1323 bp, Enterobacter aerogenes; identical to SEQ ID NO: 105960

SEQ ID NO: 107593 - DNA, 996 bp, Enterobacter aerogenes; identical to SEQ ID NO: 105961

SEQ ID NO: 107594 - DNA, 1542 bp, Enterobacter aerogenes
atgtcctggttactcgaaatgaagaacatcaccaaagcctttggcgcggttaaggccgtggataacgtcagcctgcggctgaatgccggggaagtggtgtcgttatgcggtgaaaatggttcggggaaatcaacgctgatgaaagtgctgtgcgggatctatcctcacggcagctacgaaggtgaaattattttcgctggcgagacgttacaggcgaatcatattcgcgataccgagcgtaaaggtatcgccattattcaccaggagctggcgttggtgaaacatctcacggtgctggaaaatatctttctcggcgccgaggtctcacgccatggcctgctggattacgaaaccatgaccctgcgctgccagaagctattggcgcaggtgaatttatcgatctcgcccgatacccgcgttggcgatttaggcctgggccagcaacagctggtcgagatcgccaaggcgctaaataaacaggtacgtttgctgatcctcgatgaacccacggcatcattaaccgaacaagaaaccgcgacgctgctggcaattattcgcgatctgcaaaaccacggcatcgcctgtatttatatttcgcacaagctcaatgaagttaaagctatctccgacactatctgcgtaatacgtgacggccagcatattggcacccgcgacgccagcgggatgaatgaagatgacatcatcactatgatggtcgggcgcgagctcactgcgctgtacccaaatgaaccacatagtcatggcgatgagatcttgcgggtcgagcatctcaccgcctggcacccggttaaccgtcatatcaagcgcgtcaacgacgtgtcgttttccctccgccgcggcgaaatccttggcatcgccgggttagtcggcgccgggcgcaccgaggcggtacagtgtctgtttggcgtctggccggggcgctggcagggaagcatctttatcgacggacagccggtgacgattaacaactgccaacaggcgattgcccatggcatcgccatggtgccggaagaccgcaaaaaagacggcatcgtgccggtgatggctgtcggcaagaacatcactctcgcggcgttaaaccagttcaccggcccggcaagcagcctcgatgacgccgcggagcagcactgcattcagcagtcgattcagcggctgaaaatcaaaacgtcatcgccggatctggcgattggccgcctgagcggcggcaatcaacaaaaggcgattctggcccgctgcctgctgctcaatccgcgcattttaatcctcgatgaaccaacccgcggcatcgatatcggtgcgaaatacgaaatctacaagcttatcaatcaactggtgcagcaaggcatcgccgtcatcgtgatctcatccgaactgcctgaagtgctcgggctgagcgatagggtgctggtgatgcacgaaggcaagcttaaggccgatttgcataatcaaggtctgacccaggaacaggtgatggaagccgcactgaggagcgaacgccatgtcgaaaaacacgtcgtctga

SEQ ID NO: 107595 - DNA, 1182 bp, Enterobacter aerogenes; identical to SEQ ID NO: 105963

SEQ ID NO: 107596 - DNA, 1179 bp, Enterobacter aerogenes; identical to SEQ ID NO: 105964

SEQ ID NO: 107597 - DNA, 564 bp, Enterobacter aerogenes; identical to SEQ ID NO: 87610

SEQ ID NO: 107598 - DNA, 2031 bp, Enterobacter aerogenes
atgaaactcgctgcgcttgcctcgctactgctgcccgggatggcctttgccgcctggacaaccgctgacttccccgcctttactgaacaggatgcaggccgtttcacgacgcaaaatgaggtgacgaagggtacccgccctttgcggataagttttgaccaacagtgctggcagcctgcgggggcgataaaactcaatcagatgctgtcgctggaaccctgccgggatacgccgccgcagtggcgcgtgttccgtgacgggcgctatacgctggaagtcgatacccgctccggtacgccaacgctgatgctgtcgctggcggaacagcacactaccagtacgcagccgctgctgcgccagtgccccaaatgggatggtaaaccgctgacgctcgacgtcggccaaacgttcgctgaaggaagccaggtccgcgatttttatagcggtaatatcgccacggtgaaagcgggcaaaatcacgctgcggcccgccgctggtagtaatgggctcctgctgcttgaacaagcgaatagcgccgccagcgcgccgtttaactggcacaacgccacgatctattttgtcctgaccgatcgcttcgtcaacggcaatccggccaacgacaacagctacgggcgccataaagacggtatgcaggagataggcaccttccacggcggcgatttacaagggctgaccagcaagctggattatcttcaacagcttggcgtcaacgcgctatggataagttcaccgctggagcaaattcacggctgggtcggcggcggcaccaaaggcgactttccccactacgcctatcacggttactacacccaggactggacccgtcttgacgccaacatgggtgacgaagccgatcttcggcaactggttgatgaggcccatcggcgcggtatacgcgtgctgtttgatatcgtcatgaatcacgccggttacgccacgctcgccgatatgcaggaatttcacttcggttcgttgtacctgaaaggcgatgaactgaaaaaaacgcttggcgagcgctggaccgattgggaaccggcgtcggggcaaagctggcacagcttcaatgattacatcaacttcagcgataaagcaggctgggaacaatggtgggggaaaaaatggatccgcaccgatatcggcgactacgacaatccgggtttcgacgatttcaccatgtcgctggcgttcctgccggacctgaaaaccgaatcgacgatcccttctggcctgccaaatttctaccgtcacaagccggataccgccgccaaagagatagccggctacacgccgcgcgactatctgacccactggcttagccaatgggtacgcgactacgggattgacggtttccgcgtcgatactgcgaaacacgtcgaactggacgcctggcagcagctcaaaacacaggccacggccgcgctggcagactggaaaaaagcgaatccgcagaaagcgctggatgacgcgccattctggatgaccggcgaggcctggggccacggcgtgatgcagagcgactactatcgccacggtttcgacgcgatgattaatttcgattatcaggatcaagcggcgaaagcagcaaactgtcttgcaaacatggacgccacctggcagcagatggcggacaagctgcagggtttcaacgtgctgagctatctctcctcgcacgatacccgcctgttccgcgaaggcggcagccgggcggcggaactgttattactcgcgccaggcgccgtgcaactcttctatggcgatgaatcttcgcgcccgttcggccccacgggctccgacccgctgcagggtacccgctccgatatgaactggcaggatgttgccggcagcgcatccgataatgtcgcgcactggcaaaaaatcgcccaattccgcgcccgccatccggccattggtatgggtaaacaacagacgctgacgctagagcagggctatggtttcgtgcgtgaaagcagcgctgataaagtgatggttgtctgggccggacagcaatag

SEQ ID NO: 107599 - DNA, 1257 bp, Enterobacter aerogenes; identical to SEQ ID NO: 105967

SEQ ID NO: 107600 - DNA, 489 bp, Enterobacter aerogenes; identical to SEQ ID NO: 105968

SEQ ID NO: 107601 - DNA, 1152 bp, Enterobacter aerogenes; identical to SEQ ID NO: 105969

SEQ ID NO: 107602 - DNA, 1860 bp, Enterobacter aerogenes; identical to SEQ ID NO: 105970

SEQ ID NO: 107603 - DNA, 1389 bp, Enterobacter aerogenes; identical to SEQ ID NO: 105971

SEQ ID NO: 107604 - DNA, 609 bp, Enterobacter aerogenes
atgaaactgatcggcagctataccagtccttttgtacgcaaaatttccgttatcttgctggaaaaggcgatccccttcgagtttgtgaacgaattcccctataacgacgtcaacggtgtggcgcagtacaacccgctgggaaaagtcccggcgttgctgaccgatgacggcgcgtgctggtttgattcgcccattattgcgcaatatctggaactgctaaacgtcgcgccggcgatgctgcccgcggaacctctggcggcgctgaagatgcgccaactggaagccttgtctgacggcatcatggaggcggcgatcgcactggtgcgggaaaaagcgcgtctggcggcccagcagtcagaaaccgaactgctccgccagcgggaaaaaatcgctcgcggccttgatatgttggaagggtacgccgccgacggtaccttgcgtcacggtgagctgaatctggcgaccattactgccgcctgcgctattgcttatctgaattttcgtcgcgtggcgcccggctggtgcgcgacgcggccaaaactggtcaaactggtcgagacgttgtttcagcgatccagttttgcccgtaccgaaccgccagggagttga

SEQ ID NO: 107605 - DNA, 1137 bp, Enterobacter aerogenes
atggacctgttgatcattttgacgtacgtggccattgcgtggtcggtatttaaaatattccgtattccggtaaataaatggacggtcccgaccgcggccctgggcggcgtatttattgttagcgcgcttattttattaatgaactataaccacccttatacttttactgcgcagaaagcggttatttctattcctattacgccgcaggttaccggcattgttagcagcgtgaccgataaagccaaccagcgggtgaaaaagggcgaggtactatttactatcgacccggcgcgctaccaggcgcgtgtcgacaggctgcaggccgatctggtcaccgctctgcacagtatcaataccctgaaagcccaactgcaggaagcgcaggcgaacaccgtgcgcgtctccgccgagcgcgaccggctgtataaagattatcagcgctatttgaaaggcagccaggcgcgggtcaacccattttcggaaagcgatatcgataatgcgcggcaaaactatcttgcccaggatgcgttggtgaaagcctcggttgccgagcaggcgcagattcagagccagctggatagcacgctgaatggcgaacagtcgcaggtggtgagcctgcgcgcgcagttggcggaagcgaaatataacctcgatcagaccaccgtccgggcgccgagcgatggctacattacccaggtgctgattcgcccgggaacctacgccgcgtcgctgccgctgcgcccggtgatggtctttattccgcaacagaaacggctaattgtcgcccagttccgccagaactcgttgctcaggctggaggccggcgatgatgccgaagcggtgtttaacgccctgccaggtcaggtattccacggtaaactggtcaacgtattgccggtggtgccgggcgggacttatcaggcgcagggttcgctgcagtcgctgagcgtcacgccgggtagcgatggcgtgctggcgacaattgaactggatcccgatgcgcaggtcgatgcgctgcccgacggcatctacgcccaagtggcggtctattccgaccatttcacccacgtgtcggtgatgagaaaagtgctgctgcgcatgaccagctggatgcactacctctatctcgatcattaa

SEQ ID NO: 107606 - DNA, 366 bp, Enterobacter aerogenes; identical to SEQ ID NO: 105975

SEQ ID NO: 107607 - DNA, 1911 bp, Enterobacter aerogenes; identical to SEQ ID NO: 105976

SEQ ID NO: 107608 - DNA, 1149 bp, Enterobacter aerogenes
atgaaagcattacattttggcgcaggtaatatcggacgtggcttcattggcaaactgctggctgacgccggtatctcccttacgttcgccgatgttaatcaggtggtccttgatgccctgaatgcccgtcatagctatcaggtccacgtggtgggtgaaaacgaacaggttgataccgtctccggcgtgaatgccgtcagcagcattggcgatgaggtggtggatctgatcgccgatgtcgacctggtgaccaccgcggtcggccccgtcgttctggagcgtatcgcccctgccatcgccaaaggcctggtgaaacgtaaagcgcagggtattgaacgcccgctgaatatcatcgcctgcgaaaacatggtacgcggcaccagccagctgaaaggccatgtgtttaacgcgctggcggaagaggacaaagcgtgggttgaagcgcatatcggcttcgtcgactccgccgtagaccgcatcgtgccgccgtcggcttccgccacccacgatccgctggaagtcaccgttgaaaccttcagcgaatggattgtggataaaacccagtttaagggcgagctgccgaacatcccaggaatggaattaaccgataacctgatggcatttgtcgagcgtaagctattcaccttaaacaccgggcatgctataaccgcctacctcgggaaactggcgggccatcaaacgattcgcgacgcgattctcgatgagcacattcgcgccgtcgtgaaaggcgcaatggaagagagcggcgcggtgctgattaaacgctacagctttgatgcgcagaaacacgcggcttatatccagaagatcctcggtcgctttgagaacccgtatctgaaagatgatgtggagcgcgtcggccgccagccgctgcgtaaattgagcgcgggcgatcgtttgatcaagccgctgcttggcacgctggaatacggcctgccgcaccggaacctggtaaaagggattgccgcggccatgcatttccgcagcgaagacgatctgcaggctcaggaactggcggcgctgattgccgaaaaagggccacaggccgcgctggcgcagatttccggtctggatgcggcaagcgctgtagtggcggaagccgttaacgactacaacgcggtaaaatga

SEQ ID NO: 107609 - DNA, 600 bp, Enterobacter aerogenes; identical to SEQ ID NO: 105978

SEQ ID NO: 107610 - DNA, 225 bp, Enterobacter aerogenes; identical to SEQ ID NO: 87597

SEQ ID NO: 107611 - DNA, 363 bp, Enterobacter aerogenes; identical to SEQ ID NO: 87596

SEQ ID NO: 107612 - DNA, 1656 bp, Enterobacter aerogenes
atgaacctctggcaacaaaattacgatccggctggtaatatctggctatcgagccttatcgcctcactgccgattctgtttttctttttcgccctgattaagctcaagcttaaaggctatatcgccgccacctggaccgtagccatcgcgctgcttgtcgccctgctgttctataaaatgccggtcgaccgcgccttatcgtcggtggtatacggcttcttctacggcctgtggcctatcgcgtggattatcatcgccgcggtcttcgtctataaaatctcggtgaagaccgggcagttcgacattatccgctcgtcgattctttcgattacaccggaccagcgcctgcagatgctgattgtcggcttctccttcggcgccttcctcgaaggggccgccggtttcggcgcgccggtggcgatcaccgccgcgctgctggtcgggctcggcttcaatccgctatacgccgccggactgtgcctgattgttaacaccgcgccggtggccttcggcgccatggggatcccgattctggtcgccggccaggtgaccggcatcgatagcttcgccatcggccagatggttggccgccaactgccgttcctgaccattatcgtgctgttctggatcatggcgattatggacggctggcgcggggtgaaagagacgtggcctgcggtgatggtcgcaggcggctcgttcgctatcgcgcagtacctcagctctaacttcctcggcccggaactgccggacatcatctcttcgctggtgtcgctggtatgcctgacgctgttcctcaagcgctggcagccggtacgtatcttccgctttggcgatatgggcgccgcgcaggttgatcaaacgctggcgcgcacgcattacaccgccggtcaggtcattcgcgcctggtcgccgttcctgttcctcaccgccaccgtcaccctgtggagcgtaccgccgtttaaagcgctgtttgcgccgggcggggcgatgtatgacttcgtggttaacatcccggtaccgttcctcgacaaaatggtcgcccgtatgccgccggtggtaagcgccgcgacgccgtacgccgcggtgtataaattcgactggctgtcggcgaccggcaccgccattctgttcgccgctatactgtctatcgtctggctgcgtatgaagccaaaggatgcgctgaccactttcgccgggacgttgaaagagctggcgctgccgatttactccatcggcatggtgctggcgttcgcctttatttcaaactactccgggctgtcatcgacgctggcgttggcgctggcgcataccggccacgcgtttaccttcttctcgccgttcctcggctggctgggggttttcctgaccggttcggatacctcgtctaacgcgctgttcgccgcgctgcaggcgacggcagcccagcaaatcggcgtctccgatattctgctggtcgccgcgaataccaccggtggggtgacaggcaagatgatttcgccccagtcgatcgccattgcctgcgccgcggtaggcctggtgggtaaagagtcggacctgttccgctttaccgtcaagcacagcctgatattcacctgcatggtgggcctgattaccaccctgcaggcttatgtcttaacctggatgattccgtga

SEQ ID NO: 107613 - DNA, 774 bp, Enterobacter aerogenes
gtgaaagtgatgccaaaacgcctggctgacgacgtcgcaaatcgcgtccgggcgctgatagaagaacaacagctggaggcgggcatgcgtttgcccgccgagcgccagcttgccgtccagctcggtgtttcacgcaattcgctgcgtgaagcgctggcgatgctggtcaacgaaggggtgctgcttagccgtcgcggcggcggcaccttcgtgcgctggcagcacgagccctggtcggagcaaaacatcgtccagccgctgaaaacgctgctcgccgacgaccccgactacagttttgatattctcgaagcccgccacgctattgaagccagcaccgcctggcatgcggcgatgcgggccaccgacgccgaaaaagaaaaaatccgcctctgttttgaagccaccctcagcgatgacccggatctcgcctcacaggcggatgttcgcttccacctggcgatcgctgaagcctcacataatgtggtgctgctgcaaaccatgcgcggtttcttcgagcttctgcaatcctcagtgaagcagagccgccagcgcatgtatctggtgccgccggtgttcgcgcgtctgaccgaacaacatcaggcggtaatggaagcgatcttcgccggcgacgcggaaggcgcccgccaggcgatgatggcccacctcggttttgtccacgccaccattaaacgttttgatgaagaccaggcccgccaggcgcgtattacccgcctgcccggtgaccacaatgaaaattccagggagaactcgtga

SEQ ID NO: 107614 - DNA, 1185 bp, Enterobacter aerogenes
atgattatttccgccgccagcgactatcgcgccgccgcacagcgtatcctgccaccatttctgttccactatatcgacggcggcgcctacgccgaacataccctgcgccgcaacgttgaagacctctccgacgtggcgctacgccagcgcattctgcgcaatatgtcggatctgagcctggaaaccacgttattcaacgaaaagctggcgatgccaacggcgctggcgccggtcgggctgtgcggcatgtacgcgcgccgcggcgaagtgcaggcagcgggcgcggcggacgacaaaggcatcccgtttaccctctctaccgtttccgtttgcccgattgaagaggtcgccccgaccatcaaacgcccgatgtggttccagctgtatgtcctgcgcgatcgcggatttatgcgcaatgcgctggagcgcgccaaagccgcaggctgctccacgctggtctttaccgtggatatgccgacccccggcgcgcgctatcgcgacgcccattctggcatgagcggcccaaacgccgccatgcgccgctactggcaggccgtcactcatccgcagtgggcatgggacgtcggtctcaacggccgcccgcacgacctgggcaatatctccgcctacctcggcaaaccgaccgggcttgaggattacatcggctggctggcgaataatttcgatccgtcgatttcatggaaagacctggagtggatccgcgacttctgggacggcccaatggtgatcaaagggatcctcgacccggaggacgcccgcgatgcggtgcgcttcggcgctgacggcattgtcgtctccaaccacggcggccgccagcttgacggcgtgctctcttccgcccgcgccctgcccgccattgccgatgcggttaaaggcgacatcactattctcgccgacagcggtatccgcaacggtctcgacgtggtgcggatgatcgccctgggcgccgacagcgtgctgctgggccgcgcgtatctgtacgcgctggcgacccacggcaagcagggggtggcgaatctgctcaaccttatcgagaaagagatgaaagtggcgatgacgctgaccggggcgaaatccatcagcgaaatcagccgcgattcgctggtgcagaatgccgaagcgctgcagaccttcgatgcgctcaagcagggcaacgccgcgtaa

SEQ ID NO: 107615 - DNA, 474 bp, Enterobacter aerogenes
atgctgaacatcgtgttattcgaaccagaaatcccgccgaacacaggcaatatcatccgcctgtgcgccaacaccggcttcaatttacatatcattgagccgatgggctttacctgggacgataaacgtctgagacgcgccgggttggattatcacgagttcaccgccgtacagcgccacgcggattacgcggcgtttgtcgccagcgcgaagccgcaacggttgttcgccctcacgactaaaggcacgcccgcccacagcgcggtaagctatcaggatggtgatttcttgatgtttggtccggaaacgcgcggcctgccggccagcatcctcgatgccctgccggcggagcaaaaaatccgtattccgatgatgccggacagccgcagcatgaacctgtcaaacgcggtgtcggtggtggtgtatgaagcctggcgtcagttgggataccccggcgccgtgttgcgccgctaa

SEQ ID NO: 107616 - DNA, 822 bp, Enterobacter aerogenes
atgccgtgtgaagaactggatatcgtctggaacaatattaaagccgaagcccgggctttggccgactgtgagccgatgctcgccagtttttaccacgcaacgctactcaagcacgaaaatctgggcagcgccctgagctatatgctggcgaataagctggcctcgccgattatgcccgctatcgccattcgcgaagtggtggaagaggcttatgccgcagacccggagatgatcgcttccgccgcctgtgatatccaggcggtacgtacccgtgaccctgcggtcgataaatactcaacgccgctgttgtacctgaaaggcttccatgcgctgcaggcctatcgtatcggccactggctgtggaatcagggtcgccgcgcgctggctattttcctgcagaaccaggtttccgtctcgttccaggtcgatattcatccggcggcgaagattggccgtgggatcatgctcgaccacgccaccggtatcgtggtcggtgaaacggcggtgattgaagacgacgtatccatcctgcagtctgtgaccctcggcggtaccggtaaaaccagcggcgaccgtcacccgaaaattcgcgaaggcgtgatgattggcgccggggcgaagatcctcggcaatatcgaagtcgggcgcggggcgaagattggcgccggttccgtggtgctacaacctgtgccgccgcataccaccgccgcaggcgtaccggcgcgcatcgtcggcaagccggagagcgacaagccagcgatggatatggatcagcattttaatgggattcaccatactttcgagtacggcgacgggatttga

SEQ ID NO: 107617 - DNA, 1020 bp, Enterobacter aerogenes
atgaacgcgcttaatgctgcaatgactgtgatcggtgccggctcttacggcaccgctcttgccatcaccctggcaagaaatggccacgaggttgtcctctggggtcatgacccgaaacatatcgcgacgctgcaacacgatcgctgcaacgccgcgttccttcccgatgtgcccttcccggacacgctgcgccttgagagcgatttagcgacggcgctggccgccagccgcgatatcctcgtggtggtgccgagccacgtcttcggccaggttctgcgccagattaaaccgctgatgcgttccgatgcgcgtctggtgtgggcgacgaaaggtctggaggccgaaaccggccgtctgctgcaggacgtggcgcgtgaagcgctgggcgatgacatcccattagcggtcatctccggtccgacttttgccaaagagctggccgccggcctaccgacggcgatttcgctggcggcgacggatccgcagtttgcagaagaccttcagcgcttgctgcactgcggtaaaagcttccgcgtctacatcaacccggattttatcggcgtgcagttgggcggcgcggtgaaaaacgttatcgccatcggcgccgggatgtctgacggcatcggctttggcgcgaatgcgcgtacggcgttgatcacccgtgggctggtggaaatgtcccgtctcggggcggcgctgggcgccgatccggaaaccttcatgggcatggccgggttgggcgacctggtactgacttgtaccgataaccaatcgcgaaaccgccgttttggcatgatgctcggacagggcatggacgtgcaaagcgcgcaggacaagattggccaggtggttgaaggctatcgcaataccaaagaggttcgcgttctggcgcagcgtttaggcgtcgaaatgccaataaccgaggaaatttatcaggtattgtattgcggaaaaattgcgcgcgaggcagcattgaccttattaggtcgcgcacgcaaggacgaacgcagcgccaactag

SEQ ID NO: 107618 - DNA, 468 bp, Enterobacter aerogenes; identical to SEQ ID NO: 87589

SEQ ID NO: 107619 - DNA, 252 bp, Enterobacter aerogenes; identical to SEQ ID NO: 87588

SEQ ID NO: 107620 - DNA, 432 bp, Enterobacter aerogenes
atgcaagaaattatgcaattcatcggccgtcacccggtcctgagcatcgcgtggatcgcgctgctgggtgcggtactgttcaccacctttaaaggcttgatgtcgaaagttaaagtcatcacccgtggtgaagcgacgcgtcttatcaacaaagaagaagccgttgttgtcgacctgcgtcagcgtgacgacttccgtaaaggccatatcgccggcgctatcaatctgctgcctgccgatatcaaagcaaataacgtcggcgagttggaaaaacacaaagcacaacccattattgttgtggatgggtccggcatgcaggcgcaagaacctgccagcctgctgaataaagccggattcgaaaaagtctttgtactgaaagaaggtatcgcaggctggagcggcgagaatcttccgctggtacgcggcaaataa

SEQ ID NO: 107621 - DNA, 1545 bp, Enterobacter aerogenes
atgtcggttactaaaaaacctatggtactggtgattctggatggctacggctaccgtgaagaccagcaggataacgccatttatagcgcgaaaacgccggtaatggacgcactgtgggcaaaacgcccgcacaccctgattgatgcatccggtctggaagtcggcctgcctgaccgccagatgggtaactccgaagtgggtcacgtaaacctcggcgcgggccgtatcgtgtatcaggatctgacccgtctggatgttgaaatcaaagaacgcaccttctttgccaacccggtgctgaccggcgcggtcgacaaagccgtcgccgccggtaaagcggtacacatcatgggcctgatgtcgcctggcggcgttcacagccacgaagaccacatcatggcgatggtagaactggccgccgaacgcggcgcagagaaaatctatctgcacgctttcctcgatggccgcgacacgccgccgcgcagcgctgaagccacgctggctaaattcgaagctaaattcacctcgctgggcaaaggccgtatcgcctctatcattggccgctactacgctatggaccgcgacaaccgctgggatcgcgtagaacaagcctatgacctgatgacgctggccaaaggtgaattccaggccgacaccgccgtggcgggcctgcaggcagcctacgcgcgtgacgaaaacgacgagttcgtcaaagcgaccgttatccgcgccgccggccaggccgatgccgcgatggaagacggcgacgcgctgatcttcatgaacttccgcgctgaccgcgcgcgcgaaatcacccgcgccttcgttaacgccgacttcgacggcttcgcgcgtaagaaagtggttaacctcgatttcgtgatgctgaccgaatacgccgccgacatcaaagtcgcttgcgcttatccaccagcttcactggtgaacactttcggcgagtggatggcgaagcacgacaaaacccagctgcgcatctccgaaaccgagaaatatgcgcacgtgaccttcttctttaacggcggggtagaaaatccgttcaaaggcgaagaccgtattctgattaactcgccgaaggtcgccacttacgacctgcagccggaaatgagctccgccgagctgaccgagaaactggttgcggccatcaaaggcggtcagtatgacaccatcatctgcaactacccgaacggcgatatggtaggccataccggggtgatggaagccgccgtgaaagcggttgaagcgctggatcactgcattgagcaagtggccgcggccgttgaatccgtcggcggccagctgctgatcaccgccgaccacggcaacgccgaacagatgcgcgatccggcgaccggacaggcgcacaccgcgcatactaacctgccggttccgctgatctacgttggcgacaaaacggtgaaagtggccgaaggcggcaagctttccgacatcgcgccaaccatgctgtcgctgatgggaatggaaatcccgcaagagatgactggcaagccgctgttcatcgtggaataa

SEQ ID NO: 107622 - DNA, 1272 bp, Enterobacter aerogenes; identical to SEQ ID NO: 87585

SEQ ID NO: 107623 - DNA, 900 bp, Enterobacter aerogenes
atggctgcgccggttttcgccggtaaactctccatcgttatcgatgatttcggctaccgtccgcagacggaaaataaggtgctggcgctaccgcccaccatctccgtcgccgtactgccgaatgccccccacgcccgggaaatggccactaaagcgcataatctgggccatgaagtgctgatccatctgccgatggcgccgctcagcaagcaaccgctggaaaaagacacgctgcgcccggatatgagcagcgatgagatcgaacgtattatccgtgaggcttacgggaaagtgccttacgccgtcgggctgaataaccacatgggtagcgccatgacctcaaacctgttcggcatgcaaaaggtgatgcaggcgctggaacgctacaatctctattttctcgatagcgtgaccatcggcaacacccaggccatgcgcgccgcccagggtaccggcgtgaaggtgattaaacgcaaagtgtttctcgacgacacccagaacgaggcggacatccgcactcagttcaatcgcgccatcgcactggcgcggcgtaatggttcggcgatcgccattggtcacccacacccttcaacggtgcgggtactacagcaaatggtctataacctgccgccggatatcacgctggtgcgcccgagcagcctgctgaacgaaccgcaggtcgacaactcgacgccgaacacgcccgtccaaccaaacgcgccgcaacagcagaagccgcgtaacccgttccatggcgtgaagtactgcaaaccgaagcgtccgctggagccggtgaacgccagccgcttctttagcatcctcagcgaaagcatcagccagagcgcgctggtccagtattaccagttgaaatggcagggctgggacagccccaccaactaa

SEQ ID NO: 107624 - DNA, 792 bp, Enterobacter aerogenes; identical to SEQ ID NO: 105993

SEQ ID NO: 107625 - DNA, 729 bp, Enterobacter aerogenes; identical to SEQ ID NO: 87582

SEQ ID NO: 107626 - DNA, 1026 bp, Enterobacter aerogenes; identical to SEQ ID NO: 105995

SEQ ID NO: 107627 - DNA, 1194 bp, Enterobacter aerogenes; identical to SEQ ID NO: 105996

SEQ ID NO: 107628 - DNA, 933 bp, Enterobacter aerogenes; identical to SEQ ID NO: 87579

SEQ ID NO: 107629 - DNA, 1017 bp, Enterobacter aerogenes; identical to SEQ ID NO: 105998

SEQ ID NO: 107630 - DNA, 972 bp, Enterobacter aerogenes; identical to SEQ ID NO: 105999

SEQ ID NO: 107631 - DNA, 909 bp, Enterobacter aerogenes; identical to SEQ ID NO: 106000

SEQ ID NO: 107632 - DNA, 1170 bp, Enterobacter aerogenes
atgagtacttcaaaaataagtaatcttgcaaagcagggttactcggttgttttccctttatttctattttttagcgctattttttgcatgtccacccgcacgaataacctgctgcatttgtctattttattactgctgttgtcactgctgcgccaggataaccggcaggcgctggctgaagttttgcgtgaacagtggcaaacatggggggtgttggtagcgttcttcgtctacttctccctcagcaatatctgggggcatacgccgcagcatatcgactcaccgctaacacacggcgtttatctgattttttaccttctgctgatgtcgacgctcctgggtagctcgcaaacccgacggcttacgttgctgtctattgttgccggcgtcaccgtactttcaatctggaccctggctattgatcatactctggtattgaccgagcgggctgtatcgccagaaaacccagggccgactaatgtgatagatttggcaggctactgcggtatcggtcttttgatcagcggtatgttattgaaagaaaaatcgaaccactggttatatattccaattatcatcatgttggtgatgatgttgttaacccaaagtcgtgggccattgatctcactggcaatcgctatttgttgcactctgcatctacatctcttcacgcggcgtaatttgcttattattggcgcactgcttgtactgatcggattagtactttgcctgacgccagtgggcgacatgctgcttacccgttttgaagagttgggaacgcaaagcgggctacgcctgagcatctggcatcatacgttgatggaaatcgctgaccaaccgtggctgggacgaggtttcggctatgaactgaatttcatcaactacagcggtgagcacatcaccaccacgcatagcgtttatctcggttcactgctgaagggcgggattattggtttactgctgttgctggcagtgatcgtctgcggtttacatcaagcctggcgtaagcgccatgacgacagtcgctatagtctggccatcatgctgtatgcgctgatatttatggcttcccaggggatgtttattgtcagtaatccacgtgagacatgggtacttttctggctaccgctagggattgcgctcagtaagagtgtgctgaagaaacgctag

SEQ ID NO: 107633 - DNA, 1077 bp, Enterobacter aerogenes; identical to SEQ ID NO: 87574

SEQ ID NO: 107634 - DNA, 963 bp, Enterobacter aerogenes; identical to SEQ ID NO: 106003

SEQ ID NO: 107635 - DNA, 1077 bp, Enterobacter aerogenes
atgacgcctgaaaccctctcctccggccagcagaacccggcgcggatcctggtcattaagctgcgccaccatggcgacatgttgctgatcaccccgcttgtaaacgcgctcaaacagcagtatcccgccgctcgcgtcgatgtactactgtatgctgagacccgcgacatgctggcggcaaatccggagattaaccagatttacgcgatcgatcgcaattggaaaaagcagggcaagcggcatcagctcaagatggaatggcagctcattcgctcgctacgccaacagcgctacgacatggtgctcaaccttgccgaccagtggcccagcgcgattatcagcaaattaaccggtgcgccgacgcgcatcggtttcgatttccctaagcgccgtcatcctttctggcgctactgccacaccgcgcttgcttctacccagcagcacaatcagctgcatacggtacagcaaaatctctctattctggcgccgctgggactggagattaatgatgcgccggcgcggatgggctacagcgaatatgactggacgaccagccgcgcgctgctaccggacggcttccaggaaaactacatcgtgattcagccgacctcgcgctggttctttaaatgctggcgcgaagcgcgcatgagcgcgctgattaacgcgctatcagcagaaggctacgcggtggtgctcacctctggccctgacgccaaagaaaagcagatggtagagaacatcatcagcggctgcccgcaggcgcgactgcactcgttagccggtcagttgacgctccgccagctggcggcggttatcgatcacgcccgcctgtttatcggcgtagattcggtgccgatgcatatggcggcagccctgggtacgccgctcgtcgcgctatttggcccgtcaaagctgaccttctggcggccgtggcaggcgaaaggcgaggttatctgggccggcgacttcggcccgctgcccgatcctgacgacatcaacaccaacaccgaagaacgctatcttgatttaatccctaccgacgcggtcatcgcggcggcgaaaaaggtactggcatga

SEQ ID NO: 107636 - DNA, 1128 bp, Enterobacter aerogenes; identical to SEQ ID NO: 106005

SEQ ID NO: 107637 - DNA, 1095 bp, Enterobacter aerogenes; identical to SEQ ID NO: 106006

SEQ ID NO: 107638 - DNA, 990 bp, Enterobacter aerogenes; identical to SEQ ID NO: 106007

SEQ ID NO: 107639 - DNA, 1275 bp, Enterobacter aerogenes; identical to SEQ ID NO: 106008

SEQ ID NO: 107640 - DNA, 771 bp, Enterobacter aerogenes; identical to SEQ ID NO: 106009

SEQ ID NO: 107641 - DNA, 480 bp, Enterobacter aerogenes; identical to SEQ ID NO: 87566

SEQ ID NO: 107642 - DNA, 810 bp, Enterobacter aerogenes
atgcctgaattacctgaagtcgaaaccagtcgtcgcggcattgagccgcatctggtgggcgctaacatcctgcatgccgtagtgcgcaacgggcgcctgcgttggccagtatccgaagagatttaccgcctcagcgacgaaccggtgctgagcgtgcgccgacgcgccaaatacctgctgctggagctgcgtcacggctggatcattattcatcttggtatgtctggcagcctgcgcatcctcagtgaggagcagccggctgaaaaacacgaccacgtcgacctggtgctgagcaacggtaaagtactgcgctataccgatcctcgccgctttggcgcctggttatggactaaagagctggatggtcatccggtgctggcgcatctcggcccggagccgctaagcgatgaattcaacgccgactatctccagcagcgttgcgcgaagaagaaaaccgctattaaaccctggctgatggataacaagctggtggtgggcgtgggcaatatctacgccagcgaatcgctgttttccgccgggatccatcccgatcggctggcctcgtcgctctcgcatcaggaatgcgagtggttagtgaagatgattaagctggtgctgctgcgctcgattgagcagggtggaacgacgctgaaggatttcctgcaaagcgacggtaaaccgggatatttcgcccaggaactgcaggtatatggccgcaaaggcgagccgtgccggatctgcggcacgccgattatcgccagcaaacacgctcagcgcgcgaccttttattgccgccagtgtcagaagtag

SEQ ID NO: 107643 - DNA, 168 bp, Enterobacter aerogenes; identical to SEQ ID NO: 87564

SEQ ID NO: 107644 - DNA, 237 bp, Enterobacter aerogenes; identical to SEQ ID NO: 87563

SEQ ID NO: 107645 - DNA, 666 bp, Enterobacter aerogenes; identical to SEQ ID NO: 106014

SEQ ID NO: 107646 - DNA, 1215 bp, Enterobacter aerogenes; identical to SEQ ID NO: 106015

SEQ ID NO: 107647 - DNA, 459 bp, Enterobacter aerogenes; identical to SEQ ID NO: 106016

SEQ ID NO: 107648 - DNA, 597 bp, Enterobacter aerogenes; identical to SEQ ID NO: 106017

SEQ ID NO: 107649 - DNA, 642 bp, Enterobacter aerogenes; identical to SEQ ID NO: 106018

SEQ ID NO: 107650 - DNA, 717 bp, Enterobacter aerogenes; identical to SEQ ID NO: 106019

SEQ ID NO: 107651 - DNA, 864 bp, Enterobacter aerogenes; identical to SEQ ID NO: 106020

SEQ ID NO: 107652 - DNA, 618 bp, Enterobacter aerogenes; identical to SEQ ID NO: 106021

SEQ ID NO: 107653 - DNA, 1674 bp, Enterobacter aerogenes
atgtgcagatggctgatagcggcagcgttatggatggcggcggcaatggcaatggcggcctgcccggcgtggtctttgcaacaagccgggcaggagatagagcgcctgagccagcagattgtcgactggaaagcggcctactggcagcagggcagtagcgaggtcagcgatgaggtctacgacatgctatctgcccggttggcgcagtggcggcgctgcttcggtcaggagacgcctgaagacgagctgccgccgccgcgcggcgaagtcaaacatcccatcgcgcataccggggtgcgtaaactgcccgatgccgcgagcgtcggccgctggatgcgcgagaaacccaatctgtgggtacagccgaaagtcgacggtgtggcggtgacgctggtttatcgcgggggtaggttaatacaggcgattagccgcggcgacggtctggcgggggaagactggacggcaaaagtgcgccagatccccggcgtaccgcaaactaccgcaggagcgctggcaaatagcgtgctacagggcgagatttttcagctgcaagaggggcacatacaaaaacaggcgggcggtatgaattcacgggcgaaagtcgccgggatactgatgcgcaaagcgccatcggcaacgctgaatacgctgggggtgtttatctgggcctggcccgacggtccggcccggatgtccacccgcctggcgctgcttgccgacggcgggtttcctctggcgcagcgctattcccatccggtgaaagactggcaggagaccgccgtctggcgcgagcgctggttcgcctcgccgctgccctttgtcaccgatggcattgtgatccgtgcggaaaaagaaccagccgggggccgttggcttccaggacaggggcactgggtggcggcctggaaatatcagccattttcgcaggtggcggaagtgaccacgatccagttcactgtcgggcgcagcggcaagatagccgttgtggcgcatctcgaaccggtaaaactggacgataagctggtgcgtcgggtcaatattggctcggtggcccgctggcggcagttagacatcgtcgccggagaccaggtgctagtaagcctggctggacaggggatcccgcgtctggatagcgtggtctggcgggccagccaccgcgatgcgccacaaccgccttcgccccgttttcattccttaacctgttattatgcgtcgtccgagtgcgccgggcagtttctctcccggctggtctggctatcgtctaagccagttctggatatggggggaactggagaggcgctatggcgcacgctaatagacgatcgccgcatggcacatcttttttcatggctggctttgacgcctgaacaactacagagcgtaccaggcattaccagcaagcgtggcctgcggctgtggcatcagttcaatttgacccgcgagcagccgtttattcgttgggtgctggcgctgggggtaccgatacctcagtccgcgcaggcgagcgttgcggcagaaaactggcagctattgcgggagcgcaatgagtcccagtggcggcaattaccgggggtggggcaggaaagggcgcgccagctggtcgtctttttgcaaaacccggatattgccgcgctggcgcagtggctcagcgggcaacgtattccgggattctga

SEQ ID NO: 107654 - DNA, 735 bp, Enterobacter aerogenes; identical to SEQ ID NO: 106022

SEQ ID NO: 107655 - DNA, 276 bp, Enterobacter aerogenes; identical to SEQ ID NO: 87552

SEQ ID NO: 107656 - DNA, 2121 bp, Enterobacter aerogenes; identical to SEQ ID NO: 106024

SEQ ID NO: 107657 - DNA, 690 bp, Enterobacter aerogenes; identical to SEQ ID NO: 106025

SEQ ID NO: 107658 - DNA, 2082 bp, Enterobacter aerogenes
atgtcaggccgcctgttagatgccgtcccgctcaactcgctgaccggcgttggcgccgcacagagcagcaaactggcgaaaatcggtctgcatacggttcaggacctgctacttcacctgccgctacgctatgaagaccggactcacctgtaccaaatcggcgaactgctgccgggcgtctacgcaaccgtagagggtgaagtgctcaacagcaatatcaccttcggcggccgccggatgatgacctgtcagatcagcgacggctccggcatcctgaccatgcgttttttcaacttcaacgcggcgatgaaaaacagcctggcgaccggtcgtcgcgtgctggcctacggcgaagctaaacgcggcaagtttggcgccgagatgatccacccggaatatcgcgtacagggtgatatgagtaccccggagctacaggaaaccctcactccggtctacccaaccactgaaggcattaagcaggcgacgctgcgcaaactcaccgatcaggcgcttgagctgctggaaacctgcgcgattagtgaactgctgccgccggagctggcgcaggggatgatgagcctaccggaggcgctgcgtacgctgcaccgcccgccgccgtcgctacagctcagcgagctagagagcggtaaacatccggcacagcagcgtcttatcctggaagagttgctggcgcataatctcagcatgctggcgcttcgcgccggcgcccagcgctaccatgcgctgccgctcagcgccaacgacacgctgaaaacccagctcctggcttccctgccctttaaaccaacgggcgcgcaggcgcgcgtcaccgcggagatcgagcgcgatatggcgctggacgtgccgatgatgcgcctggtacagggcgacgtcggatccggtaaaacgctggttgccgcgctggccgccttgcgcgctatcgcccatggtaagcaggtggcgctgatggcgccgaccgaactgctcgccgagcagcacgccaataatttccgcagctggttcgcgccgctgggcattgaagtcggctggctggctggcaaacagaaaggcaaagcgcgccaggcgcagcaggaagccatcgccaacggtgaagtgcagatgattgtcggcacccacgccattttccaggagcaggtgcagtttaacggcctggcgctggtgattatcgacgaacagcaccgctttggcgttcatcaacgcctggcgctgtgggaaaagggccagcagcagggtttccacccgcatcagctgatcatgaccgctacgccgattccgcgcaccctggcgatgaccgcttatgccgatctcgatacctcggttatcgatgagctgccgccgggccgtaccccggtaacgaccgtcgctatcccggacacgcgccgcagcgacattatcgaccgcgtgcgtaacgcctgcacccaggaaggtcgccaggcctattgggtctgtacgttgattgaagagtccgatctgctggaggcccaggcggcggaagccacctgggaagagctcaagctggcgctgccggaacttaatatcggcctcgtccacgggcggatgaaaccagcggaaaagcaggcagtgatgcaggccttcaagcagggcgagatgcacctgctggtcgccaccacggtgattgaagtcggcgttgacgtccctaactcaagcctgatgattattgaaaacccggagcgtcttggtctggcgcagctgcaccagctacgcgggcgcgtcgggcgcggcgccgtcgcctcccactgcgtgctactctataaatcgccgctctccaaaacggcgcagaagcgactgcaggtgctgcgcgacagcaacgacggtttcgtcatcgcccagaaagacctggaaatccgcggccccggggagcttctcggcacccgccagaccggcaacgccgaatttaaagtagcggacttgctgcgcgatcaggccatgatccccgaggttcagcgcattgctcgccatattcacgaacgctatccgctgcaggcacaggcactgattgagcgctggatgccggaaaccgaacgctattccaacgcgtag

SEQ ID NO: 107659 - DNA, 1011 bp, Enterobacter aerogenes
atgaaacgagaactggccatcgaattttcgcgtgtcaccgaagccgccgcgctggcgggttataaatggctgggccgcggcgataaaaataccgccgacggcgcagcggttaacgccatgcgcattatgctcaacctcgtcaatatcgacggcaccatcgtcatcggcgagggcgaaatcgatgaagcgccgatgctctatatcggcgaaaaagtgggtaccggcaaaggcgacgcggtagatatcgccgtcgatccgattgaaggcacccgcatgacggccatgggccaggccaacgcgctggcggtgatggcggttggcgataaaggctgcttcctcaacgcgccggatatgtatatggaaaagctgattgtcggccccggcgctaaaggcgctatcgatctcaatctgccgctggaagagaacttgcgcaacatcgcccgcgcgttgaataaaccgctcgctgaactgaccgtcaccgtgctggcgaaaccccgccacgacgcggtcattgcgcaactgcagcagttgggcgtgcgcgtgttcgcgatccccgatggcgacgtggcagcttctattctgacctgtatgccggatagcgaagtcgacgtgctgtacggcatcggcggcgcgccggaaggcgtggtttcggcggcggtgatccgcgcgctggacggcgatatgcagggccgcctgctggctcgccaccacgtgaagggcgacagcgaagagaaccgccgtatcggtgaaagcgaactggcgcgctgcaaaactatgggtatcgaagcgggtaaagtgctgcgtcttgatgaaatggcgcgcagcgataacgtcatcttctccgccaccgggattaccaaaggcgatctgctggatggcatcacccgcaagggcaatatggcgaccaccgaaacactgctaatccgcggtaaatcgcggactatccgccgtattcagtcgattcattacctcgaccgaaaagacccggacgtccagcaacacatcctgtaa

SEQ ID NO: 107660 - DNA, 747 bp, Enterobacter aerogenes
atggcaaactgggttacaggtaaagttgtaaaagtgcaaaactggaccgatgcactgtttagcctcaccattcacgcgcccgttgagccgttcaccgcagggcagtttgctaaactgggcctggatgttgacggcgagcgcgtgcagcgcgcctactcctacgtcaacgcccccagcaatcccgatcttgagttctacctggtcaccgttccggagggtaaactcagcccgcgactggccgcgctgaaacccggggacgacgttcagatagtcagcgaagccgccggtttcttcgtgctggaagaggtgccggactgcgacacgctgtggatgctcgccaccggtacggcgatcggcccctatttgtcgattctggaggaagggaaagacctggatcgcttcaaaaacctggtgctggtgcatgcggcgcgctacgcagccgacctcagctatttaccgcaaatgcgagagctggagcagcgctacgccggcaaattgcgtatccagaccgtggtcagccgcgagacagcggaaggttctctgaccggccgggtgccgtttctgattgaaaccggtgcgctggaagaggcggtcggcctgccgatgaccgccgataccagccacgtgatgctgtgtggtaacccgcagatggtgcgtgatacccagcagttgctgaaagagacccggcagatgaccaaacatctgcgtcgccggccgggccatatgacagcagagcactactggtaa

SEQ ID NO: 107661 - DNA, 429 bp, Enterobacter aerogenes
atgaccctacagcagtggttattctcaattaaaggccgtattggccgccgggatttctggatttggatcgttatctgggtgttgaccatgagcgcgctgtttaccctcgcgggcagcaatttgctgggtttacagaccgcggcgtttattctcgtctgcctgctctggccgacggcggcggtggtggtgaagcgtctgcacgatcgcgggagatccggcctctgggcgctgctgatgattctggcgtggatgctgctggcgggtaactgggcgatgttgccgcaggtctggcagtggggcgtcgggcgctttgtaccgacgctgattatcgtcatgatgttgatcgacctgggcgcgtttgtcggcacccagggcgaaaataagtttggtaaagagacgcaggatgtccgctggaaagcggacgcctga

SEQ ID NO: 107662 - DNA, 600 bp, Enterobacter aerogenes
atgaagaagtgggcaatcttaagtttgattgggctgacagcgttatctgtcggcccgatggcgatgtccgcagaaacggaatccgccgccaccgccccctatcttttacccagcgcgccgatttttgatgtcagcatcagcgagttccgcgagaaatttaatgccgataatccgaaactgccgcttaacgagtttcgttctatcgcctccagccgcgataaagccaacctgacccgcgccgccaccaagattaacgagaatctgtatgcctctaccgcgctggagcgcggcacgctaaagattaaatcgatgcagataacctggctgccgattcaggggccggaacaaaaagcggcgaaagcgaaagcgcaggagtatatgagcgctattcttcgcgcttttgtaccgacgctaagtccactgcagagccagcaaaagttgcaaaaactgctgaccgccggcaaaggcaaacgctactacaccgaaaccgaaggcgcggtgcgctatgtagtggcagatcacggggaaaaggggctaactttcgccattgaaccgattaagctggcgctatctgaaacgctggaagacaacaataaatga

SEQ ID NO: 107663 - DNA, 768 bp, Enterobacter aerogenes
atgcgacatcctttagtgatgggtaactggaaactgaacggcagccgccacatggtaaacgaactggttgctaacctgcgtactgaactggccggcgtaagcggctgtgcagtggcaatcgcgccgccggaaatgtatctcgacctggctaagcgtgcggcagaaggcagccacatccacctgggcgcgcagaacgttgacgtgaacctgtccggcgcattcaccggtgaaacctccgccgaaatgctgaaagatatcggcgcgcagtacatcatcatcggccactccgaacgccgtacctaccacaaagaatccgacgagctgatcgcgaagaaattcgctgtactgaaagagcagggtctgacgccggttctgtgcatcggtgaaaccgaagcggaaaacgaagcgggcaaaacggaagaagtttgcgcacgtcagatcgacgcggtgctgaaaactcagggcgcagccgcttttgaaggcgtggttatcgcttatgaaccagtatgggctatcggtaccggtaaatccgctaccccagcgcaggctcaggcggtacacaaattcatccgtgaccacattgctaaagctgacgctaaaatcgctgagcaggtcatcatccagtacggcggttccgttaacgccggcaacgccgcagagctgttcacccagccggacatcgacggcgcgctggttggcggcgcatccctgaaagcagacgctttcgcggtgatcgttaaagctgcagaagcggcgaaaaaagcgtaa

SEQ ID NO: 107664 - DNA, 1305 bp, Enterobacter aerogenes
atgtcgctctggctaacccacccgctgttcctcccttcgctgatcgtcggcatcaccattgtgctctgggcgacttcgctgttaccggaatttatcaccgcgctgctgttcttcgcggcggcgatgatgaccaaaatcgctccgccggaggtgatcttcggcggttttgcttcctcggcgttctggctggtgttcagcggctttgtgttggggatcgccattcgaaaaaccggactggcggatagagcggcgcaggcgctatcggcgcggctcaccgactcctggccgcggatggtcggcagcgtggtattactgagttatgcgttggcgttcgtgatgccatcaaatatggggcgcatcgcgctgttaatgccgatcgtggcggcgatggcccggcgcgcggggatagccgacggcacgcgcggctggtacggcctggcgctggcggtgggctttggcaccttccagctatctgcgaccattttgcccgctaacgtgccgaatctggtgatgagcggggcggcggaaggctcttacgggatccatctgaattacgttccctatttactgctgcatacgccggtacttggctggctgaaaggggcggtgctggtggcgctgatctgttggctgtttcccggcaagccgcatccgccgcgcgagctggcgccgcaggcgccaatgagccgcgatgaaaagcgtctggcgtggctactggcggtggtgttgacgttatgggtgaccgaaagctggcacggcgtcggcccggcgtggaccggcctggcggcagcggtggtcacgctgctgccgcgagtaggatttatcagcggtgaggagttcgccagcggggtgaatatgcgcacctgcatttatgttgccggcattttgggactggcgattaccgtgacccaaaccgggattggcggcgcggtgggtaacgcgctgctgcaggtgatgccgctggataaagataatccgttcaccagcttcctggcgctcaccggaattaccagcgcgctgaattttattatgaccgccaacggcgtcccggcgctgtatacgacttttgcgcagagctttgccgacgcgaccggctttccgctgctgagcgtgattatgattcaggtgctgggttattccacgccgctgctgccataccaggcgtcacctatcgtggtggcgatgggattaggtaaagtcccggcgaaagcggggatgttgctatgcctggcgctggcggcggtgagctatttgattttgctgccgctggattacgcgtggtatcagctattggggaaattgtag

SEQ ID NO: 107665 - DNA, 765 bp, Enterobacter aerogenes
atgagaagagtaagataccttttatgggcgctgctggtggttattctggcggcgctggctggcggctactattggctgcattccggtaacccgaacgcgttacgtcatattgtcctgcagcagtgcgtacccaatcagcagcaacatcaaaacccgtcgccgtgcgcggaagtgaacctgaaaggcggctacgtgttgtttaaagatcgcaacggcccgctgcaatatctgctgatgccgacctaccgtattaacggtaccgaaagtccgctgctgttggatccgctaacgccaaatttcttctggcaggcctggcaggggcgcgaaattatgagccagcgccgcggcgcgccgattgatgataacgcggtatcgctggcgattaactcgcgcagcgggcgcacgcaaaaccatttccatattcatatctcctgcctgcgtcccgatgtccgcgcgcagttagataatgatgcggcgacaattagcagccgctggctccctttgccgggcggtctgcagggccatgaatatctggcgcgtcgggtaacggaagccgagctggctcagcgcagcccgttcctgatgctggcggaagaggtaccggaagcgcgcgaacatatggggcgttatgcgttagcgatggcgcggcaaagcgacggctcgctggtgctgttggcgacagagcgtaacctgctgactctcaaccgtgcttcagcggaagaaattcaggatcatagctgcgcaattcttaacgcaaaccactag

SEQ ID NO: 107666 - DNA, 990 bp, Enterobacter aerogenes; identical to SEQ ID NO: 87541

SEQ ID NO: 107667 - DNA, 240 bp, Enterobacter aerogenes; identical to SEQ ID NO: 87540

SEQ ID NO: 107668 - DNA, 849 bp, Enterobacter aerogenes; identical to SEQ ID NO: 87539

SEQ ID NO: 107669 - DNA, 1512 bp, Enterobacter aerogenes
atgaccgagaaaaaatatatcgttgcgctcgaccagggcactaccagctcccgcgccgtcgtgatggatcacgacgccaatatcgtcagcgtgtcacagcgtgaattcgaacaaatttatccgaagccaggctgggttgagcacgacccgatggagatttgggcctcgcagagctctacgctggtcgaagtgttggcgaaagccgatatcaactccgacgaaattgccgccatcggcatcaccaaccagcgtgaaaccgccatcgtttgggagcgtgagaccggtaagcctatttacaacgccatcgtctggcagtgccgccgcaccgcggatatctgcgagcagctcaagcgcgacggcatggaagagtacatccgtaaagccaccggcctggtggtggacccgtacttctccggcaccaaagtgaagtggatccttgaccatgtcgaaggcgcccgcgagcgcgcgaagcgcggcgaactgctgttcggtaccgttgatacctggcttatctggaaaatgacccaggggcgcgtgcacgtcaccgactacactaacgcctcgcgtaccatgttgttcaacatccatgaactggactgggacgacaaaatgctcgacgcgctggatatcccgcgcgccatgctaccggaagtacgtaagtcttctgaagtgtacggccagaccaacatcggcggtaaaggcggcacccgtattcctatctccggcatcgccggcgaccagcaggcggcgctgtttggccagctgtgtgtgaaagaagggatggcgaaaaacacctacggtaccggctgcttcatgttaatgaacaccggtgaaaaggctgtgacctcaacccacggcctgctgaccactatcgcctgcggcccgaccggcgaagtgaactacgcgctggaaggcgcggtgtttatggccggagcgtcgattcagtggctgcgtgatgaaatgaaactcatcaacgatgctttcgattctgaatacttcgccactaaggtgaaggacaccaacggcgtgtatgtggtgccggcctttaccggtcttggcgcgccatactgggatccgtatgcgcgcggcgcgattttcggcctgacccgcggagtgaacgccaaccatattatccgcgccacgctggaatctatcgcctatcagacgcgtgacgttctggaagcgatgcaggccgactccggtattcgtctgcacgccctgcgcgtggacggcggcgcggtcgccaacaacttcctgatgcagttccagtccgatattctcggcacccgcgtggaacgcccggaagtgcgtgaagtcacggcgctgggcgccgcttatctggcaggtctggcggtcggcttctggcaaaatctcgacgagctgcaggagaaagcggtgattgaacgtgagttccgcccgggtattgaaaccaccgagcgtaatttccgctacagcggctggaagaaagcggtgaaacgcgcgttagcgtgggaagagcacgacgaagcgtaa

SEQ ID NO: 107670 - DNA, 1203 bp, Enterobacter aerogenes; identical to SEQ ID NO: 87537

SEQ ID NO: 107671 - DNA, 1392 bp, Enterobacter aerogenes
atgtccgttacgaccgcagagtcagaaaatgcgcaaccggttgcgcataaaccagccagcgaattaatctatcgcctcgaagaccgtccgccgcttccgcaaacgctgtttgccgcattccagcacctgctggcgatgtttgttgcggtcatcaccccggcgctgcttatctgtcaggcgctcggcctcccggccgaagatacgcaacacatcatcagcatgtcgctgttcgcctccggcgtggcatctattatccagattaaagcctgggggccagttggctccggcctgctctccatccagggcaccagcttcaacttcgtcgccccgttgattatgggcggcaccgcgctgaaaaccggcggcgccgacgtgccgacgatgatggccgcgctgttcggcaccctgatgctggcgagttgcaccgaaatggtcctctcgcgggttctgcatctggcgcgccgcattattacgccgctggtctccggcgtggtggtgatgattatcggcctgtcgctgattcaggttggcctgacttctatcggcggcggctatgcggcgatggccgaccacaccttcggcgcgccgaaaaacctgctgctggcgggcatcgtgctggcgctgattattatcctcaaccgccagcgcaacccgtacctgcgcatcgcctcgctggtgatcgcgatggctgccggttatctggcggcgtggttcctcgatatgctgccggctaacaccgcgcctaccaacagcagcctgatcactatccctacgccgctctattacggcctgggcatcgactggagcctgctgctgccgctgatgctggtctttatgatcacctcgctggaaacgattggcgatatcaccgccacctccgacgtttctgaacaaccggtctccggcccgctgtatatgaaacgcctgaaaggcggcgtactggcgaacggcctgaactcatttgtttccgccgttttcaataccttcccgaactcctgcttcggccagaacaacggcgtgatccaactgaccggcgtcgccagccgctatgtgggctttgtggtggcactgatgctgattgtgctcggcctgttcccggcggtaagcggctttgtgcagcatattcctgagccggtacttggcggcgcgacgctggtgatgttcggtaccattgccgcatccggcgtgcgcatcgtctcccgcgagccgctgaatcgccgcgctatcctgattatcgccctctctctggcggtgggtctcggcgtatcgcagcagcctctgatcctgcagttcgcaccggactggctgaaaaacctgctctcttccggtattgccgctggcggtatcacggcgattgttctgaatttaatcttcccgcctgagaagaactaa

SEQ ID NO: 107672 - DNA, 1710 bp, Enterobacter aerogenes; identical to SEQ ID NO: 87535

SEQ ID NO: 107673 - DNA, 1560 bp, Enterobacter aerogenes; identical to SEQ ID NO: 106041

SEQ ID NO: 107674 - DNA, 1380 bp, Enterobacter aerogenes; identical to SEQ ID NO: 106042

SEQ ID NO: 107675 - DNA, 723 bp, Enterobacter aerogenes; identical to SEQ ID NO: 106043

SEQ ID NO: 107676 - DNA, 2319 bp, Enterobacter aerogenes
atgaaaatcagtgatggaaactggctcattcaaccagggctcaacctgatccaacccgtacaggtttacgaggtggagcagcaggggaatgaaatggtggtctatgccgcaccgcgcgatgtccgcgaacgcgcctggcagctggatacgccattgttcaccctgcgctttttctcgcctcaggaagggataatcggcgtgcgcatggagcacttccatggcgcgctggataacggcccgcactatccgctgaacgtgcagaaagacgtccatgtcgaaatagaaaatacggccgagttcgccgagctgaaaagcggcagcctcagcgtgcgggtgactaaaggtgaattctgggcgctggattttctgcgcgacggcgtgcgtatcaccggtagccaactgaaaaacaacggctacgtgcaggatagtaagacccagcgcaactacatgtttgagcgcctcgacctcggcgtcggcgaaaccgtctacggcctcggcgagcgctttaccgcgctggtgcgcaacggccagacggtagaaacctggaacgaagacggcggcaccagcactgagcaatcctacaaaaacattccgttctacctgaccaaccgcggctacggcgtgctggtgaatcacccgcagcgcgtctccttcgaggtgggctcggagaaagtctctaaagtccagttcagcgttgaaggcgaatatctcgagtacttcgtgatcgacggcccgacgccgaaagcggtgcttaaccgctatacgcagttcaccggccgcccggcgctgccgccggcatggtcgttcggtctgtggctgacgacctcgttcactaccaactatgacgaagcgacggtaaatagctttatcgacggcatggccgagcgccatctgccgctgcacgtcttccacttcgactgcttctggatgaaggccttccagtggtgcgattttgaatgggatccgctaactttcccggacccggaagggatgatcaagcgcctgaaggcgaaagggctgaaggtctgcgtgtggatcaacccgtacatcggccagcgctcgccggtgttcaaggagctgaaagagaagggctatctgcttaagcgcccggacggttcgctgtggcagtgggataagtggcagccggggctggcgatttatgacttcaccaacccggaagcctgccagtggtacgccagcaagttaaaaggtctggtagcgatgggggtcgattgcttcaagaccgacttcggcgagcgtatcccgaccgacgtgcagtggtttgacggttccgatccgcagaaaatgcacaaccactacgcattcatctataacgagctggtgtggaaggtgctgaaagagaccgtcggcgagcaggaggcggtgctgttcgcccgttccgcctcggtgggcgcgcagcagttcccggtgcactggggcggcgactgctacgccaactacgaatcgatggcggaaagcctgcgcggcgggctgtcgatcggcatgtccggcttcggtttctggagccacgatatcggcggtttcgaaaacaccgcgccggcccacgtttataagcgctggtgtgcctttggcctgctctccagccacagccgcctgcacggcagcaaatcctatcgtgtgccgtgggcctacgacgaagagtcctgtgacgtggtgcgccacttcacgcacctgaaatgccgcatgatgccgtatctctatcgccaggcggcgctggccaacgagttcggcactccgatgttgcgtgcgatgatgctcgaattcccggacgatccggcctgcgactatctcgaccgtcagtatatgctcggcgattcggtcctggtggcgccggtgttctccgaagcgggcgaggtgcagttttatctgccggaggggcgctggacgcacctgtggcataacgatgaattgccgggtagccgctggcataagcagcgtcacgatgcactgagcctgccggtctacgttcgtgacaacaccctgctggcgctgggcaacaacgaccagaaacccgattatgcctggcatgaaggcaccgccttccagctgttccagctgggcgatggcaatgaaacggtctgtcaggttccggcggccgacggttccgcgatcttcactctgaaggcgaagcgccagggtaacaccatcaccgtgagcggcgaaggcgaagcccgcggctggacgctgtgtctgcgcaatatcccgcagatagcgggcgtggagggcgggacgcaggcgggcagcgaactgggcgtggtggtgagcgcccagggcaatgcgctgacgatttcgctgtaa

SEQ ID NO: 107677 - DNA, 1395 bp, Enterobacter aerogenes
atgaaagatcatattctgtccgtcaaagagaaaattggctacggtatgggtgacgccgccagccacatcatttttgataacgtcatgttatacatgatgtttttctacaccgatattttcggtatccccgccggctttgtcggcaccatgttcctgctggcgcgggcgctggatgcgatttccgacccgtgcatgggcctgcttgccgaccgtacccgcagccgttggggtaagttccgcccgtggatcctcttcggcgctatcccgttcggcctcgtctgcgtgctggcttacagctcgccggatttaagccacaacggcaagctgatctacgccgccgtgacctacacgctgctgaccctgctctacaccgtggtgaatatcccctactgcgcgctcggcggcgtgatcaccgacaacccgacgcagcgcatctcgctgcagtcctggcgcttcgtgctggcgacggcggggggcatgctctccaccgtgctgatgatgccgctggtcaactttatcggcggcgaagataaagcgctgggcttccagggcggcattgctgtgctctcggtggtcgccttcctgatgctggccttctgttttttcaccaccaaagagcgtgtcgaagcgccgccgagcagtacctcgatgcgtgaagacctgcgcgatatctggcgcaacgaccagtggcgcatcgttggcgtactcaccatcctcaatatcctcgcggtctgcgttcgcggcggcgcgatgatgtactacaccacctggatcatgggctcggcggcgctgttcaccgtcttcctcaccacctactgcgtcggcaacctgattggctcggcgctggcgaagccgttgaccgactggaaatgcaaagtcagcgtcttctggtggaccaacgccctcctggcggtgctcagcgtggcgatgttcttcgtaccgatggacgccgaaatcaccatgttcgtctttatcttcatcattggcgtactgcaccagctggtgacgccaatccagtgggtgatgatgtccgacaccgtcgactacggcgaatggtgcaacggcaaacgcctgaccggcatcagcttcgccggcaccctgtttgtgctcaagttggggctggcgctgggcggcgcgctgatcggctggatgctggccggcggcggctatgacgccgccgctaaaacccagaacagcgccaccctcaccatcattatcgccttgttcaccctcgttccggcggtgtgctacctgctgagcgcggtaatcgccaaacgctactacacgctaaaaacgccgttcctgaaaaaaatgatggccgagctggccgagggcgcgcgtcgcaacgaacaagagttcacggcagccccgatcgaaaaagaatggcaaaactaa

SEQ ID NO: 107678 - DNA, 567 bp, Enterobacter aerogenes
atgagtttaatgctatcgatcacaatggtgatagtgactttaatcagccctgttgttgccgttcaagttcagaaatttattaaaagatatactgatagaaagacgctcaaaatagatatttttaaacaattgatggccaccaggtcgcagaacgcaaggctatcaaatgaacatgtcagagcacttaatatgatcgatattgctttttatggtcgggtaaggaaaggacaagctaaaagaagcaaagcagaaagtcaggtaatatcagcatggaagctgtatttctcacatctaaatacaacatatccaaacaacgataacgccagcggccttatctggaatcaaaacagcaataatttatttgtagatcttctttcagccattgccaaagatattggttatgattttgagcgcgttcagttgcaaaccgctatctactcgccgattgcacacggtgaaattgaaaatgatcaattaaaaataagaaagggcctggcatcaatattctctgatgatggcgctataaaaatggagatcgttggtattcctagtcgaacagaaagttaa

SEQ ID NO: 107679 - DNA, 288 bp, Enterobacter aerogenes
atggctgatttgcattctaccccagatatcaccgttagcggaaccgagcgtcagctgctggttggctatcggcccaatggccgggataccagtacaccaagtcttaccctttccggcaagtggctgcgtgaagcgggattcgataccgggaaggcggtcacggttaaggtgatggatggctgtattgtgttgctgccgctcagcgataaagaagagaaattaacagccgaattacggcatattcaacaatcgctgaaaagcgtcaacggcacgctgcaacatacctga

SEQ ID NO: 107680 - DNA, 1038 bp, Enterobacter aerogenes
atggcaaaagaaaatataacgtcttccccagcaggggaattcattatgtttgccagcgaggacggggaagtgcgcgttgaatgccgctttgagcaagaaacactatggctccctcaagcaactatcgccagcctttatcaagtcaccccacaagcagttacacagcatattaaagcgatctatgaggaaggtgagcttgaacaaaacgcaacctgtaagtcttacttacaagttcaacaggaaggtagccgtcaggtaagccgaaaccggcttcactacagcctgcctgtcatactcgctgttggctatcgcgttcgctcctctcgcggcacgcagttccgccagtgggcgacccagacgctccaggaatacctgatcaaaggttttgtgatggacgatgagcggctgaagaatccgcctgtgggttcatcggcagtgcccgactatttcgatgagatgctggagcgtatccgcgatattcgcgccagcgaacgccgcgtttatttgcgggtgcgagagatttttgcattagcggctgactatcaaccatcgctaaaagaaaccacgcagttttttcaaactatccagaacaagttacattttgcctgtaccaggcataccgccgctgaactcattcatcaacgtgctgacgccagtcagccgcatatggggctgagcagctatagaggcgaagaggtgaataagggcgacgtgacggtggcaaaaaattatctcactcaggatgaagtcagcgagcttaaccgcgtagttaacatgtggctggattttgccgaggatcaggcccgtcgtcgtcagcaggtctttttacgcgactggcaggataagctggatcagttcctgcaatttaacgaccgtgaggttttgcaaggcgcaggtaaagtcagtaagaaaatggccgatgaaaaagcgcaggcggaatatagtcagtttgctgaacaacagcggcgcttaaaggaagccgaaggtgaaaaggatatcgccggtttgctacagtggaaaacagagcctaaaaagtag

SEQ ID NO: 107681 - DNA, 693 bp, Enterobacter aerogenes
atggaaccggagaatttgcgctatgcgccggacgttggcgattacgatcggctgaaaaacactatctatccgactcagcatcagcagcataatgaaaagcgcgaccaggtgaacgtgcgaatagcgcgggattttcacggcggcggctggaataacgagctgggcggctcactggcgctggcgcggttgcacaaccgcgagaccgatgacgacggcaccttctgggcggcaggcgtgcacggcatgttgcataacgggccgtggcagctgacctcgcagctgattcgctaccaatacgatccaaagaacccggcgggcgtcagcgacgatacgattctgatgggcggcaacggcctgacgccggcctacctgatcccggcgaaagcgacgaccgcgtcgctgaacgtcgcccgcgatgtcgacgtgaagtggggcggcgtatcgaagctgcgtttttacaacgactacagcgtgctgtggaaagataaaagcggctggagcgattcgcagatgaacacccttggcgtacaggtctttgcgctgccggtaatgttctgggtcgatctcagctgggcgaagaacgttaatccgtggggcggcgcgctgaacgccaccggctggaccagcacccagtccgagggcagcggcaaatggtacttccgcactaacgtcaatattggctattacttctga

SEQ ID NO: 107682 - DNA, 504 bp, Enterobacter aerogenes; identical to SEQ ID NO: 107371

SEQ ID NO: 107683 - DNA, 1008 bp, Enterobacter aerogenes; identical to SEQ ID NO: 106048

SEQ ID NO: 107684 - DNA, 303 bp, Enterobacter aerogenes
atgcgcgacgacaccattgcgcttatcgcggttctgaaggcgaaagccgggcaaaccgaggccctgcgcgacgcgctgcaggcgctgctgctgccaacccgcgaggagccgggcaatctcgactacgcgctgtttcagctgcgcgacgcgccggataccttctacatgcgtgagtcctggcgcgaccagcaggcgctggatgagcatatcgcccagccctacttccaggcctttatcggccagatggagagcctgctcgccgagccgctgcggctggattatctgacacccatcgcgccttga

SEQ ID NO: 107685 - DNA, 1050 bp, Enterobacter aerogenes
atgcagatcaacgctataggtacgtactccgccagccagccgctcgaatcgatgtctatcacccgccgcgaacccggcccacaagatgtgcagatcgctattgcatactgcggcgtctgccattccgatctccatcaggcgcgagcggaatgggccgggacgctgtatccctgcgtgccgggccatgaaatcgttggccgggtgacggcggtcggcgatgccgtctcaggttacgccgtcggcgatctggtgggcgtcggctgtatggtggatagctgtaaacagtgcgaggagtgcgctgaagggctggagaactactgtgaccatatggtgctgacctataacgggccgacccaggacgcgccagggcatacgctgggcggttattcacagcagatcgtggtcaatgaacgctacgtactgcggataaaccatcccgaagcgcagcttgccgccgtcgcgccgctgttgtgcgccgggatcacgacctattcgccgctgcgccactggcacgccgggccgggcaaaaaagtcggcgtcgtcggcatcggcggcctgggacatatggggatcaagttggcccacgccatgggggcccacgttgtggcctttactacctcggaatccaagcgcgacgcggccagagcgttgggcgcggatgaggttgtggtgtcgcgcaacgaagacgaaatggcggcccacgtcaaaagcttcgatttcatcctcaacaccgtggcggcgccgcacaatctcgatgccttcaccacgctgctgaaacgcgatggcactatgaccctggttggcgccccggccacgccgcatccgtcgccggaagtgttcaatctgatcttccgccgccgctcgattgccggctcaatgatcggcggtatcccggaaacccaggagatgctcgacttctgcgccgaacacggcatcgtcgccgatatcgagctgattcgcgccgatcagatcaacgaagcctgggaaagaatggtcaagggcgacgtgaaatatcgcttcgtgatcgacagttcgactctcgccggctaa

SEQ ID NO: 107686 - DNA, 957 bp, Enterobacter aerogenes
atgatgacattaaccgacgtggcgattgtcgccgtagagggctttagcccgtttcattattccgtcccctgtatgctgtttggcgatacggtctcggaaaccaaacgttttaatctgcagatttgcgccgaacagccgggattactcagcgcccgcgacggcttcgcgctatacgccagcggtgattttaccgcgatggaacaggcggatatcgtggtggtgccttactggggcgaggtcaaccagcgcccgccgcaggcgttgatcgcgagtttggttcgagcgcgcgataacggcgcggaaatcgtcggcctgtgcctcggcgcgtttgtccttggctacgccgggctgctcgacggtaagcgggcggcgacccactgggagttcgagcaggatttccagcgcctgtttccgcaggtgcggctcgatatcaacgccctgtacgtcgatgaccagaaggtgattacctcggcggggaccgctgcggcgctcgattgctgcctgtatatcattcgccagcgttttggcagcctcgccgccaaccagatcgcccggcggatgatcgtgccgccgcaccgcgagggcggccaggcgcagtttattgcccagccggtgccgcgcaacacccgcgacgcgcggattaactgcctgctggattatctgcaacagcatattgccgagccgcataatcttgattcgctggccgaggtggtggcgatgagccgccgtaccctgacccgccacttcgccagggcgaccgggatgagcattgccgactggttgaccgctgaacgtctgcgccgcagccagagcctgctcgaagcgggggatttgccggtcgagcaggtggcggaagcagtgggctatctttccgccgtgacctggcgccagcagtttaaagcgcgttttggcgttagcccgacggagtggcggcggactttccgccgcggcgtttag

SEQ ID NO: 107687 - DNA, 543 bp, Enterobacter aerogenes; identical to SEQ ID NO: 106053

SEQ ID NO: 107688 - DNA, 813 bp, Enterobacter aerogenes
atgatgaaattgcgtttacgcacggcggcggcagtgatgctggctggcctgctgttagcgggctgtgaccagaagaatgacaatgccaaacacataaaagtcggcgtgattaacggcgcggaacaggatgtggcggaagtggcgaagaaggtggcgaaagaaaaatatggcctcgacgtcgagctggtgggctttagcggctcgctgctgccgaacgatgccaccaacgccggggagctggatgccaacgtcttccagcatcgcccctatctggaacaagacaacaaagcgcacggctaccacctggtggccatcggcaatacttttgtctttcccatggccggctattcgcgcaagattaaatccgttgccgatattaaagatggcgcgactattgccattcccaactacccgaccaacctcggccgcgcgctattgttattgcaaaaagagcaactgattaccctcaaagcgggcaccggcctgctgccgacggcggtggatatcaccagcaacccgcgcaacctgaaaattatggagctggagggcgcgcagctgccgcgggtgctggacgatccgaaggtcgatgtcgccattatcagcaccacctacctgcagcaaaccgggttatcgccggtgcgcgatggcatctttattgaagacaaaaactcgccatacgtgaacatcattgtggcgcgtgaagacaataaagacgccgaaaacgtgaaagagtttatgcagtcgtaccagtcgccggaagtggcgaaggcggcagaaaccatcttcaacggcggcgcggtaccgggctggtaa

SEQ ID NO: 107689 - DNA, 330 bp, Enterobacter aerogenes
atgaaaaaagttttatttgtggtcatggcgttaatgtcatttagtgctatgtcagcaacgacagtaagtattccaacggattcgaaggccaaatataccatcatcgataaaaccacaaatggcaccatggcaaccattacgacgatgagagaggggccatcaggggtgtcttactcacagcgcctgtatgactgcgctgcgtggaccgtgaagtatcttggtgatggagacacgctggagcagatgaaggcatccaagcctgatgaaagcatgtcttcaatagctgataattcaatagcgtattatataggccaatgggcctgtaaataa

SEQ ID NO: 107690 - DNA, 579 bp, Enterobacter aerogenes
atgaaactagatagggggagcgagcttggcgatggaagagtgctctactggatggagaatttttgcattagttgcgtgccaagcaaaaatgggaaatggcatgtaggacattttgaccgagctgaatatgaaactctgagggagaatacggtagctctcctaaaaaacgaagagtttcaatttatggtaaaagttggacgtgggctttctgtaaaagccaggtgcgtatctctcaatgggacttttgtattcagcgttcaccgtgatcccgatgcgaccatggcagctatcattgtactgaatgctcaacaaaaagaagtcttcagcttaactaccacgacacacctaacctcatgtgccctctctgagtttgcggagtatttggcgttatccttctatagcgctatagatgacaaagaaccatacgggaacaaattggaggttttcaatctaaataccggcgagattgttgcttctatcgacaaagataacgacttaaggcacgccgaaattattgttaccgaacccgatggtaatgtcgtcgccttttgtaagggaaaaagcttcaaagtttgctag

SEQ ID NO: 107691 - DNA, 333 bp, Enterobacter aerogenes
atggaatggctaactcttgtagcaacaagcgctgttgtatccgccgtggtgtccggtttgcttacactctggaatgcccatctgcaaagaaaagcagaagaaaggaagcgccttgctgaattagcaatgaaattggctattgctgaatgggaatcccatgctgcaaatattaaggatgtcggtagagggtcgctactcccccctgagatttacttatacaggtactcgcgtttactcccgctcatcgagaaaggagagttgacacctgaaaaattggcggaattggacgctgatgttaagcgtattgcagatacaaaaccagcgcgcaaataa

SEQ ID NO: 107692 - DNA, 234 bp, Enterobacter aerogenes
atggagcgacaaattttagtttttcgtggcgaattcgatacttacgttacttgccaagcatatgttggaagaatccctcctgagatacggtccatagttttagagaatgaaaaatattctttaacagtgtatccgtacgaaggcgaaaactatctggttgcccaccagagcgagataaaacaggaatcacttgaggaagcgatcaagctttataaaccgaagccattaaattga

SEQ ID NO: 107693 - DNA, 519 bp, Enterobacter aerogenes
atgtctttctatataagaaaagtaaacacttctaaatgggaagatgctctacctcaaagtaatgattttttggatatgtcagttgatgggataacaaactgctgtaaaacatctgataatgcgctatctgtatggaagacagagagtcaagatatttatagcgacgaaaacaaacgattgatcacggctatggcgatggcgcttgatcgaccatcagccatgacgattatatttttttctgatgatgatataagctcgctggggcttgatttaaaagaaaccagagggcagacaccttacgatgaactagctgattgccatagggatatatctaatcttactttgaaaaaaataggcagtctagcatggaaaattcatgagaaggttaatgatgatgatgagataaaaatagtttcagaagaggaggtgatagggtttgtgagatatttatttcctgtagttggtgaattgccaaatgaaaaacaacatcaaaaaaaatggaaggcattatattcatga

SEQ ID NO: 107694 - DNA, 651 bp, Enterobacter aerogenes
atgagtaattcatcttatgagtctttttttatcaactttaacaaaactggtaagccgtctgcttctgttttttcgtatcacgaaaaccagttagaagaaggtggagtagagttccataagaatatttttttagataataccccggttattaaaaacaaaacaagtggtaaaaccgagacccgtcctctttatgctaaaaatattgcagaaatagcacttattgaaatagaaagtttagtttcgcaagtttactcatcatttgtgtatgacgatattcaatttggttgtgattcaaaaacacaaaaaatgattgaggagttggttggggtttatcactatgattttattgataatgttttggtgagaattctttcaaaacatatcgttttttgcggtaaacctgtgcttatgagcaagtacatgatgttgctttctgcttttgacgcaaaccattttccattgacttgtaatatggcaattacttcattagcttctaaaaaatttaactctgtaaaagaatctgtgctgatttcaatagaaacttggaaatataaagatgctattactcttctggaggacatggaaccgtataacagaagatatctggaggattataaacgtaaagttattgattttttaaaaaggtgctaa

SEQ ID NO: 107695 - DNA, 696 bp, Enterobacter aerogenes
atggaaatggaaatgattggttcgtcaacacaagttaatttttttataaatagcacactgttacaagctgacagtaaagctatacttaaactggttccatttattgaggaaggttttgtaccttcttttggcgaagaagttactgagaataatgttaaaaacaaaatttttagaatcgaaaaagagtccgacggttttaactatataataacgtttggaactcaggtggtttcattccagtttgatacgcctagtatttccgttaaggatgagttgtttgatatttttcggcagttgttagagaagttaatcaatgtgtttcataatgaacttcctttggttaatcgtgtatcagttgtggtaaatcagggctatcaatatcactcagatcttgatgttagattgcacggtaaatttttcaaacctcaagttataccatccgaatggaatttcagacgagcaatagctactgagtttgaaaacattccaatttatcatatcatagctataacgaaaggccacgcgattataaatatacgtggggaagtaagcgaacaagaaactatcctcttgacagttgataataatgtggatgttggaagggtgagtaaaaaatttaagtttgacgatttgtcgtttatatatcctttgtttttgaaaagcgtatcggatttttatagtacacttgaaggatga

SEQ ID NO: 107696 - DNA, 177 bp, Enterobacter aerogenes
atggcggagctggctaaaaacaatcggagagccagtcgtaaggcgcagtactgcaagcgcaaggcgtctgagcgccagcttaccgtgctggagtcccgcaccgtcaccgtgaatctgcctgcagggtatggcgtccgacctggcatccgattaacgaagatgaaagaagtgctatga

SEQ ID NO: 107697 - DNA, 435 bp, Enterobacter aerogenes
atgaataacgaaatcgaactcacagcagcactgttaactatcgagaagagcaaagaggcatcaggctgcccggctggcgtcgacctgcaggactgggtgaagcagctggcggaggagaacttggggctgaagtcgtttggcggcaagctgaatgatatgcataacgcgctgaatggagaaggggtaggtattcaagggcgtgcagaagtagtttgccagcaggtcgcactggaagcagcaatggaagagttcgacgctattgaaacccccgccaccgatcgcatcgtagccgaagccgaggcgcgcggggttgagaagttcgcagcaaaacttcgaattcctggtgatgaccagttttttgatgctgtcgctgagggggttgcaggtgctgctgacgccttctccaagcagctgcgcgagggggccgacaaatga

SEQ ID NO: 107698 - DNA, 159 bp, Enterobacter aerogenes
atgacagcggcagaacgttgggatgacgacgctttcgtcagactgatgcgtgacgcaatccacgaatcaccggttgaagatgacgagccggttaacctggctgcagaacgccataacccggtgatcagcatggaagagttcgcaggtaattttaactaa

SEQ ID NO: 107699 - DNA, 369 bp, Enterobacter aerogenes
atgataaaacaaattaaagtaatcatgttggcagcaatagttaccggatgttcatcgccaccgcctcccgttcctgtagattgggataaagccgccgccccattaaataccagtttaccgcaatggagcgacaataacgttatggtcccttccccgacagttaacagtaaatggacatcatcaatcagcgcacaaagtttctacaatacaatacaatatggactccagccgtattttacgcagtcgcccactcaacacgaattgtcgtcactgcacaatccggcactgatttctttaatgccaaaaactggcttcggcagaatggagcaaaaggtgttattgaataccagcctgtctttaattgtctga

SEQ ID NO: 107700 - DNA, 879 bp, Enterobacter aerogenes
gtgcccgatgtttatcaatacactgagcttccttatagttttcgtgtgcaagtgattcatatcatcactgaaactataggtgatagctatcgagcaggctccgagtcggagcaaatatacgaagctattagtaatgctctttgccgtgaatatggtgtattcagtttaactaggagttcaagaggccacttcgaatcaattcgtgacttttttctgaatgaacaaaattatgagcgctgccttgatgttattgaattaagctttaaatgtattaatggctacgtgaaagaaaactattggcggtttcacggtcaatatcaaaagtcagatgcagcgatagaagagcttaacgttagattcaaagaagcaggaataggttatcagttcgaatccggggagttggtgagagttgattcacaattcattcactccgatgcggttaagcccgcccttcagattttggggagttctaaagaattcgcaggggctaatgacgagttcctctctgcacatgagcactacaggcatcaaagattcaaagagtgtcttaatgattgtctgaagtcgtttgaaagccttatgaaggccatccataaaaaacgctcatgggaatatggaagtactgatacagcaaagaaactaatttccagttgcctttcaaatgggcttattcctgactatatgcaaaatcaattttcatcactgaggattttactcgaaagcggtgtgccaactatcagaaataaagagggtggtcacggtcagggggatgaggtgacgaatgtaccagagcatctggctagctatacattacacctgacagcatctaatctactatttttagcaaaatgtgatgagaatttcacaaagaaaaaataa

SEQ ID NO: 107701 - DNA, 558 bp, Enterobacter aerogenes
atgatttatggttatgcaagagtatcaaccaaagagcaaaacttagaccgtcagttagctgctcttgagcctatatgtgatgtggttaaagttgagaaggtttccggtaaagatttgaaccgtccagagcttcagaagctgtttgagttcatccagtctggtgacacgctcatttgcaaaagtattgaccgtctggcaaggaacacgaaagatttgcttgaagttgttgattcactaattggtaagggtgtaattgttaagtttctggacaactcaatgagctttgacaatacaccagcttcccgattgattctaaccatgatgggtgctgtagcagagtttgagaggggcatcattgctgctcgccgtgatgaaggtatcgctattgctaaagacgcaggaaagtacaaaggcaagcaagctaatcaggctcttcatagtaaggtagtaaagtaccttgaagcgggaacttattcacctgatgagatagcaaagctatgtgaatgcggtagagctacagtgttcagaatcaagaaagagtggaaagcagcagcttaa

SEQ ID NO: 107702 - DNA, 522 bp, Enterobacter aerogenes
atgaatagtcctacacagaaacgaattgaaatcgaatcacatttcattcccaaaattaaagctgcactggaaaatatcgaagatgcaaaggatatttacaacgcagacagcctgaataaagatactcttattgctatcaaggctaagcaactaatgtctcagccagtcgaagattacggattccgaatccgacaggttacacacccagcgatggtacagactattattcagaacatgatgaatgagggttacgttgtgtatgagatgggcgctggatttatcaagtttgtaccattacagcagtcaccaaaacataacccgctcgctgagattgaaaaggcatgtaagaaagccgctgagaaattttttgatgcaggaatcactgagaaagcaaataaggtaaataaggccatccatgctcacaacgtattggtgaaacaggctgaagaggccttatcgggaattaaaccgcttgaatcctatctgtcgatgattgtcgctggtgaggtgggtaatgactaa

SEQ ID NO: 107703 - DNA, 354 bp, Enterobacter aerogenes
atgactaacaaagtcactgaagccgcttacaaggctcagattgccactttacaggctcagttaatgcagcgtcatacagtgactgccatcgacgctgtacagcctttctgtgaagctataggtatcaatcccgctgattacgttaaggccaccagcgctatgagtaaccagcataaagcgttctgtgacgggattctgaaagcagcttcttcaaaggtcacccgcttgcagcgtgatgcaactgtacgaatccttgaagcacagacaaaacgaaacaaagccataacagcagcctcagaagcggctgaagttgctcagtcgatgggagggctaaatgaatcaactcttcaatga

SEQ ID NO: 107704 - DNA, 216 bp, Enterobacter aerogenes
atgaacctttacgcattcaacccactgaaacaaaatgataagcaagaggtacttacccccgtatcctttaatttggtcttatcgctacctgagcagctactgaaaaggctggataaggtcagctatgaattggttaagcggtacggtattgcaggatgtagtgataagcagcgacatcacatcgctattgttcatctgcttgaaaaatccgcttag

SEQ ID NO: 107705 - DNA, 243 bp, Enterobacter aerogenes
atgcataccttttttagcatcagttatatacttatcaacaaagactgctgcaaggtttaccttaccgccgctccaatatttatactctttcaaaagagattgattataaggtgggttaataaggacatgcgtaaacgcatcctgcgaaacatcatcatccaaaccatttttacattttatattggtgaggattttcatattttcttgaagatttttttcatcaatatgaacaccacgatttaa

SEQ ID NO: 107706 - DNA, 363 bp, Enterobacter aerogenes
atgattccggattatttaacgtttattcgtcgtcaggatcggtcgcttttaccgtatttgtactttcttactacattactaattgcattttacgtcaaaaacagagggtatctgttaaccgtagaggatgcctttccagtaagtgccatcttttcgttaactatgttcagctttgtttatgagttaaagggatattgggcatataaatatgcgataaggaatatcaatttttcttggttgcaggggaaaagctattcgcgatttgagataatactgtggcagccgcttgtcgctacaacgtgctgtttactgagttgctatctggttgttacaggatttctactcttttttcaaccattgtag

SEQ ID NO: 107707 - DNA, 747 bp, Enterobacter aerogenes
atgtacgcggcgataagcgtcagcgggtcggcctcgctgatcgccctggtgatgctccccttcgcgccacagccgacgctggccagcgccccctatctggtggcgtcatgtgcattacaggtggtgtatacggtactggtggcgaagacctatcaggtgtcggatatgagccagacctatccgctaatgcgcggcaccgcgccgctgctggtcgcggctatcagcgtgatatttatcggcgatcgcttatccccgctggcctggttgggtattggcgtcatctgtctggcgattctggcaatggccttcaacggccgcatcagttcccgcaaaggcatcatgctggcgctgatcaacgcctgttttatcgcgggttatacgctggtggacggcaccggggtacggctggcgggatcggcgctcggctataccctgtggaccttttttatgaacggttgctgcctgctgtgctgggcgatggcggcgcggcggcgcgaagccagccgttatttacgccaacactggaaaaagggcatcctcggcggcgtcggcactatgggatcctacggcctggcgctatgggcgatgactcaggcgccgctggcggtggtcgccgcgctgcgtgaaacctccattctgttcggcgcgctgatcgcgtttatcgtcctgaaggaacaagtggtagcgctgcgcatcgttgccgcctgtggtattgccgctggagcaatcctgctgcgtctctcatag

SEQ ID NO: 107708 - DNA, 495 bp, Enterobacter aerogenes
atgctcggtgaatctcaagggcaaagtaaacttattgcatttgttgctatgcctttttcagaaaaaacgtctaactacccgcatggttattttgatgaagtacttaaacatctcattacgccttctgcggtgaaggctggatttaatgctaagacggcaaaaaaagcagggagtgaagttattcaatctacgattgtcaacgatcttgatgctgctgatcttgtgatagttgatctaactgaacacaatccaaatgtgctttttgaattaggtatgaggattgcctttagtaaacctgtctgtttgatcagagcaaaaggtactgcacctatatttgatatagaccacatgttaagagtctatgattataatccttgcttatggccttctacgctagaaagcgatattccacaattgtcagagcatataaaagaaacatggataaataggagagagcgttcatacctcgatattcttagagaaaataaaagctaa

SEQ ID NO: 107709 - DNA, 804 bp, Enterobacter aerogenes
gtggcgggtgcgcaggccgggaagaacgcggtggagaataatgcgctgagtgatattgcagagcaacttgcttcggggcaatcaccggcggagaaactcgacaagctgaataaggcagaagaagagcgattcagtcgggaagaatgcgccggattaagtccagacgcctgtggcgccaaaatgtacgaccatcgccgggaagccctgaaggatatggcatcgcttggtgtggacttcttgcccattgccggggatatcaagggatttgcggaagcagaaagtgcgatagattatctggccgctgtaataggaatatttccggggttaggtgacggagcaggtaaagcgattaaagcagcggagaaggcactggcaaaaggtgatcttgaatctgcttccaagctgattaataaagccagcgatgatatacaggtaaaatgggttgatgaaaatgcgggaatgagccagagagcaagagattataacgactctgcaacaggtgcccggtcaaatattgacacccaaaaaggtcaagctcctaccattgatagaattgatgctaatgggaatagcaagccggttcggttcgatggagtggatggcaatgtcatgatagatagaaaaatatctgtagtgacaactcaaaaagcgaaaaaccaagccctgagacaatcagaagcactgaaaaacagtggtattacagggcgctgggaagtgccaaatcagactcaggctaatcgtgctcaaaagatgtttgatgatttagggatcaagaacatagaggtgaaaattgttaaagagtag

SEQ ID NO: 107710 - DNA, 387 bp, Enterobacter aerogenes
atggccggttatacctataataccggcgaccatatggcctgtaataaggatcaacatagcgcctgttcgcagtcgggttttaacggcatgccgtcgccggaaaacggttttgaatcgacgaatatctccggcagcagcggttatctcggcgcctttgttctgaaacctttgagcgccgatctacgcctgttaggtttcgccggtggatcgtatggctcgaaaaacgacgatggcgataactataaaggttatttcgccggggtcggcgtgggatataacctgaccgagcataactcagtgaaatttatgacctacgtgcaggataacaacacctatctcgatgaagccgaaaagcgcttcctgttctcctggcagtatcagctttaa

SEQ ID NO: 107711 - DNA, 804 bp, Enterobacter aerogenes; identical to SEQ ID NO: 87857

SEQ ID NO: 107712 - DNA, 252 bp, Enterobacter aerogenes
atggcgcaattctactctgcaaaacggcgtgtgacgacgcgccagatcataaccgtgacggtaaatgaccttgatccctttggccagggcgtagcccgtcatcagggtaaggcgctgtttatccccggcctgttgccgcaagagcaggcggaagtcgtgctggtagaggataaaaaacagtatgcccgcgctcaggttaaacgccgcctcaacgacagtccacagcgcgttgcgccgcgctctcccgcctga

SEQ ID NO: 107713 - DNA, 177 bp, Enterobacter aerogenes
atggagtattcaggtaaaaaatgccagcctctggaggggctggcaaagggatgtgacttcgattttgtattgggcgtgatacacgggtatcggtatcacaactacattatagacaataaaaaagccctgtatctctacagggccctgaaatcaggacagaaagaatcgaacacctaa

SEQ ID NO: 107714 - DNA, 366 bp, Enterobacter aerogenes
atgactgatatcacccgacttttagccagtctcaaacgccgctcagcccatgtaaaagagtttggcgacgatattacgtttgtaaagctagtagaccttgatgcgctggtagaggcgctggatatggcgcagcagcggaatgatgaactggagaatgatgaggttcgtcaacggctagctaacgcagaccaccaactctacatggctgaactggctatgcatcacttcaaggccagccgcaaagctcagtatcgtaagcgcaaagcagcagaaaagcgcgttgccgagctggagcgtgaacatcggcatcttcgcccggtcggtgtgatgagcgagaaagcatttcgccgtcttgaaaacagttaa

SEQ ID NO: 107715 - DNA, 477 bp, Enterobacter aerogenes
atggagatatcttatctctgcgcagcccgcgaaggcgacgtttttgatttgataattaccgagctaatggaagatgggatttttattgagcaaaacaagacgggtaaaaaacagatcaagaaatggacaccacgtctacgggcagcgattgatctggctaaaaaacatcttatcggaaaatcagcagccggttatgtaatcccttcaccatcaggtggacggatgaataaaaaaacattcaatacatggtggaataacgcgaaaaagcaagccgcggtgaaactgggtcgacctgttccgggtacgttccacgatattaaagccaaggcaatttcagactatgatggtagtagcagagataagcaacttttttcagggcataaaactgaaagtcaagtgtcaagttatgaccgaaaaataaaagtaacaccaacccttaaccttgaacctcttctcaacgaaaaaaaagcccgctaa

SEQ ID NO: 107716 - DNA, 249 bp, Enterobacter aerogenes
atgcctgaaagaagaattgcgtttcgcagcaactcgctaatagctattttaacgatgatcaatcagagcgatcttattggttttgtcccgaagcacgcattaagttattttagcgcgtcatttaaattccgcgaaatcattttgcctgacccgatccctccggtaatggcctatatgatttataatcgttcatcattaaacaaccccaaatttgccgaatttattacgcaaaataccgcagtcaactaa

SEQ ID NO: 107717 - DNA, 144 bp, Enterobacter aerogenes
atgacttcgcctttaacatcgacacgctgggtaaacttgcaaaatatcaatgcgcagataagcgcaatgagaaataatgccgacaataaggcgattaaccaggcgggtaagccagcgagcaacaaggctttccctttccagtga

SEQ ID NO: 107718 - DNA, 1026 bp, Enterobacter aerogenes; identical to SEQ ID NO: 71839

SEQ ID NO: 107719 - DNA, 423 bp, Enterobacter aerogenes
atgaggctgcattccttcccggtaaatcgattcgaatatttcgaggttgggggcatcgccgctcatgactttggtgtatctgccgatacccgacaggtcgagcgtgacacgagcggcaaaacgtttggtatcgccacgcttgaactgatttttcaccacaacatactggcgggcttgcgggtcaagccctttcaccacatcgaacacttccggctcaaacttcataccgtcaacatagtgtgcgcggtcggcgttggggttcgccgccagaatctgtgtcccgcactgctcaatcactgccggggcgatatcatctttgatgatctctgccggggattgagtaccgacgaccagcatcccgttcagcttacggatggttttcagcttgttataagcaaagtccttaaacaccgggtcgcgtaa

SEQ ID NO: 107720 - DNA, 423 bp, Enterobacter aerogenes
atgaggctgcattccttcccggtaaatcgattcgaatatttcgaggttgggggcatcgccgctcatgactttggtgtatctgccgatacccgacaggtcgagcgtgacacgagcggcaaaacgtttggtatcgccacgcttgaactgatttttcaccacaacatactggcgggcttgcgggtcaagccctttcaccacatcgaacacttccggctcaaacttcataccgtcaacatagtgtgcgcggtcggcgttggggttcgccgccagaatctgtgtcccgcactgctcaatcactgccggagcgatatcatctttgatgatctcagccggggattgagtaccgacgaccagcatcccgttcagcttacggatggttttcagcttgttataagcaaagtccttaaacaccgggtcgcgtaa

SEQ ID NO: 107721 - DNA, 783 bp, Enterobacter aerogenes
atgaatgacgagccgcaatatcgcgtctacggcattacccgaatgctggaaaatttgcctgagccggctacgaaagaagcccaggaaaacggccttagcattcggttgtcccaatgggcgcagggcggtgagttcggctgggtgtttgataacgagtctgacacgttcgatatcagcaactgcgataacttcggcatcgacggaacggagttcctggacgacgcaagcgtatgtgcgccaatctcgttttatctgctgtaccgcattaccagcctgcttgacgggcgacgcctggtcattttcatggatgaattctggaagtggttacgcgacccggtgtttaaggactttgcttataacaagctgaaaaccatccgtaagctgaacgggatgctggtcgtcggtactcaatccccggcagagatcatcaaagatgatatcgccccggcagtgattgagcagtgcgggacacagattctggcggcgaaccccaacgccgaccgcgcacactatgttgacggtatgaagtttgaaccggaagtgttcgacgtggtgaaagggcttgacccgcaagcccgccagtatgttgtggtgaaaaatcagttcaagcgcggcgataccaaacgttttgccgctcgtgtcacgctcgacctgtcgggtatcggcagatacaccaaagtcatgagcggcgatgcccccaacctcgaaatattcgaatcgatttaccgggaaggaatgcagcctcatgaatggctcgatacctacctggctaaagcgctctga

SEQ ID NO: 107722 - DNA, 423 bp, Enterobacter aerogenes; identical to SEQ ID NO: 107720

SEQ ID NO: 107723 - DNA, 426 bp, Enterobacter aerogenes
atgcgcgttaatagtttaaccccgcaggatctcaaggcttacggtatcaatgacgtccaggaaattgtccacaacccgagcttcgatacgctgtatcaggaagagctcgacccgaaactggaaggttatgagcgtggcgtattaaccaatcttggcgccatcgccgtcgataccggcattttcaccggccgttcgccgaaagataaatatatcgtccgtgacgataccactcgcgataccgtgtggtggtctgataaaggcaatggcaagaacgacaacaagccgctctcccaggaaacctggcagcacctgaaaggcctggtgactcaccagctgtcgggcaaacgcctgtttatcgtcgacgccttctgcggcgccaacgcagacacccgcctaagcgtgcgcttcattactgaagtcgcctag

SEQ ID NO: 107724 - DNA, 1173 bp, Enterobacter aerogenes
atgttcattcgcccgagcgaagaagaactggcagccttcgagccggactttatcgtcatgaacggcgcgaagtgcaccaacccgcagtggaaagagcagggtctgaactccgaaaacttcgtggctttcaacctgaccgagcgcatccagctcatcggcggtacctggtacggcggcgaaatgaagaaagggatgttctcgatcatgaactacctgctgccgctgcagggcatcgcttcgatgcactgctccgctaacgtcggcgaaaaaggcgatgtcgccgtgttcttcggcctctccggcaccggtaaaaccaccctctccaccgacccgaaacgccgcctgattggcgatgacgagcacggatgggatgatgacggcgtatttaacttcgaaggcggctgctacgcgaagaccattaagctgtcggaagccaacgagccggatatctaccacgcgatccgccgcgatgcgctgctggaaaacgtcgtggtacgggctgacggcaccatcgattttgatgacggttcgaagaccgagaacacccgcgtctcctacccgatcgaccatatcgaaaatatcgttaagccagtgtcgaaagccggtcacgccaccaaggttatcttcctgaccgccgatgcctttggcgtattgccgccggtttcacgcctgaccgctgaccagactcagtaccacttcctgtctggctttaccgccaagctggccggtaccgagcgcggcgtcaccgagccgaccccaaccttctccgcctgcttcggcgccgcgttcctgtcgctgcacccgacgcagtacgctgaagtgctggtaaaacgcatgcaggcttccggcgcccaggcctacctggtcaacaccggctggaacggtaccggtaaacgtatctcaattaaagatacccgcgcgattatcgacgccatcctcgacggttcgctggataacgccgaaaccttcaccctgccgatgttcaacctgcagatcccaaccgagctgccgggcgtcgatacccatatcctcgacccgcgtaatacctacggttctccggagcagtggcaggagaaagccgatcagctggcgaaactgtttattgagaacttcgagaagtataccgataccccggccggcgctgcgctggttgcggccggtccgaagcgttaa

SEQ ID NO: 107725 - DNA, 249 bp, Enterobacter aerogenes
atgcagcaaatattgctgatagtggtggggatgcggcagggtgtactcttccggcaaccagtcgtctttttgcaccagcgcagccaggcgctcggcgacggcgtcgagcaggggggcctcatcggtaaactggcgatgcagggcatcaaggtcttgaataaactggcgttatttttccactcgcggtgcagtcatggtggtttcctgttgtcgggactggtcattacgctagcaaaggcgttaatataa

SEQ ID NO: 107726 - DNA, 708 bp, Enterobacter aerogenes
atgaaagaacgcggaatgatttttaacggggagatggtgcgggccatcctcgacggccggaagacgcagacgcgcaggattatggcaccacaaccagcggacgacattgagcgtggcattttccctaacccaaaagtaattggctggaaatcctctctgaggcacaagtatggcagcaccaccgctcattttttcccttacggcaagccaggcgaccgcatctgggtgcgggaggcttttcgggtgcatagccgggctacagacgtcgcaaccctggtatacaaagccagcgagcgaaattcatggacggagcaaaccctccgtgtacccgtagctgtctgcaataagccggcaacgcctgagaaatggactccttcgctgcacatgccgcgctgggccagccgcattctgctggaaatcactgacgtgcgcgtggagcggctgagcgctatcagcgaagaggatgcgcaacgcgagggagttcataccgaggtttgggaccagacagtagtcgcaaggaattacgcggacagcgatgagtttttccagtcctggtccgaagacatgccccactacgttgaaatgaatcaactttatcggtcctcattcagaagcctgtgggaatccatctatggcgccgaaaactggcaagccaacccctgggtttgggttatcgagttcaagcgcgttgaaggcggtgcagcatga

SEQ ID NO: 107727 - DNA, 273 bp, Enterobacter aerogenes
atgagcaaaaacctacacatcgaactcggtgataaatacgtagtcacagggtcaacgcatgacctcatcctgaacgagaaacgcataattaaggatggtaagaacgccggtcaggaaacgctggctcgactcggctactacagcaagtttgagcacctggtgaaagaactttgccatcgggagattcttcagtcagaagcgcagtcactggaagaattgcgcgactacatcgttgctctcggcgagaagctgggtaaggcggttgagtcatga

SEQ ID NO: 107728 - DNA, 633 bp, Enterobacter aerogenes
atgagccttgcggatcgcgtaaaacaaaagagacttgaactggggttaactcagacagaagctgcagaaattgctggtatacggcagcagtcctggcaaagtattgaggacggtaaaacccttaagcctcgtaacattattggaatagccaaggcgctaaaatgcgatgccgattggctaatgaacggcggtaattttatgccgatggccgaaatcaacagcaggagagttccgttgataagctatgtacaggcaggagccttggcagagaaaaaccctatcgaagcattcgacggcagccttgaatacatactcacagatcttgatgtctctcaatatacttttgcattacgtattgaaggtgactctatggagcctgactttaaggctggtgacgttattattgtcgatcctgaaattgaaccaacacctggtgagttcgtagttgcgaaaaacggcggcgcgcaagcaactttcaaaaaataccgtccgacctggatagacccgcttggttgtcaacactttgaattagttccattaaatgatgattaccccgttatcaacagtgatcaacaaccgttgaccatcattggcgtaatgattgagcaccgcatataccgccgcaagcgataa

SEQ ID NO: 107729 - DNA, 216 bp, Enterobacter aerogenes
atggaaacaatttctcaacgcctcaagcaaaaacgtgaagagatgaacctgtctcaggaccaactggcaaagctggccggtatgaaacagcagtctctgcaggccattgaggccgggactactaagcgcccacgttatttggttgagctggctcgcgctcttaaatgcgacccagaatggctcctgttcggtgaaaacgaagcgaaatctcactaa

SEQ ID NO: 107730 - DNA, 306 bp, Enterobacter aerogenes
atgatgaaaaagaactctggcaaacaagccgttatcaacttcatcggcctgcatcctggctgcaactttcaggatatccgccgcggtaccgggcttgactcttcggtggtcaattcctccctgtggcatatgaaccgtgacggtctggtaaagcgggaaggtgagtgcaggagcttccgctacaccctgatcgacacaacaactataaccgaaagcgatccatcggttcagtatcgccagcgtcctggcggcgtaaacccaatgacaaacctttttaaccagtgcctggcgggagtaagaaaatga

SEQ ID NO: 107731 - DNA, 579 bp, Enterobacter aerogenes
atgaataacgaaatcgaacagattgcacggcaaaacgatatgagcgttgaattcgtcacctggttctttgacgagaagaaatccgggtgtggcaacgtctggttcataatgatggccgccatgtgggaaggctggaaagcgcgcgaaggagaagctaccgctctggcgctgactcttgagaagagtcttgaagcatcaggctgcccggttggcgtagacctgcagaactgggtgaagcaactggcggcggagaatgtggcgctgaagtctgaggttccattaggtgctattgagaatggtcgtgcttttgcagatcgtttagaggcatacccgtttgaatgccaggctggaaatctaaacatgtgcagtgactggcaagagcttcgccgctgcttcgaacatctttccgaatgggctatgcacggccaatcagaaacctccgccaccgatcgcatcgtagccgctcagcgctcagcattcgttgatgaagctgttgcgaagattacggaatcaggagcgcttaccttcggtgattgcattgtggccctatgccagctgcgcgatggggccgacaaatga

SEQ ID NO: 107732 - DNA, 501 bp, Enterobacter aerogenes
atgaattgggaatttactagtgccgactggaacatggctattgcagcagttacggcatttggtggcttggctgcggcatatgcagcatttttaagtagacagacagcaacgaaatctctccaactgcaaagcagaatgaatgcttatgagtcgttaaagaattgcgcggagagggctaacggatatgccaaagggaagcaaggttctgattggacattccatgatggagcaaacattgtcagaagtctgcgacaggcgatgaaaataatacaagattatagtgagtacagtgatgacaaggaaagtgaagaattaaaagaatactttataaatcaaattaatatggaactattcgaagagttgaaccatcaagatgcgcctggagctttatttaaggggaaaggggattcatctgttgaagttaagatttacgagcaatggaatgatattgtcgcttttttcaacctgatgattgccacagatgaagacctcgccgattaa

SEQ ID NO: 107733 - DNA, 276 bp, Enterobacter aerogenes
atgagcttcgaaattatcgcggggctggtggttgtcatcctgggtgctatcgctggtgcgttcggcattggtcatgctcgcgggaccagtaaggcggaagccaacgccgatcagcagcgtaccgaagaaaacgccgcagctaccgtcgccgcggcagaacgccgtgccgaagtcacgaaaggggccagtgatgtacagcagactgttagccatatgcctgatgacgatgttgatcgggagctgcgcgaaaagtttacccgccacggtggtggttga

SEQ ID NO: 107734 - DNA, 204 bp, Enterobacter aerogenes
atgattactcactacatcgcttactacgaaggcttggatgaaagaggcaacgtaattttgaatggcaacatttcagccgatgttgaaaacctgactgactctggggcgttcatgaattacctcacggataaggccctcacttacgcgcaggtaaatcagccctcagtcacacgcatcgtgctgaaaggggttttcaaactgtaa

SEQ ID NO: 107735 - DNA, 1371 bp, Enterobacter aerogenes
gtgaagctatccagcatccacgttaaatccctcgccatcaacgcctccagcatctcaacgaccaccatcaacggtcaggaacactacgtcattcgtggtgcggtcccgatcgtcgatgacatcgtgatgaatggcggcctgtacccggcggaggagattaacaacagctaccagacgatggagcgcaagttaatgccgatcggccacccgatggtgaacggaaaatacgtcagcgccaacgacccgcaggcggtcaacgattactacgccggggcatgggctcagaacgtcagcaaggccaatgacaaggtcgtgatggacgtttacgtcaataaggctgtggcagacacgaagcctgacggtaagcgccttattcagcgcctggacgacatgatttccggcaataacgccgacccgattcatgtctctaccggtctactgctgaacaaagagcaaaaggcaggtgagtcgaagcagaagaaatactcctgggtcgctcacaacatgcagttcgaccacatcgcgatcctgctcgatgagcctggcgctggaacgccagatgaaggcgtcggcatgttcgttaacgctgacggacaggaggccgatgttgaagcgacaagcctcatcgatgccgccaacagcatgaaagacggctggtggaacaaagtgaagttcttcatcagcaacgcttcagagatgtcattcgacgacatctaccaggcgctgcgcatgtccatcaaacaggacgacaaaaagtggcgctacgtcgtcagtgtctggcctgaccattttgtttacgaagaggatggcgagaacgtcaaaccgaagctcttcgaccagaagtacctcatctctgacaaagtcgtaacgctagtcggcgatccagtagaggtcgtgcgcaaacccactgagtacgaagtcaaaaccaacggagaaataaacccgatgaaagagaagatgatcgccgcgctcaatgccgcaggcgttaaaaccgaggggctgaccgacgatcaggtctgggatgcctacaaccagcagatgcagaagaaagatgtcggcggcgaccctggccaggctcagattaactctgacgcgattactgcagcagttaacgctgccattttcccgctgaacgaaaagctgagcaagctggaaactcagctgcaggcgaatgctgaaagtgacctgaaaaccaagcgtgatgcggttaaagcgaaattctcgttcatgaccgaagcggcggttaactccctgtccggcgacgcgctgaacgacctgtactcacagtgccagaccagcaccggtttgaaccctgcattccaagggaatggcgctcagagtgaaatccttaatatggaggcacctgaataa

SEQ ID NO: 107736 - DNA, 381 bp, Enterobacter aerogenes
atgaataaatttatattcgctacagcgattgttttaactctcgctggctgtgcgtcttctggaaatcagaagcttagcaaggaaaccgaaaccagcgtgcagactaagttacaggagggaaaaacaacaaagtcgcaagtaaaagcagcgtttggctctcctgatgctgtttcctatactgatggcggaaatgaaatctggaaatattcattcgcaaaggtaaaggttaatggtacttccttcatccctttctatggtttgttccataatgggactaatggaaccaagaaagagctcactattctgttcaaagacgacgtggtagcaaaatacacaatggctgaatcggctattaataccaagtctggctgggctgattaa

SEQ ID NO: 107737 - DNA, 471 bp, Enterobacter aerogenes
atgaatcggtttttatcattggcaataatgtttattgctgcacctagttttgctaactctgatgccgctatttcatcagctaaaacagcggtcacaaaaaaattagagtcccgttataaatcaggtgagtgtgctaaatggaaagcaatggcgtcaggtggcgctattgagccagggaatgctattgctaaatgtgacaatgactttaatccagcatacgggcttgttttcagttccttagatgtcaaagaagacgctggtggagaatctgtttgcggaattgttagcggaagaacagaacttagtagaataggcgcgcgtttcatatatgagggaaaaacaggttatgtaacgataaagccttccaaattcccattggcgtcattagcatcatcaggtgaattaggtaaaaaccaaataaagatagaaaataaacaatacgaaatagtatataaatcgcaatgtaagtga

SEQ ID NO: 107738 - DNA, 837 bp, Enterobacter aerogenes
atgaagaataaaataataatacagcacggaatgagtttttttgaaagtggtggaatgcaatttaagacaggtaggatcccaaacttaaatactaaagttatgtactgggatggaataacaaatataaaaggtggccttgctgttatgaatgattcccctgatatactgacattaaaaaaagaaggtttattcgaagatcatcaattatttataaaaaaatcagggagcctcacagagataatcgccgatgagacaaaaaacataatattatctttgctttcggatgcatcaactaactacatcacagatggaatatccccaagtattttaatgagatctggcatggctgcgtctaatggtggggcacttctaaatcttacaaatgcactcccaatggttgatgactccttaaatatagatcaaattcttgaattccgagaaaaaagaggggacatgcacaggcgattaattaatcacattaactctcttgaattacgagtcatgtcttctgaaatgccgggacttgaattaaaaaaagcaattcaagaaattgacactggatgtatggatgccataagcttgtataaagaaagcaaaataaagttcaatctctccaatattaaaattaattttaacatgaaggaaataataaaaataacaggttctgtctatggtggaacttcattgctgctacctcagacaggagccattgtggcgggtgtgttagccggagcagtttccacatttagatgggatgactctgtaaaaataaaaaaaatagacagagcacatccattcaattacattgccgaaattcaaaaatcgggctttgcataa

SEQ ID NO: 107739 - DNA, 294 bp, Enterobacter aerogenes
gtgtccatcgcgcgggcgctggcgatggagccggacgtactgttgtttgatgagccgacatcggcactggatccggagctggtgggcgaagtgttgcgtattatgcaaaaactggcggaagaggggaaaaccatggtggtcgtcacccacgaaatgggttttgcccgccacgtctcttcacacgtgattttcctccatcagggaagaatcgaagaagagggacatcccgacgagctattcggcaacccgaaaagccagcgcctgcagcagttccttaaaggttcactgaagtaa

SEQ ID NO: 107740 - DNA, 1569 bp, Enterobacter aerogenes
atgagcgatctgtttaagcgccagcatggcgtcacaccgcggcaatttcgccaacagcagccgcagcccgccgtccgcccacgagtcagcgccagcgaagtctggcatccggtcgcggttgagcggctttacgcccgcctgaatgaggcggaaaaaaacagcgataatacgccgccgctgctgctcaacccgcgtcagaccaggctggtggatatccgccagttgccagcgcgcgcgccgttattgcgccatacccgtaccatcgtcaccgttcgcgaacttgatgatttactccgcgaagatgtccgccgcgagctggagcaactgcagcagacgctacccgtctacggcatcgatattcacgatccgtttctcagtagccgcctgtttggcgaaggctgggacgacccgacgctcgcgggttatgcctgttggtacaatcttcagcagctgtttagctggctggcgcagaaaggctggacggtgctactccacaccggtttaaccacccgctgcgatttactacagcgttttctgcaacttgccgccaatcactttccacccacgacgcttgcgagctggcgttttgtctggcactggtcgccgcaggccagtgaagcggcgcgacagcaggcctggcgacaacagcgcgaagtgctcgcgtccaccttgcaacaaccgcaaatggggatctggcatcgtttcccgcaaagcgatattgccgacgatccgctactgcattccccgctgctcagcgaagccgattttctcgcctgccaggcggatgctaatgaactgcttgacctggcgcaggccgatagcagcaagctggccgccagtgaaagctatccgcgacagaaattacgccaaatacataatgccctacggcaacggcagctctcgttgctgctgtggctgctatcgtggaatacgttgaccggtgatacccgcgataccaacggacgttttttccgcggcgcgctattgatggataacctgctgggcattgccgaacaggtgtggctggccggcttctggcttaattccgggctgcagggggaggcgcgggacaacggtaaacttgatacctccagcctggcgctgcattacctgcatggtctgccgcgcccggtttactgggtattatggctgtggcggcgtctgcgcggcgaagtcttaatcaatgacaaaaacctgttgttattgcgccataacggacactaccagttgctgctgcgcaatacggtgattttcaacccctggctgtcgagcgaagaggcctttactcagcggtttcgccagccttataccctgcggcttgaagggctggagggacgctggcgcatcaaacagcatctgttcgatcaacatcacggcgcgctatttcctctatttgaggcattccgcagccgcagcggcccggacgaagaagattatcgctggctccagcaccacgcccgcccggcgctgagcgtgcatgaggaacagatggatgatggctggcttcgggtggattcactgcagagcaatgcgctggcattatatgaattcacaccgctgaatgattga

SEQ ID NO: 107741 - DNA, 459 bp, Enterobacter aerogenes
gtgtctgactaccacaacctattgcatgtgatcaaatcgcgtgtgtgtgaaaacaggaggatgtctcactccgcgtattatccgggcagcatgcaggacaatcagataagaaacagagcagcgctgatttatgtcctcgaaatgattctccatcagcacagacaaaaatatgccactattttcaatccgcttgagggaaaagctgcgttgcatcacctcatctttatgaaaacaaaatggcagccgtcagaaatcagggaactgaagctggaagatgctctttttgttatccaggatgagctaagaattgagaacataagcgacgatgctcaggaggccttaagctctttcaatctgcctttagctgctttcctgtttgaggactttccagaagaggactggaactatagggaaaactcaacgttcctacgaaacctgatgatgaaagcaactcaatag

SEQ ID NO: 107742 - DNA, 258 bp, Enterobacter aerogenes
atgcagcagccatatttttttaacccgggcatgaccactcaacagcttgaagactggcttgggcagcagaaaacccatctttcccatttcaaccgtctggtggcagaaaaagccgctcttgaagaacggctaaaagagatcgacatgtctattgagttgctttcatcatcaggtttcgtaggaacgttgagttttccctatagttccagtcctcttctggaaagtcctcaaacaggaaagcagctaaaggcagattga

SEQ ID NO: 107743 - DNA, 489 bp, Enterobacter aerogenes
atggatactatcatacctctgattgtcgtaggtctggttttcttacaagtgtcgttatatgcccgtgcagcatacgttcgtagaatgatcatgatgaaacgagttctgatttttcttgagcgtgacgatgcctctttaaggttgaaacaactggtttcagcatcatttgaagacgcacttgagttcagtcttcctctttctatagctaagagcatgcgcatgcaaagagatgaagacccaagaatgatggaagtgattgaagagtgtaagcgcgatgaaattgaagaccagagctctctgtctgctaaaaatgaggcggacagaattttaagtttgatgttcaagattaacctgatgtttaatagagttttatggatcttttcaatagtttgtaacgctcgcatagtggttaagaaaaacatacctgttgagctgtacaaaagtagctcgcaagaaatgcaggcatttgccgcaactcatcagcactaa

SEQ ID NO: 107744 - DNA, 681 bp, Enterobacter aerogenes
atggcggccatcggtaccaccagcagtcgtgcgcgcttcggcctggccgctttcttcggaaaggctggtatcagcaagacagatgagcagttggccgtccaggcgctagcgcggtatgccatagatacagcaccaaagaacgttctcaaggctgcgggtagtcatctcggatggtgcatgcagatgctggctcagtttgcttttgaggaatactcacgttcggcggccaccagtgcaacgtgtcacagctgcagcggtaccgggtttatttcccggcgtgaagatgtaattaagcaccctggtattttcgatgcagacggtgtcgaagttaaggccccaaagattaaaaatgaactggtgaaaagggtctgtggagtatgtggaggaaagaaagtgatccatgcgcgatgcaggtgtggtggtaaaggggaggtgttagatcgcaaagcgaccaaagaacttggcgcaccggttttcaaaacatgtgagcgctgctctggtaatggcttctctgttgtaccctcagcgacggttcaccgcgccattctgaagcgtctcccggaactccatcagtcttcgtggtcacgcaactggaaaccgttctatgaggggctggtggacactctgcgtcagggtgagcgacaagcggcggtagaatttgagaaggcaacgacttattaa

SEQ ID NO: 107745 - DNA, 171 bp, Enterobacter aerogenes
atgtccagtttcatctgtaatggtggcccacaaatgccctttctgacttggctcattaccatctgtcacattacccccctgagcgacatacagacgcactcacagaaaacgggtagcagcatcaagggtaacgcaaacgcgatgctctgggataaaggccgccaccaataa

SEQ ID NO: 107746 - DNA, 234 bp, Enterobacter aerogenes
atgaaagttgaattaaccatcgatcgaacaaagaaacttccagacggagcaattccagcgctggaaaaagaactgctagaaaggctccggaatcagttcgaggattgcagtctggttgttcgtcgtgctgattcggatgggccaagcgttgatggtggggcaaaggaagcgaagaagacggtagagggtatacttcaggaagcttgggaaagcgccgacgacgggttttattga

SEQ ID NO: 107747 - DNA, 150 bp, Enterobacter aerogenes
gtgctggcgggggaaacggtcactatcacccgcgaaccgctggcggcacagagtatttttgataccggcagccggctgcagcggcagaaagcgcaggaaacgctgttcagcagtatgcgcgagtacgtgtactatccgggaagtttttag

SEQ ID NO: 107748 - DNA, 1566 bp, Enterobacter aerogenes
atggatagccatacgctaatacaggcgctgatctacctcggatccgctgcgcttatcgtgccgatcgccgtgcgtctggggctggggtcggtactggggtatttgatcgccggctgcgttataggcccgtgggggctgcgcttggtcactgacgctgaggcgattctgcatttcgccgaaatcggcgtcgtactgatgctgtttgtcatcggtcttgagctggatccgcagcgcttatggaagctgcgcgcctcggtatttggcggcggcgcgctggcgctggtggtgctgttagggcgctatctgacccggccggtactgcgcttcgttgcccgttccggcctgcgcgaagtattcagcgccgtggccttgttcctggtcttcggcttcggattgctgctggaagaagtgggactgtcgatggcgatgggcgcgtttcttgccggggtgcttctggcaagttcggaataccgccatgcgctggaaagcgatatcgaaccgtttaaagggttgctgttggggctgttctttatcggcgtcggcatgtctattgacttcggtaccctcgtcacccatccgctacgtatcctgatcctgctggtgggtttcctggcgatcaaagccctgatgctgtggctgattgctaaaccgctgggcgtaccgcgcgcgcagcgccgctggtttgccgtgctgctggggcaggggagtgagttcgctttcgtggtcttcggcgccgcgcagatggccgatgtgctggatagcgaatgggcgaaggcgctgacgctggcggtggcgctatcgatggcggcaacgcccatcctgctggtgctgctgacgcggatggagaaatccgccagcggccaggagcgcgaagcggacgagattgacgaagagcagccgcgagtgattatcgccggttttggccgctatgggcagattgccgggcgcgtgctgctttccagtggcgtgaaaatggttatcctcgatcacgatccggatcacgttgataccctgcgcaagttcgatatgaaggtgttttacggtgatgccacgcgagtggatctgctggaatcggcaggggcggcaaaggcagaagtgctgattaacgccatcgacgacccgcaggccagcctgcagctggtggagctggcgaaagagcacttcccgcatctgcagatcatttcgcgtgcccgcgatgtcgatcactacattcagctgcgccaggccggtgtggacgcgccggagcgtgagaccttcgaatcggcgctgaaaagcggtcgcatgacgctggaagccctgggccttggcgcttatgaggcccgcgagcgcgccgatctgttccgtcgtttcaaccaacagatggtagaagagatggtggcgatggcggaaaatgatgccgcctcgcgggtggcggtgtttaaacggaccagcgatatgcttaccggcattatcaacgaggaccgtaatcatctgtcgctggtgcagcgccacggctggcaaggtactgaagaaggacggcacaccggagacgttcgcgatgagccggagaataagccttcaacctga

SEQ ID NO: 107749 - DNA, 378 bp, Enterobacter aerogenes
atgacaggcaatacactttcgctgaaagaaaagattggctacgggatgggcgatgccggatgtaacattatctttggcgccatcatgttgttcgttaactatttttatacggatatttttggtcttgcgccggcgctggttggggtgctgctgctttcggtgcgcgtcatcgatgccgtcaccgacccgatcatgggggcgatggccgaccgcacccgcagtaaatatggccgctttcgcccatggctgctgtggatggccttcccctacgccctgttcagcgtgctgatgttcaccaccccggttttgcgagacgcctcgcacgcttcccgcgcatctttgaaaatgctaccgaaaagctggatgcctgcatcctaa

SEQ ID NO: 107750 - DNA, 573 bp, Enterobacter aerogenes
gtggtttcctcgtttgcctataacgccgtcgcgttcggtctgccggtgatcatctccagcttcttcgtgcaatcgatgctgacgacgattttgatttcgctggcgctgaatctgctgttcgctttcgtgggagggatactggcggtacgcctggtaccgcgcttcggggcgtggcggatgtcgctggcgggttatggctgccagctgacggcgctgctcggcctggcgctgattggccgccctgatggcgcaggtgaaggcgtcgctgccgtggcgatgctggcactgttccttttcggccagggattcggccccggcgcgcacaccatgaccttcgcctcgttaagctatccgacatcgctgcgcggcgttggcgtcgggctcaaccagacgctcatgcgcggcagctcaacgctttctttattcctcttcccgctgctggtcgccgcgctggatacccgcgtcttctggatcatcgccgcggcgccgctgattgggctattgtcgctgttggctatccgctgggagccgtcgggctacgacatcgacgccgaggattatcagcagccttaa

SEQ ID NO: 107751 - DNA, 672 bp, Enterobacter aerogenes
atgtctgaagtgggtgaactcttaaaattaggtgccgcgaatgtcagcgcgtctcttgaacaaaccagtcagcagatacttatcaatgctgattcgatgcgagttgcccttgatgaaggcactgaaggtttcagacagtcagtgactcagacacagcaagcttttgcatcaatggcgcatgatgtcagcaattcctctgaaactcttaccagcacgctaggagacactattacggagatgaaacaaagtggtgatgagttcctgaaatctctggaaacacactcaagagaattgcatcgaaatatggaacaaaacactactaatgttattgatatgttcagtaagacaggtgagaaatttaatcaacaattatccagcaatgccgataacatgtttggttcaatgcaatcttcgtttgataaagcaagcgcgggactgacatctcaggtgaaagagtcaattgagaaatttggtagttcaattaacgagcagttacatgcttttgagcaagcaacagagcgcgaaatgaatcgtgagatgcaatcactagggaatgctctgctctcaatcagcaaaggttttgtcggtaactacgagcgactactcaaagagtatcaagctgtcatgggacaactgcaaacattaatttctgctaatcaaaaacgaggataa

SEQ ID NO: 107752 - DNA, 708 bp, Enterobacter aerogenes
atggataaaatccttggcaagcaggcccctaaaaaagatcaagataatgaacattgggtttcaatgtcagatttaatggcaggtctgatgatggtatttatgtttatttctatcgcctacatgcactatgtgcgtattgaaaaagaaaaaattaaagaagtggctgtcgcctatgaaaatgctcaacttcaactctataatgcactagaaactgagtttacaaaggatttgccagcttgggatgctgaaattgacaaacaaactcttgaggtccgttttaaatcacccgatgtcttatttggtttaggtagcacagagcttaagccaaaatttaaacagatccttgataatttcttccctcgctaccttaaagttcttgataactaccaggaacatattactgaagtacgcattgagggacatacaagtactgactggactggagcgtccaattctgacatggcctattttaataacatggaactctcgcaagggcgaacacgagcagtactgcagtatgtctatggtttaaaagaaagcgcagcacaccagaagtgggtaaaaagtaaatttgctgccgttggatattcttccgcacaccctattcttgataaatctggtaaagaagatcccaatcgctctcgccgagtaacatttaaagttgtaacaaatgccgagttgcagattagaaaaataattcaggagtaa

SEQ ID NO: 107753 - DNA, 1092 bp, Enterobacter aerogenes
atgaaattatctatcgacatttctgaacttattcagttaggaagaaaaatgttgccggaaggcgttgattttttccttgacgaaacgcctgtagtttttgatccaattgatatcgaactttctgcaggtaaagaagttagaattgaagatcttgatcccggcagtggtcttatttcctaccaagggagacaggttcttttgtatattagagaccataccggacgttatgatgcggctattgaagatggagagaaagggaagcgatttcatattgcctggtgtagaacattagatgacatgcgccaaaaaaatcgatttgaacggtatcatgcaacaaatcgtgttgatggcttatttgaaattgatgatgggctcggtcggagccaagatgtcgctcttaaagtttgtatgaactgcctagaacgccttaattacaaaggaagtatagataaacaacagaaaagagtaatatttaaatcattttctttgaatgaatttttttcagattatagtacctgctttcgccatatgcctaaaggaatctatgataaatcaaatagcggctatgtagaaaattggaaggatatatccagaactactcgagaacaagctaactacaaatgtaatgattgtggtgtgaatttaatgtccatgaaaagtctatgcgatgttcaccacaaaaatggtattaaatatgataactcagctgaaaatctactcgtcttgtgtaaagattgccatcgaaagcaacctttgcacgaaggaatatttgtcactcaggctgacatggcaatcattcaacgcttacgttcccaacaagggcttttgaaggctgaatcctggaaggatatttacgatctgacagatccatcgattcatggtgatataaacattatgcaacacaaaggatacccgccaccagttccgggattagacttacaaaacgcggagcatgaaattattgctaccgtagaagctgcctggccggtttcaaaaattgcagtaaatttaacaccggtaaaagtcgatggttggacagtattctccgtgggagaactcgttaaagaaatacaatctggggttattttctaa

SEQ ID NO: 107754 - DNA, 1275 bp, Enterobacter aerogenes
atggctctgagtgatgtgaaggttcgttcggctaagcctgaagcaaaagcctataaacttactgacggcgacggtatggttttgctggttcacccgaatggctcaaaatactggcggctgcgttatcgttttggcggtaaagaaaagatgctggctttagggaaataccccgaggtttcgctggcggatgccagggctcgtcgcgatgaagcccgtaagctgttagctaacggcgtcgatcccagtgagaacaagaaagccgtcaaagtcgagcaggaacaagaggcgataacgtttgaagtggttgccagagactggcatgccagcaaccagaaatggtcggcatcgcatagcgctcgtgtattgaaaagcctggaagataatctcttcgctgctatcggtaagcggaacattgctgaattgaagacgcgagatctgcttgtccccatcaaaactgtggagtcatccgggcgtcttgaggtcgccgctcgtttgcagcagcgaactaccgcgattatgcgctttgctgtgcagagcggtttaatagactacaaccctgcacaagagattgctggtgcagttgctacggctaaaaggcagcaccgtgctgcattagaacttaaccgcattcctgaattacttcatcgcatcgatcactattctggtagaccgttaactcgactggcggttgagctcactttgttggttttcatccgttcaagcgagctgcgatttgcccgttggtcagaagtggattttgaaacagctatgtggacgattccgggcgagcgtgagccactggaaggagttaagcattctcaacgcggttcgaagatgaggactcctcatcttgttcccttgtcgcgtcaggccttagctattttggaaaagatcaaaagcatgaatggaaaccgagagctgatcttcgttggcgatcacgatccaagtaagccgatgagtgagaacacggtgaacaaggctttgcgagttatgggctatgacaccaaaacggaagtatgtggacatggtttcaggacgatggcgtgtagttcacttattgaatcaggattgtggtcgagggatgcagtggagcggcagatgagccatcaggaacgtagctctgttcgggctgcttacatccataaggcggagcatctcggggagcgtagattaatgttgcagtggtgggctgattttctggatgcgaatcgggagaagcagacttcaccatttgattattctaagatttacaaacagtcttttgacgatagataa

SEQ ID NO: 107755 - DNA, 1437 bp, Enterobacter aerogenes
atgaatgagttcccattaagcgctcttccattattcttacgggaggctattaaagatgttaataagttaacgcaagcaccctttccacttatagtatcatcagcaataagcgcgatgtcactggcttgtcagggcctgattgatgtcagaataaatgagagtgtgatttcacctgtatcactgtttctgctggtcatcgcaaactcaggcgagcggaaaacttcagtggacaggaaaatgcttaaaccattttatcaacatgatgcggataccctatgtcaggccagactaaaagaaaaagaacatgatgttaatcaggttgtttggcatgtaaaacaaaagggtattttaagtcagataagaaaggcagccgtaaaagggcaatgcaccaaagtactggaacaacggctacatgaattaaataatgatatgcccgtgcaacctaaaataagtcgaattgtttacaataacgttactcctgaggctttacagttagcgatgtataaccactcatcaaatgttggtttgattgcagatgagggagctaatgtcctggacagacaggtcatgaaagatctgagttttattaactcattgtgggatggagtcagcttccacgtggaacgtaaaacgacgaagagcttcacaatagaggacggaaatatcacgctatctgttatggcacaaaaaaaggtatttgattcctatttcaaaaggcatggtgaaaaagctcgcggtagtggattttttgcccgttgcctggtggttcatatcgatgaaggtctttctacacaaggtgagcgttttattcgccctcattatcatgattcatattctcttgacatctttcatcagcgtatagttgatttgttagaagagtaccgggcaaatgaaggttcaaaggtaaaaaaacattctatttttgaaccggcagcccagtacgagtgggactgcatttataaccatattgaaagcctaatccggcctgataaagcgtatggaagcatgaatgactttgcttccaagttgcctaacaatattgcgcgattatctgctctgtttgcctattttattgatggctccactacgattaaaaaagagtacgttgaaagtgcctggatattatgtgagtggtatatgcaacaggccatgaacctgtttggatatgaggaagggtattatgaggcattattattgtcatggttgcatcgtaaaatggattccacaggaaaacgctctctgaggtttaaccacatcaggcgttttggccccaatatcctgcgaaaaggtatgttactggataccgtcatgagtaaccttgaaaaagcaagggtgatagatattgattatggtttatacggggccaggatggtgttcaaaggccgcgattttgatgataatgcctataccaaaaaccccgttttttcattctattga

SEQ ID NO: 107756 - DNA, 276 bp, Enterobacter aerogenes
atgagcagggcgtttgtttttgtgcctgctaaggaactcaccatacacaacattgacgactcaccgttacctcccggttcgttcacccgtgaacaggcggaggctgtggtggcggtttacctcaatgttgctatcgaagatgaccaaggtacgcactttcggctggtgatccgcgacagcgagggccagttgatctggcgggcgtggaattttgaagccagtgccggggaatggcttaaccgctacatcgccagccacgggataccaaaaaactga

SEQ ID NO: 107757 - DNA, 255 bp, Enterobacter aerogenes
atgccaacgctgcctgataacgcccgccaggccaccctttatccaaccgctccggagaacaatccctgcagccgctccatctccggtgacggcctgtgcgcctggtgctcgcaccttctttaccgacccggtgaactcagcccgtgcagcttaagcatccctgagggccactggccctcccgctgtgacgaggatggctatgcgcagtcctgcccgtcactccggcttaaccagcatccccaacccgataaataa

SEQ ID NO: 107758 - DNA, 330 bp, Enterobacter aerogenes
atgcaaaccttatccgccattccggctcggaaggcaccatcacgcccaacgcccgttgaaatctggcagcggctgctaactcatctgttatcgcagcactatggcctgacgctgaatgacacaccgttcagttatgaaaccaccatacgggaacatattgatgcaggagtatcgctcagcgatgcggtgaactttctggtagaaaaatacgggcttgtccgtatcgaccggaaaggattttcatggcaagaacagaccccgtatatttccgtagtagatattctgatggcaaggcgctcgaccggcctgctaaaaactaccatgaaataa

SEQ ID NO: 107759 - DNA, 300 bp, Enterobacter aerogenes
atggcgaccctcgccgaacagggccgaattacgctggatgtagtcgatgaggaaatttcgcgactgagcgagagctggcagatcaacgatcctcttcccgccgtcatcgacgagatcgatctgttcgatcgccgtcagttggaaacggtgctggaggtttgccgctgcagcgcttcgctatctgaagccggtcgtgagttgtttgcggtctcccggctgaaaaaggccaatccgaatgatgccgaccggttacgcaagtacctcgcccgctttggtctcagttgggaaagcctgggctaa

SEQ ID NO: 107760 - DNA, 2325 bp, Enterobacter aerogenes
atgaccgaaatatcgttgtcgctccatgaagggccgattctgctaggtcacgtaattcccaaagggggttatgagcttaccgaagatttaccatgggtttttgaagcgatgaatgagagcgagtcgcagttaaaacttgtcggcatgggctctgttagttccaggcaaaactctctttttatttcgctaccgacaaatagtcatttggatattagtggagaaggtgagtttgatatcccgaggttgctgaaaaatagtgaacgtagcttaactaaaataagcggagtattcagcgttgttttacatgatggcgcagtttgtacgattcgcacgcagcaactttatgattctgcgattgagtattatataaaaccgacagagatcgatctggtaaaatctgattatcctgtccatcgtgcttggccaaagatcggctggaaaaaggatatgcagcatggcattgtcccagagaacgaacttttttggcgatccattcgttcaggtaacaactcctggttttctgtcgcatcagtaatgccgaaagggcagatagaagtcaggcgaatagtcaatggtgaggttttatttagcggtaaagttgtgattttgccagcagatttcgatattcaaattattcccgagactgctcagcaaggagttattgtactctctggtataacggatgcaagggttgataaatattcaaacaatgaaaaagtaacacttaaatcagattatttgcaaaacgagtgtgttattgattgtaattcatcacagatgctagagagcaccatcaatttacgagtatcctggaaagatggttctaatcttaaattgttattacctaagcccgttagcggtggacggtttgtaagtaatgatggttctgttcattttgacggtgttgcatctatagcacatttgcatggcgtggacgctgagctgttaacaatatcttgtgccgggaaaggatatcttaatatcgagttgttggatgaaaacccgatgtctgaaaaatttcattatttacatgcggatattccattgttatctggccgtaatgaaaaattgcaacagatttcactttatgagaattataatctgctgaacgccatgcttgtatgtgcatggaaaaatgatagtacattacgtgttgatttttactctgacagatttggcaaggacaaaacaacactcaatattaaacgctacgatggccgttttattgagggtgatgaaagattgctggttgatataaaagattctattgtttttccttaccataaaatagacgacatggttgttgaagccatttctcttaatactcctgacttatgcacagtcctgctgaaaaaagatgagtctggttatgatttctcgacgttgaataatcaaggtggcccatggttaattgtgggtaaaattgatggtgcaattcgtattgcaccagtgattaaatggatgctacctacattacagacagatgatttatttctaaatgctatatgcaacgcatcgccagaacaacgcgaggaatattgtaatgcgctgtttttggaaatgaaaaataatcctttgcaaaactcttgttatttgttggttgagtacattaaaaaatataagttgaataatagcttgcctttgctggaactggatttatttagagaaatttcgagtaattattgcgtggttgttcagttgttaatatcatcatgtctttctggggatagtgatgctatttatgatatacaggaggaattacccttctcatggggatggattcctgtttcaatatggaaagatgtctttgaacagtgttggtattctctggaaaaacagattaatgataaggcatttgcattaaatatactacagccatttattgcatttataaatcatcaagcgcatatcgatcgtcgattagttcccatcgctaacatgttgcttacacatagtgagatattacctgcaggttgcactgtattgccatctgtaagccgcgagcagtttaatgatgccaaacagatgttattaagaaaccccgatagttttggacgtgtcagcattttttctaaagagctttgggatagtgctattactccagaccttaaatctgtttttaataaattttggatcgaaaacacatatcacactcgttttgaaaaacgttttaatttgatgttagtcgcggcgctgctttcccaaagaaacaataaacttatgcatcagctaactgcactttttgaatttcactatcagcaagccccgcagcaattgggggttatctatcagtattattttgaacaagcaggagtatgtcattga

SEQ ID NO: 107761 - DNA, 6327 bp, Enterobacter aerogenes
atgaacgttcagcaactgcattatgcgccacttctaaatcagcttcatcagcgtgcggtgaggtcggtggtaagtcagctggcattgcggagcaagtcgttgagtcaatatctggaatctcaatatttccagcctccaggtctgggggggtcactgcttgcagatccggtattcgaaagtacgtttggctggatgcccgcggatgaaacaatggaggatttgcgtgacaaactgatctccagcccgctggttgatgctttgagcaatgcgccagtgccgtttcgtcatcagctaactgcgtggcgaacgattcttgaagacaagcagtccctattagtgagcagtggtacagggtcaggaaaaacagaatgttttatggtgccggtgctggaagatcttattcgtcagcaaaatttgacccggcagtcactaacagggacgcaggctattttcttgtatccgttgaatgcgctaataaatagtcagcaagagcggcttcgcgagtggactcgcgggtttaaagggaagatacgctttgcgctatataatggcgaaacccggcataccaaatatgaagttcaggaagaccagctcaaagtacctgaacaggcattgagtcgggaagccatttatgaagccccaccgtccatcatggtgacgaataccacgatgctggaatatatgctgattcgtcgcaaagatgcccctgtcattgaaaagtcccagggaatgctgaagtatatcgtccttgatgaggctcacagttatattggctctcaggcagctgaattagcgctgcttttacgtcgcgtcatgcaggccttcaatgttggacctggtacagataaacctgtgcaaatcattgctacctcggccactattggtgaagattctcctgaaggtaataaagaacttgctaaatttgttgccgatctcgcgggggtcacagaacgtgatgtaaaagtagttcgcggctatcgacaaataccgccgatatcggagtctcttattcgtcatgaatatcccacatctttagcatctcttaactcactaagttctcaggaactttaccaacagctgtgccattaccgtgtggcccagcaattgcgtcaggcgttaactcgccccggacgcctggcggtacgtttgagtgaattgctcaatgttgccagaagaacctggccagacattaatcaccgtgagctgctgcagcttctcgatctgatggcgaaatcgcgagagggtgaatctaaattttcactagcttttacgccattacgtatgcatgggtttatccgaacactcgcgggcctatgggcatgttcaaataaacaatgcgcacataaagcgagtgaattaggtgagagtgactggccatttggtcaggtatggtttgaacagcgccaatattgtgactgtggtgcgcctgtatttgaaatcttacgttgctccgggtgtggttcagcttatttgtctgccaaggaggaagtgcgcggtgatggaacgagctggttggtggcgcaacctgctgctgccgaagaggatgagtttgctcttgatctcgatgtttattctgaagatgaagataacaacgaattagaaaataactcccaatttgatcgtcttatagcgagcgatggtgaaaaatatatcatttcactggaggaagcgacggcgggtaaaatcgaccgcgaggcgcaaaagcactatgagataaatctgctaagacctgaatctcgaggtgagggacgcaataattcctttgcttgtgtttgttgtggtgacacccaacggaaaaataatcctttgttccgtccgcttcgactcggtgcacccttttttttaaatgaaattattcctactctgcttgaattttcgcctttaccgcaaacaagagaagagcagttaggaccgtttaatggtcgacgtttgctcacctttacggattcacgtcagggaaccgcccgtatctctgcccgattacagcaggacgcagataaagctacgttacgaaccctttgttatcaggaactggcaaatattaatgagccatcagtaaagctcagtccggcacattgtgcattgttagagagttttattacccagttttctatccctccgttaaaaaattccatcgacgcactgagaaaagcgatggtttcgaatgagaagcttagcccagcagacgttcaggcgcttagaattatcgagccgatggttagttccttaagtcaggaacatgctgaagcaatgcaaatactcctcgtcaattcaggcaatcagcagaagaaaaccatgtcgtggcaaactctgtctgaacaacttgttggcagtgtggaccttgcggacagaatgagaggcagttttaaagacttgtctggacttgagcttactaaacaacagtttgctgatttttgtttatacagtgagtttggtcgccgccctaaaaatgcctggaccctcgaaagtttggggctggtggccattcactatccatttattgataaagtcacaacctgcccgcaggactggaagacattattacccgaccccgataagcaattaccggaatggcgtaatttattgaagattacccttgatttctttatacgtgaaaacagtgccgttttttacgaaaacgaggagtaccctcgctggatgggagcacgtttcccggtaaaaatgctgcaggggccagataaaaaatacaaagggcagaaacgtgatcaactttggccacaaatacgcgatcgtcattataaccgggtcattaagctattaattgctgtctttccggcaatacagcctgagcaggctcactggaaagcgctggttaattacttaatgaatgaggtctgggaagctattcgaccatgcctgcgtcagtttgaatcgggttatcaattggacattaaacaacaagctgaattttacagtccaaagcaagtctggcgttgcccctatactcgccgtgcgttagatgtcactttattgggttattctccgtatttaccaggtagcaaagagatagcacctgaaaaagctgtattgattgaaatgcctgagcttcctgcgcgtcactggcgtttatctggtggtggagaaatggcgcgagaagagcgcctgcactggctggaatgtaatgaacgcattcaacatgctcgggaggagggggtatggtctactcgcagtgatcgattggccctgaaagatagctggtatcgtctggaggaacactcagcgcagcgaacaccagagaagaaccagtttaatgaaaaacaatttaaagcagggaaagtcaatgtgttgaactgttccacgaccatggaaatgggcgtggatattggtggtatgagtttggtcgcgatgaataacgttcctccggctccggcgaattatttgcagcgtgctggccgtgctggccgtcgcggtgaaagcgcatctgccgccattacgttatgtaaaaacaccgcgcatggaatggaggtattcaaagaccctctctgggcgttcaacaccgttgcgagtgccccacgggttcgttttggtagcagtagtattgttcagcggcatgttaacgcattggttttaggtgcgtttttacgggctgaagttcctgatgcgacaaaactgagttgtaaatggttctttgaaggtgatgagagccagtgtcttcgttttctccattggttaaatcatcaggccgatcagctggcggataaacttaaacgccttacccagggaactgtactgatgtcattgacgccgccacagctcttgactcgtacgcaaacgatgatgcagctggttgatactcgttggagaagccaacttgccatactgttggaaaacatcgaagcgttgaaaacagataacagcgcgtgggaagaaacgccagcaggcaaagcaatcacttatcagcttcgtgattatcgcggtgcttatctgttttctaaactcatcagtgaagcgttcctgccgggtcatggtttcccggttggcgtggtcaatttcaattatctgaccgcggatgaactggaaagacgtcgcgcaataaaagccactcaggctgaccctaatgaagggggagaaaacttttctcgccgcattgaaaaactgcccagccgtgacctgcccacagcattacgtgaatatgctcctggtgctgatgtggtattgggcggaaaagtatatcgttcctcgggtattatgcttggtaaagtacttgccagcgggcaggagctgtctggcgatcatcatattccgtggttctggcattgccgtaaatgcggcgcgggagcgaccagcgccacccggcctgtcgaatgttgccactgcaaggcagatatacagcagcttgatgtgaagcggtatttacagcctgtcggtttcgcgacagacattcgttatcaggcacataatgatgtatccatgcctgcgcaacttccctggaaagatcctcgtgttcttgtaccttcttcggtatgggtctccttacccgatgctggactcggacgttaccgttttagtcatagcggggaattgttccactttagtgagggtgaatttggtcatggctacgcaatttgtctttcctgtggccgggcagaatctcaaacccagccccagcgtactccggagaatctaaagaacccggagaaggaaaatacacactacctgttgagaggcggtagtaatgatcggcaggggaacaataaattgtgccacggtcatgttcataaagatctgtggttgggatatagcagccgtacagatatggttgagctgcaactcagtgatgatagtggcttactgatcagggatgatgttgccgcgcgttcccttgcggttgctttgcgtgaaggattagcgcataaattgggtatcgaaaatactgagctgggcgtgacgacacagcaagcgcgcgatatcgatggcttcactggatattctatctttatttacgataataatgctggtggtgcgggttatgcagtgcaattgatcgataattggtcggatgtctttaattacgccagaaaattgctcgattgcagctgtgataaattctgccaccactgcttgctcagctacgacagtcagcattatgtcggcaaattagatcgtcaccaggcattaaccctgctcactaatcttcgtctacagcggcttaatctcgcgccagaatatcagtacttcggagaaagtagtcgggttgaaaccaacccactcagtttgcgtattgcgcaatgcctgaacagcgaggtttatgattcttgctcgttggttcttgctgggtcgcaggaacagtggagttttgcgcaatggccattatttaaagagttactccagtttgcttcctctgggggcaatgttgagttgctgattgccacgcagctggaaaacttagctgatagcaccagacatcagctttccgcgctagcggcgataccgggtgaatgcttgcaagtgaaatctatagacactgcgcaacttgtgcaagggaatgggcacttactggcacaggtcactcgtgaggggcaaacccaacagtgggccgctgccaacagtgcctccgtttcgcccggtgaattatggggacaaagctcggcatcgccggtagtgacgattaaaggggcgtccagaaaaacattctcgggtcagactttgagtgcagaagacttactgccagcattgcccgccggggcggtacgcatcaatctcagccaacaacttgacggtcaggtggaaggttttggttcgcgtttctgggcactgatagctcagcagcatgctggctggaagaaggtttttactaatggacgcgaaattactcacgtccattatagtgatcgttatctcaatagcccatttactgtacgtttgttaggtgaaattttgacggaattggttgaacaggggctggcagaacgtgccgaactcactgtttcagttaaaaagttagagtacagttctcgccaacacgattcactctataacgcatggcttgatgagcaggatcgccagcaagttatgaccacgttgctggaagagggctaccttgggccagcctggtcagggaaaatctcatggttagcaggagataatcagaacaccgatcacggacgtgaactgaccgtgaccttcagcgatggcagtgaacattatgtgttgctcgatatgggactgagttactggcgttgtacaggtgacacattcttcgatttttcaggacgaataccgaatcaggtcgagcgcctggcaacatgccgggcattggttatagccccggataatggattgaagagttatatcatcgcaggctaa

SEQ ID NO: 107762 - DNA, 876 bp, Enterobacter aerogenes
atggcgaataagttaaaacagatcattaccccggttgaggtttcagccgtgatgaatttcgatgcaactgatacgcactggcagtatcaatccggtgcttccagcatggcggcgaagcaggcagagggggtggctgggttgtggaatttgctgaataaacaacgactggcactccttgctgatgaagtcggcatggggaaaacttatcaggcgatgggagtaatgttgttgttatggcaggcaaaacctgatgcacgcattctggttatggcacctaacaggacgctctgtgataactgggagagagaatttagcattttcacagagatacactatcgggctgaacataatgcctttaccactttagagggtaagacaaaatatgccccacaaatttatggcagactggcggagctggcggccgctgtggaaaaaaaatctcaccatttttaccttactactatccattcactaagcggtctggtccctccagatgaaaaaaaagatgctttaaatgctgccgcgtcttatggcgtgttatatcgtcagcagattaagcaagctcttggaaaaggagggtttgacttaattataatcgatgaggctcattactttcgtaaccgaagcggatcacagcgtgccgccgccgctcaggccttctttggtgatgcgcaggaccggctggggagcaatgtactgttgttgacggcaactccaaatcactcagcatcgcgaaatgtttatgacatatttagctacttcagtgacatgccaaaacgttatgcagaggatgatgtccgtgcgctgatgaatgattttgccatccgccgactgcgcaaaatgcagggcagagagagcagccacagcaaatattaa

SEQ ID NO: 107763 - DNA, 312 bp, Enterobacter aerogenes
atgatgctggccgcctggcggccgccggaaatgattatctggcttaatctgctggcctttggcggcctggaagccgtgttcttatggccgctggtattgggcctttactgggagcgggcaaacgctgccggcgcgctcagcgcgatgttagtgggcggcatactgtatgccgtgctcgcgacgtttaacattcagtacctgggcttccaccctatcgtgccctcgctgctgctaagtttgttggcttttgtcgtcgggaaccgcttcggtcaacccgtaccaccagcccctattatgactactgataaataa

SEQ ID NO: 107764 - DNA, 285 bp, Enterobacter aerogenes; identical to SEQ ID NO: 92086

SEQ ID NO: 107765 - DNA, 951 bp, Enterobacter aerogenes
atgtatctgtcttcatattcgttcatggaaccagacgagccattttatttatactatccaagttggttgaatgtatgggagtctcactcatacaatactgccttgaaaactacgggagctaacggctggagattcaaacgttttggctcaagaagggaaatttatactcgagagattacacggcgtcctgaacatactccttatattaacgccctcgataaagtatcagatgccgcattacatagcatgtcagcgaaagaaaggatgctgttactgaaatcgagaactgcttttatttatattgattcctggggagaatcaggcgtctttgagtacaatatcagtagccttaatttatctactattgatactctaccaaagaacttggttaagaaattttcaataagtgatgttacttgcaaagttcgcggcgaaaatttttccctttatcaggcgatggcaatggcgcaggattatcttgcatgggatgtatttgattttgtcgttatctgcggaggatatcgtgctgtgccattgttggcatttacagctgaaagtatgatccagagtgaagtaaaaaacaagaaaagactcattcccgggataaatatatcaatagaaagagtggggtgttttatttttagtaaaagggaaagtgatctaaaaatacattgtgggccatatatacctactgcaaccaataacccacatttaccagatgttgaaaatactgatgatatagatctccttgcatatgccggaggaatcaataaaacaaaaccatttcctcataccggcatcgatcttattgctcgctacggctgtagcggatgtatgacaccggcgctaagttggcaatatattaatcagtatgcattgcataatggctgtctcagaaccgttattccgggagtagttagcggctatgcctattttgatacctggtactaa

SEQ ID NO: 107766 - DNA, 684 bp, Enterobacter aerogenes
atgctataccgcaatgtgaactctaaattgtctgcgagtgctgaatttatcagacggaaatatgactacacattgggtgggacagaactagttttgcaaaaacgagatatgggtaacatacggttaggattaaattataaaagaaactttactggggctgcattggattctactttaacctggcaacggtttaccagggcttttggtggcactgacacaccagacatgcgtactggcactgtgagtaagaaaagtcaaattgtaaaccttaatctgaactatgtgaaatggttaacgatgttgccagccaacgcctattacgaacttaattttggtgcccagtattcaccagataatttgacgttacaggatcaatttacaataggcgatcgttggagtgtacgtggttttcaaaacagcgatggtatctatgggaataaaggtttttttatacaaaataccctgaatgtggtgactggatttgacggtatcaccccttatgttggcacagattatggacaaataattggtaagttaccttcacaagacctgagtgggaaaaggataatgggtggagtcttaggagttaaaggcgcggtgaaagctgtcgagtatgatgcttcgttatcaacaccttttctctatccggataatataaactcaggttttccatattcgtcatga

SEQ ID NO: 107767 - DNA, 1281 bp, Enterobacter aerogenes
atgcgtaacagtttctcaggattctatggcatcagtgaagattcgataggtacagtgtttacctcagacagaacgatattcatttttgatgcaaacatactccttactctctatcggtgcgaggaggaaactcgtaaccgtttttttgaaatatggggaaatatcaaagagcaatgctggtttcctcatcaggtatgtcttgaatatcaacgtaaccgcctgaaagtggtcaaggacagtcgtgatgcgttggacaaaataccaaagaaaattaagaatacaattagtgaactaaaaactcacatttttgatggtgatcataatcaaactatctcacgatactcaaatttaagaggtgagcttgactctctttttaatcaaatagaaggtatcgtcaatggtttttctgataaccatattgatattagaaaagataatattgattttttaaataaacatgatgtcattcgagataaaattgacgagcttacagagagtcgtatcggttctgcacctcaaaatcaggaagtgatagataatttaaacaaagtcggaaaaacacgttataagtacaaaattggtccgggctttgaagataatgcgagtaagaaagacaatttttattcttatgaaggaattaattatgatgctgaatacggagattactatgtttggagccagattttagaatatgttaacagcaagccaaatagtaatgtagtctatgtttcaaatgatgctaaatcagatttttactataaggtcgatggtaaaatccgtggccctaacgagtctcttcgtactgaaataaaaaaacatggtgcagctgagtttttacttcagaatattgatacttttcttcatcacgccaatgctcacttgggtgcgggagtggaggagtcggtcataaatgagctgactaatgcaagtaatgctgatgaacaactttcgctaataaaagactatgaaatcattaatcccggtgaaaactatagcgattatatttttaataaaataaagaaagaaaacttgtctgatttatctttctcgaaatacatgactttacggtttaaaattagtgagattaataatgagcttgcggaattaagagctatagatactgacaatttaagcggagcagagcggattatacaccttcagcgaataacccatgctgaaggtattctcaataattatcaggtgttattatcagcgcttgcaaataaaattgcttataaacaagaagccgaggcgattgctcagcttcgcgaaaaagaatga

SEQ ID NO: 107768 - DNA, 1359 bp, Enterobacter aerogenes
atgccaaataactaccaccaatacatcgaagacgttagtgacgatatcaaaacatgccttgaagggatgggatgccagccaatactttttgttggttcgggtttaactaagagatatatttctgggccaaactgggaagaacttctgcaacaacttgctaatgaatgccctaacatcgataaaaaatttgcttactacaaacagaaataccctgagctaattgatattggaagtgtcttttccgattcttataatgagtgggcatggggggatggagaaaaggattttccaccagagctatttgaagcagggaacgaaccaagcatttattttaaacacaaaatatctagcatctttaacacattactacaagaaaaagaaattgcagataatggggagattgatcttttaagaaaaatccatcctcattcaatcatcacaacaaattacgacaaactacttgagtcaatttaccctgaattcacccctattgttggccaaaaaatcctatatgctaaccatggtagcattggtgaaatacttaaaatacacggttgctgctccacgcctaaaagcataattataaatcgcaatgactacgatgactttataaagaaaaagaaatacttaagtgcgaaattacttactttttttgcagagcaccctctcctatttataggttatagtgccgaagactcgaatataaaaaacatactatcggatattgatgaattactgtcagaaaatggggatgtcattcccaatatatacattttagaatggacggataaacaaaatgagaatgaataccctcgccgcgagcggttgattcaggtatcagcgaacaaaagcattcgaattaaaagtatagttgcaaatgatttttcttgggtgttttcggcgtttggcgcgaatagagcacttgataacataaatcccaagctattacgagcacttctagcccgcacttacgatcttgtcagaactgatatacctcgcaatcctgttcaggttgattaccgcgttttatcaagcattagcgaatcagaaggcgaactagctaaattatatggcatagccacatcatcagatggtatggcatttaatgccagttatcctttcactctaaccacgctagggcagtcacttggcttcaaaggttggcatgatgctaacaagctattagaaatagttaaaaacattactggcgtagatattaagacattcgataacaaataccattatgcaataatgaatggtgatgagattcagtcccataggtattcaaactatctacgagagctacttgaaaaagtcagagacggcgaacaatttgaacttggaataaaaacaccttaa

SEQ ID NO: 107769 - DNA, 753 bp, Enterobacter aerogenes
ttgcttgttaataaatctaagaccttgagtttagaggcgaattctagatattttgattggtataatagacgcacgcgagagcgagaattggataaattaaaagatatgtttgatgaaagtaacgagtttttatcagatgaggaatattatgaaaggctcgatttttcgccatttgaattaaaagataatgtcttggtatgcatacgcaatgctattgaggcgcgtaaagaggaaaataaaaaaagacagacgggttattatgggctaatgaactcttttagaacacctttaaatatcttaggtaatgatgttcaggaagagtttgaacttattgatgctctcaaagtaaagattctagcaaatataaatgacattatttatgtccatgatgagattgtaaaagaaaagtatggtaagaatctgataacaatctcgattgttgcatcatcccttttgtttgtattgggcgttatttatccacttagttttattcctaaaggtattggtgaagatattaatattacttttatggcatttttcgatgttttgttttcgattaaagggttttttctttctttgcttgctattgtttttttgagcttgatgttagcatttctatatattaatgtaactctggggtttgagagtgatgtaatatctgagcttgaaggctatatgaatataagcgcctattctgaatactttgaaaacgagtgtaaaaacagcatatccttgcaagacaaggccgtgtga

SEQ ID NO: 107770 - DNA, 192 bp, Enterobacter aerogenes
atgtcgggactgctggaggatctggcagagccgcgcgcggtcggtgaggcgctgctatcggcgctgttcgatgttgtgacgccggtgctggctgatctgttgcggaacgagccgaaccttccgaagcttgatgagaagagggcctatcgtctacttgaagcaaaactggcagcgcgaaaagcaagcgcttga

SEQ ID NO: 107771 - DNA, 468 bp, Enterobacter aerogenes
atgaatcgcttggcctcagtcgcaattcataaccctaatgaatgcagtgttgttgaccccgaactggatcaagtcgacccacttcggggatttggtacccctgaacatcgtaaagtcgtggagttagctgcagaagttgctgttatcgaatattatacagaacaaggctacagctaccagcgaacaacacaccttccctgcggatatgactttatcttcacgcgcggcgaatcagtgctgcatctcgaagttaagggtaccgtcggtactacaccacgttttttccttacgcgtaacgaacacaatgcaggattgatgcttaatccagactggaggttagccatagtgacatctgcgctatctgcctccccgcaagtcactgtgtacgattctcgtcagctaaaagaggcgtttaaccttgaaccttacgtttacattggggcattcgcaccaaaacccgaatcctaa

SEQ ID NO: 107772 - DNA, 222 bp, Enterobacter aerogenes
atggaaaaagcgccgtactcgccgccacgaacggaaagcgagatagcaaaccagagcgaggagcaacgcgccggcggcggatttcagcgctgccaacagcagatagcgggtattgtactgttcacgcagcgacgtccgttgtgcttacatacgggcaagaacgcgctgcgccgcctgatccaacgtcagatcgtcgccttcatcgaggtcagcctggcttag

SEQ ID NO: 107773 - DNA, 336 bp, Enterobacter aerogenes
gtgacagtgtcacctcgcgttggctatcgcttcaaccttcaggggatttccggcccttcgcatctcagcgtgtgggtcggcagtatgtatcaggatgtgcagcaggaatttaaaggcaacctggccgatttgcatatgccgccacagctgcacccattgattgccgcggtcaataaagacggcgacggcaagtttgatgtcaaacagaaactcacttcaccatggaatatgctgatcggcgcccagtacgaaatcacgcgtaacttcaacgttctgaccgaatttggctttaacgatcgcaatagtttctttgtcgccggtgaataccgtttttga

SEQ ID NO: 107774 - DNA, 177 bp, Enterobacter aerogenes
atgttgccggttgacctttgtctccctgaggggcaatatttgatggccatcacaaaaccgacacaaccgaagacgttgttgtcgcattttatagaggaaaaaacgatgtggaagaaacctgcttttattgatttacgtctgggtctggaagttacgctgtacatttccaaccgctaa

SEQ ID NO: 107775 - DNA, 336 bp, Enterobacter aerogenes
atgaccctggattatattgctttagccatcctgattgcggtggtgctgattttattttatggaattatcatgatccacgatattccgtatgaaatagccaaaaaaagaaatcatccgcaccaggatgcgattcattacgctggctgggtgagcttgttcaccctgcacgtgctgtggccgctgctgtggatctgggccacgctgtggcgagaagaccgcggctggggaatgcagcagttaaagcccgaccagcgtcagtaccgttggtctgcgtcctgggaccatgtccaccgcgttggggctgaagccggtaatgacgtttgtgccaacggataa

SEQ ID NO: 107776 - DNA, 828 bp, Enterobacter aerogenes
atgacacatccaaccgttattaaactacacgacggcaacctgatgccgcagctgggtctcggcgtgtggaaagcaggcaacgaggaagtcgtctccgccattcataaggcgctggaagtcggttatcgttcttttgacaccgccgccgcgtatcaaaatgagtctggcgtcggcaacgcgttaagcagcgcgggcgtcaatcgcgatgagctattcatcaccaccaaactgtggaatgacgatcaaaaacggccgcaggaagcgctaaaagagagcctgagcaagctgaaactggactatgtggatctctatttaattcactggccggtgccagcgataggccattacgtcgaagcctggcaggcgctgatcgaactgcagcagcaggggctggtaaaaagcatcggggtgtgtaatttccaggtgccacatctgcaaaagctgattgatgaaaccggcgtcgctccggtgatcaaccagattgagctgcacccgttaatgcagcagcgtcaactgcatgcatggaacgccacccacaaaatccagaccgaatcctggagcccattagcacagggcggcaaaggggtcttcgatcagaaaattattcaccatctggcggataaatacggcaaaacgccggcgcaaatcgtcattcgctggcatctcgacagcggactggtggtgatcccgaaatccgtcacgccatcgcgtatcgcggaaaacttcgacgtctgggacttccgcctcgacaaagacgaactcggtgaaatcgctaagctggaccagggcaaacgtctcggccccgacccggatcagttcggcggttaa

SEQ ID NO: 107777 - DNA, 357 bp, Enterobacter aerogenes
ttgccatggagccgggaacttacattcgtcctcacttttgagctgctactgccgttaagcggccgttttgtggtgctgaacctcgatgaacaaggaatcgtgacccagcgtgtggaattaggcgaagtgtgcacggcgctggaaatgccggcgggcacctggcatgcggtattgtcgctcgatcgcggcggtatcatctttgaagtcaagcacggaggctatcagctggtagacgaacaggattcagcgccatgggcgctagccgaaggcgcaccgggcaccgatgaattaatggcgtggtatgccacggcgcaggtgagggatggcggttttactttccagaagagtgcccactaa

SEQ ID NO: 107778 - DNA, 270 bp, Enterobacter aerogenes
gtgattagcggtaccgcgcgctaccaaaagcaggacaacgaaacccactttattcccggcggattatattttggcgaccagttaatgtatctgggggatcgcgcccgctactattttcatcttgatgacactatcgcgctatacggctacggacgctggcgtttcggtaatttagatcccgacgacgatgcggcttttagggggatgaacgaacgtaaaggcgaactggaaggcggtattggcgccacatggacacaccatacgcgctga

SEQ ID NO: 107779 - DNA, 333 bp, Enterobacter aerogenes
atggaacagcaggtgaccttagagtacacgcttacggtaaagcactgcatcgacacaatagcgggttttctgaagcgtgttgatgttgagcctcttccggttatcgcagatattctcacacagtttgagagtaccgtgggtcagttcccgctgggatgccagatttgccctgaattgctgaaaattggctgcgccaaataccgggaatttaactacgctgaaggctaccgggttttgtattcagtagacggaacgttagtgacagcacatgcgatcctggcacatcggcaggatgttcagcagctgctgtttaagcgtctgataatggcctga

SEQ ID NO: 107780 - DNA, 234 bp, Enterobacter aerogenes
atgaaagtagagacaatcagctacgttaaaaagaacgcagcaacgcttgatctgtcagaacccatcctggtcacacaaaatggtgtgcctgcttatgttatagagtcctatgaccagcagcaggaacgggagaacgccattgctttgctgaagctgcttaccttgtcagagaaagataaagcggaagggcgcgtgttctcgaaagaccagttgctggatagccttgcggattaa

SEQ ID NO: 107781 - DNA, 1065 bp, Enterobacter aerogenes
atgagtaggaatcagcaaactttgtccaaagggccaaagatggaagaaatgttgcgtaattatttcctcaaggctgggtattacgtcattcgtggtgtttcgtttgtgtatgaaggttttgacgttactgatattgatctatggctctacagtcgaacatcttccgtatctcgagaaattacgttggttgatgctaagaataaaaaaacacctcaagccatagaacgaattttctgggtgcaggggctacgaattgcaacgaaggctacgaatgcgatcgtagcaacaacggaaaagcgtcaagaagtcaaagattttggccgagatcttggtgttcttgtgcttgatggtaatttccttgggaagcttgctaattctgaagatagaaatgcgattaggctctcggacgaagagttctttgctaagataaatgattattctctcagcaagctggatggtgattggcgaggacgaatagttctttccaagagccttttagctaaatcgctttcattcgatagttgcaatgaatggcttgggcagggaaaattttttgccgagcaatctatcactaaggatgtccagcgtgaaaccgcgcttaggtgcctctacctcgtctgttcattcgtcgccatcgcagtggattactgtatgaaagaactttcgttcttggatcaatccgagcgtagcacgctaattaaagatggattcacgtatggttccagaggtagctctggtttgaagaaagtattgaacgtggcaatgggcttagttgaaggacacgcaaatgatgggccagcaatttcccggcaagttaggttaagtgtcgagaaacagcttgctcagttgaatactgctatcttaggggactttttctcaaagaacgatgttgctagaactttatttgctgtcgctaaagagttcgagcatcttgcaatgaaaagggaattttcctcacatgaaacggccagcattgaacttcgcagcactctcttttgcttgcttgactattgggggattgagcgagtgttgttttctttcggcatcaaaaatagccaaaactaa

SEQ ID NO: 107782 - DNA, 1263 bp, Enterobacter aerogenes
atggacaagaagacaaaagggtcgtggctaatccatcatacaaataagctgcaaggagttaccaaccaatcaggatatgagaagacctatttggcgggaaaggcggggatattattatcagctatttcagccaaccagagcacgacagtaaacaatgacaggctgactgttttggctaaagcagccaacataaatacaacatttgagcttcctaagcttattgaagtcttacatcagcagcaacttattgatacatctgcagggggaattgcagtacttggtgtgacaaccactacagcgttgcaacatacctcagatctcttcgactccctaaatccagggaataatgagattgcttcaatcgatcttgctgagcacgcatcaatagcaccaatccttgcaaacgatattgccaatgacctggctgatatgtataaactagctagctcagatcttggtcaattattctcggacgcagagcagataggttttgtcgatacagagaaacttgatagtaccaatacactgttgttcaacggtaacttgtttcgtcgagatgcaactcaaaagattaaggctgttttggattcgcttaacacatcagagcaggcaaaactcaatgagatgacggagatattacgtaaacaagcatgcgttagcactgactatgcaagacagtttttaggggagccccttttccagaaggttactgcaatcggcctgtttgatattagtattgttagcaactcaaatgaagatgttggattccttaccttaccttcggcattctcgaaatatagtaactcaatggtcgatgatgctttcgatcttgctaaagccttcgttagttcagttacttacggtatgacaaagagctcttacgagcgagggaaaatacagatggttgatgccttgctaagtgctttggttcgtggcgagagcgttggcccagtagcagcaattgctgaagattacaaattgcttgaattgaaaggtgttgttgaagtcaaacaaggaactaagaaggggcggactggaccaatgcttcgactacttaaaatagaggttggtgagctcgcccttcaagcgatccggcaaggagatgtcagcgagcattctctgagcagtttacctaccgcagcagttactacatttagtggccctgagcataatagagagaagattcgaagaacacaaaccaagttaagccccaaggcaacgaatgatatgctctctatccttcgaacaggaggtgggttatga

SEQ ID NO: 107783 - DNA, 300 bp, Enterobacter aerogenes
atggacttgcccttcaaaggcaaaagccatgctcaactttcaatctataaggcaggatcgtcttcctgggcaggggcaatccaaacaatggttactatgtgtatacataggttcatacaaacgggcaaagcaatactaaccccaactacgtgtatggagacgttgttctggatggtaccgctcacgatatatctggcgctgaccgagaaacatgaaaaggcggaaaggatgcggattatgtggaatacgggatgtactgaggtggagataccaataattttaagtacggcaatttcataa

SEQ ID NO: 107784 - DNA, 921 bp, Enterobacter aerogenes
atgactgcaattgcatgttggttaaatagcgaagaaaacgatagtatttgggctgttagtgactcaagaataactcagcaaaacagcactctaaccgaccattgccctaaactattctcagtacctgtatctgttatacgctctacagatgtattacgtatacatccacaaaaaatattcgagtttggtttcggctttgccggaagtacaataataggaattaatgttaaggaaatgcttgctgtttcactttctcgattacatgaaataggaagtagtactccagagcaagaaataccttatgaaacctatccaacattgaatgaaatagcaattctagcaaaagacattgctgaaaaatttatgcgtgatgttggccaatcatttccccaatcagtaagaattgagatgcttatttttggtttttgtttaaatacaagatcatataaaatagtcaagctcaataactctagtgcaacccctggcatcattgatatagaagacaaccagaatttattatcaggcagacctattttattaggtgatcgtcaacaggaactgcaagaattcattgaaactactcgagagcaattttcacctaacactataaattggtggcgttcgccatttattgcattaaacaactggataaatcaagaaacggtgaataccattggtggttatatccaaatggttactgctttcccatttttcgcccgattatcatttttaacagacctaaatgataatctttttatatcgagttatgctggaattaacactactgagtcatttggccctacgattggtggttttatcttaagatcaatggatggaatgacccttccaagcgtaaacggctgggacgtaggaaatcaggtcaccagagcagctgcagaaagagccgcagctagtagataa

SEQ ID NO: 107785 - DNA, 225 bp, Enterobacter aerogenes
atgaaaaatacatccagcattcaggcgcagtttggtgcgcatctcaaaaaactcaggctccagtcaggcctgtctcaggaagcatttgcggataagtgtgggcttgatcgtacttatgtgagcggcattgagcggggggtaaggaatccaacccttgaggtgataagtgttttggggaaagggttggacatagatattaaagagttatttaactttgaaagatag

SEQ ID NO: 107786 - DNA, 264 bp, Enterobacter aerogenes
atggaaaagacgggatcaatcaaaaaggtactgggcaatagaatcagggcgctacgccatgagatggacctgtctcaggaagcctttgccgataagtgcggcatcgatcgcacctacatgagtggaattgagcgaggagtgaggaaccccacgcttattgtcatgtgtgcaatttcggatggtctggggatggaccttagccatttatttatgtttgacgatggcgcagaaaaggacgccgaatcaacggaatgtgactcatag

SEQ ID NO: 107787 - DNA, 1656 bp, Enterobacter aerogenes
atgctttttaatatgcttaataataaacaaaaaaaacgtctttttattaatcaagtaaatgtgttttacaattattcgttaggttttgaagttccttcggtagatttacttaagactgctaataaacttcttaaatcaggattttctaaatgtgtttgtttttcagattttaagtttttatatcttaatgaaaacaatcaaataaaatacagtaatttacatccagaaggaagaaattgggattcttcatgggaaataaattttgatgatggcataccaaaagaaataattcctgatttaatgatttcttccgaattgtttttccatgaaaatagactcgtgaatgataatcaggcttacataagaacatcattacctccctttgttctggagacaagtaatgagcagtaccctatgtatccaggagtaaagatctaccgtgatggaatcgctatcatttattttcaatttgatggtaaatggaatggaattgatgatgacagtttcttatcatcaattataaatatgagtcaaagatattttgataaaatatgggttgatgcgaaacttcaaatgctggatggtgaagtggttttagaaaatagctttgaagatgttttttcaattggtggaagttatcttgatggaagagaaataagaaaattaaaacaaaagatgcgagataatagcatgaaagtattaactgaatcttttgagaaagaaggttgtactttttcgttcgataatcatagagaatggattttgcaccagattgcaggaacggaggggaatgaatcatgggaatctacgattgaaatgtgtcgttctatatattcaaacgttattagcagcatgttggttccacaatataataataaagctaagtcatatagttatctctggcacggacggccttctgtttctcttttacgttttgataagcaacctcaggataaaagtgctttgttgaaaaatttctctgagtcattggttaagtttttgaatagagctgatatcagcgaaaagaaaaactccttgccgccagatttacggaagtttaatgattattgtctacatgcaaatagatccatttacttatggacttggttaagaggagagaatgagtcagaagatatttgggatgacagaaatacctcatcaagaatacttgaaaatcaggcaagagttgagcaggttgaatatcataatatgagtatttctagagcgtgctcttgggctaataacccgccatctgaacagcatctatttatctcctatacaacattggcagaaacagaaaataaaattcatcatagtagtatatctggggaaatttctgatacgctttcatatctcattaaatcttttgggacagagagtttaattgcttctgcgaaagagatggctagatttcgcatggacgaacttaaatataggtcagattcagcaagaaactctagcaattattggttaacatttgttttcggtttggttggtgttacaagttttgctgaatttgcagttaatccactaattcttaataaatggagtggaatgaataaagttatagcgccttttatttcttttgggatctctgctgttttagttttagcaatatctgcaattatctggtattacacaaagagaaaatactag

SEQ ID NO: 107788 - DNA, 1827 bp, Enterobacter aerogenes
atgaaaatgaaccccagagcgtggtttaaccgctcccgtattccggtgaatgctgccgaaaacgtaacgttttcggcgaacgatcctgcaagcgaaagcactccgcggtcagaactcttttcgactgcccagatggaacgctatggtcagaagctggcgcggacccataaagtatcaccggataaacatccctattatcttctgaaacggcttggcgacaatgaggccgttatcacccaaaactgctatgagcttaatgcaggtaaaaagaccagtatcatgcccgccggggagtggttgctggacaattattatctgattgaggaacaaatccgtaccgtccgccagcacttgccgaaaagttttggtaaaggtctcccgtcgctgatgtcgccgctgaattgcccaagaatttatcatatcgcatcagaggccattgctcacggtgatggccgctgggatgccaccagtctgaccagctatctcgctgcctatcaacaggtgacgccgctgacgctgggtgaagtctgggcattaccgggaatgcttcgactggcgctgattgaaaatcttcgtcgtatcagtatggaagtgataaaagcgcaacaggacagaaacctggcagatacgtggataaccaggattttcgaatgtgcagagagtgcgcctggtgatttaattatggtggttgccgatttggcgcgctcccgtcctccgttatccagcgcgtttgtcgcagaactggtgcggcgtctgcaggggcatggcaacgcgctgtcgttacctcttacctgggttgatcagtgccttcgggaacagggagtcaccactgacattctcataaataacttcaatcaacagcttgccgccagccagctgtctgtcagtaacagcatcgcaggtctgcgattactgggtgaaacggactgggctgatttcgccgaaacgataagcgtcgtcgaacaggtattaagcaatgatcctgccggtatctatccccggatgcacttcaatacccgggatcattaccggcacgtagttgaggtcctggccagagacagtgggctcagcgagcctgaggttgctgacagggtgctggcgctttcagaggaaaaagcccccaatacaccggaacatcatgttggttattatctcgccggcgaaggtcgacaggcactggatatacatctcctggcagacacctcaagactcatacgcttgcggcacagtttcaacagaataaccctgctgtcatggcttggtagcctggcgttgttgacaaccgcagcgaccgcggcaatattgcacgaaactgccatgcagggcgcaggttggttgttaatcgcggtgatattacctctggttatcgctttaactcagttaatgagtgatttactcagtgacgcaaccacccgttttcgcgttcctcgccccttgccggggatggatttttcaaccggcattcccgctgacagtgccaccatgatcgtcatcccctgcatgctgaccagccacgaaagtttcagccagctcctctccagtcttgaagtctgttggttggggaatgaaaacgaaaatctcaggttcgcgctgctcactgattttgcagattctgaaaatgaaccctcgccggaaagtcacgcgctgctcagacaggctatcgctgatacgcaggtgctgaatcgccgctacccctccggccgaccacgtttttatctgttacatcgtcagcctgaatggaacccctcggaaggagcgtggatgggctatgaacgcaagcggggaaaactggtcaccgacagcgttgcctgttcgcggacacggtga

SEQ ID NO: 107789 - DNA, 156 bp, Enterobacter aerogenes
atgcagaagaaatgcggttactgcagtaaagcaatcgagggaaagccagtggtaagcaccctgttgtacctccaggggaaccagctagcacggaaagaaaaagagtattgctctgaacgttgcgcctctcacgaccagatggctcacgagggctaa

SEQ ID NO: 107790 - DNA, 3252 bp, Enterobacter aerogenes
atggaatatttttatctgataaaagcgactcaaaaatcgggtaaagctgatgccgtaatctggcgcactaataaatcagaagcccgcgctctactgcagctcgacgtagatctggaagacgctgggatcgaaacaggccgcggcaaagactatcaaaaacctattcgcaccgatttcccggtattcaacgacctgccagcggagggtgttctcgattactcatggtgcgaacgctaccagctcggcgacgatggccgcacctggactcttaagccaggactggcgcctgctgatgttcatcacggcgataatgccggagtatcctctgaggccgttactggagagctggttgatgccaatactactggcgacgcggcacaagatgagaccgtggaaactttcggtagcgatgaataccaggacgattcaagcgcgctttttaacgtggcagaactcccctttcgcgctcagctgctggcgcagtatatggccgaagagagtcacgtttatcatatcagcatgcctcaccggcaggagctgtcagttctggaaatggacactgataacgcagccgtccaggatctgattctggccgccgagaatatccctgaaatcaaaaaatacgatatgccgacgctctggaaattcaccagcgccaataaaaaagtcttcccggaagggaaacggcatgagctcggcaaacgtattcagtttgcaaagctgtggttcgccacgaacgcgatcgaccgcggcattctcaccagggaatgggctgccggtaactgcatttcttcggttttgaaaactgatgcaggaactaatgctggcggcggtaataaaaccgatcgcaaccctgactacacccatacccttgatacgctcgatgtagaaatagccctggccacaatgccaatggatttcgatatctacaatttcccggcatcaattcaccgccgggccaaagagatcgttcagaagaaagaaagtccgttcaaggaatggtcggcagcgctgcgcaaggttgcaggcatcctggattattcccgcgccgcgatttttgcccttattcgtggcgccaccagcgacattcatcatttcccggtaagtctgcagacctatatcaatgcgaacctgaccgagcataagcatgacgccccttctgctgagactcttgaaaaagctggtcatgtttcatctgccgccgtcactctggacgctgtgaaaaaggctatcgatggagatgaaggtgtgcctgacctggaaactctcccaactgactttcaggtaattggcaccgaactggtgaaagaagctcaaaagaaacgccctgacgctaatcaggttctggccgccgaacgtggcgaatatgtcgaaggcatcagtgaccccacggatccgaagtggataaccgaagacctgaccaaacccaaacagcctgaagtttcaaacatgggcaatggtgttttttcgattgatggtctgatggatagccagccagcaccagcactttctatcgtggaccaggcgcgccagcgcgctgcagaagaaaaattacatccagctaattccggggaaaccaccagcgatgtgcagatggaaacggctcagccggtcgaagacgaaaatgataatgcggtatcagcaggcgaaggcgctgatgagcctcctgcgcaaacaattgccgtgaacatgagcaaaatactggctgaacgctgcccggatcttaccgccgaagtgctgaaaagccaggtttcagagagtgctcatagcgatgaagaggaagaggctgaacaagcagcgccagcatggccggagtatttcgagcctggtcgatatgaaggcgtgccaaatgaggtctaccacgccgctaacggcatcagctccacgatggttaaagatgcgcgggtatcgctgatgtatttcgaaaagcgtcacgtctcgaaagtcattgaaaaaacgcgctctcctgttctcgatatgggcaatctggtgcatgcgctggcgctgcagcctgaacagctggaaaaagaattcagcatcgagccggaaatccctgaaggcgccttcaccacgactgcgacgatccgcgcgtttatcgacgagtacaacgccggtcttccgccgctgttgagtgctgacgatatcaaagcattgctggaggcgcacaacgccagccttgtcgcccccctcagcaccgatgatatcaaagctctcattgaagaacacaaccatagtctgccagcgcagatcgctctggggaacgacatcaacgaaacaggacagagctacatgtctctgccggttgatttccagcgcattgaagaaggacagaaacagaccgctgctgcaatgaaagcctgtatcaaggaattcaacgccacccttccgccacagctaaaaaccagtggcagccgggaaacgctgatggaaacgctggcgattatcaatccggatctcgttgcacaggaaatgcagaagcccgcaccagtcaaaaccagcggaagtcgtgatgccctgttggagcaactggcgattatcaaccctgacatggtcgctcaggaggcccagaaggcgcagccgctgaaagtatcaggcaccaaagcggatctgattcaggccgtgaaatcggttgaaccggatgccgtgtttgccgacgaactgctggatgcatggcgcgaaaacccggaaggaaaaatactggttacccgccagcagatgagcactgcgctggacatacagaaagcactatttaaccaccccaccgccggcaagctgctccagcatccgagccgcgccgttgaggtgagctatttcggtattgatgaggaaaccgggctggaagttcgcgtacgccctgaccttgagatagacatgagcggcctgcgcattggtgcggacctgaagaccatcagcatgtggaacatcaagcaggaaggcctgcgcgcgaagttgcacagggaaatcattgagcgcgattaccacctcagcgcggctatgtactgcgaaaccgctgctctggatcagttcttctggatattcgttaacaaagacgagaactaccactggatcgccattatcgaggcatctgaagaactacttgaacttggcatgctggaataccgcaaagcaatgcgcgccatcgcgaacggtttcgacactggcgaatggccagctccgatcactgaagactacgccgaagaacttaacgattttgatgtgcgccgtctcgaagcgctgcgcgtacaggcataa

SEQ ID NO: 107791 - DNA, 342 bp, Enterobacter aerogenes
atgaaatttctacttgcaacaaacttgcggtcggcgaaaccatgcctgtcatccgttgctgtctggcaaatgctgcttgaacgcctgctggaaaaacattatggcctgacactcaacgacacaccattcagtgatgaaacggtaattcatgaacatatcgatgccggtatatctttggccgatgccgttaatcttctggtggaaaagtacgaactggttcgtattgatcgtaggggattcaactggcaagaacagtccccatatctgcgggcagtcgatattctgcgggcgcggcaggcaactggtttattgaaaagaaatcgtattagcgcggcacagtga

SEQ ID NO: 107792 - DNA, 357 bp, Enterobacter aerogenes
atgaacaatcactccgaatccggtacaacgccggagaatacctcctgcccgcagtgggggctcaaacgtgctattacaccttgttttggtgcccgcctggtacaggagggaaaccgactgcattttctccctgaccgggccggatttaactgtgctttcagcgacgatgactcgctgcgcctggatcaggcctttccgttgatactcaagcagctggagctgatgctcaccagcagagaactatctccccggtatcagcactgcgtcacgctatatcacaacgggctcacttgcgaagccgacacacttggcagttgcggttacgtatacatcgccgtttatcccactcaacgttaa

SEQ ID NO: 107793 - DNA, 528 bp, Enterobacter aerogenes
atgcaggacacgacaacattacccgcaccattacaacccgatatgttccccctctcagtacatcctcatccgcaccccaccatgacgccgtatgcgcagcgtaccatccggcgggcgctgaacattctggaacgccagttacgcgaacccggtgcggccttcaccaccagcagttcggtacgcgactggcttcgtctgcaactgacgcaggagcaacgtgaggaattctccgtgctgtggctcgacaaccagcaccggcttattgcttacgacacgctgtttctgggcaccatcaacactatcacagtgcatccgcgtgaaatcgttaaggcgggcctgaagcacaatgcggcggctgccgtacttgcgcataatcacccgtcagggcttgccgaacccagtcatgccgaccggcagatgactgagcggctaaagcatgcactggacctggtggatatccgtctgctggaccacctggtggtcggcggcatggatgtcatctcgtttgccgaacgcggctggctttaa

SEQ ID NO: 107794 - DNA, 471 bp, Enterobacter aerogenes
atgactgacaatacactgccactgtttccctccgcagaaaccgttcctgcagcggtacagcatcagattgccgcaacacaggtagccgatgagaaccgcatcgacttctggccgcagcacttcggcaacataccgcaatggatcaccctagagacacatatcttcgcatggatggaccgtctgtgcgcagactacagcggcggtatctggcagttttacacgctcagcaacggtagcgcgtttatggcaccggacgatgacagcaatgagccctggtcactgtttaacgacatgaacggcaacagtgcggcaatgagcgccgaagctgccggaattgcggtctgtctgatgacttacagccatcacgccatgcgtaccggatgcgatgccatgacggaacattactaccgtctgcgggattacgcgctcagccatgcggaatgtaacaccattatgcacatcatcgattag

SEQ ID NO: 107795 - DNA, 822 bp, Enterobacter aerogenes
atgcgattagtcagccgcttcgggcgtataaatcagatacgccgtaaccgccccttgacacgtgaagaattaaagcaggtcgtccccagcgtattcggggaaaataagcacgcatccagaagcgaaaaatatacttacatccccacaattaccctcctagagaacctgcagcgcgaagggtttcagccgttttttgcctgtcagtcgcgagcccgcgatccgggtaagcgtgagcataccaaacacctgctgcgcctgcgccgtgcgggtcaaatcacaggtcagcatgtgccggaaatcatcattctcaacagccacgatggtgcatcgagctttcagttacttccgggaatattccggagcgtatgcacaaacagcctcgtatgcgggcagtcgtttggcgaaatcagagttccgcacagggggaatgtagttgagaaggttatcaaaggcgcttacgaagtactcggcgtctttgacaaggtggaggaaaaacgcgaagccatgcagtcgctgctgttatcaccaccagcacaacacgccctggcaaacgccgctctccagtatcgctttggtgaaggacatcagccagtgcttgcaacgcagatattgacgccgcgacgctatgaagaccgcaagaatgacctgtggacgacataccagaggcttcaggagaacctgctgaaaggcggtctgcccggacgcactgcgaagggcaaacgcagtcacacccgtgccgttaacgggatagacagtgacatcagactcaaccgggcgctctgggtcatggccgagaacatgatggacttactcagtaaataa

SEQ ID NO: 107796 - DNA, 708 bp, Enterobacter aerogenes
atgtctcaggctgaacgtcgccatgaccggcttgcggtcagactgtcgatgattattggtcgtctggtggcgggtgaaacgctggatatacgcaaactggccgctgagtttgacgtgtcagttcgtaccctgcgccgggattttcgtgaacgactgatgtacctggacctggagtatcgacagggccagtgccgtctgctgtccggtagccgtcagcgggaactggcggtgatgacctttgcccgtcagtcgggcgttgagtccttgtttccgggacttgacggacatctggtcagttcacttctgggtgggtcgggtgaatccccctgccttatctggcagggagattctgtacaggccgtcaccgacaacgaggtctttatccggctggtaaatgctgtccaggaatgccggaaagtgactctgcacggcaacggatgcaaccataccgatatctcaccctaccgcctggttctgcatgccggtagctggtatctgacaggggcacaccagacccgcatcaccgcactgccactggctgatatccggggtgtcacgcttcatcccgacacttttacacccgacatcaccgtgcgcgacatcctgtcccgcccggagtttttacaggcattacctcatttccggttcattggtgaagtgctgtccggctttgtccctgaaccacatcaacccgcaacagaaggataa

SEQ ID NO: 107797 - DNA, 1068 bp, Enterobacter aerogenes
atggaaggtcattcagacaaaacgctaaaggcactggataaaaaaacagcatggttaaaaaataatccgagagctttccacttttatctcttccgggcgtgctcactaatctcggaacaattagaaaaagatatcctctctgaggatgactgccccccaccttttccccttgaggaaagatataatgctttcaacagaactatatccaccagtcaatatactcagccttcccgcgatattatgccgtggtcgcaggctcttcctgctgagttagtggacactattgataaacaatccagtactattgatgctaaaaataaaacttcttcctccgcattctcgtcaccggagaaaataaaccttagtacctgtaaacaaggtaagaaagaaaagaccgacaaacttccacctgaaaatatcagaaatgcaaacgggttactttttaaaagaattaaggatgtctcagagagaaacgttggcttttctttattcgtacacctgttgataaccttcgtaaaaaagcctcaaaaaatatcaaatttaatctcatctatagatatcgaatggcgtcaccagtacgccctttaccccgcacctttttcatgggttaacagcaaagatgaaactcaatgccagtggttatggcaacaaatgcaggaacgatgcttaggcattccattaaaaccacatgataataaagagaaatattattttatctttgctatttttgataactggaaaggatggactaccgagcaggaatcttatcttaacggcaaaaataaaaggcgtaataaaggaaagtttcttggacatggcatcatgccggaaaatggcatcaataaaaatcataaagatattcttcttgatgagcttaaaaatgcatgggagcaaaaggaaagaagagccagaagagctaaggaaccagctgctgtgaagttgaccaaagcggctcaaaaaaaacttgagtttattgcgcatgtagagaagaccacatcgaaggaaattcttaacgagctgattaacaatgcttttaatgatgcgaagagtcaatcacggcaatcataa

SEQ ID NO: 107798 - DNA, 600 bp, Enterobacter aerogenes
atgaaagactataaaccgcgttacgaagaactgaagaaatattaccagacctggctgacgggttatacccggctggcggtctgccagggaatgtgccatcagaatatatatcaccatcataccctgacggtcgggagctttacgtttccgggagaaggcgacgttattgcgattgttccccggtgtcttcaccggattatttatggcagagccgcagccccactgacggttaatgatgacctgagcgtcagtttatttactcaggagcatcttttagcacatcaccccatgctggaagggattttgctgtctgagtgcgtgcgattaaaacagcgtcctctggcaaataagctcatcagtttgttctgccagttcagcggtagcgagttgcgtctgaagctggtctggctgtgctggtacgatttgatgctggggaacagtctggatgactggaatgacaatctcagattcaaaaaaggccacgagatggagatctggatcaataaccggcaggaagaaaaccctgcgctgactcgtctgatggacgagtacgtctgctttgcgtggcgaacgacaactgaaccgctgaagcatgcctga

SEQ ID NO: 107799 - DNA, 645 bp, Enterobacter aerogenes
atgcttctgctggattttggtcagatacgccagtacctgacggatgttgtcgatactgtctgggtcgctgtagcgtaccggaatgttgatattggccgcgtaatgctctttaaactcacaccggtgataccagccttcccggtcagtgatatcgctccagtacaaaccggcctgctgcgcccagggataggtattctgagttttactaccatccagccagaatacgacatgggcatggtagtggtggtcttcggtccattcgataacccagaaaaaaccgacaactgcttcgagttgcatcatacggttcatcagttttctgacatcccattcgagttgccggtgatcccgcaggaaaaacttagcggtatgatcctggtaaaacagatctgttcggagtgcccgcaggcaggaatagcgctctaccattttgtctatatggttgtccaggagggctttcaggaaccagtctggctcccatcgttgattgttttgcatagtataaatttctttagtgtcggcgaggaccagcaagtggaatgtactaggccctcaggaggggctttggctgaggaagttgcatgggttaaggagatgactgtaaaaagggagtgcctattaattatattaattaacctaaattaa

SEQ ID NO: 107800 - DNA, 1782 bp, Enterobacter aerogenes
atgttcgtttgggacccaagagacctcaatcctgagcaggcggaggcagtgatcgagccatcaagtatctttctaaacgcttgtccgggtagcggtaaaacccgcaccttgacatacaaaattgcatacgaacttacacgtcgtactgacaagcggatcgttgtagccattacctatacccaccgcgctgccgacgagattcaagagcgtattgaagatctaggagtcgacacttcgggcctatggattggtacgatccatgcgttctgcctagagtggatactcaagccatatggcatctactcccctgaacttgcacacggttaccgtgtgatcgacccgcatgatcgtgaacgtctacttgagagactatgctctccatataaaggtgttactcactgggattgcgattactacgttactgagacggggtatcagcttggctgtgtagacaaaggaaaacaccatatcattcataagattttgaaggcgtacttcgacgagctttcagtgaaccgacagatcgacttcgaacttatcctttggcatgcctacagattgatgcatgacagagcccaaatcgcagtgctgctctcgcgtgtgttttcccacatccttgttgatgagtatcaggacaccaaacagatccagtacactattttgacatccatacttcgtgcaggcagcggaaagaccaaaacattcattgttggcgatccgaatcaagctatctatggatcactgggtggttacgctatgccagtggatgaattccgtacccgtgcagggatcttgattaaggagtttgcgctcagccgaaattaccgctccagtgaacgaattatcagttatttttcgaactacagcgtacacgcaacaaaaatcaacggtgcaggtaagcatgccaagtatcccagccgagtgacctacaatcaaaacgtaacatgcagcgatgtgcacgatgagattgtgagattgattcgggtcagtctcgccaacgctcactctcccgaaaacatctgcgtcctcgctccacagtgggttttgcttgcatccacgacacgaaaactagtggcgatgttgcctgaccagcaatttgatggcccaggtctcgtccctttcagtaataacttcgataatttctggttcaaggtctccaaaattttactaacggactcttcccccagactgcttgtcaggcgaatgcgttgggcaaacgacgtgatcaaagacctcgatagtttcggcgttgacaccaaatcattaactccgcgcattttactgcgggagattaatgctcttacaatcgatgaaacagacggactcagttatttggaccaggccttcaacgatctgctcaagaggctcgatattccccaagaaatccatcctgcgctcttgacccaccgtgaggcatttttcagcagttcggcagcgcgaatagcgcggctgcagaaggaaggggcgacttacatcaatcaagtttcattcttcaaaaaagtttttcgcgagcgagccggtatcactgtctccaccatccatggagtcaagggggccgaattcgacgttgttattgcctttggcttactggagggtatggttccgcactttaatgaagcaaatagacatatcgctgcaagcaagctcctctatgtattgagttcccgtgctcgtaaaaatcttcacttgatctcggagtcaggacgacagagaggaaaatacggtgtctatacctcgactgagttactaacgacttgccaattcagttacgacctggactaa

SEQ ID NO: 107801 - DNA, 2139 bp, Enterobacter aerogenes
atgcacatttccaaactgaccttggtcaactataagaacttcaagaacacgtctctgcggtttcataagggagtgaataccattatcggggaaaacggttccggtaaatctaacatcctgcgagctatccgcctcctgcttgacgacactatggtgcgcgctgcctatcgcttggatgagtctgatttcagtcgctcactcggtcaatggcagggccactggatcgtaattagcatggagttcgatgacatcaccactgatgaatccgttcaagcactcttcctccatggaactgctcccttggatgacgtgccgattcataaggccacctataacctgattttccggccaaaaaaagaaatcaggttgaagctggcagccttgagaatgtttgagcatgagcaactatcagagattcgtgactcaatcacgatcgatgattacgaaacgattttcacaggacggagttgggccgacttcggcaatcctgcagtatacaaaagcatcgttggcgattttgatgtttgtaacttttcatcagagacggagtttccagaaattggggcaaaggtgcctggtttcctttctgttacgaaagaggtatctctgactttcatccaggccttgcgcgatgttgtttctgagttccacaacaaccgcaccaaccctttactcaccctgctcaagagcaagagtggagagatcaatccagcgaagatggagccaatcaccgagatggtccgcgaactaaatacctcgatcgaaggcttagaggacgttcagtcagttcgcaatcacattagagagaccatcaaggacgccgcaggtgaaacctactcgccagcgtcactctcaatcaaatccgatcttcccgaagaagcagataagctcttcaagtctctccgactattcgtgggggaatccgaggaagggtatgaaggtgcaattcatgagttgagcctcggtggagccaacctcatctatttgacgctcaaactactggagtttaagtaccagcgcgaaaagctgaccatagccaatttcctcctgatcgaggagccggaagcgcacatccatacacatattcaaaaaaccctgttcgaccgcatctcatacagcgacgcgcagatcatctacaccactcactccactcacatctcagaagtcagcaatgtaagcaatgtcaacatcttgggccgtcatggatcgttctgcgaggcctatcagcctgccagaggtcttgagccaacccagatcaacagtatccagcgttatctagatgctgtgcgtagcaatctgctctttgccaaaagcgttatactcgtcgaaggtgatgtggaggaaattctgataccaatcctaattaagctagtactgggagtaagcgttgacgagttaggcatcagtgtcatcaatattcgcagcacaggcttcaagaatgttgcggttctcttccataaccttcgcattaagaaaagatgtgccatcgtcactgatttggaccaagccttttttgacatcactgaacagacaactgatacagaaagtatggctaagataaaggcaaaagccgccggctcccagaaagcaggcttagaacggcaggccgatctgaccgagttcacagtagacaatccatggcttgcaaccttctatgcgaaatacaccttcgaggtcgactttgtcgcagtcggtaatcatgaggccgttatccaaaccattccaaaagtctataaggacgagggaaccaggaaagaggccaagcagcaactccaatccggagacctgcgacaaatgggttgccgtacgctaacgatggctaagcaagtgggcaaggggtggtttgctctcttgctcgctgagtacctcacccctcaagtccatatcccagcctacatcatgcaggcaattcattttgcacatggcacgtttcctcttccccttcttgccaggatgctccaacatcgcgctgaataccgatacggttccgatgctttgaattcggcagtgaagcaggcatttcttctggaagttgagcggtttgcgcgagggtatattggcttggctgagctcaggatagcaatcgaacacatgctgccaggagacgccattgatgcatttttagcggagatgcagtga

SEQ ID NO: 107802 - DNA, 282 bp, Enterobacter aerogenes
atggtcacttttgagacagttacggaaattaaaatcctacacaagcagggtatgagcagtcgggcgatcgccaggtacttagatatctctcgtaatatcgtaaaacgttatctgcatgcgcagtttgagcctccaaaatatacaacgcccccgcagtcgcttcacttcgggataaataccgggactatattcttcagcacatcgccgatgcccacccttataaaatccctgcgactgttatcgcccacgagatcatggagcacagctaccgtggtggtatga

SEQ ID NO: 107803 - DNA, 801 bp, Enterobacter aerogenes
atgcatgaactggagacgctgctgggccgtctgaaaatggagcatctggggtaccaggtggaaagcctgctggagcaggcggcgaaggaagaactcaactaccgcgagttcctgtgccgcgcgctgcaacaggaatggagcgggcgccatcaacgcggtatggagtcccggctgaagcaagcccggctcccctgggtgaaaacgctggagcagttcgacttcaacttccagccggggatcgaccgtaaggtggtgagagagcttgccggcctggcgttcgtagagcgcagcgaaaacgtgatcctgctgggtccaccgggcgtgggcaaaacgcatctggcggtggcgctgggcgtgaaagcggctgatgcagggcatagggtgctgttcatgccgctggacaggctgatagcgacgctgatgaaggcgcgacaggaaaaccgtctggagcgccagctgcagcagctgagttatgcgcgcgtgctgatcctcgatgaaatcggctacctgccgatgaaccgtgaggaggcaagcctgttcttcaggctgctgaatcggcgttacgagaaggccagcatcatcctgacgtcgaacaaggggttcgcggactggggagagatgttcggcgacaacgtgctggcaacggcgatcctggacaggttgctgcatcactcaacgacgctgaatatcaagggggagagctaccggctaagagagaaacggaaggcaggcgtgctgagcaagaatctggcgccagaaaacaacgaggcatcgctggagaaaagcggtcaacctggttga

SEQ ID NO: 107804 - DNA, 1173 bp, Enterobacter aerogenes
atgctgagcagagaggactttttcatgataaagcaaatgcgccatcaaggggcttacattgtcgatattgccacccaaatcggctgttccgagcgcaccgtcagacggtatctgcgttatccgtctccgccggcgcgcaaggcccgactgcgaatggaaaaactccgcccttttatggagtacatcgatatgcggctgaccgaaaatgtctggaacgccgaagtgatattccatgaaatcagaaagatgggctatcccggcggacgctccacgcttcgggcttacatccagcccaaacgcaaaatgcggccgggtaaaaagaccgtgcgcttcgaaacccagccaggttaccagttgcagcatgactggggggaaatcgaggcggaagtggccggtgagcgctgcaaaatcaacttcgccgtgaacacgctgggttactcgcgtcgcctccacgtctttgcggcaccgagccaggatgcggagcacacctacgagtccctggtgcgggccttccgttacttcggcggcggcgtgaaaaccgtgctggtcgataatcagaaagcggccgtgctgaaaaatcacaacggcaatgtggtgttcaacgccggcttcctgcaactggcgcagcactatgacttccagccccgggcctgtcgcccccgccgcgcgcggaccaagggcaaggttgaacgcatggtcgaatacctcaaatacaacttcttcgtccgttacacgcagttcgacagcttcgcgcacgtcaatcagttgctggagcagtggcttgccgaggtcgcggaccagcgcgagctgcgccagttccggcaaacgccggcgacccgcttcgaggaagaaaaagcgcacctacaggcgttgccggcaacggacttcgataccagctacttcgacatccgtcacgtagcctgggacggttatatcgaggtacggggtaatcgttactccgtaccggaggcctggtgtggccgcccggtctccatccggatcacgctggatgatgagctgaggatctacggcaatgagcagcttgtggccactcatcgtctgaacaatcgtggtgccgggtggcagactgttccggaacaccatgcaccgctgtggcaacaggtgagcatggtagaacaccggccgctgagtgcttatgaggagttgctgtga

SEQ ID NO: 107805 - DNA, 177 bp, Enterobacter aerogenes
atgtatttatttgatgatgtcattctctccccgcttaacatcaatcgcaaggcctttctttgctggaacgaagatttttgtaattgtcactatgacagtggacaattttcctgggtttcgctggaaaatgaagaagtgataggtaaatcaggcttcccgcatactgtcaagaactag

SEQ ID NO: 107806 - DNA, 1185 bp, Enterobacter aerogenes
atggtgcgcccaatgtcaacagaacctaaggagactactgcctctgtgcgaatgagcgttgctgaaaaaagatcggcagaaatcagagctaaatccttaggctacaaatcgctaagtgactatcttcgagcattggcgtcctcagacatgaaatcggcaaccccagatccgaaaaaatgcagagaaacacgccctgtatctctttttcacaaaacaaacttcggcgcaatgtggaatggtgactctctggattggatggattcacgtgaagcagaaagcgtaaacctcattatgacctccccacctttcggtctcgtccggaaaaaatcctatggtaatgaggacgcacacgcttattgtgattggtttcgtccatttgctgagggtttcaaaaaaatactcaaagacgatgggagcctagtaattgatatcggaggcgcatggaaggcaggaacccccacacgctctctttaccattatgaactgctgctaatgctttgcaatgagtacggttttcatttggcgctggaacatttttggtggaatcctgctaagttgccgacacctgcagaatgggtaaatgtaaggcgggtacgacctaaagatgccgtaaattgcgtatggtggctttcaaaaacaccattccctaaagcaagtaacaggcgcgtgcttgcaccatattccgactcaatgaagtctttactaaaaaacggttatcaagcaaaaacacgtccctcgggccatgtgatttctgaaaaattcggcaaagataatggtggttccgttcccccaaatcttcttgctattgcgaatacagaatcaaatggcacttatcaggattattgccgaaaaaaaggattggacatccacccagcgcgctttccatcagcgcttccagagtattttattcgtatgactacggatcctggcgattttgttttcgatccattcggcggctcttgcgtgacaggtgcagtgtctgaagcccttggccgccactgggcttgcgtagaaatgaattcagcataccttgagggcgcaatgtcccgatttgagggtgaccctattgttttagctacagacaaaccatcctcttacacaattttcacaccatgtgctgcacaggtagtggaagaagctgtccctctagtagctgatggtggggccgctcgtccgaaaaaataa

SEQ ID NO: 107807 - DNA, 1224 bp, Enterobacter aerogenes
atgaactccatgagccttgatgaaatatgtcttcgcggtcttcttcgctgggtaggaacggggtctccttcaccctactcgggaagcgtggagactttaagatatgaagatttagatgctttaagaatgtggtgggctctttctgaacctgttggcaggctagccttaagattagtggaaaaacagagagaagtttcccccaccttagacgacttcagaagggaggtatctggtgaacttcctggccctcctgacgctgcagcttctatgttgcttcaaaccgtcactcttgaccctgctgcctttgtggtcatggaggcatcttcttcatggctttcagggccaaacagggttcttgcgaaaacgctgaaaaccgcgcaagtagctttgaaagcaggagctttacatgccagaggagggcttttcgatttgcatgcgaataaaagattagctcttctcgattgcgccctaaaagtcgcacctatacgagaagtacttagtacacctgcgggcagatctcgtattgttgcttatgaaaaaaggcaggcttccaaggcaaggagcccgttgtataagcagtcttggttttgtgcatcaatcttatcagatattgaagctttcaaggctgatacgattaaggctctacttgcctccgatttgcttccaggaatggaggtctggagaaaatttgaactcgcaacgattctggaggttgctgaagccctttctggggcgactggggctcccgttgttcttgacgcttcgtttgcggcgggcaggccagcggcaactattggtgatttggaattacgttggcaaagagccatgcccaagagaccaagtgcgtttctagatccgggagaggtgctagcaggtgaactggccttctctcttggggtttccaagggtacttctcgagcagatataactattgaaagggctggacgtattctttcgattattgaatgtaaatggttttcttctcccgattcggcaccagcagcaatacttgaggcaactagtcagcttgtaggttatgcaagagacattgcacatgcgcaggaagaatctgatacagatattctagctcgtagcattgtggctcttgctcacaggggccctgctgaaatgcgttttggagcccctgtttgctgcattggtttttctgatttcggtaccgctaatttggcaccttgggcagctatggtatcaggaatacactaa

SEQ ID NO: 107808 - DNA, 1689 bp, Enterobacter aerogenes
atggcaacctcgctgacgacgcaagacatacttgggctgtttaaggcgttgaaagacgatattcaggcaacaatattgaagccgaggggactgtcgataaaaagctcgggtacaaagagccttgtgcttaacgaaccattgaatcctgagactggcttttggcaaaatccgcaggcgatgtcaaataagcccctacgctggattcctcaagttgaagttagcgctgaaaatgttgttgcaagattcgctcaaaatgttgatggacagagcataggtatggctaaaagcgtcggttacattaacaaccgcgatggctcttgctctgtatgcgtttttcgcgttctccctgcgattaaacctctaggccctgattcaaattgggaatttcctgcgggatgggagttcctgcttattcttggctttgcgcagcctctgcctgcaggtacgtcgggtgatccattaagcaatttcgaacctggtgaaggtactattgatttcggtggcggtgcattaaagagaacatttccgataagcttccgggctctggtgaaagcccctgtctcagaagagaatgtagcaggaacttcatattcagttgttggcaatgcaatcgcgcggttagttggtgctacagtatacgatgggactcaagcatcgggacgtgatgccttagttactgatctctcaaatatctttgctcctcagtcagttgaaggaccattttcactcgatgaaaatacttctcttgttgggatcgagccgtcggtatatcaacagatagaagcagcaatcaactctggtaagcgtcatataattttatatggtcctccgggtacaggtaaaacgacgttagcggaatatcttgcagcggaagtttcagagcgggatgatggcgatggatcttatctaatgctcacagcatcgtctgcttggagttctcaagatcttgtcggcgggtatcagcctctaggtaatggggctattggctttgttcctggcgcattgctccgtaattttgataaacctgtaatcattgacgaattaaatcgttgtccgattgataaagttttgggtccgttgttttcgattctctcaggacagtcttcggcactgccttgtcgggtcgaggtggcaaaccctgcaagtccatttcatgtaatttatcctaaacctcatccaggaatggaacctcacgagcatgcaccagagcctgcatggcgtatgatctgtactttgaatacctatgataaaacccagcttggtcagatttcctatgcactgagccgtcgttttgcatggattaaaataggagcgccagcagatcctgatggatttgtaagggaaatggcaactcgtcttggcgctacagttacagagcctgtagcctcaaacccgattggtgctttgtggaaggccgttaattcattacgtgaaataggtggtgcccctatcgtcgatttcatcaaaacaatgctcgcgttcaaatctgatgtaaacctatttgtacaaccagagggaaatgctgcagacttgtttttatccgcgtttcgcatgtgcgttcttccattgatggatggtttgtcgccaagagaagcaagggatctagcagaatcaatttcagttgcatggggcttagatgctgagaaagccgcttcattaactcgtgattgtgcggagttttctgcttga

SEQ ID NO: 107809 - DNA, 297 bp, Enterobacter aerogenes
gtgttctttgtatcaaaatacacatctttagaagaatggcgtaaggtgttggcgacagataattcaaaacaaataaagaagttgatatcttactacaattcgatttgtagcggggggatgttaacacataaagagtattcggtacttctggttacaaaaagaaatagatgtattaactccatttgtaagattttgaatcttaatggaaaacaagtttcatattatcacactaaacttaaagataaacttgggattcatacctctgcgttatttaataattatatcaattggttgtaa

SEQ ID NO: 107810 - DNA, 618 bp, Enterobacter aerogenes
ttgttgggtccattagagaagttcgtagtttgtcaaaagccgctggaagaggtaaacctatgcgacacagacctcaccctgacaagtcgggaagcacaaaaggtcgactaccccatatgcatccaaatcagcatcaaggtcctgctggtaatgggcatgttttctaccctgactctcatgggagtgattaatatgtctgtctatctaatatattttgaaaaaaagcagcagcccactgatggtgattttagtggttttgacaatgttaataactatacattaccggatatcttgcatggtgaagagacaactgttgattatttaggaaaagaaatcaaagctaatattatatttgatggtgtatcttcaggtgatttttattttttcggaaaaaatagagaagggaaaaaaggtgagctttgccgtaactcattgaaagaatttattttatctcgaatgaaaaacaaatgtgttaatccatttatttatcttgatatttttaatggtgagatggttaactatattaaattacctgaattttatgtggaacattctttggcggagttagattctatttttaaaagtagtacatacaaaggtttttttaatatagtgtaa

SEQ ID NO: 107811 - DNA, 543 bp, Enterobacter aerogenes
atgaaaatgaataaaattatgatcgctgttgtcgcttttggcatggtcggtatggcaaatgcagcacctaccgatgccggacatggaactgttaaatttgaagggtcaattattgatgctccatgctctattactccagatactgtagatcagactgtaaacttagggcaaatttccaacgtggcgcttaaagatggtggtaaatcatctcctaagaatttctatattaagttggaaaactgtgacgttagtaccgcgaagaatgtaactgcaacatttactggtgcaaactctgcaggtaatccagatctactcggtatcactggtactgcgcgtggggctagcatcgcgattacagatggtgcaggtagtttaatcaaattgggttcgtctactaagccgcaggggatccaagatatcaacaacactttagccttctctgcgtatctgcagggtgacatggctgctgacggtaccactggcgctgaaattgtaccgggcgaattcagcagtattgcaaactttacactcgcttatcagtaa

SEQ ID NO: 107812 - DNA, 537 bp, Enterobacter aerogenes
atgggaaaaacactgctcatcctgaagcttatcctattaaccttagtgaacatttctgccgcaaatgcagtccgtgaggtaggcagggggacggtgagtatgcaaggaagcattgtagaaactgcttgtgctattgagatgaatagccgtgagcagacagtggatatgaaaacggtgtctgttggacagatatcacgtagaggagatggaattccctacccttttaaaattcgtctgatcaattgcacaccgcaaagagttaatccgaattatcttccatggctttcatttagtgtcacctttgacggtaaacatgacgggaatttaattggagttgagggggatgcagaaggtgtcggactacaaattattgatgaatggggcaatgttgcgcggcctggtaaatcaatgccgttgcaagatattaaacctggtaattatgaactgcgctataccatgcatctcttaccaaataatagaccgctgcgggctggatatttccgatcagtagtgcgtttcaagatggattactactga

SEQ ID NO: 107813 - DNA, 2517 bp, Enterobacter aerogenes
atggcacaacatgtaatcaaaacagcctttcgcttttgcagcttgcgagtgttgatcgctttgttgctgggaaacccgctttattcgctagcagctgatgaaattcaattcaatactgatgttttggatgttaaagaccgtactaacctcgatttaagtcgtttttcacgcagtggttatattattcctggtgtctataacttggctgtacgtattaatcaacaggaattatcggagcacgctattgttttcgccgcgccaaatgatgatccaaaggatagccttccatgcctaactttagaactcgttgaacagatagcgctgaaacctgattatctcaaaacgctagtatggcgtgatgagggacaatgtctcgataatcgcaagcttgaaggatggactgtaaaagcggatttatccctgggagcgctgattataactattccccaagcttatcttgaatatagtgcacccgattgggatccgccttcccgttgggacgaaggtgtgcccggaattttatttgattacaacatgaacttcgcctcaactcaaaatcagcatcagaggcgtaattatacattgtcgggtaacggaaccacaggtttaaacttggggccatggcggttacgtgctgattggcagatgcaacaagagagtcagaaggatgtggctgagaatcgttttgattggagccgtttctacgcataccgagctttgccttcgttgatggccagcttaacgttaggggaaaactatctcaactctgacatctttgatagtttccgttttagcggagtgacgcttaatactgatgacaatatgctgccacctaatttgcgaggttatgccccggaagttaccggcgtagcaagaacaaacgcacgaatagtgataagtcagcaaggaagagtactgtacgacacacaggtcgcccctgggccgtttagaattcaggatttgaacgatgcggtaactggtcaattgcaggtacgcattgaagagcaggatggcaccagtcgagagtatagcgtggacacggctagcattccgtatctcactcgaccaggaaggatacgatataaagtctctgcaggacgcccgactgattggtatcaccatattaatggcccgatgttcaccacaggtgagtattcttgggggattagtaatggctggtcgctatatgggggcggagttgggagtgatgactatcatgcactcgctctaggactaggacgtgatcttatgctgttgggggcgctttcttttgatattactcattcagatgcgcgccttccgcaggaaggaaaattgcaaggtatgtcttatcgcctgagctattccaaacgatttgaggactatgacagccaagttacgtttgctggctatcgattttccgagcgcaactatatgaatatgagcaccttcttggatgctcgtaactcagggtggaggcctaatagtgggaaggagatgtataccatcactttcaacaagcagttttcccgaaccagtgtttttctcaactacaaccatcagacttactggaatgcgcaggctaatgacagctataccatgtcgattgctcgttattttgatataggacgttataaagatattagcctgtcgtttaacgcataccggaataaatatcaaggtaccaatgacgatggaatgtatctctcgattagtttgccttggggggaaaatggtcatattagctacaacggtcaggttaatcgccacgatactacccatagcatgagctattttggaaggaacaataatgatgatacttggcagctcagcgctggtggatcacgcgatggcgcattagccaacggctactttacacatcgtgccagctcggcggagataacattcaacgccagttaccaagcgaatcgctataacgcttccgggatttccttacagggcggcatgaccgcaaccccatatggcgtcgcgttacatcgtatagggacagctggaggaacacgaattttgctagatacaggcgatgcatccggtgttccactacgcggtttcggtgctctaacgcgcaccaacatgttcggtaaggcggtggtatccgatatcaatagttactaccgaaatcagctcagtattgatgttgatgcattggccgacaatatggaaacggtgcaatccgtccaacaggccactttgactcagggggcgattggctaccggcagtttgaggttattacagggatgaaagcgatggtggcgattcgacagagtgatggatctttcccaccattcggtgctcaggtaaaggattcgcgtggacgtgaagttggcgtagtgaacgacgatggcagcgcttggctaagtggtttacaaccagatactcaccttcaggtgttctggaatgggttagcacaatgtgagctgcatctgcctacacaacttaatcgtaacagtatgaaaaatttattactgccgtgcattacgcagaaagttagcggagcagcagaggagaaactataa

SEQ ID NO: 107814 - DNA, 771 bp, Enterobacter aerogenes
atgcaacatagggaatcagtaatgaaactaacagcattgaccgctactttggtctgcatgataggaatgttgagcataacacctgcgaaagcggcgattgcactcgatcgtacaagagtcatttttaacggtgatagtaaatcgttaagtatgaatattagtaatgaaaataaacaattaccttaccttgcgcagggctggattgaggatgctaagggaaacaaaattactagccctctactggtattgccgccagttcaacgtattgaagcagaagcaaaaagtcagctgaaaattcaggggcttcctcaactgtcagaattacctcaggatcgggaaacgctgttttatttcaacttgcgcgaaatcccaccgcgtagtgacaaaccaaatacgttacagatagcactacagacacgcattaagttgttttatagaccacaggcgatcgtagcgaccaaagagagtttggcaaatccgtggcaagagaaaataacactcacgcgtcggggagatagctatcaggtcaataatccaactccatattacatcaccttagtcgatggtggggctagtaagggacaaagtatatcttcgttccaaccacttatgattgcacctttcggccatgcgcagatgagtaacaaagcaagtgcgtttgggagtgcgccagttattacttatatcaatgacttcggtggtcgaccacagttgactttccgttgcgctggtaacgaatgtcaggttgataccagtaaaagtaaatcctga

SEQ ID NO: 107815 - DNA, 588 bp, Enterobacter aerogenes
atgaaaataattaggatgatagcaacttttgcgttggtgtatatgggatcgggaattgctcaggtgcctgcggtctctgaaggctatgaaatcgatggcgcgaatggagttatatatgtacgtggagcgttgagtgaaagtgcttgtcgcttagacatgtcttccgttcagcagactgttgagctggggacagtaagcaccggccagctaaggcgtgatggtcatggtacaccgattgcagtgaagttaatattgcacgactgcctccgttcgccgtctgtaggtcaagatcgctggttatctactcagctttggaatccttaccagccatccgtaacagctacttttaatggtatgagttctcctgagatgcctggactgctggcagtaaacggtgcagctggaatggcgttacgtctgagcgatgagcaaggacgcgatgttcgtatagggagtcggggaatcccattacaactgacgccaggggaaaatcaaataattttctatatcacaccccagcgtacatctggtgaactaaaagccgatgcgttctttgcgcaggtcagttttcagctcaactatgactga

SEQ ID NO: 107816 - DNA, 501 bp, Enterobacter aerogenes
atgatcttgaaaaagatgcattggtatctgctaaccgcatttattttttcgatgagcatcggttatagcggtaacttgcttgcgactatgacgatgctttctattcagggcactattctgcttcctcctccctgtgtcatcaacggcgaaaaaccgatttcgataacatttaatgaagtactgactaccagggttgatggtaaaaattatcgtcaacaggttccttacactttgcaatgtaacgcggcgagcagtaatgcattaaggatgatgataacggggggggacgcaggttttggaaatggtgcattgcggactgatatagatgatttagggattaaccttgaagctgatagtagtgctttcccggttaatacttggttgattttttatcttccagagcaaccgaaactctttgccgttccgattaagcgccctggtagcactttaagcgcccggccattcaacgcagcggccaccatggttgtcgactatcagtga

SEQ ID NO: 107817 - DNA, 480 bp, Enterobacter aerogenes
atgaaactgtggattagaagccagtttagcgccttattgttgttatggagtatttcagctgtagcgatagagaacatgacatttactggtaccctggtggcaccaccaccttgtgaggtgaacaatggttcaacaatcgacgttccgtttaatgaaatcggcatcgatagtgtggatggtattaaccatcgacgtgatgttccgtatacgttgagttgtaatgctgatcctaaatggagtatgacgttgacgcttagcggaccagtctcctccttcgatacagcaacactacaaacaaatgtggatgctttgggaataaaagtttacatcaacggtttgccatttgagcttgataaaccttttccggtggatattgctgcgctacctcggattgaagcggtaccggtgaaaagcccgggatcaacgttaagcgaacaggtttttgaggtcagtgcgaccctgcaagccgaatatcaataa

SEQ ID NO: 107818 - DNA, 528 bp, Enterobacter aerogenes
atgtggcgctttgtgtcattggttattttactatggggcgggcattttaccgacggctgggcgttggaaaacctcagatttcacggttctctggttgcgcaaccgtgtgtaatagagcctggagatgaacatatcgaattagattttggttcggtgatcgacaaatacttgtacataaatcagcgtacccatagccaaccttttgtcattcgtttgagtaagtgcaatctggcattaggaaagatggttagcttgtcgttcctgggaacagaaagcgtgggggctcctgggaagttagctctggatgccaccagtcaagcctctgggattgcgatcgggattgaagatcgtgaaggtaaagccatcctgattaatcagggcaacagttcgcgttatccgttacaaagcggagttaatagaattatcttacatgcatgggtggaggcggaacaggaagctcttagtacaaagagtatcgttcgcgggccgtttagcgcagtagtgacttttaaattgaattatgagtga

SEQ ID NO: 107819 - DNA, 789 bp, Enterobacter aerogenes
atgtcaatacgatatttttttagcctaattataggtcttttttttctggtaggaagtatggacactttcgccgtgatagaaaatattgagtggcataacgaaggcggacaaatttttattgaacgcgcatcttatgagcagaataccttcgatatgccaatgtgcaatggtaccaggataaagacctgtcggttattctttgttccatttactgctggcgccccatcaccgacagccggtgtaacgattatcagttctcctaatgtaacagatactcaatatgctgctgcacttacagcttttagtggacaaacattaccgttttctgcagaaagcgggctttgtatctggctttatcaggatgccaaggggatgactggcgttgaacgtaagaactgtggtccgaatggtattccgccgacagaaccggtgcgcccaagctgcactgtactcggtggtcctgtcacgatagattttaaagagctacagatatccgaggtggctggtaaaagccagagcgcgaatctgaacgttttatgcgatgcaaacgcgtctatcaaagtcacaatattgggatatacgtcatcgacgggtattaagctgcgtgacgacgggtctttgagggcagatgtgacattacgtaatactgccggtgatgtaggtatcactgaagtaatgtcggcaaatacgcttaagtctatccctgttaccgccgttcttaagacaaatggtacactagctggcggagcttttagtggtagtgctataattaatatcgacgttttataa

SEQ ID NO: 107820 - DNA, 735 bp, Enterobacter aerogenes
atgtccaaccccgaaattcaccagataatacccaagtttatcctggaatttcgcgcgggccggataggggaaggcctgaaggcctctactatcaaccgcgatatttaccggttgtccgggatgtttaccgatctgatcaccgcaggcgaatgcagatcaattccgttccgtggcatagcccccctgaaagaagacactcccgcagtcactttcttaactatgcaggagatcgatcgggtgctggcaaagatgagcggcgattcacacaaactgacactgctctgcctcagtaccggcgcgcggtttagtgaagcggcaaatcttaccggcgaaatggttaataactgtcgcgtgactttcgttaaaaccaaaaacggaaaacagcgaactattcccatatcgcagaaactggaagcagagataaaaacgcaggataccgggagattgttcacggtggattacaaatggtttgccagacgattaaaggcggtaaaacccaacttacccagaaggcaagcaacacacgttctacgacatactttcgcaagtcactttgtcatgaacggcggaaatatcgtggcgctgcgggaaattttgggacacgcgaacatacagcagacaatggtttatgctcatctcgcgcccgactacctgcaacacgcgattttgcttaacccattacggggcgggctaggcgaaaaactggccgctaatacaggtcaaaatgaactgtaa

SEQ ID NO: 107821 - DNA, 594 bp, Enterobacter aerogenes
atgcaaaattacccattaccttggacgtttcatccgcagttaaccgaagagcgcttatctatcattgcggaggcactccttaaagtgcaggaagacacacatgagcttttgtcttcttcgcttgatgataattatacccgcgcaacatgcacttttggacgccagaagaatcgaatcgtcaaactgtgcatgtcaaaaaaatacgattggttggggctttctaatcccaataacgattacaccatcactattggcggtatcccaatccgttcctttagcgatgatccgactaatccgaaaaaggctaacttcttccgaaagaatagtgttgatcagttattcgcatcagaagatacaatccctacgatttggcgcttcgttgtagagaaaccagagttcgaaggtgaaggtgggcgagtgcattttgcgggttataatgcgctggaagaaatgctctctttatggacgtatggcgaagaacgggtaactgtactgcattctacagacgataccccgccagcacctgttaagattgagctggatgatatcagcgcttctgttcctgaaaaggaaaagaaaagcgataacggataa

SEQ ID NO: 107822 - DNA, 1113 bp, Enterobacter aerogenes
gtgtttaacggttctaatttgcgattggctcgtctgtatcacgagttatcactggagcaagtagctgagcgggtcgataagacccgccagtacattcagcggctggaatccggctcggctgtgcctactcctgagcttgcgaataaattagctgccgtattgctggtcacgcctgaatttttcgcagtacaagagcaatctccagtgaatgaagagatcgttcacttccgcaagcgtagttcaacacgtatggctactaagtgggcgacgctcgctaaagctgaattgtatcgccgtctcattgaagtttttgatgagtacttgaatttaccgccagtaagatttcctgaactgagagtaaatactcaagaggacatagaaagagccgctgagaaatgccgggctgattggggattaggttttgggccgatcgacaacatgactcgtcttgctgaaaagctgggagcatttgttacttctttcgattctgtctctgatgatgtggatgcgctttctgtccctttaagtcggccattcattgtaagaaatacggctaaaaaatcgccttgccgtcagcgttttgatattgctcacgaagttgcgcatttgattttgcacgaaggtatttcaacgggggatcgggtaactgaatctcaagctaaccgttttgcatcagcattgcttctaccccgatcggcgatggcaaaatattttcctcgcccaattggcggtcgtatcgactggcaggggctaagtcagtttaaactgacgtggaaagttagtaaggcagcaacaatttatagagcacatcagctttctcttttaaccgatgcccaatataaaacggcattcttcggtttaaagcgcaagggggaagccatcgatgaaaaagaagattatttgatccctaatgaaaagccagagctatttcataaggcaatgaagtttctcttaacggatctgtcagttgatgttgagtcattagccaagcgtttgtgtattactccagctatgttagcggagttagcgaacgataattcgttagattttgccccagaaatcgctaccgaaaatgttgtttctttatctgcttatcgaatgaaatctgcataa

SEQ ID NO: 107823 - DNA, 216 bp, Enterobacter aerogenes
gtgccgttcagccaggtagcggcaaaggatgaatttaccggcatcaaggacgccacccgcgacgacctgttagccgcgcaccgcgtgccgcccgttctgatgggtgtaatgccgaataactccgggggcttcgacgacgttgagaaagcggcgaaggtattttccatcaacgaactgtccccgatacaagaaagcctgaaagagttaaacgactga

SEQ ID NO: 107824 - DNA, 183 bp, Enterobacter aerogenes
atggcggagtcagatcagcagcgggcggaccagatgactagtttacaaagtaccttgatcagcctggcggtcgccgacgcagttggcctaactcctacggcccttgagtgtttggacctgattcaattacgcggttgtgccgccgcaggtgacctggcgcagcatactggattgacgacctga

SEQ ID NO: 107825 - DNA, 621 bp, Enterobacter aerogenes
atgtcgaaaactgatgagttatcagaattactcattcatcaagcgaagctgcaggccaaagcggacgcaatagtagacgcccttgggttagatagtttgctggcagatatcggaagtccgacgcgcgtcggaagttccgcactgggtctaatggttcaccgcgatatcgacatcaccgttatatgcaaaaagctgaaagaggagacgcaccgcgcggtagttgaacttggcgggaagctggccatgcatgcttctattggctctgttcgtttccgtaatgatacaggcatctggaacagagcagtcgaagaatatcctgatggcttgtatctgggggtaacctatcgtgacgagtctgaccaagactggacctttgacatctggtttgtcgacgagccggagaggcagcctgatctcaaacatcttcgcacaattccgccaatgctgaccacttccgctcgtcagtcgattttggccctcaaaaccgcgcttgcgaatggctctttcgcagctggacgtccgtccagctttaagatctacgaagctgtacttgaacacggcgtaacaagcctctccgagtttggagattggcttaacgatatgcatcgatcagagtcttag

SEQ ID NO: 107826 - DNA, 555 bp, Enterobacter aerogenes
atgagcgtcgaagaagacaagcaaattatgggctatcaggaagcgctggattgtgctcgtgggctcattcatgcccacccccgtatcgtcttcatgatgtgcgggctggcaggttcagggaagactacttttgcccaagcgcttgagaagatgggctgccagcgattatccatagatgaggagatttggcgcgctaatggtcgatttggcgtggactattcggagcatgactatccgagcctacaagcgtcagcagagaagcgcctgcgccggcagcttgtcgaaatgttggagaaaggaaccaaggcggtaatcgactttagcttctggaacgccgaagcacgggccgattaccgtgagcttttgcgacgcaacggtcatcactgccaacttgtgtatatgaacgttccagagaaagtcttgcgtgaacgcttaatcaaacgtgcctctcgtcacgatgctaatgctgcctttccaattacagaggaacgtttgcagcgctacatccgggggtttgaaccaccatctgacaaagaagcgtggatagtccaatag

SEQ ID NO: 107827 - DNA, 507 bp, Enterobacter aerogenes
atgcagtttgaacgctcaagaccggaagaagtgctggctcacggccttgatgccgatgttggcatggacgtgggggaaatcggcgcagccgccccggaaggaggtttttatgactttgcacccgtgcatctcgtcactatcgcttccttggaagaaatttcgcgcaaggctgacctcgatgggctggaggcagaaagatatcggcccaacattgtgatcgagagttccgacaccactcccttcgttgaaaacagttggaaaggtcagaaattgcagatcggcagcgcggtactggaaatcatggtacccacgccaagatgtgctgtgccgactttggctcacggcctcggacttgcgccaaaaccagatgtattacgagcaatccatgcgaacaatcgcgtggacatacctgatgccgggacgttttcatgccttggcgtctacgcgaagattcttcacactggggaaatagtgccgggagattcagtgcttttcgtagatgactga

SEQ ID NO: 107828 - DNA, 861 bp, Enterobacter aerogenes
atgatgcaacgcaaggcgcacttggcaccggagagcacggcagaacgtaccgcactgtggcgtgccctgcacgtccagatcgatgcagcgccttacgtctttgaggacagggttgggcttcgacttctggcacccggcgcggagtggcggcgtcgtcccgacatggatcccgattttacaaagacctttcgtgcgtcgatggttgccagagcgaggtttgtcgaagatctggtcattgaacaagccgatcgcggcgttgcgcagtatgtcattttaggtgccggtctcgacaccttcgcccaacgcaggacagacgttgcgtgtcggatgcgcatctttgaagtcgatcagtcggcgccccaggaatggaaacgccaacggctgaccgcgcttggctatggtattcctgaatggttgcgctttgtcccggttgatttcgaagcaggaggctctgcctggcaggcacttgcggaggcgggcttcgatgcgaagcagtcggccatcatagcttccacgggcgtcagcatgtacctgacgaaagaagcaactctggcaactttccgtcaggtcgcggcgcttgcgccaggatcgaccctcgtcatgacgttcatgttgccgctctatctcatgccgcctgatgttcggctacagcttgggcaggcgctcgagggtgcacgcgcaagcggaacaccattcattagcttcttcgcgcctgaagagataatggccatggctcggaatgccggctttcaggatgttcggcatattcctccgagcgcactggcacaacgctacttcacgaaccggaaggatggcttgcaattatcgtgcgcggaagagttcttggtcgcgaagacctag

SEQ ID NO: 107829 - DNA, 363 bp, Enterobacter aerogenes
atgaagactaaaggtgtgaaagcaatcttcctgacgacccataactggggaaagtccgtaaagttctttcagtccttgggatatgagcttgactttgaaaccgatcataattctggacaattgcgcaacgaggcgggcccgtatcttttcatcgccgaagtgccagagaacgagcagcctgcaatccaaatggtgctaaagattcgagatggcgaaacccttgaccttgcccccccggttgaagtcgtttcgccgttcgcagatacccattggggtacgcgggaaatgactgtccgcgatccggatgggcggatctggagcctggaagccccggcacagtcaaaagccggcgcatcaacatga

SEQ ID NO: 107830 - DNA, 204 bp, Enterobacter aerogenes
atgactagcaaagatgtcaagcagttcaacgtttacctcccggtaagcctgatccgagagattaaacatcatgcgattgaagccgaaatgtcactctcggcgctcgttgccgatgcgctacgcgcgtatctggacgagaagaccaataagagggacattctttcgcgcagccaaaacagacgtagaaaaggagatgagcaatga

SEQ ID NO: 107831 - DNA, 201 bp, Enterobacter aerogenes
atgtccgatgttgaacagcccgaattagcttatcgccagattctggcccttacagcggcaatgtttctctcgtatcttactgttgcaatgtcgctgccggcggtgccggtccaagttgtggacggccagggactggataacacctgtggggggctagctatcgggattttctttgtatcgacgatcccaacgcgtagctga

SEQ ID NO: 107832 - DNA, 477 bp, Enterobacter aerogenes
atgactcgaccatgtcccggcgcagctcggacaattcgtcgggggacaactccacaacgtgccggcaggccaattccgcatgcggttccttcgataattaggaggggcaagattaactacagaagccgcgatttttcctcactcactacacggcaatgcctgcgcgcttatgcaccgagattacgataccgagtgcgaacgtcgccgcaataccaccaatcagaaacgccgacgtatagcttgatctatcagccaacaatccgactgccggtcccgttacggcatacgcaagatcttggaagtccgcgaatccgccaaacgttgtcccacacagatgaggcggcaccagcttggcgacttcagctctcatcgccgggaacaccatcgaacagccaaagcccgtcaaaagagcaccggccaatgcaggatatggaccatgagccattcacaaaagatactggccgcacacttcaataa

SEQ ID NO: 107833 - DNA, 1152 bp, Enterobacter aerogenes
atgaacagtgaaagcactatacatggcaatgtagccccgggattcgggcgcgtaaaagaggagtttgcagcggttgcagcggcagagggcggctccctcagcgcacaactggcagcctaccataatgggaaacttgttgttgatttgtggacgggaccagagatccagggtgattctcttcttggcgcttattctgcaagtaagggggcgggcgcattaattgtcgcactgcttacacaggaaagaatacttaatcttgaagaaaaggtgagccactattggccagaatttgctgtaaatggtaaagcccatatcactttacgtgagttgatgagccatcaggcgggtctggttggttcggatgagggattcactattgaacagcttgctgatgaccgttatgttgcggcacgccttggcgcacaacgtccctactggcaacccggttcagcgttcggttaccatgctctggttatgggggctctcgaaaatgaagtcgtatatcgtgccacagggaaaactgtgcaggagattttctctgagcgggtgagaatcccttataatattgacttttatttggggctgacggaagcgcttgacagtcgatatcttcactcgcgcccacacatatccacgcctgaacgggtggcattactggctgcaagagcaactgcacctgacagcattacgggggttgcttttaacaggcatcatccacagaaccctgctgtatgggagctaacgaacctggatatagttcgacgttccgggactgtctcatttggaggtgtcgcctcagcacgtggcctggcgaaaatgtacgccgtttcgatcacttctgttgataacaaagcaccgctacttaatcctgaaaccgtttcatcattcagccagatacagtctatcggacatgatgttgttcttaaggattttaaagctttcgctgtcggcttccacgccacgtctgaatactatccgtccctcggtcagggggcatttggtcatagcggagcggggggacaacaggcttttgccgatccccggaatggtctggcttatggatatacgcgcaggcgattccctttcccgaatgctcaggctcctgaaaatgatcgtctggtaaaagcgctctatgctgcgataggacaataa

SEQ ID NO: 107834 - DNA, 213 bp, Enterobacter aerogenes
atgaagtcattaaccgcagtgcgtaaaaaaagcccttattatcccgttgagttcaaaaccaaaatggttgaactctcacatcaaccagagatctccgtagcgcaactcgctcgtgagcatgggatcaacgataatctgttgttcaagtggcgtcagtactggcgcgaaggaaaactgatcttacccagcaatagtggacacgcgactaagtga

SEQ ID NO: 107835 - DNA, 198 bp, Enterobacter aerogenes
atgacaaaaccaacatcaaccaccaaaaagccacgcaagcagcacactcctgaatttcgtcaggaagccctgaaactggctgaacgcattggggtggcagctgccgcccgcgaacttaacctgtatgaatcacagctctacaactggcgaagcaaacattcagtgacgcaaaacaacgctatggcgcgccacgcctga

SEQ ID NO: 107836 - DNA, 624 bp, Enterobacter aerogenes
gtgaaaaccgtggctgccagcctgcgtcgtcaggggctacgggcgaaagcttcacgaaagttcagtccggtcagttaccgcgaacatggtctgccagtctcagagaatctgctgaagcaggacttttacgccagcggcccgaatcagaagtgggtgggtgacatcacgtatcttcgcactggtgaaggctggctttatctggccgtggttatcgatctgtggtcgcggtcagtcattggctggtcgatgtcctcacggatgacagcacagcttgcctgcgatgcgttacagatggcgctgtggcggcgtaaacgtccggaaaacgtcatcgtgcatacagacagaggcggtcagtactgttcaacggattaccagagcttgctgaaacgccataatctgcgggggagtatgagcgccagaggttgttgttacgacaatgcctgtgcggaaagcttcttccatacgctgaaggtggaatgtatccacggagaggactttgtcagccgggaaatcatgcggacaacagtgtttaattatattgagtgtgattacaatcggtggcgtcgtcacggtacctgtggcggtcttagtccggaacaatttgaaaaccagaacctcgcttag

SEQ ID NO: 107837 - DNA, 534 bp, Enterobacter aerogenes
atgagaaacggttttaacggactggcggcaaaggtgcagacgacgctgaaagacgatccgatgtcaggtcacgtttttatcttccgtgggcgtaatggtagtcaggtaaagctcctctggtctaccggcgatggactgtgtctgctgaccaaacggctggagcgcggccgcttcgcctggccgtcagcccgagatggtaaagagatgaaaacgctatcgcgacactcggagctggcgaaggccttcacgtacgccctgaaccagtggccagcgctggcgtactatgcggaggacggctgggtcgaagcagataacaacatcgctgaaaatgccctacggaaggtcagcctgggtcgtaaaaactggttgttcttcggctcagaccacggaggtgaacgtggagcgctgctgtacagtctgctcgggacatgcaaactgaacggagtggatccgaaaggctacctccgccatgtgcttgacgtcatagcggactggaaggtcaaccgggtcagtgacctgctccccgttgattag

SEQ ID NO: 107838 - DNA, 900 bp, Enterobacter aerogenes
atgtctaacaaaatcaatgagtcatacctaaatgtagaagaaataaatcagactactggtgaagttatcacactttcttccacatcggagaccagtgtacagacagttcctctgatgcgtttgggggtctttgtaccaacattaaaatcgacgaacaaagcgatcgctaagaaaagcaatgtcggatcaaacatcaacgcgtcagacgatcttaggcatctggagctagccaaatccgaagggtttgaaaggattaccatttcaggtccaaggctagacatggatacggatttcaaggtttggacaggaatcatatcggtactgaccgataatgaactcgagtctaacgaggatgggactatctcgatccgatttactgagtttgctatgcgatgtggtttttctcgtggacgtctgaaggctgaatttcgggaaaaaatcaaagattcgctcaggaaactgatgtctaatgttgttgaattctccaaggacagaggcacaaacattgaagtcactaaatttgttcagctcattggtgagtcaaccgtggacattggtaatgacaaagttatcctcactccgtcgaaaacgcttaaggatctgtatgttggtgaatacaagatcctgcttaagctgagagcccttaaagcccttgcaaggaaagagtcagcccaagccctttatacgttcattgaggctctgccacctaatccgatccctgtcagcattgagaggttcaggaagcgtttgtccctcacttccagacctgctcttcagaattcaacggtaagaaaagcacttaagcaactggaggacattggataccttgaataccaggagcttaaggaaggcaacaagatagcgtttcaaatcatcaagagaaatccctccctgaagtag

SEQ ID NO: 107839 - DNA, 1200 bp, Enterobacter aerogenes
atggccaagatcaaactcacaaagtccgcagtcgatgcggcacaaccccaggcgcagccggtcgagctgcgcgacaccctcgttcccggcttcctctgcaagattacaccggcgggccgcaaggtattcatgctcctgtaccgcacgaacgccggcgagcgccgcaagcccgcactgggccagtacggagaactgaccgtcgagcaggcccgttcgctggcgcaggaatggctggctcaagtgcgccggggcggcgatccggcagcggacaaggccgaagcgcgcaaggcgccgaccgtcaaggagctgtgcgtgaggttcatggaggactactcaaaacaacgcaacaagcccagcacgcagaaaggctaccagagcgtcatcgaccgcaacatcattccgatgatcggccgtctgaaagtccaggacgtgaagcgcccggacatcgccgggatgatgaagaagatggcccacaagccagcagacgcgaaccgcacgttcggcgtcatgcgccggatgttcaacctggccgaagtgtggggctaccgttccgacggcacgaacccatgccgccatgtcccgatgtatcccaacggcaaagccacccacctcatcagcgacgaggacatggggcggatcttccgccaactcgagaggctggaggcggaggggctggagaactacgtcattccgctggcgatccgcttgcagttcgagtttgctggccgccgctccgaaatcgtcggtttgcaatgggattgggtcgatctggagaaccggcgggtggtctggcctgacagcaagaccggcggcatgtcgaagcccttgagcgaggaagcccaccggctgctctcggctgcaccgcgacaggaaggttgcccccacgtcctgccatcgccgaaccatccggggcagcacctgaccacgggtgagtattacaacggctggagccgtacactcaaggcggctggtgcgacacacgtggggacgcacggcatccaccaccgctcggccaccgacattgccaactcgggcattccggtcaaggtcggcatggcgctgaccgcgcacaagaccgtggcgatgttcatgcgctatgtccacaccgaggacgatccggtgcgccaggcggcggaactggtggcgaaccggcgcaagacgattaccggcgggaaacgccccgtggaggtaacggcatga

SEQ ID NO: 107840 - DNA, 1062 bp, Enterobacter aerogenes
atgactaggcgcaaggcatctacatcacccgtcgcgccaaggtcactgctgggcgacattcgggcactcattgaggcggcgcggcagcgcgccgcctcggcggtgaatagcgaattgacgatgctctattggcgaatcggtcaacgcatccacacgcaggtcttggaggggcggcgggccgactacggcgagggggttgtaccgaccctagcgatgcaactggtgaaggagtacggcagtagcttttcggtaaagaacctgcgccgcatggtgcagttcgccgccaccttccctgacgagctaattgtcgtatcactgatacgacaattgagctggacgcacttcatcgccctgatcccgctgaaagatccgctccagcgggactactacgctcagatggccagcgccgaacgctggagcgtgcgcacgctacgtgagcgcatcgactccatgctgtacgagcgcacggcactgtcccagaaaccagacgagatgatcgtgcaggaactggcggccctgcgcgatgcacaacgcatgtcaccgtcgctggtcatgcgcgatccgtacgtcctcgatttcctgggactgcgggatacctggcaggaaggcgaccttgaggcggccatcatccgcgaaatggaatctttcctactggagctgggtgcgggtttcagcttcgttgcccggcagaaacgcatcccgattgacgatgaggatttccacctcgatctgctgttttacaaccgcaagctccggcggctggtggcagtggagttgaagataggcgagttcaaggcggcctacaaagggcagatggagctttacctgcgttggctcgataagcacgaacgggagtcggaggaagcctcgcctctggggatcatcctctgcaccggcaagaagcgcgagcaaatcgagttgctggagctggacaggtcgggcatccacgttgccgaatacttgaccaccttgccgcctcgcacggtgctggtggagcggttgcagcaggcgaccgagcgggcgcggttgcagattgagcggcgcgatcgctcgcctaattag

SEQ ID NO: 107841 - DNA, 2064 bp, Enterobacter aerogenes
atgacttctcctacgtgccatatggtctggaagtattcgaggcactcgccaaggtctgccaacaactcaaaaccacagttgaggcagagcaaaagcagtcagcagtcagcagtggatctcactgcatttgcgcacctacagggggaaaccgctgtcggcaagctgatcgcggcgctctctgcgaaaaccagcacagcgcaggttgaagcactcgccactatcaagccagaagaacttgagcagcgggaaacgctggagaaaagcctcaaggaaaacaaccctaaggaaaaagctggcctcttgcgcttgcgcgcgcgccgtgtcgcggcaatcgctaaaaactctgtcgagaaaggactcgtagttggccccgacgctatagccaagttgaaggccctagctgatagtttccgcacagctcaggctgccgccggtctcgcggcgaagagtttcaaggaaggcgaaaacttactgccagggacgggtggagaagcgtggcgagagctgtttgacgctgcccggaagttcgcactagaagctcatccagacaaacagttcccagatttaggggcggacgccgcatgcccgctgtgtcagcaacctctggctgcaggagcggaacggttactgcgattcgaggcgttcatacaagcggaagcggaaaaaacggctcaggcacgccgccaggcgcttgccgcagagtaccgtccatttgccgcctcggtcatgacgttgaaccttgatgaggttacgcaggcggagatagcagaaatcgatccaccgttagtggccgataccaaggctttcgaatccgcactaacggctcgccatgaagcgataaaggcagcagttgtctcccatgattgggcagggctggatcaggcactggccagcccggcagatcgattacaagcactcgctgacaaactgaatgccgaggcggaggctttggaaaaagcctcgaatgaagaagctcgtgctgcgttacaaaagcaacttgaggagttggatgcgcgcttaagactcagccaagccaaggaagccgtgcttacggcgatggcgaagcttggacatcaggcaaagctgaagagctgtctgaccgcagtgaggacaaacgccatatccctcaaagcatcggaactcgcggaaaaagtcgtttccaaggagctggccgatgcgctaaaccgggaattcaaggccctaggcgtgggaggcttgagtgtttccctgcagagccgtgccgaccgcgggaaagcgttacacaagctgaaactacaattgccgcaagtccgtagtccaggtgaaatcctgagcgaaggcgagcaacgcgccatcgcactcggttcgttcctagccgaagtggggttgagcggcggtaaaggaggaatcgtcttcgacgatccagtctcatccctggatcatcggcggcgagagcgcgtggccaagcgtctcgctgccgaagccgtgcagcgacaggtcatcattttcactcacgacatctacttcctttgcctactggccgaggaagcgaagcaaatgggtgccgcagtggttacgcaaagtctgacgcgacgcgctgaaggcttcggtattgcggaccctgaactgcctttcgaggggaagagcgccagcaagcgcattggtgcgctgaaagcgcagcaacaaggcattgccaagctacacaaagaaggcaacgaacaggagcatcacaggcagaccgttgatgcgtactttcgtctgcgtatggcatgggaacgagcggtggaagaagtcctcctgcgcgaagtcattctccgcttccgcaagggcgtggagacacagcgactggtcggtgtgagtgtagacgatgatgactatgcgcaggtcaacgcggggatgagcaagtgctccaactatgcccatgacaaagcgatgatggggggagttgctgttcctgacccggacgaactgcttgcagacatcatcgcgctggagaactggcgcgcacaggtgcacaaacgttcggaagagaccgccaagaagcgcaaggctgggccagcggttgccgcaggggcaccagcctga

SEQ ID NO: 107842 - DNA, 321 bp, Enterobacter aerogenes
ttggtgccaacgcacttccttggcagtaccatcaatcgctatgtcgaaggatgcctgcgcattgccggccttaacccccggcaaattggcattggggtgaatgggctccgactgatcgcgggctcggcaggcacgcttgagaactcgcgaatatcccgacttgccggacccgttatcgccataaatgacagtcatgcccaccggacctactgccaactgctgattttctgcaattgcgttgacgttacgcagattcttgatggctcgcagctcaatatgcgtgtttgcctcgacctgtgctggaatctgatcggcagttag

SEQ ID NO: 107843 - DNA, 510 bp, Enterobacter aerogenes
atgacgcaactgtccttttcctcgttcgattcctctctgctggtgcgtgacgcgcaggggcgctacctgccggcgtcggtggatcagattcttgatgccgcgcgccaggtcatcgaccagaagaacccacgcgggacgctgttcacttcgccggcgctggtcaaggattacctacggaccaagctgaccagcttcgagcacgaagtcttcgcggtgctgttcctcgataaccagcatcgcctgatcgaatacaccgagatgttccggggcaccatcgacagtgcttcggtatatccgcgagaagtggtcaaggaagccctgcggcttaacgcggcggcggtgatcttttcgcacaaccatcccagcggcaacccggagccaagccgtgccgatgaggccatcaccacgcggctcaaggaggcgctggcgctggtggatgtgcgtgcgctggatcatgtcattgtcgccggaagcgacactgtgtcctttgcggaacgtggcctgatttga

SEQ ID NO: 107844 - DNA, 387 bp, Enterobacter aerogenes
atgaacgacaaatcacatgtttccctcgaacaacacctttgcctagtctgcggcgtggccttcgacaccggcaccatcctgctggacaagcgcctgcgcgcgagtatggagcagcatacggcgacaggctggggcctgtgtcccgagcatcagaagctgtccgacgatggctttgttgcactggttgagtgtgatccgcagcgcagcgtctcgccagcggccagtggccgcgtaaagcccgaacaggcaaaccgcacgggtcgtctggcgcacctgaaacgcgaggtattcgccaaggtgttcaatgcgcctgtcgcggccgatcagccctgcgtcttcgttgagcccggcgtgatcgagcagttgcaggcgatggtcgcgcactga

SEQ ID NO: 107845 - DNA, 300 bp, Enterobacter aerogenes
atgcaatttttccagcgtatagccgcgtcgttccgaacacgacacacatggcatctgcatgaaatgagcgattgggtccttgcgccccttggggccaccgcgttcttgattgctgggtattgggtgatggcggttactcatgtcttgccggatttgatcgctacgacgaatcaaaccgggttgacctgggttggagctgcggcatttacgtttcttggcggcctgggtgtgaccatctggttctacggctgcttggcggcgcgttgccataccatcctgttcgagcgacatttccgctga

SEQ ID NO: 107846 - DNA, 828 bp, Enterobacter aerogenes
atgcaactcgcatcccgcttcgcttcccgttccccgtcgctgcgcagtgactacctgctgtccgacgatcagattcaccgcgtggccccgtccatcttcgcgaacgcgccccatgaaagccgttccgagcggtacgcctatatccccaccgccgtcgtgctggccgagcttcgcaaagagggttttcagcccttcatggtggcgcaaacccgcgtgcgcgatgaaggcaagcgcgagcacaccaagcacatgatccggctgcgccacgccagccagatcaacggcgcggaagccaatgaaatcgtgctgctgaactcgcacgacggcaccagcagctatcagatgctggctggcatgttccgcttcgtgtgcagcaatggccttgtgtgcggcgacatcgtggctgacgtgcgcgtgccgcacaaaggcgacgtgtccgggcacgtcatcgaaggcgcttatgaggtgttgagcggtttcgaccgggtgaaggataaccgcgatgccatgcgcgccgtcacgctggatgaaggcgaagccgaggtgttcgcccgcgctgcacttgccctcaagtacgacgacccggacaagcctgcgcccatcaccgaatcgcaaatcctgatgccgcgccgcttcgacgaccgccgcccggacctgtggagcgtgttcaaccgcacgcaggagaacctgaccaaaggtggcatgtccggacgcagcgccagcggacgccgccagcaaacccgcccgatacagggcattgattccgatgtgcgcctgaatcgtgccctgtggctgctggccgatggcctgcgccaactgaaagcctga

SEQ ID NO: 107847 - DNA, 2049 bp, Enterobacter aerogenes
atgaacgccattacccaagccgaagcccgcatcctcaacgccgccgtgctggaagccgccgacccgaccaagaatctgattctggttccgctgtcgcggttggtatcgcgtcccgcaggccgcaacgtgcgcaagaccccgcggatgtccatccccgaactggccgccagtattgcccgcgtgggcctgctgcaaaaccttatcgtgattgccgccgatggtgagcgttacgaagtcgtcgccggtggccgtcgcctcgccgcattgaagctgctggcgaagaagcgccgcatcagcaaggaatgggaagtaccttgcctgctggtggccgatggcactgcccgcacggccagcctgaccgagaacgtgcagcgtgaagccatgcacccggcagaccagttcgaggcattcgccgcgctggtggcggaaggccgcagcatcgaggcgattgccgccgatttcagcgtcacgccactggtggtgcaacgccgcctgaaactcgccaacgtctcgccgcgcctgctggccgactaccgcgccgaggccgtgacgctcgatcagttgatggcgctggccatcaccgacgaccacgccgcgcaggaaagcgcgttttacgatgcaccaacgtggcagcgccagccatccgcgttgcgcgaccgcctgaccgagcgcgaaatcgacgcccaccggcacccgctggtgcgattcgtcgggctggacacttacgaagcgtcaggtggcggcatccgccgcgacctgttcgcagaaggtgataccggcgtatatctgactgacgccgcgctgctggaacggctggcgcaagacaggctggccgttatcgccaccgaagtaaaggccgaaggctgggcatgggtggatgtcacatctgccatgacccatgccgacctacacgtcttccagcgtgcgccgagggagcgccgcgagccgaccaagcgcgaggctcagcgcatcgaaaagctgcaaatcaagctgcacgaactggcggcagccgtggatgcggcgctggacgccgaggacgaggaaaaggccgatgccttgcaggaagaaggcgaagccctgggtgagcagttgcaggtgctggaagatggcttgctggactacgcggccaacgtgaagaccgcagccggtgccatcgtcgccatcgatcgtaacggcgaggccgtgattcatcgcgggttgcttcgagaagcagaggccaaggcgctgcgcacgttggaacgcttgcggcagggtttcggcagcgacggcgaagccgggaacgacgaggaaggagaggacgaacagcccaagaccgccgccatatccgaccggctggcgcaacgcttgagcgcccaccgcaccgctgcgctgcaaatcgaagtcgcccggcatccacaggtggcgctggcagcgctggtgcatggcatggtgcaaaccgtcttgcaggagaggcactacggccacgacctgccgctgggcatgagtctgcaggtgcaagaccggctggagaacatggccccggacataccggattcacccgccgccgtggcgctacgcgagttgcagcaggtggcaggtgaagccttgccacaggatagtgccgaactgttcgccgtgctgctggcaaagccgcaagatgaactggtgcggctgctggcggtatgcgtggcgtccacggtggatgcggtaacaccccgcgccacacaacaccagcccggtgcggaactggcgcaagccgtggggctggatatggccacatggtggcagccgaccgctgcgggctacttcaagcacgttccgaaggccgcgattctggaagccgtgggtcagttcgccccgtcgcacgtcacgcgactggaaaagttgaagaaggccgacattgccagcgaagcggaacggctggccgatggcaccggctggatgcctgccatgttcaaggccgaaggcagcgcggcgcagagcagcgccacgcaagagggtgagccggaagcaccgcaggaagccgacgcggaggccgacagcgaagcagcggactcactggcggcatga

SEQ ID NO: 107848 - DNA, 756 bp, Enterobacter aerogenes
atgtctgtatctacgttttttgtttccaagtccgctgtgcgcactctcaagcagagtgcgcagcggcatgttcgtggtgtttcttcgtcccacctgagtgaaggcgttgcggcagccttgggcttcaagacccacgctgcgctgcgagccgcgcttgaaggtcgtgcaaccgccgaggcccagagacccagcaatgccaggctggtgcagcgtctgcgccagctaggttatgtctcggtgcctgatgacctccgattgttgccggagttcgagcactcctattcccctttccagaacttcccgctcaggaaagggcgcagtgtgcgttggcgtgcatggcgcaacttgctagtagcggcgatcaatgcaggtctcgaacagcgcttgtttgggctttcaccaggtgagaactggtggcccggcggtgcgccggaaagccatgagtgcgaacgcagcacttaccgcttcatggttgatggagagatagcagcgattgccagtgtgaatgctatcagcggagacgagctttccatcagtgtcattctcaatccccgtaaagctgatatccaaccagaatggtactgcggcttgactgacggcgatgcggtggcgcattgctggctggagcggcgtttgggtgcgtggattcaagacggtggtgagaacttccggtgcaagcgtgtaatacagtcacggctggcagatctgacgattgagccgaatggttattcggatcaaggcagtttcttcatgtag

SEQ ID NO: 107849 - DNA, 315 bp, Enterobacter aerogenes
atggctaacatcggcaccttcaccgcagagaaagacggcttcaccggccagctccgcaccctgaccctgaacgtcaaggtcaaactcgttcccaacgacaagggcgacaacgaaagcgcccctgacttccgcgtgcaggcggcaagctatgacattggcgcggcctggaagaaaaccagcgaagccggacgggagtacctgtccgtgaccctcgacgatccttcgtttccggccacggtctatgcccggctcatcgagggcgagaacggcacgcacgatctcatctggtcgcgcaacaagcctaagacggcctga

SEQ ID NO: 107850 - DNA, 960 bp, Enterobacter aerogenes
atgacggtggaagaaattctgagaaacctacaaatcttatgtaaccagttcatcagtcatgatgacaactgggtttaccttaagaatcaaagtgaattcgtattcgatgtggatcatagttcaccaataaggaaattatatgaagaaggtagaggctgcacatattatttaaagggaagcctcgacacctcatatgtaaacaagtccgtgcttatagatgagtacgtggcgaacgtaaaagcggcaatccttcctgagcatgattacaatgccatcggccaagcggctcaacaagattacgaaaaaaactaccgaacgaattataccgtccaatacatgctcaggcagtattgggatcaatgggaaaccatcaagcgtgtggagcaatttttagaggtattgattgcaagctctgtataccaacctctggttagctcgactcccatgcaggtgattcagcagtatgtaaaacactgggagaaaaatgctcagctccataaggggcttgacgagaactcattgcgctcgcaacttgttctggcacttcagaacgcaggttttgatgccagtgctgaaacgcatgcgtatcaaggacatgctgatattttagtgaacaaacaatccctcagaggcatgatcaataagggctttctgttagtagctgaatgcaaaatatggagaggttccgccgcgctttcagatgcgctgtcgcagttatgccaatatgtaacaccctatgacaatcatgcagcactgattgtctttgtgaccgatggtttttttgttgatatatgtagaaaagctgtgcagtgcctcgttgagcatccatcacgcagaaggcattccgttgtatcagcagactatatcgagtacttcttgataccggttcagaaccaagcatcggaaattccggcaactctgttgttgtgtaacctcacaacacctcgatatacacgttga

SEQ ID NO: 107851 - DNA, 1671 bp, Enterobacter aerogenes
atgatcgccgtaggtgattggcaaccggcggacgggctgacgcttgaacccaatgccttgcgtgccgcacgggaaacggagcgctgtcttgcgctgacagccgggccgggtgcgggtaaaacggaaatgcttgcacagcgcgccgacttcctactacgcacaggaatctgtcgctacccgaaacggatattggctatctcattcaaggtcgatgcctgcaaaaacctgaaggagcgcgtgcaacgtcgttgtggctccgagctggcagctcgtttcgacagctatacctttcatgcttttgccaagcggatcatcgaccgtttccgaccggtgctgaccggacaagatgccctcgacgtcaactaccagatcggcgaccgaagagtgacgcgacggcagatcgaattcagcgatctagtgcctttggctatccagatcctcaatacatccgttgcggcccgcaacgccgtccgtcagacctacagcgatgtctttctggacgaattccaggattgcaccgaccagcaatacgcgctggtaaagctcgcattccagggctcgggtatccgcctgacggcagtcggtgacaccaagcaaaagataatgggatgggctggtgccctcgacggcatcttccaaaccttcgcagcggactttgctgctgaaccacttaatatgtatcgcaacttccgttctaagcctcgcctactacgtatgcagaacgaaatcatcaaggtgatggacgccacttccgtcatgcccgatgaacaactcacaggcgaggaaggtcagatattcgcgcggcgatttccgaacagtcaggaagaagccgaatacctggcggattcaatcagcacatggatcaaccatgagcagctcccaccttcggaaatcgcgatcctgatcgtccggcaacctgatctctatggcgaccacctgagccaggcgttggagcagcggcgcatcccctttcgcaatgagcaacaactccaggacatctctgccgaaccagccgcaagacttgtcgttgattatctgtccattctttatggacagcgcgaacccaaagcctggattcgattgatggcacagctcattcctttcgctgatgacgatgtacagtccagcctgcgacaggacttccagaactttattgctgggcagcggaaaagtgcagcacaagtcgccctattggatgacccattcatgggctggtgggattttgttcgcgccctcatgaacaaagtgggcatcgaaactctgtctgcactttcccatgattacgagtcaaaagcgcgactagtccaagtcgtcaacgacaccaagacacgtatagacgaactgctaaagtcggaacccaatttgcccaaggcattggagcgtttttccgatgatcaggctgtgcgtcttttgactatccacaagagcaaggggctagaattcgatacggttgtcattctcggtgttgaagaccagtccttctggggggaggaggatgcggagcgttgtgctttttttgtcggcatttcccgggctaagaaacggctgttgttgaccgtcagtgatcgccgagacaccccaccatccaatcctcgcaggtggaaggaaaacagaacgcctcactcggagtttttaggctatgccatgccttttctcagccctgatcggtag

SEQ ID NO: 107852 - DNA, 1905 bp, Enterobacter aerogenes
atgaaactgcaaagtatccgactgtccagctttcagtcgtttgggccagagcctaccgaactgcccctcaacgacattacctatctgatcggcccgaacggttcaggcaagacggcagcacttcaggcgttgtgtcgcttgtttgccttcgatccctcactgcggcgcattcggcggtcggacttccacgttccctatgatgaacaggaagctcctgaagaaaggcaactctggatcgaagccgactttatctttcccgaacttgaagatgacgatgatgtcgcgacgatagctccccactttggccatatgcggttggactccgccgatagccatcctcgtgtccggtatcgcctcgacgccacgatgggagtgaatggtgacatcgaggaaacactggttcatgtactggacctcaataccgatggttctcctctcacgaccgcacaggttacgcgagcggaacgcaactatgtacaagttcactacctacctgcacgacgagatcccgccgatcacatcgcttacagcgccaatgctctgctcggccgtatgctgcgagccgtaaactgggagaatgagcgagaagaaatcaaagacttcacagacaaaatcagcgaaagcctcgcgggcaatccatcaatcgcaactctgagcgagagcctgaagacaacctggagcaccttgcacaaaggcagtttcttcgctgaccctcaagtcaccttcgtcgcatccgagattgaagccttattgcgacatctgtccgtttcattttctcctgggcatgacgaggaattggtcgatttctccaggctaagtgatggccagaagtccatgctctatctgtcactggtgctttcggcgcagtcaatcgggcgtgcagtccttgccggtgacgacgataccttcgacccggacaagttgcgccccccggtgttcacgattgttgctcttgaggagcccgagaatagtctctcgccccactatctgggacgaatcgtgaatgctctggtcaccatgacgggtaacgaggatgcccaggccctgatcgccacgcatgctccctccatgctgcggcgagtcaaccccaggcacatccgctacttgcggctcaccagcgagcgaatcaccaaggccacgcgcattcgcttgccgaaaaagaccgatgaagcccacaagtttgttcgcgaagccgtgcaggcatatcccgaaatctacttttcccggcttgtcattcttggagaaggtgatagcgaggaaatcgttctgccccgtatcctgcgggccaaaggtattccagtcgatgagtctgctgtaactgtcgcgcccttgggcggtcgccatgtcaatcacttctggcgcctgctctcggccctcgaaatcccctatcttactttgcttgatttggatgtcgcccgatatcaaggaggatgggggaggttcaaatatgccaatgaccagctattggcataccgccccgaagatgttttgcctaaagatcacaatattcccatctggaactcagacaaatataaggttcgacagtaccctggctatatcgaagcctttgaagagcgcggcgtcttcttctcctatccgatggacctcgacttcgcgatgttgctctcgtttcccgatgagtatggtgtcgagtctaatccgccgagcgaggccacagtcaaagccgtcctcggcgacagccacttcgacgcggaacagtacgatggcggtgagcgtgcgcttttcggcacctatcacaagcgtttcaagctaggtagcaagccagcggcccatattgatgcactggcccagttgagtgacgaagaacttctcgacgacatgcccgaatcactggtgcgactagcggacgcggtgatcgccgagctggaggaattgcctgaatga

SEQ ID NO: 107853 - DNA, 354 bp, Enterobacter aerogenes
atgggctgtcatcttggtttttgtggggaaaccaagttggcagaaacgaaacactcattagcggcggcaatacggacggtcaggaaggcgcggggcttgagccaggaagcgttctccgacgtgtccagtcgtacctatatgagttcgctggagcgcgacttgaaaagcccgactatcaacaagctggccgagctgtgcgaggtcatgggggttcacccgctcacgctgctgacattggcgtatgccggcagtgatcaaaccaagattgatcgactgcttgttcaggttcggcaggagttatgtggaatcatcgaagttgacgaagagggggagtcttcgtcaaaaagtgagtga

SEQ ID NO: 107854 - DNA, 351 bp, Enterobacter aerogenes
atgacccagccgctcatcaccactgaacagcgcgcgcaactgctggcgatcggcgaagcgcgtgctaccggccaggtgatcgacccactgccggtggttcggctgttcactcctgacgcgcacgcgacctggttgctggtgtccctcgaccctgcggacggtgacacggcttatgggctgatcgaccttggtatcgggatgccagcgctggggacggtcaggctgtcagacctgtcaggcatcgttggcccgcgcaagctgccggtgagacgggatcggtatttccaggcggtgcgcccgctgtcggagtatgttcggctggcgcagctcaatggctcgatcacggactga

SEQ ID NO: 107855 - DNA, 1173 bp, Enterobacter aerogenes
atgactgaaccgagcgccgcacactggtatccgaccgccgcgtatctctacacgctgcacctcgatggtcctgcgctggcctgggagtacctgcgcaggcatcccgactaccggctcgactggcagcgccgtcgccgctggccgcaggcgtcgcaccgctggggcttgcgcctgctggagaacccggcactggacgcacgcgatgcgcatcctgtctggtttcccgaccacgatgccctggtgcagctctatcccgacgctgatccgccacccggtgccgatgctttcgcgttctggcgcatccccggccacaagcacctgatccacgatggccaccgcttggtactggtgtcacgctggccgggcagctacctgcgacttgcgctggcgcccggcctggaagagggaatggcctacctctacgccgtccgtgcctgtgcgacgtcttgcgcgtgttgtcgggcgctggcggttgagctggacaagctggaggccgtcgctgaggccacgcctgcagcggctgcccactcccggcctgcacctaccgagctgttggagttgcacacgctccaggcgctcgacgcgatcctggcgggtgcctccctgcgcgaagtggccgaggggctgttcggtgccgatgccgtcacggccgactggcacgctgacagtgctttgcgcgcgcgttcgtcgcttggtgcgccgtggcaatgcgctgatgcacggcggctatcggcgcctggcacagcttccgtcacttccatcgtaattggggggacgtttcgccccccctgcaaaacgtccctgagcaagcgcctcgtctttcttgagactgcctccatccggccgcactggtgccgccggctttaccgaccgatggaggtacatctcatgcgacccgctcccttgcggcctgccgccgctaccgtcgctgcgcctgcgcagccccaacgctacctgaccaacgacgaagccgccgagtacctgcgcctgtcgccgcgcacgctggagaaacagcgcgtgatcggtggtggcccgaagttccgcaagttcggtcgccgcgtcatgtatgcggtgtccgacctggacgcctgggccgaccagcacagctatgaggccacatccgaccccgaatacgctgagcgtcatgcgggcgactaccgtgatggtcgctga

SEQ ID NO: 107856 - DNA, 858 bp, Enterobacter aerogenes
atgtccagcccatcgttgcctgtccagcagcgatccgcgccgcagcgggaacagctcgatctgttccgtgcgctgccgggcgaggacatcgcgccgcgcgacgcccaggacttgatggcctatccgttcttctcgctggcgaagtcgcggcgcacagcgccgatcgacttccgtgccggcaacatcaccatccgagtggagggaaccgccgagcacggtatagcgaccatctgggacgcggacgtgctgatctgggccgccagccagatcgtggaagcccgcgatgcgggcatccaaccctcacgcaggatgcaggctacgccctacgagatcctgcgcttcatcggacgcggaacgtcactacgcgactaccagcgcctcaaagccgcgctggatcgcctgcaatcgaccacggtagccacttccatccgcgaaaccacgggaaggcggctgcaccgcttctcgtggatcaacgagtggaaagagctggcggacgccaacggcacaccgctgggtatcgaactgattctgccggactggttctacgcgggcgtggtggactcagcgctggtactgaccatcgaccggacgtacttccggctgaccggcggtatcgagcgctggctgtatcggctggtgcgcaagcacggcggctggcaggaacatggctggcagttcgactttccgtacctgcaccgcaagtctggcagccttgccaagtcttacgacttcgcctgcgacctgcgtgctttggtggcgcggcagtcgctgccgggttaccggctggctatcaaacgactgcctggcgaaccggaaatcctcatgttccggcccgtgccgcaaacggcacggggataa

SEQ ID NO: 107857 - DNA, 639 bp, Enterobacter aerogenes
atgatcgtcgcgctgctcaaccagaaaggcggagtgggcaagaccacacttgcgacccacatcgcaggtgaactggcactgcgtggccagcacgtcgtgctgttggacgccgacccgcaggggtcatcgctggactggacactgcgcagaagccagcagggattgccccggctgttcagcgccgtgggcctcgcccgcgaaacgctgcaccaggaagcgccagaactcgctcgccgcgccgatcacgtcattattgacggtccgccgcgcatcgcagccttggcgcgctcagcgctactggcggccgaacgtgtgctgatccccgtgcagcccagcccctacgacctgtgggccagcgcggagatggtttcactcatccgcgaggcgcaggtattccggccgcagctcgcagcggccttcgtcatcaaccggcgcgtcagcaccaccatcatcggccgtgaggcgcggcaatcgctggccgaacagccgctgccggcactgcgctcggaagtgcatcaacgcattgtcttcgccgacagtgtggccgccggccggctcgcccgtgagacggcgcccgatagcgccgccgcgcgcgagatcgccgcgctcaccgatgagctactgcggtggacgacatga

SEQ ID NO: 107858 - DNA, 255 bp, Enterobacter aerogenes
atgagcggcgcacgcaataagcgcgtcggcatcggtgcgcgtccacccgcgaatccacacgccgaggcgtggattcgccagggcgacgccgacggcatccagaaaagcgacctctacaccgcgcgtctgaccctcgacattacgcccgccatgcgggcgcgtatcaaggtatcggccttcacgcagggcgtgaccgtggccaaactgctgcgcggtctgctggagcgggagtttcccccggagaacacaccatga

SEQ ID NO: 107859 - DNA, 546 bp, Enterobacter aerogenes
atgaccgcatccgtttcacccgctgcgaacgcggccccggcggcgccgctgccatcgctagcggtactcgccggcaagaccgggagcgtgccactgacgcgcgtttcgctggcctacctcgaacatcgcttcaagctctacctgcgtttcggcgaacctgcgcgcatcgtccggctcgaccgctggcggcgctgcgcggtgttcctgccgggtgccatcttctgccgcatccgctggcaggccaatgactacgggacgacccgctggcagctcatggtgatgcaggcttgcacaccactggacgcggcgcagcgcatccctggcgtgcggcccggcgcgcgcctgctgctgcacaccgagggcgatgccagtgtgcgtgccgtactggagcgcatcgacgccatcgaggcgctgagtatcgccgccatcgatgtgtcgcccgcgtacttgcgcacgctgggcaaccgtctcgcggcgcgctcgccactgcccgaatacaccgccgagcggcacgccgcctggctggccgcgaggactctgccatga

SEQ ID NO: 107860 - DNA, 600 bp, Enterobacter aerogenes
atgacgatcccatccacctcggccaacacgcccgctgttccgctgcgtccacgttcgcgcctgcgcgctcgtattctgctcgctagcctgtccatctgcggcctcgctgcgctggcctgggcggctttcgtgcatccgctgccgcgcctgatctacaacccatccaacagcgttccggtcggctggtatcgtgtcgaaccgctcgattatcgacccgactcgatgtctcgtgcgttgtcagtgggcagcatcgtgctggtgcctctgccgtccgatgccgccgtcctggctgcacagcgtggctacctgccgctgcgcgttccactgctcaaacgtgtgggtgctgtcgcgccgcaacacatctgcatcgtcgctggtcaggtgcgcatagacggcgtgccggtggccgctgtgctgcctgccgaccggctgggccggccgctgccatcctggcggccatgccgccgccttgagcccggcgagctgttcctgttgagcacgaccaacccggcatcgttcgacagccgctacttcggaccggtcagcgcatccgccgtgatcggcgtcgcgcatccgctctggttggaggcacgcccatga

SEQ ID NO: 107861 - DNA, 486 bp, Enterobacter aerogenes
gtgcgaagcacgcggacataccaggattggcgcgaacttcgcgccccacgcggcacggcggcgaagacgctccgtgccgcgttccccccatgtgcagactggctttgcaggcggccgagtgccgcacccttttgtcttgccttccgcctttgcccttcgcttccgctccgggcagcgtcggcccggcggcgctgtgctgcaggcagcccgctcgccggcgaacgcgccaatggccagaggccgggcgcgttcgaggcaagacgtctgcacgttggaaggcaatgcgcagtgcggcgcggatgcgttcgcactgtgctcacgatggcacggccagcaccgaaacatctgccagcagaacgacatgcccgatggcacgaggagatgcacggcaacgtgcagcgaatcagcggccatcatgggcgtgcctccaaccagagcggatgcgcgacgccgatcacggcggatgcgctgaccggtccgaagtag

SEQ ID NO: 107862 - DNA, 1986 bp, Enterobacter aerogenes
atgacagatcgccgcgacgacgttttcagggtgcgccccagcggcccgaagaaccggggcaagggccaagggcagagcttcgtttccaaggtgctcaagcagaccggtaaggtcaacggcggcaagtcgtcggcgcgccgttccgccacggtcggaagcaagggccagcgtcccggttcgcgcctggggcgcggccatacggcagcgcgcttcgcaggcgcaaagctgacgcccctgtcccggcgggtgaccatcaagaccctgctggtcaatcagcgcaacgccagcccgcagtcactcgccaagcacctgcgctacgtcgagcgtgacggcgtgggtcgcgatggtgagccaggccaagcctacggcccgcagaccgatgccgccgacctcgacgccttcaaggaacgctgcgccgacgaccggcaccatttccgcttcatcatctccccggaggatggcgccgaactggatgacctgcgcacctacacccggcacctgatgggacgcatggaggccgacctgggcacgcggctggattgggtggcggtcgatcactggaacaccgacaacccgcatacccacctgatcgtgtgcgggcgcgacgacaccggcaaagaccttatcatcgcgggcgactacatcgcccacggcttccggcaccgggccaccgaactggcgaccgaatggctcggcccgcgcaccgaactggagatccagcagaccttgcaacgcgaggtggaacaggagcgatggacgagcctggatcgcacgctgcagcgagagaccggcgaagctggccgggtgcagatcgaacgcttcaacgaaccgaagctgcaacgccaacgcctgctgctgatcggccggctgcaacgcttgcagcggctgagcctcgccgatgaggtacggcccggcacctgggccattcatgccgataccgagaagaccctgcgcgcccagggcgagcgcggcgacatcatccgtaccatgcaacgagccatgagcgggcagccgcgcgagctggcggtgttcgagccaggagacgacggccgcagcatcgtcgggcgcgtggccgcgaaggggctggccgacgagctgcacgaccggggctatctggtcatcgacggcgtggacggcaaggctcactacgtcgcactgaacgcccgcgacgagctggcgaactatcccacgggcgcggtggtggaggtgaagggttcggccgacgtgcgagcgtccgacaaaaacatcgccgcgctggcgagcgatggcctgtaccgcaccaatcatcacctggccatcgaacagggccgggccacgcccggacgcgacccgcaggaagtcgtcgccgcccacgtccggcggctggaagccctgcgccgggccggcatcgtggagcgtgtggccgaagggttatggaaggtgccggacgacctagccgagcgtggccgccagtacgacgcgcagcgcctgggaggcgtggcggtggaactgaaatcgcacctgcccatcgagcggcaggcccgcgtcatcggcgcgacctggctggatcagcaattgatcggcggcggccgtgggctgggcgacctgggctttggtggcgacgccaagcaggcgatgcagcagcgcgccgacttcctggccgaacaggggctggccgagcgacgcgggcagcgcgtgatcctcgcccgcaacctgctgggcacgctgcgcaatcgggaactggcgcaggccgccaaggacattgccgccgaaacaggactagagcatcgaccggtgtccgatggacagcgtgtagctggcatctaccggcgttccgtcacgctttccagcgggcgctacgcggtgcttgacgatggcattaggttctcgctgttgccgtggaagtctgaaattgagctgcggttaggcttacacgttgcagccacagcctatggcgacatggtgtcttggagtctgaccagaacgccgagtcgctcaatcggctga

SEQ ID NO: 107863 - DNA, 747 bp, Enterobacter aerogenes
atgaggcttaaaaataaaatcgcattaatcaccggaggcaccagtgggattggtctcgcaaccgctaaactcttcctggccgaaggtgctcgtgtggcggttactggccgcgatgattccgtgtttgaccgtgtaaaagccgaactcggcgagaacgcgatcgttctcaaaggtgatgttaggtcgattactgacatgcaagcggttgctgttcagatgaaggagaaatttggcggcttggacgtagtgtttgcaaacgcgggacgagcatttccatcacctgtcaatgacatctcggaggaactttataacgagatcatggacatcaacgtcaaaggagttgtgcttacactccaggcaacactgccaatcttgcgagaaggttcttcatttattctgaatacctcgtttactgcgcaaactggtaagcatggcatctcgttgactgcagcagcgaaggcagccgtgcgatcactagcacgtagctggtcctacgagtttctggaccggaaaattcggtttaatgccatcgctccaggcgcaacggacacacctttgattagcaaatgggggttgtctgaagaggtggtgagaaacatcaagcaggaactggcgaaaacggttccggttggtcacatgggtaaggcagaggatattgcatacgctgcgctttaccttgccagtgacgagtcgtcatatgtcgtcggcactgaacttgttgttgatggcggagcctcgcagctttaa

SEQ ID NO: 107864 - DNA, 870 bp, Enterobacter aerogenes
atgagcaatgatggaaaaattaacgactctcgcaaagagccgagtggagcaggttattcccggcgtgacgccttaaggttaggaggtatggccgcgatcggcgcagtcgttgctggcggagtgttactgggaaatgccgctccagcgtttgcgcaggttggtaacacaggaaaactttccccaacaggtatactttcccccaatgaaactctcgatattctgattgtaaattacgacggcggcacgcttctcgatttcgccggccccagcgagatttttcaccggctaccaaatactaacgttaggtatgcgagcctgaatggaggcaacgtgaccctcgaattcggagtcgtgtatggcaataccgaacgactggccgatattgagaagactgacttaattctggttcctggcggggctgacttatcggctccgatgcaacccgagtacctagcacagattcggcgtttggctgaaggtgctaagcacattacgtcggtttgcaacgggtcgctcgtgctcgccgcagcgggcattctcaaaggcaagcgcagtgcctgccattgggcatttatcaataaactgtctgaatatggtgcaattccggttccagatcgcttcgtagaagacgacaacggccgattcatgagcggtggtggtgtaactgctggcatcgacttcgcaattcgcgtggccgcgaagttgcgtggtcaagaggccgccgagttcacacaattgctgattgaatacgatcccgctccgccataccacggtcatccaagagatgcgcggccggagatagttgcaatggtcgacaaatatctacccaacgcatctaaggggttagcagttattcctggcgttcgctga

SEQ ID NO: 107865 - DNA, 474 bp, Enterobacter aerogenes
atgcgcagggttcatctattccatctactcattgcggcagttgtagtttgtgtttccacttttattttcatcaaacctacgtttgcaaatgacctaacgccccaaaccgaagctgccatcaaggctgagaacgcccggtgggcagaagcatatgcccgtggtgattatgaggcgataggtcgcctctatacgaaaaatggcacgcttttgcctccaggtggcaaccgaatcgtcggggcctcagaaattgtaaactttttcaccaaagcgtcatctgaaacacagcctgatacggtgtctttcagcaattacgaattctacggtaacgatcaggtcgttactgaggtgtcggatactgatattcgtgatcccagtgggaagcttaaataccgtggcaagcagatacttatctttttgaaacagggcgaaacttggaagctgcatcgcgacatctggaatgaatctgctccataa

SEQ ID NO: 107866 - DNA, 762 bp, Enterobacter aerogenes
atgaccagcgcagaagttgaaccaagtgccttttatgtagataaacatacaaaaatctctgaagaaaggcacttgagaattggtgctttaatttttccggatatggatcagtgtgatttcacaggtccttttgaagtgctatcgcgcattccaaactcgactttctatactctttggaaagacaaaggcattgttcaggatatgcggggcctgcaactgctgccagatacgcccctcgaagaagcacctccgctcgatgtgttacttgttccaggaggatatggacaagaacaaattgccaccgaccagaaagttctcgcatttattcgcaagcaagccaagcatgccttgtatgtgttttcggtttgtaccggtactctcctttgcggcgccgctggtttgcttcatggtcgaagagcaacgactcattggactgcgatggaagccttaccgttatatggggtaatgcccagcgatgaccgtgtcgttattgacggtcgtttcgtgagtgcagggggggttacttcgggcattgatggggctcttgttcttgctgcgcttcttcgcggtgatcagatagctcaagaactccaactctacatggcgtacgacccacaaccgccttttgattcaggatcgcctatgaaggcccccgcagatgttttgagcattgtccgcgcacgagcacaaggaatcactgaacaacgcatgatcagtgctcgaaattacgctaccgcatgctttttaaagagaggagattaa

SEQ ID NO: 107867 - DNA, 987 bp, Enterobacter aerogenes
gtgaatatcctcgttactggaggcaccggcttactgggtaatcgcttgattcctgttctagcagctggccatcaagtatttgctcttgcgcgctcggcatcggctcgtgaaaaagtacaacacctgggcgcacagccgatcgatggcgatttggaaagcagcgcgccactggtactgccggcgcttgatgctgtggtgcatgcagcggcgctgtttcgattctcagggccgcctgagccaatttttcgtaccaatgtggatggaacagcaaagttgctggcggcagcagagagagttggggctgcatattttattcacataagcgcggcaggcgtcatcatggacgaatccggctcccccgtccgcaatgcagatgagagtgctcggatttatacacggcatttttccgcgtacctagcgagcaaggcacaggccgagcaaatggtgctgaccgctaacaaaccgacttttcgtactattgctctacgtccgccggcgctctgggggccgggagatccattcagccgcgagattcctcacgcgattcagtcaggccgatttgcctttatcgatcgcggcaactatgcgttctctacttgtcacgtggacaacgtcgtcgaagcagttcagtgtgctcttgaacgcggcgagggggggcgcgcttactttatttccgatcagcaggtgcaaaccttccgtaagttcgtcgcgtccattgccagcgtgcaagatctgtccgtcgaggaattgcgttcgatgcctttttggctggcgtcgatcgctggacggttgatagacatcatttgggctattctccgcagagacgatgatccgccgttatcccgttctatggtgcgcatgatcgggaaagagtttagcgtgagcgatgctgctgcccgacgggagctgggctatgttggcatgacctcacgggatgagggattattgagatatggacaatctcatcctaagagcattccactttga

SEQ ID NO: 107868 - DNA, 948 bp, Enterobacter aerogenes
atgcatcgagttggattttttatttgccatggttacgaagctcttgatcttgcaggccctctttcggctttcaatcaagtagccacagccgttgctcgcagcccatatgaacttcatgtaatttcgcagtctggagggcatgtcatcggtaatgcgggctttccgattgagacaaagccgatcggaaatcttgcgtttgacaccgtagtgttcgtgggtggagatattgaccaaatacagaccccagagaatatcaccgcggccaaacaactgagtgccagtgcctcgcgagtcgcaagcgtttgtacaggggcatttttgcttgcagaaaccggcttgttggacgggcgaaaggtaacgactcactggcgctatatttctcaattgcagtcacgctttcctcgtgttaaggccgaaggcgatagcatatacattgaggatgggcgcgtttggacatctgcaggcatcgccgccggaatagacttaactttggctatgattgagaaagatatggggtcggaaattgcccgcaatgtttccaggctcttggtcgttccgtatcgacgaccgggagggcagtcacaattctctgcgatgtctcaaatggaacctgagtcggatcgtatacgcattgctctaaattttgcccgagaacatttggctgaaacattgcctgtcgagcggcttgctgatgtggcaaatttaagtctgcgacaatttggacgagtatttcgccgagaaactggcgaaacacctgccaaagcagtcgagcgtttgcgcgttgaagctgcacgactgcgtctacagaatggtagtgaaccaatcgaacaggtcgctctagctgtgggattcatcgatccagagcgaatgcggagagcctttgttaaactgtatggacatccaccacagtcagttcgtcgagagagtagacttgttcgcagctattga

SEQ ID NO: 107869 - DNA, 420 bp, Enterobacter aerogenes
atgaccaagaaggtgcttgaaatgcccgctgaccatccgatgtttgcagctactcacaagggctatgatgactatgggtattcgccagctgttcgaactggaaacttgctcttcattgctggcgaagtaggctttcgatccgatggttcaattccggatagcgtggccgagcagacagaatttgccttggagagaacaaaggaaatcttacgtctgcacgggcttacgatggccgatctcgttgatgtggtgagctatcatgtcaatcttaaggatacgattgatgagttcttaccagtcaaggctcgctatatagagcgcccattccctgcttggtcaatcattggggtggagtcactagctcttccccaactcaagattgaaattcgaagtgttgctgcttttgcagaaggcaagtga

SEQ ID NO: 107870 - DNA, 675 bp, Enterobacter aerogenes
atggaacttcgacatttgcgttattttcaagcagtagccgacgagcttcacttctctcgtgcggcagaaaaactgcatattgaacaatcgccattgtcgcgagccatcaaggagctggaagaagaacttggagttgtcttgttcgcacgcactacaagaagcacgcgcctgactcgtgctggcaagctgtttcttgagcatgttccgcgtgtttttgcagccttgcagcaagctcgcgacagtgtgaaagcagcggccaatggcttccatggccagttgcgtatcgccttatccgatggcatcacgccgtcccggctggctgccttgctggcgctttgtcggcaggaagaacccgaagtcgaaatccgattcttcgaggtgccaatatcgcagcagatcaggggcctgaatgaagacctatacgatgtgggttttgcccagtccgacgaggtgggtgatggcatcactgccatgccagcctggagcgatgcgcttatggtggcagtacccgcacggcatccgctgcttgcccacaagcgtattccgcttgacgaactgttgcgctatccgctggcatgtgaaagtcatgccaagcatgttgaccgggtgctgcgtcgagcggagatggagccgctgatgggggttgagggccattcgtgtaaaaaaccacgctaa

SEQ ID NO: 107871 - DNA, 1752 bp, Enterobacter aerogenes
atgcgtaatttcagaagccgtgatttgttatcatatctctggccaaaggacattccagggctccgtcgtgcaattacctgctctctactatgcttggttaccgcgaaagttattacttcatttataccgcttatctataaggctttggttgaccatttcaacagtgataatgcgctcgtatctgtacccgttgggataattttcgcctacggtggtgcaagattaatgagcaccatttttgatgaattacgcaatattctgtttgttcgggtgagcggaaatgccacacgccagatagggttacgggtgtttcgtcagttgcatctgctcagcttgagatttcaccttgatcgcagaacaggtggcctttcgcgggttatagaacgggggacacagggaatttcagtcattttatcgagagtccttttttcacttgtgcctatagttctggaagttacgattgtttgtacaatcctctggtatcatttcggttctggattcagcctggttacgctgggcacagtaatagtgtatgcgggcttcaccattttgatgagtgcctggcgtacccggttccgccagcaactgaatgagaccagcgctgaagcaagcagccgatcaatagacagcctcctgaattacgaaaccgtcaaatatttcggtaacgaggaacatgaggtccaacgactcgattattctttgcgccagcacgagcaggcctctgtcagaaatgaatcgacattttctttcctgagcatcgggcagacttttatcatctcatctggtctgattacccttatgcttatggctgcccgtggaataagtaccggtaacatgagtcctggcgatcttgtaatgattaatgcctatattctgcaactctatcagccgttaaatttcttcggactcatgtatcgtgaaattcgtcaggctcttgtcgatatggagggtatgtttaatcttctgaataccgaagtggaagtcactgactccgcaggagcctgtaaacttgataacgtttctggtcagattgagtttgataatgtccagtttagctatgatggatgtcggcagattcttaatggaataagcttcactattccagcaggtaagactgtcgctgttgtgggagcaacaggggcaggtaaatcaacgctttcaagacttatgtatcggttctttgacgtaacaggaggcgctgttcgcatagatggtcaagatataagagatgtcactcaatcatctctccgctcctcaattggtattgttcctcaggacactgtcctctttaacgatactatcagatacaacattgcctatggcagacctggagctacacaggaggatattgaaatggccgccagatccgcccggatagatcaatttatccggagcctgccagatggctatgaaagtcgggtcggagagcgggggctgaagctttctggtggggagaaacagagagtggcaattgccagagctatcctcaaacaccctcagatcatgatatttgacgaggctaccagcgcacttgatacggcaactgaacatgagattcagaccagccttcatgaaattagcctgaaccaaacaaccatgattattgcccaccgactttcaacggtggtggacgctgatgaaattctggttcttaaagatggtcaaattattgagaagggatcccatagagtgttgcttgaagccaatgggcattacgccttgatgtggaaatcccagtccagagaggggtaa

SEQ ID NO: 107872 - DNA, 552 bp, Enterobacter aerogenes
atggcgttactgggctatgccagggtattaaccagtcaccagaagctgacgctccaggtggctgaactgaaaaattccggtgtgcgggaggacaggatctttaccgacatgatgaccggggccactgaggaacgggaagggttacagcggctgcttggtcgggctgaaaaagatgacatcatcatctgtacaacaatggaccgactcgggcgcaatacagccgatatgatccacattgtagacacctgctataagaaggggattgccattcgttttctggaaaatggactcagtacggaaggcactatggggaaaatggtcattcagatcctggctgctgtggcagaagccgagcgtgagcgcattctggaacgaaccaatgacggacgggttgctgcaatggcctcaggtgttcgatttggaaggaagcctcatcctgcgactgcttctgctctgactctgattaaacagggtgcttcatttaaggctgtattggagaaaacgggtatatcgagaccgacatatttccgactgaaaaaaaaagtgctgtga

SEQ ID NO: 107873 - DNA, 339 bp, Enterobacter aerogenes
atgaactatctccttagcgtggttttttacacggttgaccctcaaaccccgtggccggcactgaggtactatgcagatgatggctgggctgaggcagacaataacatcgctgaaaatacgctgcggatggtcagtctgggaagaaagaactggctgttcttcggctcagaccacggtggtgtgcgtggagcgttgctgtacagtctgatcgggacgtgcaaactgaacggcgtggaaccagaaagctaccttcgccatgtccttgatattatagcagactggccggtcaatcgggtgagtgaactgctcccctggcgcgtggcactgccaactgaataa

SEQ ID NO: 107874 - DNA, 537 bp, Enterobacter aerogenes
atgagaaaaccacagcaaaccttcgaccttgaaattgctgacgattataaattggcgtcagtcctggagcgtgatcgggcggactttgaatcgacaaatatctggttttacgttggtgctgattaccgggatagtcgttttgcaaaggtcggaatcacgatgggagacttaaggtctcgttcttacagcacaagcaatcctaattattacctgttctgcggttttcagtgcaaacatgatacaaccagggcagatcttaagaacattgaacgcgatgttttaagctatctagacgaatactacccaaatcgcgccccccacagagagtcgcgacgcctatcagaatgtttttatgatattaattttgaagctttttttgtcgatgttcatcaatacctgcatgacaagcactataagcactttcagattatgggtttcccagatggagagagttatgcgctgtcatggctgttcaatagctgcttaccatcttcagtggtaaatcatttcctaaacgctattaggcagtttagctaa

SEQ ID NO: 107875 - DNA, 279 bp, Enterobacter aerogenes
atgaaaccagacattcgtgaggctccgataaacatccgggcgaaaacatctcaacgcgatcttatcgacatggccgcaaatcttgtatctaaatcacgtactgattttatgctggaagtggcctgccgcgaagcgcaggacatcttgttagatcagcgcttgtttctgctggatgataagcagtttaacgcgtttgtcgaagagcttgacgcccctatgaccccagagcgtcaggcgcgtattgataacctgatgaaccgcaaatcaccatgggaatga

SEQ ID NO: 107876 - DNA, 477 bp, Enterobacter aerogenes
atgaggcctccggaacctcttacccctgaacacaacattgctgatttttgttgtcaggatcaggttctttctgagtggttgaagaaaaaggcgctgaagaaccatagcacgggcctttcaagagttttcgtcgtctgtgctgaaaatacgaatagggtaattgcgtactactgtttggcatccggaagcgtgcacagaaacaccgtacccggagcataccgtcgtaatgcaccagaggctttaccggtcattgttctgggaaggcttgcggttgacgctgcctgggcaagaaaagggctgggagctgcactgcttaaggatgcgatataccgaacacaacatattgcaatacaggttggtgttagggcgcttcttgttcacgccttaaatgatgaagttagggaattttacacaaagtttggattcgagccctccattgccaatgcgctgacattattatttccgatcaaaacttga

SEQ ID NO: 107877 - DNA, 237 bp, Enterobacter aerogenes
atgggactccagttaattgtaaaagcagattatcagaagatagagaaagagctgggggatctgatatcagaatgcgaagttttccctgtggcagaaggcctttttggtctcgcaatttctgagcacaccctttcatctcagggggaagatgccgtgctaagcaaactcgaacgactgaagcgttttgacctctggcagggttcctggcaaacagccagacgacgctggctctggtga

SEQ ID NO: 107878 - DNA, 189 bp, Enterobacter aerogenes
atggcaaatcttaaaacaaaaaatagtatcagaaggcaactacgttggctaagaaatcttcgtgagtattgtttagatgatagggaaattgttagatttttgagcaacgaaatccgtgtattagagaagttactagatgatattgtaatggaagaatacaacccattgtcaacacgctttgataaatga

SEQ ID NO: 107879 - DNA, 483 bp, Enterobacter aerogenes
atgaaaaaaaataattcaataatattattttccacatctttaatattcatactttcagttattgctgggaaactaattatgtccggcattaataaatacagagaaacacattttagttgcgatgctaatgttgtcgtgcttaataaaaataataaattaaccatgataaccacttatttctttgagggtgatcatggatttgttataatcaaaggtaacctaaatcacgatgataaaacctataacgttagtagaaaagctttgttttccatagagaaactgcaaacggttttaagtttgaattctacacacgttgatatatcgccaggagataatgcacccagcgagttaatagaacaaatacttccttcatttttttataaaacaaacaagacatttgaatatagtatttatcctcgaggatgggatggtctggttttttcaacaggttatataccattattttattgccatcgtttttaa

SEQ ID NO: 107880 - DNA, 276 bp, Enterobacter aerogenes
atgtatccgggcaggcaggccagcaacctgagtgaaagcgataaacagctcgtcagtaatctggcgaccaccgcctcgggatttgcgggtaatatagtcgggggtgactcgcagagcgcaacaacgggtgcacagtccggtaagaacgcggttgagaataactcgctgagcaaggataagatctttgacataaacccgatgctgaaagtcgggattgaaggtgcagatggcgatccgctgaaaggcggtggtgggattgtaagcacatctgtttaa

SEQ ID NO: 107881 - DNA, 387 bp, Enterobacter aerogenes
atgattacttttcgaaaattgatcgggaatatcaacgtgacgaaagaaccagatcaacaatcaccgcttgagctctggttcgaacgtattattgatgtgcctattgaagagttgccagtggaagatctttgtcgtgctattcgacaggaactatttattgaccagttgatgccaagggtgttggaagttctgactgaagaaccgttggcgggtgagtattacgatggtgaactaatagcagccctatcgacaataaaaggaaatgatctaaaagatcagaaaggtacttttgtccaaataaggcaacttataaaccagatatctccctcagatatcaatgatgacctgagaaaagatatattaaaaatcaaccaaataacggtataa

SEQ ID NO: 107882 - DNA, 234 bp, Enterobacter aerogenes
atggcatcagccctggacaagaagctgaaggaaatgaaggaggcgctggataaagcgacccagtgttccttcgggcgggcctgttcagcggatgatgcagagcagacagaggggccgaatgcgggcaggaacctgacggatgcggagaaggctgaactgggggagctggctcaggaacaggtacaccgccaccgccggaaaatgatcctaagcaacaaaatgaaaaacctgtag

SEQ ID NO: 107883 - DNA, 498 bp, Enterobacter aerogenes
atgatcattggaaatgcactagagatagcaattcaggtggaatacattatcccactgaattcaccaagtggcctttttaatttcataatagatgatggccttattccgggaaaaggtgtgtcaatagatctttacacggtgatatcgtcactcaaggatagtttggattaccatttaaattcaggtgttcaagatatcggcgatataaaattagaggagttagatttctctgatggagctccagaaaacataatctggctggatagtggtgaattgtctgactatggctgtgtattttggctgggatttaatggtgaggaagaaaggtttttttattcagtagattatgaaaagactatacaggagaaaaggtatgctcgaggaactattgagaaactaattaatagtctaccatcccctgaaaagctcaaaataaaaaaaattaacgatatggtatccattacagatattgattattcatataaagttcagaattga

SEQ ID NO: 107884 - DNA, 192 bp, Enterobacter aerogenes
atgaaaggtgtcgtacgtattggcgataaaacaacgcacggtgggcaggtactgtccggttctgggaccatgaaatttcagggagtgggtgtggcgcgtttaggcgattcggtaagttgtcccattgaagggcatagtccatcctatattgcggaaggccaacggattaaacattgcgctgtcatacaataa

SEQ ID NO: 107885 - DNA, 1032 bp, Enterobacter aerogenes
atggattatgaaggattaatgatcaaatacaagtaccgggcctccactgtactgactgaagatgaattaactaatcaattacatcagaatgaaaaattagacctgggtgataaaaaagtcatggatgatacggccgtgattcatcttagctcaggttatatggaggtggtggataagtggtatgcgataaaaggatttttaaccgtgccgtcgctggccttgtttctccttttcacatggggagtatttaattttacatcaacaatgatacaggagtatttatccggtagtcagagagacttttttttctgggggtttggcaccggcgtagtaatcatttcttttcttctggcatggttctgttcatttatgatgcgggttgagtgtttccgctggacgcattatcccgtcaggtttgaccggaaaaaccggctggtgcatgtattcagcgtggacggggaggtttacagcgccccttgggatgacattttcttcacgactggatgttatacaaaaacaaggttcaaacgtaagaattacgatattcgcggacatgtgctggctgaagatcgcaaaacggtgctgaaaacgttcacgctgccggtttccgctctgcggcgtgaagacctgtaccgcaactgggaatttgtgcgccgctatatggaagaagggccggaagcggtcgccggtgtgctgaaactgatgccgccggtggagggacgccgtgaaggtattttctttggctactggtatctgatgttcagcgccacctacggcgcgccgtttattgtggtgcccttcctgatggcgctgtatctgaccgtctggccgttccgggtatttgcgatgtacacctgccggataccgcgctggagtgaggcggtgcaggctaactgtgtgattgcgccgaacgatccttgggatatcagcgcggcgcagaatccccgctcgctgtggcgctggatgctgggaatggataagtcacacagcatggtggataaaaaacgagccatgatggaggtaaataaatga

SEQ ID NO: 107886 - DNA, 1935 bp, Enterobacter aerogenes
atgcttcatgatcccgtggcaatgatgcaggaaatctcatcactgctgtcataccaaaccgccagggatctttatggcaatgaaaaatatctctggaaacattctttagcttcgacactgattggcttaaaggaatcgatgacccgtcaaatggcgcgggacatgattgcggacactgagttcacttccatgagtgagaaactcggagcaaaaacacgtgaaggtctggatttactgccttccgcagaacttgcaaaacagcgcaatgatgccttagatgccactctgaacagtaaagttgagaaagaatggcagacctatgcggcgcattatgatgaaaaacagcttaaacaatttattaaggaatttaatgaagaagtaaattcctacgatgaattagtcgtcagtcctacgacagagatgtacctggaatggttcaaaagtgaagtcgcgacgggctacttcaaatgcaattttgatgtggccgatattcagagcgggttcgattatatacagacagtcggttattgtatcgttggtatgcaagataaggcattgacgctgcgttatttcaccgagcagttgaaaatgcaatctaatgattacgacaatattctgatgcgtgcgctggtatttaatcaggacaaactgtcagaacgactgggggcgttggttcaggataacagtagtttgtggacgtttccctggaatggctttgcagatgcctttaaagatacatttgacaagatgcaggaagcagccgcaggttatcttggcgtctttttggggaaagtcattggctctctttcacacatcctgcagtcagcggcaaaaagtcagttaagttatcagttgttcggcatgatggccgctgctgaccgacgggcatttattccggtatcccgtatcgggagcgaagctgaatttgttgaggatgttgtcagagtactgggcagaaacgccgggattgccggggacaatacagaagatgttctgcgtatgtacgtccgatgggaagttcgtcggcttggaattgatggcgtgcctcttaccggaagcggtgagcgtcattatattgccgctgttgatatggaaacatttaatgagctggctgcgctaccggaaaatcaacgcgtgtatcgcctgaacgaatctttacgcaccgatgctgacgttgacaggctgttatttgctcgctggcagaaccatatcaatgcgggattgagttcaatcaaacaaagtgttcctttgacgcttggtgtggtctcaatggcgttgcaaacggcgtcgttgtgggtaagcatggattttagccataaacccgtaaccgcaagccagcaggaagccagaaatcgcttctgggcaggaacgctgtcattaacgggaaccacagccggaacggtagagtcggcgatcattcgttttaataaactgggggcagcgtttcccggctcggcggcggaaaagatcgccaaatggtttgctgcgtctggacgctttttgggggccgcagggggactggtggcggcttattatgattatgcgcatatcaatgaagagtggtatagaaatcgtaaaggactggcttttgcttatggggtgtcggcggtatctggaacttatttggctttcgctccatttataagctggaaatttgtaggggatgttatcactgcatggggagttcgtttaggttcttctgcaatgctttcactgggagcgagtatggaagttgtaggtcttactctgggatgggtaatggtagcggtgcttctgattgcggcattttacatttcctggaaacagaccaatgaattgcagcaatggctggagaagactatgtggggggtaacgccagaggggcttcctttggagcgacatcagactttacaaattgaaatgcagagtctgaaagatattatgcaggtgggataa

SEQ ID NO: 107887 - DNA, 279 bp, Enterobacter aerogenes
atggaaattccatttattactgatattgcagaacgtcggagctgtagtcagcgtattgaaaaattggtgaatcagggactgagtctgggtcttacacatcacaatgatcttattgcttttgcctgtagtggcttaacccgtgcgcctgatttctggcgtattccgataattcaggaatggttaaggtatgcagaaaaaatgcccgaagttttttctcgaaaaattaaaagtctgagtgatgatgaatggcagaagattctgttccaacaggaaagataa

SEQ ID NO: 107888 - DNA, 1380 bp, Enterobacter aerogenes
atgacagacgataaccagcgctggtacccgtggcaggggccgctggcgcagccgtatcgactgcgataccacaaaaaccgcaaccctgcgcttcatccggtcgccgccagcctgctggccgctcaaatcctgcccgccgccgcgcttaactggctggcgcaataccgggagttgtatgaggcgtttctgttctgcatcagcggccattacgaccgggcgggtattctgggtgaactggtgcgggaagcggatcgcgcttcggtagcgcagtttatgggcgcgaaccccagcgccgcgctggagcgtccgcaaccatcgctggcgaagcagttgctcacggcgctgcgtgaactggtacagacgcagttgacactgagccatccgcattccggttctgacggttggctgacggaagaggcgctgtggctggtcagcaaaaccaccgcagaccgcatccgcgcctggctgctgcaacagggcatcaccggcgtacccgacagcaatatcaggctgtttgatgaaatgcaggcgcacggactgattgttccgacgcccgaagggagagccatctggtcatgcgacatcatatcagacagcggctggacgccgggttgcccgctgacgctgttgcgcttatcgccatcccggctctggcacacgccggaagaacgccctgtgccctttgcagggcgagtacgcgttgttagcgctgaaatcggtacaccagagcgcgccgcccgaacaaaaatgaattcaaccgtctcgccagtggttcaggcagacagtgaactcaccgacctggcgttttcgttgtttgccgcgccgggaccggagacaaccgcccccgctgacagcattccgccagcgcctgccgccgataccttcgcggatgttgccgcgccaggcccgatatcggcggaaaaacagccgcagaaaaatactgcccgcccggcatcgctgcctgataaccccctcccctcgccgacgcctgtcacaggggcggcatcgctttccggcgagcattttataacctggctgcgggcagggatacagcgccgtcacattgcggtgaatgacaccctggcgcgcgtgcatagggtggaaggtcgggcgtttttagtttcaccagaaatttttaagctgtacgtcaaaaccaccaccggcgaaaccggcgaggaatggaaaagagttcagaaagcattccagaagctgaaactgcatcagcgcggggatgagggaatgaatattttcacctgcgaggtgaaggggccgcgtaaaacgcggcgggtgaaggggtatctgctggagaggccggaagttattttcggcaatatggtaccggaagataatccttatctgtccatcgtctcaacatcataa

SEQ ID NO: 107889 - DNA, 1212 bp, Enterobacter aerogenes
atggctattcttacccgtccattatctgcctcagaagttcagaaagctaaacccgcagaaaaagactacgaactttttgacggtcaggggttatccctgatggttaaaaccacaggtaaaaaaatctggcgtttccgctataaacgtcccggttcaatttcccgtaccacaattagtcttggctattatccggcaatgtcgcttgccagtgcgcggactattcatgcggaacaccttgcgttgttgattaaaggtcttgacccgaaaaagctggagcaggaagacgctgagcgggagaaaagggctgtcgacagtcttttcattaatgttgcaaaaaaatggtttgtagtgaaaaaggccagcggtatctcagaggtccacgcggacgatatctggaaatcactggagcgtgatgtatttcccgcgattgggcagacgccggtcaccgaactgaaagcgcatatactgattgccgcccttgagccagtacgagtgcgcggcgcgctggaaacgcttcgccgcctgacgcagcgtattaatgaagtgatgaaattcgctatcaactcgggcttgttggatgccaacccggcgtcaaccatcggtgaagtattcgagaagccaaagaagcagcatatggcgaccatccgcccggaacgcttgccggaactgatgcagcgctttgaaaataccaacctgacgctgatgacccgtctgctgttgaaatggcaactgttgacgctggtgcgccccggcgaagcggcaggaacccgatggtgtgaaattgacagggagaataaactctggactattccggctgagcggatgaaaaaacgtcgtgaacatcaggtgccgctgtcgccgcaggctatcgcggtactggagcagcttaagccgctgagcggtcactctccttttgtgttccccggcagagttaaacgcgaccagtcaatgaacagcgagacggttaacaaggcgctgcggcggatggggtataccggtgagctggtgtcacacggattgcgcgctttaggcagcaccgcgatgaacgaacagggatttcagccggatgtgattgaggcggtgttggcgcatgcggataccaaccaaacccgtgcggcgtataaccgttcgacgtacctgactcagcgtatggaagtgatggattggtgggggcagcaaatcagcaagtcagcccggaatgcggtattgtaa

SEQ ID NO: 107890 - DNA, 1725 bp, Enterobacter aerogenes
atgacgcgtggcctggaactactgattgcccaaaccattttacagggattcgacgcccagtatgggcgttttctggaagtcacttccggcgcgcagcagcgctttgaacaggctgactggcacgccgtgcagcaggcgatgaagcagcgtatccatctctacgatcaccacgtgggtctggtggtagaacagctgcgctgcattaccgaagggaaaagtaccaacgtcgattttcttctgcgggtgaaacagcagtacacccaacttttgccggattaccctcgctttgaaattgcggagagctttttcaactcggtctactgccgactgtttgaccaccgctcgctgacccccgagcggctctttattttcagctcccagccggaacgtcgttttcgcacgatttcgcgaccgctggcgaaggacttttatcccgaacgcggctgggaatacctgatgcataacctgcttgccgatttgccgctgcgcctgccgtggcaaaacaaagggcgtgatatcggttatatcgtcagtcatttacgcgaagcacttggtggcgagttgctgtcgcagtcgcatctgcaggtggcgaatgagcttttttatcgtaataaagccgcctggctggtgggtaaactgattacgccgatggcgacgctgccgttcctgctgccgatacatcgtagcgatgacggtcagctgtttgtggatacctgcctgacgacccacgccgaggcgagtatcgtctttggtttcgcccgctcctatttcatggtctacgcgccgctgcccgcggcgctggttgaatggctgcgcgagattctgccgggaaaaactaccgccgaactatatatggcgattggctgccagaagcatgctaaaacggaaagttatcgcgagtacctgcactatgttacccgcagcgatgagcagtttattgaagcgccaggcatccgtgggatggtgatgttggtctttaccctgccgggattcgaccgggtatttaaggtgattaaagaccgctttgcgccgcaaaaagagatgactgccgcccacgtccgcgcctgctatcagctggtcaaagaacacgaccgcgtcgggcggatggcggatactcaggaatttgaaaactttgtgctcgataagcggcaaattgcgcccgagctgatggcgctgttgcaggcggaagcgggaaataagttgaccgacctcggcgatcgcattgccatcagccatctttatattgaacgacggatggtgccgctcaatatctggctggagcaggtggaaggccaggcgctgcgcgacgcggtagaagagtatggtaatgccattcgccaactggcggccgccaatatcttccccggcgacatgctgttcaaaaacttcggcgtcacgcgccacgggcgggtagtattctacgattacgatgaaatttgctacatgaccgaggtgaattttcgcgatattccgccgccgcgctatccggaagatgagctggccagtgaaccctggtatagcgtgtcccctggcgatgtcttcccggaagagttccgtcactggttgtgcgccgatccgcggatcgggccgctactggaggagatgcacgcggatttgctgcgtgccgattactggcgcgaattacagacgcgaattaaaaacgggcacgtggaagatgtttacgcttaccggcgtaagcagcgttttagcgtgcgctatggctga

SEQ ID NO: 107891 - DNA, 198 bp, Enterobacter aerogenes
atggcaaaaatagaattaacagattcccaggggaataagtattctctggaagttacagatggcgaaatgttccgactctttaacatcacaaagttggcggaaaaggtcggtctcaataaatatactctgagtgcacgggtatgtagacaataccccgagggtgaatatcggagtctggtaacagccttaaacaaataa

SEQ ID NO: 107892 - DNA, 1818 bp, Enterobacter aerogenes
atgagtggaaataaagtaaccgccgcgactttggtcaacagggttgtctataagacagatttaaacagtcttaaaaaggttagaaacgatatgaagaaacttcaaaaagagttttctaaatcaaacaaccaggtagctaaagcgaaacaggcagcagataaacaagtacatcaacagcaattaaaacaacagcgtgatattgataaacaacagaaacaagcagctaaacaagcggcagcagacgctaaatcaaaagcaaacgaacagaaaaaactggcagcagcgcaagctcgtgccttaaaaattcaacaacagcagcaagccaaaaccgccaaaatcagcgagaatgcacgattggcagagcgcaatgcattatttcatatcggcagattgcaggggttaaatggtgctgaacgattccaggccatcaaacatgctctggggttaattgattcttataaaaatcaaaccattactttgagagacctcaatcaacagttatctcaacatctggtaactcagagagctatcgctcgaaataattcaaaacaagctaaacaatcaggtaaaaaatcaaaggctggtcggtctggtagttctggctggttatcccaaaacgttaacgcaattgtcccacagcaattattatcaggggcagcaggtgtatatctgggacaacaaatgtacgctatatcatcacaggcaatctctgattcactcgccagaaatcagggacgaaaaatgatttcaagtatgggtttaaacccattagaagctgatgcagccatccaggaaactcttaaacgaactggttttaatatgagctatgagaaaatctctgacatctctaaagacgtacaggataaaattggtcagttaagtcttggtgagtggaaaactgataagaaaacagggcaatccacatattcaggcggtggagagatgggagattggctccagatgatggttaatcgtggggggtataccaaacagggagcattaaacactcttcaaaatgtgaaaggtccagtggaactagcaaccctcttaaaatcattgcagaaaagcgcgaaattaaccgactctgaattcaccgcgctggctgagaccataaatgatttttcctatctggcaaaatctgtagattcaaatggtcagaatgtcatcgatacaatgaacatgatggtcaataatggacttgcattaaatagtgctcaacagaaaaccattgatggattaaatcaaatggggattgtgtggggcgctattaaggattccggcgctgatcactttacactaggatttgctgaggcgatgaaagaggccaatttaaattctgataatctggctaaatcattctcgggtttaaaccctcttatggaaaatctaggtcaatctgctggcgaactttccagagtatttctggattttgcaaacaaaattggtttaaacgttgggaagggtcaaacgttgccagatgctgtttataataccgtggttgatagtagtgcgaatagtgccgctgactggatacaaaatatgattggttttgatcctcgtaatgtagggcgcttttttggttctgaatcctcagtcgcaacacaggtgcaaaatggtggttggtataatcaaattatgcctgctacgccatctatgcaatatcaacccgtcatcccggatttaaaagccgatttcaaccttacagtgaatcctagccctgaatttggaatgatggtagaggcggtagccgataaacgcattgaatgggcatttgatgatcagaacttccagattaaccaaagcattcttggtcagtga

SEQ ID NO: 107893 - DNA, 528 bp, Enterobacter aerogenes
gtggtttccgggttagtcatcacgtcgacctttttgttggcggcggcgtcgatttttgcctggcggtcggccagcgctttatcaaccgctttggcgacgatggcgtcgatctgctcctgggtaaactcttgggctattacagaggtaaacggagaaaatgcggcgataaccgccatagttaatggaagttttctaatcattgtcatcattatctcaattgagtttaattatattcagacaataacaacctcactctggctacgcagaatatgtcgctactgtgagaacaatttatttttattttgtaccgctatagaggtattaagctatatcgtaatccttcctccatacttgaaattaacgttagggctgatcgaaaatcttcaccgcagagattcatcgcgtgagcatcattacatagtgagtacaaccactggtagtgttccgtttaacctaacattgcattatgcccccaacattggtgagtgtaagaaatgtaacaactatgacacatcctgtattctataa

SEQ ID NO: 107894 - DNA, 207 bp, Enterobacter aerogenes
atgaatcagcacaacacccgtcttattcgcctccctgaagttctcaatcgaaccggttatggtaaagcctggatctatcatctaatcagcaaaggatgtttcccatcaccagtaaaaattggatctcgtgcagttgctttcgttgaaagtgaagtggaagagtggattcaattaactatcgaaaattcaagaaagcatgtctcctga

SEQ ID NO: 107895 - DNA, 354 bp, Enterobacter aerogenes
atgaaaagtgccaaagggccaggcaacttccgcaacctgtttatgtattcgcctaacggtgaaaaggacggtatccagatcatcccgctgtcagaggttgcggcaaaagatgagtttctgaaaataaaaaacgtgagccgcaatgacatgatagcagcgcaccgcgtgccgccgcagatgatgggcattattcccaacaataccggcggctttggcgatgtggaaaaggccagccgcgtctttgtccgcaacgaactgatgccattgcagaagcgattgcaggaactgaataagtggctgggcgaagaagtgatccgatttgaaccctacacgctggaccttcaggaagattga

SEQ ID NO: 107896 - DNA, 672 bp, Enterobacter aerogenes
atggcgttcagagcagaagagtcagtcaaagctaattttgataaagcttacagatatttgattcctgaaggggcatctcgtgaaatgagagttgcggtaagggataagcttgaggagattgtaggtgagtgtgggcccgtggttgatgggtatccagcatggcatccgttcatgttagatgcaaataagactacctgggcgccaacgacaccaaaaagtacgccagcttttagttacttagatcatacgatttattttcagaatgggatacttacctgtccttatggacatggagtagacgagtttattaaaaaggttaggagcctatcgcataaggacgctgggtttacaattgagaaaatagatgatgttgtgctctatcatgaagaagcggttccgttgcttatcaaatgtgattggtatttaaattatgagatggaggacgacggaactttcccggcgagagttgcaatggggttgatgttagaaaacgaagtgccgaactggcgaactgcagtttacagcgaaagttgggaagacatgaggggacagattatgggatatccacacggtgcaagatcttctctttttgttaaccagcagaccggtcaaaaaatgaaaaacctctggggtcagctaataaaaaccgggcttttaggtgaagagcgttaa

SEQ ID NO: 107897 - DNA, 741 bp, Enterobacter aerogenes
atgactaactcaaactccgtttatgttgcatggcaagctccagacactcgtgactggcatgtcgtaggcaatctacaagagcgcaattcggggtatgttttcaaatacacgaaaggggctctaaaatcttctaaatttacgaagtttagcggtatgactgatgttcgcgagacttatgtatcagaggagctttttccccttttcaagaacagactcttatccccgagaaggcccgaatacccacgtttcattaaatggcttggtttggaagaggatagtgtcaaaccgatcgatattttggcccgttctggtggtttaagaagcaccgaccagctacaaattttcaaaaaaatcgaagtggattcgaatggacagttcgagcatttctttttcttacatggcttaagctatttaaactcaatggctaatgatcgtgtatctgagctacagccaggacaagttttaaggttatgtctggatatccaaaatgaatatgatggtgatgctgtagttgttcgagctgataagcctgctgaaattattggttattgccctagatatttaagtaatgatatcaagaagatgctgatcaatgatcctaaatcagtgatgttgtctgtggaaagaattagtgatgatgccccgcacaactatcggttgctatgtaagttatcggggacgttaaaccctacatgcaaatcatctctgattccgcaagatgagtttgaaaccattgaataa

SEQ ID NO: 107898 - DNA, 915 bp, Enterobacter aerogenes
atgccttttcaaatggtggtccttagcccggttgctaacgatctggaacagttaggaaccaaagaaaaattttggttctattactctcatgacactgtaaatttacagttattcaagtattcgaggcctggtactggcgagcattggtccgaaaagtgcgctgcagagctatgccatcttctcaacattccacatgctagctatgatttagcaaagtgtaatgagagatttggagtcgtaacccaaaacctgattcctttaggtttcaggatggtgatggggaacgaggttttgcatagctctacagctgattatcctcagccgttacaacctggagagaagcctgtaagggtcagagaacacaccgtaacgagagttttggggtgtttagataaggagtcaatccagccaccgcagagcatctatgatttaaatggattaaatgctgctgatgtattttgtggatatctgatgcttgatgctttgataagtaaccaagatcggcatcatgagaattgggcgatcatgctcaataatgaaactggcgagcaatttttgtgtccaacatatgatcatgctgccagtttaggtagggagatgttagatgatgaacgtgatgaaagacttacgaccaaagataaaaatcggcaaatcccatgctttgtaagtaaagctaggtctgagcttttcaaagccaaaacagatagaaaacccttactcacagttgaagcatttcaacatgcagttgagggacggattgcagctcgcgaccattggctgggtaagctgagcgctttaacagaagattccattacagaagtgttcaaccaggtgcctggatcgtgtatctccgacagtgcccgaaattttgcaacgcttatggtgatggagaatcgaagaaggctactagaatga

SEQ ID NO: 107899 - DNA, 246 bp, Enterobacter aerogenes
gtggatggaactgaagccgggatgcttacagaaccgctaccgcattatctccaggggggttgggtgttgttccagcgacccagagtttatggcggcggtttctggttaggtaaaacctatgatggtgtttttatgcttgaacttgagcaccctgttactctgagtgatggcattgagtacattattctctcatccagagttgctgaaaactttatggattttgatgaagatttcaggcgaacctga

SEQ ID NO: 107900 - DNA, 465 bp, Enterobacter aerogenes
gtggcacgccgaattgagctacagggaatagctaatgctcttaatgagagctttgttagtcgtaacaacgactttaggggatactgggctattggccagttaaagttattcgctatctataacaatctaaccataatgcagttttttcttaccccaccagaggccgactcctactttggcctgcgacattatattgtacgtcactacgccgacatactcggtcgcttgttaagaaagcaacaaattcctgacttttgggtgagtggggctagcattacaatcgactttaacgtaaatgctaaacgctctcagttgcatgaacgctcagcctcaggtgagcctttccagtgctgttgtcggataattgatgacactggccgcagttactcctcaatcatttatggtaagtgcaaaccacactctactgcgaaagaaatgaaatcgactcgaaaattcactatgtaa

SEQ ID NO: 107901 - DNA, 132 bp, Enterobacter aerogenes
atgaggaatgaattggttttcgatgtaaaattcatcgtggaacagaaggtaaacaatataaacgtcgatcttagtcgagttacctttaatgaacgagaccttttcattaatttgaatcatttatttgtgtaa

SEQ ID NO: 107902 - DNA, 525 bp, Enterobacter aerogenes
atggatttgaatactgttattacgaaactaatggaaagtggttggaaggttgaacctttaaatattgctgcggtaaaaccattgacggaagcgcttaacactcgattacataacatccccgaattgttatataaacttatattttcttttcaatattgtacaaataaagaagacacggcctggtttgtggtgcggcctgaacttttaaaagaatataatgatgatcccttttcatgggatgagtttgaacgacttagttatgatgccgcgatagatgattctgatagagagagggtttccagcttttggcgtgggcatttttgtttcttcatgtcagtaaaaagtggttatgtacatatatcggttgtgaccaaaggtcaggatgccgggaggatagtgtttggctatgaacctgattttgaagcggtcagtgtattggctaatagcattgaagaattttttgttttattaatcgagcatatttctggtgtaaaagaaaatgaatatttaggatgtatattatga

SEQ ID NO: 107903 - DNA, 453 bp, Enterobacter aerogenes
gtgaatggtgatgttgagattaccgccggactgcagttctccctgccggttatcaacggtggcgctctgaatacccagggcatcaaaggcggtaattgtgccctgctggttatccagcaaaccgctcgtcgtcaggttgacgctgccccgctgcgccgtgcctatctgtccgtgacgattattaagattttcagcctggagttggatatcaccgctggcgatgatattcccctgcgagttatccaccccatggcgcgcagtgagctgaacgtcgccctgcgccgcgctgatttttccgccatggttggtcagattgtcggcgtcaagcttgatattgccatttgcggcaagaacgccttcgcggttatccagccctccttcagcgctcatggccaggtcgccctgcgccgcaatcacttgcccctgctggttccgaaggctggccacttgtag

SEQ ID NO: 107904 - DNA, 441 bp, Enterobacter aerogenes
atggaaaatgctgccaactggcgaactgaatcgcgtaccgtctattccagtgacttcaaacttcggatggtcgaactggcttcacgaccagatgccaacgtcgcacaactggcgcgggaacatggcgttgataataatctcatttttaagtggctacgcctctggcagagagaggggcgaatctctcgtcgaatgcctgcaactatcgtggggccggtggtacctcaatctcttccggcttctccgactctgttgtccgtcgacgttatcaacgacccgttgcccgccgcagagaatgacactctgtgtacgttctcctccgctcacgccagcgccacttcctgtcatgttgagttccgccacggcaaaatgacgctggagaacccgtcgtcagagttgctgactgtgctgatccgcgaactgaccgggaggacacaatga

SEQ ID NO: 107905 - DNA, 456 bp, Enterobacter aerogenes
atgattaagaaaacattatgcagcttattgctggccgtactttgtggcggcatggttggccccgcagtgagtacggagaatgaccatcggtatattagtattcgtaatacggatagcagttgggtgcagggcgtgtgttctttggtattccggctggataacggcggtgatgggacattcaataacctgacagtcagcttacaattaactgataaatcgggagccgttctggaaaaaggaactcttgatgttcagccgtttggcgatagcagtgctactcgctcaaccctttcggcaactgaattcagctgtgatgcggttgaaaatacagctaacatcgtgattaccgacgttgaggaaacgtcttcggatggttcagtccatgctctgccactgtcgatgtttgatccgcaatattatcaaccattaaaaatgagcgtacaaaaaagcggatag

SEQ ID NO: 107906 - DNA, 504 bp, Enterobacter aerogenes
gtgaaattaactctacgaattgcggcgttgaccattgtctgtatgtcactcagccagacagctttagctgcgtcttacagtgcggaggatcaggaacaattaacgctggaatgcctgctcaccaataataaatacgccagcgcctttattgcgcaggatagcgcgggatatgccctgggaacccagtctgctccgactgctgagctgaatcttgtcactaatcaaccgggggttaacgcctactataattctcagatgatcgccggtggctcgctttactggatacgtgtcgtcaaaggcccctatgaatatattgtttacgataaagagcagcacggcgatatgtcaggtgtggttgtcacaaaaaaagggaaaagaatcttccacaaagattgcaaggaacctatcaaggtgggtacacaaaacgatggcagcatctttagccgatttgcgcaagaagatacagaaggcgatcgtattatcgatttaatcaacaaagcataa

SEQ ID NO: 107907 - DNA, 1569 bp, Enterobacter aerogenes
atggcctttactccttccacattatcgcgctgcctggcgctagccctgctggtgaagatctcccccgcgctggcagaaccgtgggcagagaaaacctataatccgaagccagatagcgatgacgtgattttgcctatgccctgcgaaggttcgatggtatttcgtcgggtagaaattccagtagccggtcctctggatgatattcccatcaccttaggggaagatggcggtgaatggggctttgtggaacacagttatcccacgtttatcgccggtagctttactgaaacgccccaaaataaaggccgttattatttaatggcgaaatatgagctgacggcattgcaatatcaggcattaacttctgatacttgcccgacaccatcgcgtaaacttagcctccctcaaaccagcatcagttggtttgaggccgttaatttctccgataaatataaccagtggttacgcgcaaacgcgctcgacaagctgccgaaagaagataacaagccaggttttttacgactgcccaccgaagtagagtgggagtttgccgcgcgcggcggtctgaaagtggataccgcacagtttcgtgattcccgttatccgatggacgacatcaaaaattatgagtggtattccggttcgcagtcctcaaacgggaaacttcagctcatcggtctgttaaatcctaacccgctcggcctgtacgatatgttaggcaacgtctctgagatgatgtttacccccttctacctcaataaaattaatcgattgcatggccaggctggcggttttgtggtgcgtggcggcagcgtgatgtccagtgagtcggatatccgcagcgctagccgtaaagaaattaactattacgataatgcccagccttttaccagtaaaacaatgggcctgcggttggtgctggtttcccaggcaattacctcaacggaccgggtcaaacttcttgagaaaaactggtcgactctcggtgatgataaaacgggcgcagagagcagcaaatccgggtccaatgatacggcgaaagcgttaggtagcctggcttctggcgttgaagacggcgagctgaagaaaaagctgaaagatctggaaaaccaacttcgtgccagcaaccagcagcagcaagaagaaagagcacagtctatccgcgccagcctgaatctgggctcttttctctgtaccaaattacaggacgatggtcgtttccttgacttcctcaatcacaattatgagctgctgtgcaaagataaagacagcagcgatgccaactgtgccatccgcaaaaataagctggcggaacaaaccgatcgtctacagcagctaacgagctactacgccagcagtctggtggattccggcaccctgtatgggcaagcagggctaaaaggcgaagtgaacgtgttcaatcagatgctgatgctgaataaacgtctttccggtcttaagccgttcctcgctgctcattggcagaatcagcaaaaatacctagcgaacggcaaaattgatacagctggctggctggatacctgcaaacaagtaaagaacggccactaa

SEQ ID NO: 107908 - DNA, 1215 bp, Enterobacter aerogenes
ttgtcctttaatcgtgcaagactgctcggtcgccttgcaatgcaagacctgtggcacgatcgcatcatctctttttgcatcgtctcctctcttgttgcggtcatcgcccctttactgctcctttttggcctgcgctttggcattgtgaaccagttacaaaacgatctggccaacgatccccgcaatctggagatccgcatgttgagcagcggaagctacgatcagcactggattacgcagctacggcagcggcctgatgtcggcttcgccatcgggcaaacgcgctcgctcaatacgctgactgacttgcagacggacagcacacattttattgaaaatgcggaagtcattccgacagaggctggcgatcctttgctcggcacgcaggtgctccatcatgaccatgaagttgttattactcaggaagcggcacgcaagctggcggtgaaaaccggtgatacgctcacgctacgcgtgagtcgtatgctcgatgaacgccgcgaatggggacgtaagcgcgtgaccgtggtggggattttgccagccacctattttaatcgccccgctatctttacccgccccgcgttattaatggctcttgaacattttcgcgatggctatgcggtaacagcgttaggggtcgccagcggcgctcagcttaacggtaacgcgccgcgctacgcccgcgcaaggttgtacgcacgcgatattgaccatgtcgccagccttgaacgcgatttgcgcgcccaacgcatcgaaaccaccagtcggctggcggatattgagaatgtaaaaagcattaaccgtgtgttgggcatcatctttaacacgatcgccatcaccgcgctcattggctgtatcgcctcgttaatcggctcgtttatcgccaatgtcgatcgtaaacgtaagcatattgcggtacttcgtctgctgggcttcacgcgaccagccgtaggcgtttacgtcattagtcagggcgctttgctcagcctgatggcctatatcggcggttttggcatctattttttagccagccagatatttaaccgggcgctgtccacaagccaggccaccggtcagatgatttgcaagataacgcccttacacggccttatcgccctcttactgacgctggttgtggcgacgctggttgccggtatcggtgcctggcgcgcgatccatattgaacctgcgcagagcctgcgcgaggcataa

SEQ ID NO: 107909 - DNA, 726 bp, Enterobacter aerogenes
atgctgcacattgaagacttgtgcgtggttcgtggtcaggatcatcaggctcaccgtgtttacctgccgcagctttcgctgcggccaggcgaggtggtggcggtaacgggtgaaagcggctgcggtaaaagcacgcttctggaagccattggtttagtgttgcatcccagcaaaattgggcgttacacgctcagcaaagggacacagcagcaggatattgccgcgttgcttctgggcgagcgacataatacactcgctgcgattcgggcacgcgaacttggctttgtattacaaaacggtggcctccttccctacctgaacgtcaaagataatattctcttgccgtgccagctgctgggagcccgccctgacagcaccatgctggatagggtcatcgaaacgctaaaactgtcgccactactggcaaaatatcctacccagctctcctttggcgaacggcagcgcaccgcttttgcgcgcgcgatattacatcgcccggcgctggtactggcagatgaaccgacggcggcgctcgatccctacaatgcccagaaattatttagcctgtttatcgaactagtccgtcaggaagacatgatggcgctggtcgtttgccatgactggcctctggtcaaacacttcaatttaccctgtttagctgcgcagccagaatcgctgacggcgtcatcacagagcgaacggggaggtacttactttgtcctttaa

SEQ ID NO: 107910 - DNA, 1968 bp, Enterobacter aerogenes
atgacccggacttttttttgccgtctggcgctgcccttatgcggcctgttgttcagcgggcacctctttgccgccgagggcgataaaccgctgcttcaggaagggaagaaaacgctataccagcgcatcctgacgacgccaggctgtaagcttagcgacaacgccggggatgaaaatgggcagcttcagcctgcctttagcagcctttatgtttatcaaaaggaagaggctaaggggcaaagctggcttaaagtcgggccggatagctatggcaaaacccttggctggttgccgaaatcctgtaccgtagactggaaaatgcagttgacgctggcgtttaccaacccggccaaccgcgatcggttactctttttcaaagagaaagaaagtctggataacattctttctgcccccgatcctgtctctctggtggcgccgctgcgcgccaaattgaagcgtgacggccacgctgaaggtattcaggcccaggagccggaatattttgtcgatctgcaaaagcaattttatctgctgccaatcctgagcggcgaagaggtcatgaccgaagatggcttctatacgcgcctgctcaacgtggcctccgtcagcaaggcggatgataacgcagcggcaaaacaagataacgacgtaaaccagttgaaaggctttaacgcttcggtggtgttcgttatcgattcaaccatttcaatggggccgtatattgagcgcactaaagaggcggtcaataagatctacgacaaaattaaacaagagcatctggatgggcaggtcaagtttggtttggtctcttatcgttcaaataccaaagccgtaccgggacttgaatataacacccgcattttcgccgaccctaaccaggtcaaggacggcgcggattttctgcagaaagtcgccgatcttaaagaagcgaaggtctcaagctctttatacgacgaggatgcctattccggcgtgttatcagctattgatgacattgactggagtccattcggcgcccgctatatggtgctgattaccgatgctggcgcgattgagggcagcaataaactttcaggaaccggccttgatgccagccagctccgtctggaagccggtaaccgcggcattgctatttatacgttgcacctgaaaaccgccagcggcaaagcaaaccataccaaagccgagagccagtaccgcgatctctccaattttgatagcacgcaatctaacctttatcaggcggtgaatgcaggcgatatcaaaatgttcggtcagcaggttgatgccctggcgtcagccattacggaacaggtgaaagccgcctatatgggggatgccgccattggcagcgcgctgtatgccaaagatgaggggcaaaagctcacggcggagcagaaattgctccaggatacggcgttaatcgggcatgcgatgcagttagcctatttgggcaaacgcaacagcacccaggccccgctggtgttccaggcctggattagcgatcgcgatctgattaagcagaacatccccacaacagatgttcgcgtgctcttaaccaagggacagctgagcgatttaagcgatgccgtcagccagattctgaaagccgctaatgaagggatgatctcgcccactaagatgtttgaacaactgcgcaccgttgcggcaacaatggggaccgatcctaaccagttgaaacagcaagacagcgcgagcatcggcgatcttggcgtgctgggcgagtatctggccgatcttccctacaaaagcgatgtgctgaatctcgatgaagaaacgtggaaaagctgggatgggctgtcacaggagaaatttatccgcacactgtcatccaagctgcgtcactatcaaaaatataatgcagatgtcgaccgctgggtcgagctggcgcaaggtagcgatccgcgcgatcgcgtgtatcccatcccactggaaatgatgccctga

SEQ ID NO: 107911 - DNA, 1020 bp, Enterobacter aerogenes
atgctagctaaaatcatcgcctgccaaccggcagagccgggtaccgcacaattgatggttcgcctgcgcggcgaaactgcggtgctgcccgatctgacctttacgctttgtaataacgagcagaactatctgcagcccgatggcagctggagccctgcacagcactggtttactgtcaacggcggttactccctggccaacggcagcggctttcgtatcggccctactctacttgaccctttgctggcaaacgcaagccaggtccagattcagatcaagctggcttcaggagaagtgcgcaataccaccctccaattggtgcgtgatgagttgctctcttctgaagccaggggcgcgacgggtaattacagcagcagcagtatgctggcaaccccagaaaccgactccgcaccagcggccatcgtagaagcgcccgtcgcagaatctgaaaccattgcgccgaccattcatgccgagccgcagccgcaacaaaaacctgcggcttcccgcctcccgctcatcatcgccgccatcctgcttttagtggtgattgctggcgcgctttggtggttcatgggccgggacaaaggtcaggaggtggtcccggcggtacaagctcagcaagcccccgcagccgccgcccctgaagcgacgaacaccgagcctaaagccccggctggctgttccgcacagagtttagacacgctgagcgagcttgaattcgtgcagacgtgcgttcaggaaaaactcgatagcgataaactgctggccattatccagtcagcgaaagaggcgaagaaatgcggcgtcgcccagcgcctgtacgcaaatcgcgcgcagggcggcgataccaaaatcgccctgatttacgccggtgagtacgatccgaaataccatcaggcaagcgaatgtttcaaagaggcggataaagataccgcggcctattggtacgaaacggtactgcaatcagaacccgagaaccaaacggctaagcagcgccttgaggagctagcaaaatga

SEQ ID NO: 107912 - DNA, 2715 bp, Enterobacter aerogenes
atgaatagcgatcaaaaatctctcactcagggctgggcagctatcgctcagggctgtcaggacgcacttggctgggttgatgcagtgcgttccggttcacgtcgcctcgacaacgaggcggataaactcaaccttagcttgctccgcacgcgtaaccaggccaatagcctgacgctggtcgccagaacgccaatgaccttcggttttttcggcatttctcaggccgggaaatcctatctcatctccgcattggcagctggcagcaatggttcactggaagccctttatggcgaacggcgcgtcgactttatcaaagaagtgaatcccgtcggcggcggtaaagaggccaccggcctggtcacccgcttcacccgccaggcccccgccgcgcctgcgggctatcctgtgcctctgcgcctgttcagtgaaatcgatctggccaaaattctggcaaacgcctggtttaatgatttcaaccacgagcagctgagctttcaacttgatgaagccagggttgaagagcgactgcgccccttcctgcaacgcgccacacaagcaaaaagctataacggcgtgagccaggaagatgtggttgccttatgggattacctgaacgcctcgttcagaaaatcggttgaaaaacttgaacacgcctattggccgcaggtgttgaaaattgcccctgcgctgagtcctggtgaacgcgcagagctattttctttattgtggggagaactgccggccctcaccgagacctatcgttcattagccaatgtgctgaccaaactcaatcatgcccggacggtgttcgccccgctggagacgcttatcgatcacagtaatggcagcattatgaacgtcgacagccttaaccggctaggctccagccaggatcgccacgtggagatccgctactggaaagaggagcagcaaatcggcagcgccagcttaacccaggcggaactggcagcgttaaccaccgagcttatcttcccgttagcggaagtcgaggccgacagcgtcgtggagcaggtcgatctgcttgacttccctgggtatcgcgggcgtcttaaaattaccgcactggaagaggccggtagagaggggcttaatcccatttgccagcttctgctgcgcggtaaagtcgcctatctgtttgaacgttacaccgataatcaggagatgaacgcgctggtcgtgtgcgccagctccgccaaacagagcgatgttgctgacgttggtccggtattaaaccgctgggtagaaaaaacgcagggtaaaagcgccgaagaacgtcagggccgtaaccctgggctgttctgggccatcaccatgtgcgatatgcgcatcaacagcagtctgcaactcaccaccgaacagttaaaagaaggctgggaaggtatgctgcacatgaccttgctggagcgtttcgcccaatatgattggctgcagcaatgggcgcccggccaggcgtttaataactgtttcctggtgcgaaaaccggggctggataatccgttcatcgacctaaaagacggtacagaacaggagcgaaacaaggaagcgtgcatcaccgagcgctatcgccagaagctcgacgaaatgggcagcaccttcattagcgctaaaaacgtgctgcaacacgtcaccgagccgagcaaagcctggcacgcgatgctcgagctcaacgatggcggcatgggacgcttaaccaaagcgctgcgcggcgtcgcgcatctggaattcaagctggcacgtttgcagcaacaacttgagcagtgtcgcgaggagaccggcaatcgccgcctgggccgctggtacgaaaaagacggcgacgggcagctcgtgaaaaaacaggccatcgcgaaagagctatggcaggggctgtccgcctgctcccacagtatgggagagctaattaatcgtctggatctgccgacgcaggagcttaataacatctatttaagcattcgcgaccgcaacccggaaccgtcaaacgatggcgacagcctggcggcaaacgcgtttaccgccagcccatttggcaacaaccccttcggtgataacccgtttggcagcgatcccttcgccgacgcaccggctgaaatcgccgtggttgacgcgccagcgtcaactgcccaggaaagagtcggccaggacgatgatttcgcccatcaggcgtttaaagcctgggtcgcgcatttgcgtgaactgccgcagcaagcgccgcagtggcgtcagttggggatgaacagcgaactgattaatcatctcagcgaagaattgatcaccgcagccacgcgcctagatctggaaggcacgctgaaacgcgcgctggcgggtcaggagcaagcgggtacgcggcgtgaacatcttatggcacgccaggttctgcgcgcccaactgactatgcgtgattttatcgcctggtttggttatctcactctaccgcctgaaaaggtgcccaacagctatgttggcgagaaaaataaagtcttcctgcgccagaaaccgctgatgaacgacgagctgccgcagctcgccgccgttgcgccgcagccgggtgtctcttatctgggagactggctatccgccctgatgagcgtcgtacttgataacgctggtcatagcgccacgcgcgatatttccgtcgaacataatcgccaacttggtcaaattatcagccaattgaaacaagagaacatgccatgctag

SEQ ID NO: 107913 - DNA, 3069 bp, Enterobacter aerogenes
atgttgcccgagattgtatcttttgatcgtcaagtaaccctggtaggcgactccgggatccagtttatggattttggtttgtctccaggacgtttgcccgccggtgaatttgttaaattagccaatggcgtattgacccgtttaatctacaacgaacagcgtgattactatttttatcagcccagcccggcaaatatcgagaaggctaaaagccagtacgatattcccgttgagcagagtcttaagctgtttgacgggacatggttgccgcttcccctactccgtttcagcccgcctgacgtctatcaggaagggccgctaaactgggcgcgttttcgtatcgtcaagctggacaagcctgatatggatgggcatagccatcgaatgacgttggctatcgatactcgcgtaatggccaaacagcaggccgccgccgacctcagcccgaaccaggaagatgtcaatgccggggcaacctttgcggtggcgacagccacctatgccctcaactggtatctcacgcaagagtggattgtcgactggctgaaagaggtatttaaagaggcgagcaaaggccgggatatcgacgaacgcgagcaggagcttaaccagcagtatccgctggcgcactaccttaaccttctttcactgatggcgattcccgtcgaaggtttgcaaagtcagaccgcccccatcattgaattgccgcagttcagggtcatcgccaatcgggaaactaacgctatcaagcctattcccgttgatttgatcctcgatgtcggtaactcacgcacctgcggtattctcattgaagatcatgggcaatcaggttcaggtatgcagcacaactatgtgctcaaattgcgcgatcttagcgcgccggaacatgtttataccgaaccctttgaaagccgggtcgaattttcacaggccttcttcggcaaagatcactgctcggtgcgtagcggccgccacgatgccttccagtggccgacgatcgctcgtatcggcggagaagcgggtcgtttagcggcgcgccgaaaaggcagcgaaggttcaaccggcctctccagccctaaacgttatctttgggatgaaaaatattacggtcagggctggcgattcaacggtagctacgtgcaggacagtaatccactcgccaccgctgcgccgttcgcgaatctgatcgatgaacggggcgaggcgttacacaccatcgaagatgagatggatcgcatcccggtctttacgccacgctattcccgcagctcgctgatgacctttatgctcgcggaagtattaacccaggcgattagtcagattaatagcccggaacaacgcatacgtcagggacacgcaggtattccgcgtcagctacgccatattattctgaccgtgccgcccggtatgccgatggctgaacgttgcgtactggatgaccgtatgcgtcaggcggtcggtttagtctggaaagcgctacgctggcacaacggcgaaaacgatccttatgaggatgagcaagaagatcatagtcagacaaacattaaaattccgctgccgaaaatcagggtcgagtgggatgaagcgtcctgcgcgcagttggtttatctctacaccgagataaaccaaaactttgccggtcacccggagtcgtttttcgacgcccttagccgacccgacagcacgcaacgtgaaagaatatccatcgcatctatcgatatcggcggcggcaccaccgatctggtcatcaccgattatcatctcgatcgcaatggtcatagtgggggcggcgctaacgtccatatcatcccgcaggagcgttttcgcgacagttttaaaattgccggcgacgatattctgctggatgtcatccagtcctatgtgcttccagcctttgagcaggcgctgcgtgaaacgggggtcatatccgttgagacgctgatgtctcaactgtgcggctcgcaaaatattagcgcggcggaatccgtgctgcgccagcagctcaccctccaactcttcgttcccctcgcgttgcacattctgggtaaatacgagcaattcgatccgctggacgagcaaacgcatatcgtgattaaccaacgtgtcggcgatctactgccggtaggttctctgcgtgatgaagtcgagagctttgttcgccgcgaagtacaaaaagctggtggtccgaccgatttcaaactagcggaggtaatgctcactctgccgctcgccagagtgcataacgatttgtgctcgggtaagttcaacattgataaagtgctaaccgcgctgtgcgaagtgctgagctattatcattgcgacctgctactgctgacgggccgcccttcgcagctgccgggcattcaggcaattatccgtcgcaacctgccgttgccgccggggcgtattttacctctgcacggttatcagaccggcacctggtatccgttccataaaaatggccatatcgacgatccgaagagcaccgcctccgttggcgcgatgctcacgcaactgtgcgcaaatcacagcattcctaacttccatttccgtacctcggcgctgaagccttactcaacgattcgccatattggcaccattgatatggataacctgattcgcagtgccgatatcgtttatcgccatatcgaatcggagaacgggcagataaaattgccgacattcaccgacgaaaatggcgagaacaccacgcaaagtatcatcatgcgtggcgatttgcggctgggttatcgtcaactggatgccgaacgttgggccgccgcaccgctttataccttacgttttagcgaagaaggccgtaagaagttttccgccgccttctccgtggatagcggttcaccgtacctgaaagtgagactggctatcgacaaaggcaaacgggcgcgccaactgggcttaatcagcgatcggctgatgattgcggatatcaccagcaacaccgataagtcattcagcaagcgtgatgtagatctggaactcaatactatgcccgatacggggctcattgatagccgacactggctcgatagcgggagtgttaaaaaataa

SEQ ID NO: 107914 - DNA, 1449 bp, Enterobacter aerogenes
atgcgaaattcgattcagggaccactacttcgtaccggaaataactcttcattcaaggcgctgggtgaaacgggctatcctgttttcaagatggccttccagctacgcgaagccatctatcgtcttgatgcagggcgcgatctggcccgtcatctggctatcccgcaaaacgatcagggcggtgacagaaccgactggtacagcagttttcccggcgatgttatcccgtggagcggcgcaagcgaagcggagcgagaatcggcgcgccagcaatttaatgcgtttcgaatggcagtgcagtcactaagcgaacagttgctcaacgcggagcaaagcggaaccggcggcgatcgtcgggtctttgcccagttgctaaaatctgtaacccatttccccgattatgagtttgtctatctcgttaatggaacgctggtgatcaccttttgggggtttgtccacccggaaggggaacaacgtcacccgatgcattggctgagttcatcgtccgttcccgccgccgccctcgcggccgttccgccgcaggccagcgccacggaaaaaaccgtcgaacccgctcccgcgccctttgttgatgttcgaacgcgccgctggcgctggcgttggttgctatggctacttttggcgttactgctgctggcgctgctgttagggctgctccgcggctgcgctccttctctttccctgccgggcctccctggtctttctgcggataaaaccacggtcaccgctgaacctgtggctacgcacccggccaccagcacccatgacgtggcgatcagggggtcagaaaccgccgttggcgctcgcgccgtacccggcattgtggaagggtcaaccgcggacgcgcatcctgcgctggattcaacggtgcccgcgatgcctgccgacacatctgacagagcggtagacggcgatacgacgccgccgccggctaacgcaaatgaagccagcgtagaaccgccactgccgcccggcgtacaggatacccacgacgagcagacgcctccgggcgtgactccggtaaccgccccgccgctcgttgcgccgcagggcgaaccgttaaccctcccggccaccctgccggacggcccggcgaagtttcttaacggcgaatggcgcgtgaatggcggtattcaggacaagcacaccggacgcccgctccagctgcaatataattttgaccagggcaacggcaccgtcagcatccgccagtccagcggcgtaacgtgccgtggcccagccaacggtaacgtgcagcagggggcgctcaacattaccaaccctgagcaaatgacctgcagcgatggctcaaactttattgtgccgaccatcgagtgcaaatcaccttccgcgggtcatgccgattgtattggcagcaacgatggggaaaaaaccttcccgattcgtatgcttcaacctaattcctga

SEQ ID NO: 107915 - DNA, 1146 bp, Enterobacter aerogenes
atgcatatcacccacaacaataatgatttgcttatgcaacgattaacaactgccgcgccgattcatgaagcaacgctgacaacctatgaagagacggtcggtatcatacatcgtcatcttcccccttcactggcgctgctgtatgccaccgcgcgtcgcaatgccgaaggacgcctggagtggtggacagcacgtcaggggctggctaaacctttttccgcactgaatgacgccgaacggctgactgttgagaataaacgtcagcaatatcaggacattctggcggggttaatcagccagctggccgcgcgcggcgaagataagtcagcacatgcgttgcaaacgctactcacccaatcacaccacctcgacggctatagcgtcggcggcgaaccggtgttggtcaattgggccacagccagcacagcggcgcccctccatacggtagtggttatcccctggtgccgcggttttcttccttggctggcattattgctactgctgctcctactcgtcggtgtctggtggtggtttacacatcgcccggccgtgacgctccccgttgttacaccaacccataccgaattaactgacaccaatcccagcgtgaagcttgagaaacgtcaggattttggccggataaaaatcaatctgcagtggaagcagggggaccacaaagagcctgtcgatctcgatattgccgcctttgtgcgcttaaaaaacggtgaaatcagcggcgctgaggcgctgagtcatttgcccggcaactatgaccagccaccgtatctgctgctgcaggaagatctgcgtgaaggcaatgacgtggatggcgaatggcttttcgtcaacggcagccactggcaggacattgatgaggtgctgatttatagcttcatttacgctggcaccgataactggcaagggacaaacgcctccgtcaccctctatgtccccgaacagcagccgattacatccatgctcacggatagcgaccagcgtaataatgtcgccgccatcgccaggctcaaaaatgtcgatggcaatattcaggttgaacgccttgaccgtttcttccccgaccgcgagtcgatggataagcactatggctggggtttcaaatggacgcccggcgcgaccaaaaattag

SEQ ID NO: 107916 - DNA, 483 bp, Enterobacter aerogenes
atgagaaaatacgcacttcttgccgcccttgtccttacgggttgtactacgtctccccaggactgtgatttacacgcacaagatccaagctttattaccaaactgagctgcgccacgtcgggtggttatcgtcagcaggttgatcaaaaagaacagcaggttcgcctgagccaatatcaaaatgaatcggccaggcaacagcaggattatacccaaaacagacagcagaccttaaatcaaaagctggcagatgaacaagcaaggctaaatgccgtgcgttcggatctgtcgcagacgctcgcaaaactgaaatcaagcaagattcaaagccgcgaacgccagcaggaaattgccaaattgcaggagctgcagcgccagtcacaaacggcaacgagcgccagcgaaatttcagcgattgagaaaaaggtcgccgaagccaagcacaaaataaaagttctcgaagaagcaaatacgctccgctaa

SEQ ID NO: 107917 - DNA, 738 bp, Enterobacter aerogenes
gtgaatacatttaaccgaactaccacatgcatcgtgatttccgcagcattgttacttggaggctgtgccaataccggaagctctctcctgtctgggacaaagccggatcctcgccttaccaccacagaacaatcacagttctttagcgcttctggtgcacaaggttgtggcgtaggcgccgtatccggcgcagctctcggcgcgttagtaggggcgctaacaggtgactcgaagaaagcgcttgccggcgctgcaattggtggcgctgctggctgtgctgcaggtatgaccgctaactactatcttgacagactgaaaaaagattatgcctccaccgccgatcgtctgcaggcaatggataacgacatcagcaaagataccgcagcggttgaaaaatcgacgctggcgatgaaacaagttattagcgaaaaccaggccaccttaaccaaaatcagcatccaaaaagataaagctggatttgataaagccggtgcgaaaacccagctggcgcaaattgatgccaacatcagcaagatgaaagagaccatgaaaggcatgaaggataaagaatctgcctataaggtcgctttacaaggtcaaacgaccaccacaagtgcagagaaaagcaagctggcaaatttgaacaaagaatatgccaatctcaatagcaagattgctgctctggaacaagaaaccaacgagctgtatgaacagcgccaggcgatctcccttggttaa

SEQ ID NO: 107918 - DNA, 174 bp, Enterobacter aerogenes
atgattgatgttttaggtccagagaagcgcaggcggcgaagtgttcaggaaaaaatcgccattgttcagcagagctttgaacccggaatgaccgtgtcgctggtcgcccgtcagcatggtgttgctgccagtcagctgttcctgtggcgtaagcaatatcagcaactgtcttga

SEQ ID NO: 107919 - DNA, 768 bp, Enterobacter aerogenes
atgaaatatttgaaccgggatgaggcagtaaaattcgcatttcggctgcttagtaaaaaaggtcgagaacgctacggtcattatcttgttgaaggtatgcacactgtgagtgaatccgtggtttctggtgccagggtagtgtgtatcctgcactcggaaaaccgttatgttaatcttaccagtaacatcagcaagggtgggattcaggtattcagttatccggaaaaactattgcgcccactttctgatgctattacgccacaactgatttttgcacttattaagagagatgaacctgtttattcaggcatgctgacacagcccgaagcccgtattctaattcttgagtctctgcaggatcccggtaatacaggcactattatcagaacagcagaggcgttaggatatgatgctgttttttataacaaaggtactgttgatatttataatacaaaagttctgcgctctatgcagggaagtcattttcacattcctgttatcaaatcagatgttattaatctgataagcttgttaaaaaagaatagattccgtatatatggcagctcaccgggacagggttctgtaagctacaggagtgtctcgcctgaaaaaaaattcgcggttattgttggtaatgaggctaaagggattgatccagctgtgcttgccatttgtgacagaaatttgtttattgatatgcgcggaaacacagaatcgctcaacgtatccattgcggcagcaattcttatggcccacctttatccctga

SEQ ID NO: 107920 - DNA, 231 bp, Enterobacter aerogenes
ttggacagcgggtttattcctctactgaaggaaaggcctgctctgatgcccacgaccctgctggaaatgctgcaggataaatatcccggccagtaccccagcagcctccgcaggactatgcagcggcgggtccgtgagtggaaactgcagagtggggccgggcaggaggtgatgttccggcaacttaatcagccaggcctgtcggactttaccgagcttaacgtctcataa

SEQ ID NO: 107921 - DNA, 588 bp, Enterobacter aerogenes
atgaaaatccctaacgaggcagagctgtccaatctgtttgatgtggggcgtaataccatacgggaggctatcagggtgctgtcgcattccggtatgcttgaagttcgtcagggagacgggacctatgttcgcagtgaagttgatccttccgaaattatgcgctgtgtcagcatgtcaggactaaaagatcatctagagcttcagtacatacttgaagctgaagctgcagtcatggcggccacccggagaagggaggacgatctggtaaaaatttcagacgcccttaaaaaccgcgcacagtattcaaataatggatctccggaagattttatcgataaggataaccggtttcatatgtcaataattgaagccactcataatgatgctatgattgcgctttacaagtatttcagcctttccataaaacataatcatcagcatcttatgtctgtgagaaatttacctgaacctgatcaacatgcgcatcagaaattgtatgaagccatagcggcaggcgatcccgtacaggccagggagactgtcagacagatgcttgaacccatgattgaattactcaaaaaattataa

SEQ ID NO: 107922 - DNA, 423 bp, Enterobacter aerogenes
atgtctactttaaaggccgtcacgctgagagaaaggaaccgaagttttagactgcaaaaactgaaggaattttttttacggaataaaggaaggcattttacagccagagaagtctatctgaaactgtcaaaaaattatcttcatatctctccgtcaaccatttatcgccagctccggatccttgaaagagaaaaagaaatccagagaatgacggacaaaaacggggtaagtatttatgaactgacagacggcaggccacatgaccatcttatttgcgctcagtgctcaaggacgatccctttgtacgacaacagaatagaattaataattaatcaggtagctgaggagcatgacactcaggtggaaagtcgaaccatcaatatctatgttagttgtttaggcgatttatgtccgcaaaaatga

SEQ ID NO: 107923 - DNA, 1380 bp, Enterobacter aerogenes
atgaaacaactgattaattgccactatgccgggctgacagcaatcttatctgtattaatcatctcacttgatctgctcgatatttctgttatgaacatcgtgctgccgggtcttgtcctggaattcagagattcagcatccagggtgcagtggataatcacttcatatcttcttggaatggcgataacaatgccgctgagtggatgggcttctgagcactggggtcataaacaagcatttttagtcagtctgatagtgttcactgtaagttcggcattatgtgcactggcaggctctgttcctgtactgtcgcttttccgcctggttcagggggcggggggagggctcctgatgccggtttgtatggcattactatttaatgcatatggtgagaagcaacgggtccgggcttcggtaattttctcattatctgcatcagcagttccagcagctgcgcctgttgttggcggttatatcactgtttacggcaactggaattatattttctggctaagcactgcggttgctacttttgcattaatactcgcggtatgtatccttaaaagttcgccagagcagcataaaacatcgcccgattatacaggcctggctatgggaacaatcagtattgtttttacagtgtatagtctgacagagggcctgaacggacccgtatggatccctgtcattttactctgtggagccgtgctgctgatgagacagtttattcttcgttcgctgaactccaccgtaaatacaggcatgcctgttctcagatttgaactattccgtcaccggaacttcaggttatgtgctgcagtcatgttttttggtgcactggccgccagtattaccctgtttgtgatccccttcttactccagttgactttaaaatattcgtctctggagtcagggtatgtcatggcattccatgctttcggtgtgatcgctggaactctgctcgccggcagatatatcagcaaaaccgggtctgccagactgctgtgcctgggtatgcttgggatggctttctgtaccttaggcctgataatcatttcagacacgccttcctccaattctgtgagcgcaaatttattcgttagtggcattatgttcgggctgacaatcgttcccctccagaccctcccgttccgggaattgtcagtgaaggaaataactcatgccacaactttaatcggtgttatccgtcttctggcaatgactaccggagcagccctggggtcagcaggtctcagtctgccagttatttctgcgatgaatgtgctgtacatggtgacattactgcttgcggtaattttttttaccgggggatttatggtttctctgaaactccttaacctatcaatggctaatacctaa

SEQ ID NO: 107924 - DNA, 663 bp, Enterobacter aerogenes
atgaaaaacatgagtctagaagccaccttagttcaagaggcattaacactcaaaggccttgagacgccattacgcaaaactgatgttctcagaaaagataaacgtagcgaactcatcgccggttatatgacgaaggtaatggagttacttcaattggatcttactgatgacagtctgcgtggcactcccggacgtattgctgacatgtttattaatgaagtattttccgggcttgattatgctaacttcccgaaaattaccttaatggaaaacaaaatgctaatagccgaaatgataacagtacgtgatatcacgtttaccagtatgtgtgagcatcatttcgtcatgttcgacggaaaggcgacggttgcatatataccggaaaataatattatcggcctttccaaaatcaatcagattgttcaattcttcgctcagcgcccgcaaattcaggagcgactgaaccaacaggtcagggttacccttcagacattacttggcactccaaacgtggctgtttctatgaatgccgttcatttttgtgtcaaagcacggggaataaaagaccagaccagtgcgaccagtaccatatcgctcgggggcaggttcaaaacagagcagattacacgtcaggagttcctgcgctcagtcagccactcttag

SEQ ID NO: 107925 - DNA, 501 bp, Enterobacter aerogenes
gtggatgcgctgataaaccggagtcgtcgcgcaccaaatcttaagaaccgtaccgacgatgccactgaacaaactgttattgattatgcgattgcattcccggctcacgggcagcaccggactagtagcgagctgcgcaaacagggcgtttttatctccggtagtggtatccgttccgtctggttacgccacaaccttgagaactccaaaaaacgcctgaaagcgctggaagagaaagttgcccgtgactgcatcgagctgaccgaagctcagatagccgcacttgagcgcaaagccagtgatgatgaggtttgtagcgaaattgaaaccgctcatcccggctatctgggttcacaggacacgttctatgtaggcaaccagaaaggcgttgggcgtatttatcagcagacattcgttgatacatactcgaaggtcgctcactgcaagctctacgtcactaaaacgccgatacggtcaggcttcaatggtaacaatgagtga

SEQ ID NO: 107926 - DNA, 162 bp, Enterobacter aerogenes
atgcttcatactacaaatcccgtcattaaacacaaagccggtgtgctcaatctggctgaagaactcagcaacgtatcgaaagcctgcaaaatcatgggcgttcgcgtgatacgttttatcgttatcgcgagctggccgataaaggcggcgtggatgcgctga

SEQ ID NO: 107927 - DNA, 912 bp, Enterobacter aerogenes
atgaaagcactacagtaccgtgaatacggtggcccggaagtcatgtcgttaacggaagttcctttacctgttccgcaggcgggcgagataagaattgtggtcagggcaagtggcgtcaacccttccgactggaagcggcgaaccggaatgtaccgtgattttgatgaggtcagttttccggcaggtcttggcgtggaagcatccggtatcgttgatgcaacgggtccgggagtcactaatgtatctgtgggcgatgccgtatttggcatgggcagagatacggcggctgaatatgccatcctgactcactggatatccaagccggctgacatgtcgtttaaagaagccgccggtatctctgtcgtcacagaaacggcgctgagaagcttggatgtgcttgcgctaaagcccggggaaacgctgtttgtgagcggtgcagccggaggtataggcactgcggtggtacagctggccgttctgaggggcattacagtcattggttcagccagcgagaaaaaccatgactatcttcgcaggctgggtgctgtcccggttgtatatggtcccggattaaaggagcgcatcagccaactggcaccagagggcattgatgctgcccttgatgtcgccgggtcaggtatcattcctgagctgattgaaatgacaggttcagcctcgcgtgtggtttccgtagctgatttttcagcagaagaatacggtgcccgattctcaaaaggaccacctgaaaatcctgacgcggttttgcaggagattattcgtcttttcagacatgtgcactacaccgtcagcgtggaaaaaactttcaggctggaagatgcagcaaaagcacatgaagtcagtgaaaatagccacgtcagggggaaactggtcatagtacctcttcccggatga

SEQ ID NO: 107928 - DNA, 1194 bp, Enterobacter aerogenes
atgaataaatcccttattgctgtttttgccaccgtctttcttgatgccgttggtctgggcattgtttttcctgtactgcccacattgcttaaagatgtcatgcatattgacaatattgctgtctatgtggggattgtcacggcggtatatgccctgatgcagtttatcttttcgccgctgctcggcgcgctcagtgacaggattggccggcgcactgtcctgttgttggccctcggtggcgcagcagccagttatctttttatgaccgttgcagccaccctgccactgttaatcgccgggcgggcaattgccggtatcaccggtgccagtatgccggtggccatggcctgtcttacagatatttcaccacaggaaaaacggacacggtattttggtctctttaatgccatgtttggcatggggtttatttttggcccggttctggggggccttctgggggaattccatatacgccttccctttctggtcaccgcgttactgaacgcctgcaactttattatggtgctgctgtttttacctgaaactcatcagaccagtcggggtaaaccgggacgggaggagccgtcagcccgcctgtccctgcgccagttcttatcgggtggcggcattctgcctgtggctgccacgttttttatccttagtttcgccggggaagccagcggtatctgctgggccatgtggggatatgatgccttcagatgggatggtttccatgtggggttatcgctgggtgtgtttggccttttccagacgctcgcccagatattcctgcccggcccggcggcccggatactgggtgaacgaggggcggcgctggccggtatcaccgccctgtgtctggccctgtgtgtcatggccatagcaacagagagctggatgatttttgctgttatgccggtatttgccctggggggtatcggttcaccggcccttcagactattgccaccaggcaggtcagcccgcagcggcaggggcagcttcagggtgtgctgtcttccacgctcagtctatcatccgtgatagcccccctatttttctcaacgctgtattctgcggtcagaggtaactggccaggtggcgtctggcttgcagcggccgccgtcaatgttattgccatcccgttgatactgtatggcctgcacaacactcagcgacatggactggcgcagtga

SEQ ID NO: 107929 - DNA, 564 bp, Enterobacter aerogenes
atgcgactttttggttacgctcgggtatcaaccagtcagcaatctctcgatattcagatcagggcgctcaaagatgcaggagtaaaagctcaccgcatctttaccgacaaggcatctggcagttcaacagatcgggaagggctggatttgttacggatgaaggtggaggaaggggatgtcatccttgtgaagaagctcgaccgtcttggccgtgacaccgccgatatgattcagctgattaaagcattcgacacccagggtgtggcagtccgtttcatcgatgacgggatttgtaccgacggtgaaatgggccagatggtggtcaccattctatcagcggtggcccaggccgaacgacgaagaatactggagcgcaccaatgagggccgggaggaagcgaagctgaaaggcatccggtttggccgcaggcgtaccatcaacagaaacagagtcattgagcttcaccgcaaaggggctggtgcaacggatatcgccaggcagctcagcattgcccggtccacagtttacaaagtaataaaagaagataataataatctcctgtaa

SEQ ID NO: 107930 - DNA, 819 bp, Enterobacter aerogenes
atgatgagtgcaaaaaaaagtatccccgcaactagcgaacgacgtgaaaagatcattgtattactcaggcaggacggtgccgtccaggtgaacgacctggcactgttatttggtgtttccgccgtgaccattcgtaatgacctggcctttctggagaagttaggaatggcaaccagggcgtatggcggcgctttattgtgcgatgtgccaaatctgaccagcgaacgaaccattgaaaccaagcagactgaaaatctttatatcaaacaaagcattgccaggatggcggcatcaatgatcatgccaggtagtgccattattcttgattccggtacgaccacttatgaaattgcgctgcaactgaaggataaacaagatatcactgtcatgactaacggcatgaatgttgccaatgctctactggatgcgcagggtgtagaagtgctgctcaccggtggcaggctgcgccgcagttcgcaatcattttatggttcacgcgccgagcaggctctggagaattaccactttgataagctgtttttaggtgtcgatggattgagcctggcacagggaattaccacgcatcatgaagatgaagcccgaatgaatcgcaggatgtgcgaagtttcacgccagattattgttgtgaccgactccagcaagtttaatcgggtcagcctgcaccgtattatagatatttctcgtattaatacacttataaccgatagcggtttaagtgatcgactacgtagtgggctggttgaacagggtgtggaagtgctgttggttgatcaggaagcagaaggctgctcgtcgtga

SEQ ID NO: 107931 - DNA, 1275 bp, Enterobacter aerogenes
atgacagagttatccgcattaatcgccagacataagcagggtgagcaggtgggtatcacctcggtatgctctgcacatccatgggttattgaagccgcaatgcagtatgcccggcaaaacggcgatatgctactggtggaagcgacatcaaatcaggttgatcaggagggtggctacaccggaatgacaccccaggattttcgtcagcagcttgatgagatggctgaaaagatagcatttgaccgtactcgtctaatgttaggcggtgaccatcttggccctaaccgctggcagcacttgcccgcagaacaggcgatggagaaagcgcaggtattggtagcgcactatgttgctgccggtttccaaaaaatccacctggattgcagcatgtcctgtgccggagacccgataccattgactgatgccatcgttgccgaacgcacagccagcctggcacgaacctgcgagacgatcagcgaagaaaagtggggaaaacgtgaagtcgtgtatgtgattggtactgaagtaccggtaccaggcggtgcacatgagtcgctggaccatctggaagttacacatatcgatgcggcgagacagacgctggagactcaccgcacagcatttgcccgtgaaggtattgcagatatctggtcgcgggttatcggactggtggtacagccgggcgtagagttttcacatgacagcgtcatcagtttccagccagaaaaggctcgtgaactgagtaccctagtagctgattatcctcacctggtattcgaagctcactccaccgattatcagtcacccgaagcgtatcgcgccctggtgacaaatcacttcgccatcctcaaagtcggccctgcactgacattcgccctgcgcgaagcactctatgcgctggaaaatattgagcgtgagctgctgccagacgatcagtgcagcaacctgcgccagtgcctggagctggtcatgctggaaaaacccactttctggcaaaaatattacctcggtagccctcttgagcagcactttgcccgacattacagctactcagaccgcttgcgctattactggcctgaacagcaggtacagagcgccgtcgaacgcctgctcgccaacctggcgcgccagcctgtacccctgccattgttaagccagtatctgcccgaacaataccgacgggtactcgcaaagcaattacctgccgacgcacggacgctggtactggaccgaataaccgatgttttacgtgattatgcatcagcctgtcattaa

SEQ ID NO: 107932 - DNA, 1176 bp, Enterobacter aerogenes
atgagtaaacaagaagtcctgccagccattgccgcatcatgctggacagaggaagagatccgtcaacaaccagccgtatggcgggaaaccgttaacatcttggaagcgatgcgcgctcagattgatgcctttattgatcccctgctaaagcagccagatctgcgcattattctgaccggggcgggctcctccgctttcgccggcgatacgctggcacctaagctggcgcgtatgttgtcagtgccagtcagcgccgtctccaccaccgatatcgtcagcgatcctctgagttatctccccagaaattgccctctgctgctggtctcttttgcccgctccggttccagcccggaaagcctggcggccctgaagctggcagagcagcgtaacgcccattgttaccatttgttgattacctgcaacccacagggtgaactgcatcagcattaccaccagcaggcgaatgttttatcactgcctctgccagcaaaaacctgcgaccgcgggttcgctatgaccagcagcatgaccagcatgatgttggcctgtctgacggtatttaacgccatggaaagcacgccaacacaggtagaacaactggcagatagcgtatctcaccagtttgaagcccagcaggatctgacccgttcaccactacaacgccctgatattcagcgtgtgatatggctgggaagcggcatgttacaaggcattgcacatgaaagcgcccttaagctgctggaactgaccgcaggtaaaatctccgcctcttatgagtctccgctcggcttccgtcacggccccaaatcactggtaaatccccacactcaggtgttgttgatggtgtcaaatgatccttctatccggcgatacgacctggacctgctggcggaattgcgtaacgacaatgttgccgcaagcgtggtggcactggccggtagagccgataacgaaattgaacagggtgagcattattacctgcccgacgccggagaacttgatgacagtttgctggcgctgggctttcttagcgtagcgcaggtttatgccctggccgcatcgctagcattcggtatttcacccgataacccttcacctgaaggtcgggtaaaccgtgtagttcagggggtgatcattcatccgtggcaaccgattgtagacaaagagggagcataa

SEQ ID NO: 107933 - DNA, 873 bp, Enterobacter aerogenes
atgggcattatctcaaccaaatatttactgcaacgtgcgcgcaaagaaaagtgggccgttccggcgttcaatattcataatgcggaaactatccaggcggtactggaagcctgccatgaacgccgctcgcccgtgatgctggcaggtacgcccagtacatttaaacatatctcctgcccggatatgctggcgctgtgccgctcatattccgagcactttcagatgcccgtcatcctgcatctcgaccatcatgaagtttatgaggatattgtcaacaaagtgaacggcggtgtgcgtagtgccatgatcgacggcagccacctgccattcgaagaaaacattatcctggtgcgtcgggttaccgaatactgccatcacatggactgcagtgtggaagccgaactggggctgttgggcggtattgaagatgataaagatgttgatgcagcgcacagcttcctcaccgatccacaacaggccgtggcctttgttgagcgtacaggtatagatagtctggcggtcgcgattggcaccgctcacggtttatacacccagcgtcctgaaatcgattttgcccgtttggaaaagatcggtcagctgttgagcatcccactggtgctccacggcggcagcggcgtgcccgatgaagacgtcatacagtccatcaaacttgggatcgccaaagttaacgtcggcacggaattaaaaatcgcctttgccggagcggtaaaagcttattttgctgaaaatcctgacgcaagcgatccccggttttatatgcgtaaaggcatggatgccatgaaagaggtggtgcaccacaaaatcaccctctgtggttcggaaggccgcctgggcctgggagataagcaatga

SEQ ID NO: 107934 - DNA, 978 bp, Enterobacter aerogenes
atgatttatatgggtgtcgacggtggtggaacaaagaccgcctttattctgatcgacgataacgggaacgtgctggcacgtcatgaatcttcgacctgctattacctgaccgtagggatggaaaaagcacgcagcgtggtacaaaacggtatcagtgagacttgccggcgggcaggtattacccctgcagacattagctttacctttttggggctaccggcttatggtgaaatttctgccgataaagcagaactggacgctctgccgtatcccctgcttgagagagagcgctaccgctgtgataacgatatgatttgcggctgggctgccagcctcggttgcagcgatggcatcaatgtcgtctccggcaccggttccatcgcatatggcgaatataacggactcagcgcccgctgcggcggctggggcgagttattcagtgatgaaggcagtgcttactggattgggtgccaggcgctgaacttgttttcacgcatggcggacgggcggttgaagaaagatctgctgtacgatttgctgcgcgaaagatttcccagcgacagcgacctagatatctgcgatctggttttcaatcagtggaaaggtgaccgtggaaaaatcgcttctcttgcgccgctcgcctgtgaagcggcgataaccggcgacaaaagtgcgcgtgcaatattcttcctggccgcgaaagagctggcattaatggtggataccctgcgtgagtcattggcttatccgcaggacgaaacgatacgaatatcctattccggcggtgtatttaaatgtggcgatattatcctggaggccttcacttacgaattatcaaaactgaacggcaattaccatctttctttacctgctcaccatcccagcctgggcgcagcaatctatgcggccaaagtgaatggtacgcccctttctgaatctgccttaagccagctggaacttggaggttatgatgagtaa

SEQ ID NO: 107935 - DNA, 906 bp, Enterobacter aerogenes
atgagtaataaatcctggattgtttatacctttctgaacgtcgcgacctggggtatatggggagctttcagcgcctggccgaccacgcactatggctatccggaacagtggatctatattatctggtcactgacaatgctgatcccctgttatttttctctgcataatcaacggcttaatttatctggaaaggcaattttttatggttgcctgattggatttactggtgcaggtggacagttactattatttaaagtactggcaatgggagcgccggcttatctggtattccctattatctcggtttcacctgccattaccgttctgatgtcactattaattctaaaagaacgtgtaaataaatttggctcgattggtgtggtactggcgcttatttccattattatgtttagcatcagcggtggaaatgaagataagacgagtggactgctgtggttgctctattccgtcattatatgctttgcctggggcattcaggcgttcttcatgaaaaaagcctctacccaggaaattaatgacagctcattgtttggttatatgacaatcaccggaattctgttggcaccagtggcctggctgatgctggccgataaaggtgccagctatccggtaatggccattgcctccaccgcctgcatccaggtactgaacgctatcggtgcactctgtctggtgatggcgctgtctcgcggcaaggcgacaattatcgcaccctgcactaacgctctggcaccggtattaaccgccattatttcactgattatctatcagtcgatgccgggagtctgggccttaataggtatcgtgctggctatttccggttccaccattatggtttattcagaagagaaaaataacgcagtaaagattagcatcatccagtaa

SEQ ID NO: 107936 - DNA, 1266 bp, Enterobacter aerogenes
atgaaattaaatcagacaatacttttactagccttgtttagctgttccagtatggcagataacccaaagactacaacggattctgacagcaaagaaaataacgccgtgcaactagcaaaaacaccgccaatgggatggtcaagctggaattattatggcgacagaattaatgagaaaattatcattgatactatcgataaaatgatatctctcggactgcgcgatgccggatatacatacgttaatattgatgacggatggcagaaatataaaggttcacgtgcggaacatcccctggaagtagatgagaagaagttcccgcacgggataaaatacattgcggattacgcacataaaaaaggaattaaattggggatttatagcggaccggggaattcaacctgcgccggctataccggttcggaggggcacgaaaaagaggatgccgcaatgtttgcttcctggggaattgaccatcttaaatacgactcctgttgtagccatcagcaggctagcaaagacacactgaaaacggtatttggtgatatgtctaaagccctgaatgccgccgggcgaccgatggtctatcacgcctgccactgtggctggcagaatatctgggagtggggaaaatcagtaggcgccaatcagtggcgtattggccaggatatcagtgatgacttcaattatccgggcaaccgggaaggctattactttgatgtccttgacatgatcgaccgtggtgtgggtctggaaagttacagcggcaaagggcactggaacgattacgacatgctgattattggtctgcatggccgttccaaagaactggtcggcacaggcgcatccgataacgagtatcgtacccacttcagtatgtggtcgattctcagttcgccattactgatcggtgccagcctggacgatcttaataccaccgatctggaaacactgaaaaacaaagaaattatcgccctgaatcaggacccgctcggtctgcaggcgaagcgctatgtcagcaatggtgatttacagatttttgctaaacctctggctgatggttcctgggccgtcgccctgctcaaccgctccggccagaccgccacaatgacgctgaatatgcagcaagacctcaatcttccctggaagaaaacgctggtaagagacctgtggctgcatcgtgatatgggctcttttacagatacctacagtgtggaagtgcagtcacatgaaacaaaaatgctggtcatacgcagcggctggtaa

SEQ ID NO: 107937 - DNA, 1002 bp, Enterobacter aerogenes
atgaaaaaatatttgtggatgacagtcagcctgctgctgtgcaatagcaacgtatttgcacagagcgatcgagaaaaccagtttcagaagaatagcagtaaagaagagatcccaccgcctgcacaactcgcaaacaccagagaatggcagataaaaaccggcctgttattagaaaccgaaaatatcgagggaaacagtgacggaaaaggggcctgggaaccctctgtttacctggagctgataaaagatcgctggaccctgggcggttctttctaccaggaagatcacaatacctcacactattaccgtttaaagggccgcaatgacggttatgaccagtatgaaatcaccgcccgctatgcgctggtgaccagcaaaacgctggcactgggtatgatgggaggtgtacgaaattatcgctggtcttactataccggagataacaagggtcagacgtataatacacagcgttacaccctgcaaccggactggaatctgcaactgatacccgacttgcatttttctggctggctggcaatgtcgcagtttaaaaacaacgttaatcgcaatggcttaactcataacgagatagagagtgagactggaataaattttgccttcaatgaaacgcttggcgtgacgctgaattattacattgatcggggatggaataagtacagcgaacgcgacggtgaattttcccagcaggagatgcgtttatattttccggtgatatttaatctattttccgttaatgaaagtaaatttagtccctatattcgccggacactcaccacctggtactataatcacgaccatcagcgcaatgagcgggaacgtgactcacgttttggcctgctgtttgaacaagcgctaccgcataatctcgctctctcactggagtacggctacgagttacaattgcatcccgatgccagtgggaacgaaccttcacgcacgaaattccattacaccagcatagggctgagttaccttttctaa

SEQ ID NO: 107938 - DNA, 210 bp, Enterobacter aerogenes
atgaataaccgatggctgaagttaaaggtaaaaacgatgggcattgaatgcctgatggcgctgtgcttatcaggcctacggttcgcggtaggccgcagaaaagcaaaaaaccgccttttgggcgggttctctgaattagtggtggccagactcggactaacgccgcaggcgttgaacagcgcgcttgtcgcgctggccccgaaggggtga

SEQ ID NO: 107939 - DNA, 570 bp, Enterobacter aerogenes
atgtcgaaaacgcttgtgttacttttccatcctgatattactcgctcctgtgcaaacgctgctctttccactgccgcctcccagcttgctgaggtcgaaattttcgatgtacagcaggcctatcccaatggcgtgattgacaccgatgccgaggtgcatcgcttgttgggcgtggagcgtatcgtcctgcagtaccctatacagtggtacgctaccccaccgatattgaaggcatggcttgatgccgtactaactcgattgttctacattaactacgagtcggaggggcgcaagctacgaggcatgcctataatggtctcggttaccgcaggcaatagtcctgacgcttatagccagggcggacgtaatatgttcaccatgtcagaactacttgctcctgttcgcgctacagcccaccgttgtgacctgacctggaataccccatttattgtgtaccgtgccaatcagctgtctcgggacgaacttaaggacgagggaacccgttatgttgaggtattaaaatcctggatttcttcaaccgggcggaggagatctgatattggtcagtag

SEQ ID NO: 107940 - DNA, 918 bp, Enterobacter aerogenes
atggccaatcttcgctctctggatcttaatctgctggtcgtcctgcatgctttattagaggaacggcacgtaacacgagctgcacgacgtctcgcgctgtcacaaccagcaaccagtaacgctctggacaggtgtcgacatgtctttgatgatccattattggagcgtgtcgcaggtgaaatgcgattaacggctaaggcacagtcgttaaaagagccgttgtcccaggcactgcttgccatatcggctgttgtagagacaccacaaactaacttgacgcatattcgtcaaactgttcgtctggtaatagctgatcaaccaggcctggcagtcatgacccatcttttaaccaaattaagtaccagcgctccgaaggtgaatttagcgctattgccatggcgcagcagtaaggatgccctccatcgtctggagaatggtgaggctgatattgcgatatcaacgtttcctgcgcttcctccagaatttcatcgccaggaaattggacatgaaggctatgttgtggccatgcgggcctcgcatcctgccgttcagaaatttaacgtggatgagtggttggcatggccccatatagttgtttccggcgaagggaatatacgtgggtctctggaagaagtattagctcaacaaggaaaagctcgtcatgttggcgcggttgtaccgaatttcaccatgatcgaacctttgcttaaagcaacggatatgattgctattacgcctataaattgtctttctgacacccaatccctggcgattttcgagccacctaccccggtgccaggcttcagtctgcatttagcctggcatgcgcgaagagatagcgatttggtcgtgaaacatgtaatcgaaacactacgatccttctttcaaaaagagggtaacgtaacttctgttcgataa

SEQ ID NO: 107941 - DNA, 375 bp, Enterobacter aerogenes
atggtagatgttcaactgatgaagaagcaagcgactcatgagtatcggtgcactgttgaagcgaccgttgtggttgctggaggaaaatggaagccgctgattatttactacctgctcagcggaaccaaacgatttggagaacttcgaaaactcatcggcggcatcactcagcgttcgttgacactgcaacttcgggagcttgaatcgcacggtattatttctcgggaggtatttgccgaagttccaccacgcgtcgagtattcgctaacggagtttgggctgactctgacccccgttctcaacgctatgaaagagtggggagatagctatctcatctggcaagaaatcaatgggaacaataaacatgctgaataa

SEQ ID NO: 107942 - DNA, 984 bp, Enterobacter aerogenes
atgaaagccgctttttatgaagtccagggcagtgctcgtgatgttttgaaagtcggcgaattgccaataccggaaccgggtccagatgaagtacgcgtgcgcatttatgtttctgggttaaatcctaccgatgttaaagcaagaactggcttctccgcagatatgccttatccacgcatcattcctcatcaggacggcgcaggcgttattgatgcggttggcgcgaacgtgtcaccggaaaggcttggtgagcgggtttgggtatacgaagcacaatatggccgggcaacaggcacggcagcagagttcgttgtggttccgtctcatcaggcggttcgcttgccagatacggtctcattcgaagtaggtgcttctctcgggatccccgcgctcaccgctcatcattgcctgtgttctgatggcagcctcgacggtcggcgagtgctgattcatggcggagccggagtggtcggaacagcggcaatcctgttggcaaagtgggcaggcgcatgggttgcaactacagtaatgaacgcagaacaagccgccgtagcgaaggagaacggtgcagatttagtgctcgaccggacatcggaagatatcgcgactattattatgaaaatgaccgaaggattcggggttgaccgtattgttgatgtcgctttgaaagctaaccttgatatcaatttagcttgcttgtcccaggggggggttataagcgcctatgcaacttccagcgcatcggacgagctctccattcccttgctgaaggcaatgaagcatggctgtgttttgcgtttcgtatatatctacaatgttcctgacgagttaaaaaaagctgctatagaagatatcaactcgtgccttgaatcaggatgctatttgccaaaaatcggattaaacatgcctctccaaaatatagccgaagctcacgaggcactggaatcatccaaaattataggcaaggttcttatacacatgtga

SEQ ID NO: 107943 - DNA, 756 bp, Enterobacter aerogenes
atgacaaccatttctcttgtgaccggtgccagtcgcggccttggtcgaaacacagcactgaacatcgcccgctatggtggcgatgtgatcatcacctatcgtaatagtaaagaagctgcagacgcagtggcggcagacatccagtcccttggccgtaaggcaattacacttcaactggacgtgagcaatatgtcctcctttcccgatttcgtgaccgccataagagcggcattgaaaagcaactggggacgcgatacgttcgaccatctgatcaataatgccggacatggagaaatgaccgatttcatgaataccacagaagagcagtttgatgcgctctttgatgtccacgtgaagggcgtatttttcctgactcagtcacttctgccgatcctgaccgattatggacggatcatcaatttctcatcgggtctgactcgagtgtcattccctgggttctcggcctactcggcagccaaaggtgcggtagaagtgctcaccgtttatatggctaaagagttaggtagacgcggcattacagttaatgccattgctcctggcgcgatcgaaacggacttccttggcggcgctgtacgtgacattcccgattataacaacgcctttgcaggtatgacggcgcttggtcgcgtgggactacctgatgatatcggcccgatgatcgcaagcctgttgggcgaggacaaccgatgggtcaatggtcaacgcattgaagtttccggcgggcagtcgatttaa

SEQ ID NO: 107944 - DNA, 948 bp, Enterobacter aerogenes
atgatagcgatgccccgattatctgagggatgcgccttagacactgagcagtctgaaggtgcaaagacgtctgcggcgctactatgcgtggcgcggaaatatgccgacgcgcacctcaataaagaaggtgtggcaacaacccccattccaggagtattcattttaagcgagaccgcaccttcaattttgcagttcgccattactaaaccactgctcgcacttgtgctgcaaggccgaaagcgcgtgacgatgggaagtcatactttcgattttggcatgggggagtctttgctggtcacgatggatgtgccgacagtaagtcaggtaatcacggccagcgccgccaccccatattattcatttgtcgtggagcttgacgccgctgtgattaccgaactggttggcgatatggacaaactggaggcgtctccggatttgcccgtgagggttgaccagatcgaagaggatgttgcagaaactgcgttgcacctgctgaaattgctcgacagaccgcacgcgttgaagatgctgggtcgccagttggtacgcgagttgcactactggctgctgtccggacgatatggcaaatctatgcgcgccctgggaaatactgatagccatgcccgtcggatcgcccgggctgtcgagattattcgggctaaatatgatcagccgttgcggatcaaaacactggccgatgcagcgggtatgagtatttcggtgtttcacaagcattttcgcaacgtcactacgcttacaccgctgcaatttcaaaaacagttgcgcctggtcgaagcccgaaaacttatgcttgtgcaaggtgctgcaatcagcaccgctgcccaccgcgtaggctacgagagcgtgacgcagtttacacgtgaatattcgcgtatgttcggtcaaccaccggctcgcagtatccgtgacgctcgcgaaagtgaatag

SEQ ID NO: 107945 - DNA, 1536 bp, Enterobacter aerogenes
atggcgctgatcaacttttttgctaacacgacgcgtccgcgccccatattgacggtcgcgacaatttttcttggcgcggtgctcaccacattgcaggggcgcttattctcggcggccctgcctgacctgcgcggacagttcggcctggacttgttggaagccgcctggctgggtacggcattgaatggcgcgcaacttgtcacaatgccgatcgttccctggcttgccacggtaattggtccaacccgtgtactgatcgcgcccagtctcctgctggggctcgtcacctttctgatccccgcatttgcccaccactatccggtgctggtcacgctgcacgccattgccgggttgtgcctgggaatttatctgccgttaaccatttcgctggcgctgcgaagcttacacccccgtttctggttattgatcatgggggcatacagcctgcgcgtgtccacgggtatggacgcgggctatggcacctccgcttttctggtcgaggatattggctggcattgggtatactggataactgcctttgtcggcccgatcatcgcttttctggcatggaaggcgttgccgttgtcaccgctcgaccaatcccaattgcggcagggcgactgggcggggatggccatgttctgcctgggactggtactggccttcattggcattgactcggctgagcggctgggctggagcgattctggactcgccatgtccacgctggccggtggatccgttttgttctgcacatccgtcttgcgcgccctgagcaagaaaaacagcttttcaagtctcattgccttcggcaaccgcaatatttgcatctgtctggtgatcgcctgcctgttcggcgtgctgatgacccccacgtctctactgatcccgacatttctgacgcaaatggagaacctgaagccagtgcagaccggcacatcgacgtggattgctttcggtgcctaccttgctgcgacaccattggccatttacctggcaagacgaatggaaccccggctccttatcatctgcggccttatcgttattgccttgaccgcctggcaaggctctcacatcagccatgactggagggtggatcaattcgtcacgatccttgtcatgcagtcgttaggcgaaagcatcatgcttaccggccttattgccgctttcgtcaccaatctcaatccactgcacggtgtggcactgggggcatacgtatccatcgcccgcgtgctgatgccggttgcggccggtacagtcatgtcaacgtggctgcgaatgtccggtgacaccagtcgcgcaagcctgagcaattatttttcggctggcgatccctgggtagtggaacgtgctgaaccaggggtggcgggaatcgctcaattgctggcgcgagaagcgcacgttgccgcacatatcagcggctatcacctcgttttctggtgcagtttgctggcgcttagcctggccgtcttcatacgtccatccccgcctaatcagattgcacctccgctgttgaaagtaaccagtagtacgtaa

SEQ ID NO: 107946 - DNA, 1143 bp, Enterobacter aerogenes
atgagcactcctgaaaaagcaactgaacgacctccttttgcgctacgtattgcgccctggctggggtgcgttgccgtcatcaccttcgtattcctggcaacgacgcaatggtctgaatggacgagcagacacagaattcagacgacccagaatgcgtatgtgaaatcggattacgctgtattaagtgccaaagtatccggttatatcaaaagcctgccagtgggtgactacgaaaaagtacacgcaggtgaccttatcgcgcagatagatgacagcgaatatggatttgcggtagcggcggcacaggctgccctggctaaggcacaggcgaacctggataacctggacggtgaaattgcccagcaacatgcgcgtatcaaagcgtcgcaagccaacgtcaaaacggcagaggtaaggattatccagtacaagaataatccggcacggcaggcggaactcgtcaggcaaggcgcgttgtcacgtcagcgtttcgaaacggctcaggcagacttcgatcaagccgtcagccagcgtgacgcgactgctgcagagctggaactggcaaaccgttctatgaaagtcctgaagggtcagcgtgccgtgcgacaggctgatgtcgatgccgccagcgctcagctggaaaccgcactcagaaatctgacctatacgcgtattgtcgcgccctttgacggcatgttgaataaacgccatgtgcaagtgggcaacctgatcggcaatggagcgcagatcgtgtcgatcgtgccggactcgcagtcctacgtggttgccaactataaggaaacccagcttgcccatgttaaagcgggacaatctgtgacactgactgtggatggcttgccaggcaaagcgttccggggccgcgtttctgaaatagcgcccatgagcggtgcagagtccgctctgctgcccgcggataacgcatcgggcaatttcaccaaggtggtacagcggatcccagtgcgtatcgagctggagccgggccagaatgatctgagccgcttgcgggccggcatgtcggtagaaacacgcatcgacaccagaggggagattgttgcgccctatgcggcgggcatgcagaaaacagtgcaacttgccaccggccctggccgtgcaggagactga

SEQ ID NO: 107947 - DNA, 366 bp, Enterobacter aerogenes
atgcacattttgctcgatcaattcccgcaagtatgggtatccgccgcgccttcatccacctgggaggccgagctggatgctttgctaagccggggcgaacgttttgtcttattgacccgcaacctgcctgataaagagtactccagtagcacagagaaaaaagcgttcgctctgtggtttaaacgcaatcggaaacggcttgccgaagtttgcgcgggcagtattgtgatcgtccccaacaaaatggttgcgactggtttggctcctctggtagttccgttgtgcagggtgttcggttatccggttcgggtcgtgacagaagatcgtcttgatggcgaaatagccaatctgattggtgaatgttga

SEQ ID NO: 107948 - DNA, 768 bp, Enterobacter aerogenes
gtgcgaaacggaaaaattgacgatttcgatcagctgaatcgggaggtagtagcgctaggaaacgactatgcggagggatttttcctgccgccacaccagcaccgccgcgcgcagcttctgtatggcgcaacaggactgatgcacgtttcaacctgtgacggagaatgggtggtaccgccccagcatgcggtatggatccctgccaaaacactgcatgccgtaaagtttgtgggcgtcacgacgcgcagcctgtatatcgaacccgcctgcgcggacaaattacgtaacagcagccggtgcgaagtgatcagcgtatcgccgctattgcggcagctactgctggaggcggtggatctgccgccatgctatgacagcgtacgcgatcgggcactgacggatttaatgctgctggaactaacggcgatgccggtgcgcgagttcgatattcctttgccgcagcagccagggttgttggcgctgtgtcaggcttttttactcgccccagccatccacgatccggtcgagcgctgggccagcgcgctgtttatgagcgccagcacctttcgtcgctgttttcgacagcaaactggcatgtcgttttccgcctggcgccagcaagcctgtgtggttagtgcgctggcattgctgataacaggcaaacccgtgaatgaagtggctttgtctcttggatatgagagtgcctcctctttcgcaacgatgttccgccgcgttacagggcagccaccgtcatattaccatcctgcttga

SEQ ID NO: 107949 - DNA, 777 bp, Enterobacter aerogenes
atgattatcgcactggccggttttactaccggcatgacaacagtgctttttggctttggcggcggctttgtagtggtaccctttgtttaccagctgctggtgcggcagccaccgctggcaggtgatgcgatgcatatcgccgtggccacttcaacggcggtgatgatttttaacgcgggctgggtcagctttcaaaactggcgtgcgggcaggctttctttgcccatcttattcccgctgttgtggtttatcgccgtgggcgcagtgaccggttcgtggttggcgggaatattaagcgaggtgttgattcgcgagctgtttattttttatatgctgatgacgattggggactgtctgttgcgcaaaggtttcttcagcggcaatgcgccgcgtcgtttgtcacttttgacggtcaccggtggcggtatgctaatcggcacgattgccgcattgctgggcgtgggtggcagcgtaatgacggtgccgttgttgcggcgacacggtcatacgatgcgagagtgtattagcgcggccaacccgctttccctgccggtggcgttgtgcggtgcggtgacctatgcgataagcggttggcacaaaatttcggcaggcggttttgtgggttttatcagcctgaagattctgggcatgctcctggtggctggctgggcgggtatagtatttagccgccgggtgatccccgccgtccctgatgtctggcacgcgagaatctacgtgatgctgttgtgcatggtactggtggctatgttgctttaa

SEQ ID NO: 107950 - DNA, 288 bp, Enterobacter aerogenes
atgttgtcaagtcactacaggagcagtttgcggcctatgcggacattttcccggcacagcacagctatcgctcagtatgcggtctggctggcgctggctgaaaaaggaattggtgccaatctgcagcattataatcctctgatcgatgaagatattcgcactgagtggaatgttcctccatcattgaaactccgcgcgcacatgaatttcggtgctatcctttcacccgccagtgaaaaagcctttatgggtgatgaaaagcgattcatcgttgccaaacagtcctga

SEQ ID NO: 107951 - DNA, 573 bp, Enterobacter aerogenes
gtgtctttacagccagttgaactgaataaagcataccgattattgcaagtcggcccaactacaatgatttccgctaaacataatggtaatgccaatgtaatggccgccgcatgggtgagtctggtggggatcaataaagtcatggcgtatatcagtccgcaggcttacacccgtggattggtggaagaaagtggtctgtttgccgtacagatacccgtagtcagccagatggaaaccgttttgtacgcaggtgagcacagctaccgtgacaggcctgaaaagaatcataaaataccgatgttctacatgaaagagttcgatattccgctggtagagggctgtgctggctggcttgtatgtaaggtaatgccaaatgcggaatacgagctggaacataatctgttcatgggagaaattgccggggcgtggagtgacgatcgggtttttcgcaatgggcactggatatttgatgaagcaccagacgaattacgaaccatacactatgtcgccggggggcagttttatgccatcggcaaaggaacccgctttgaccatggtccgggcaaagactga

SEQ ID NO: 107952 - DNA, 516 bp, Enterobacter aerogenes
atgaaaacaactgtatttgttacccaccccaacattaatcagtcacgggtaaactcagccctggcaaaaggtgcagcatcactgaccgacgttgaagtgcgttatctgtatgacctgtatccggatggcaaaatcgacgtggccgctgaacaggctgcactggaaaagacggatcgtatcgtgctgcaatttcctatgcagtggtacagcacgccgccacttcttaaacagtggcttgacgatgtactgacgtacggctggtcacatggtggagaaacacaggcgctgcgcggtaagcaactcatgctggccgtttcgctgggtggtgcagagtctgcctatcagcctgatggcgctgccggacatacggtaggcgagtacctgctgtcttttgaaaccatctccgggtatctgggtatgaactacatcaagccgtttattacaggcggaagcgcgacgataactgacgaagaaatcgcagctcaggtcgaacaatataaaacggtattagcctga

SEQ ID NO: 107953 - DNA, 966 bp, Enterobacter aerogenes
atgaaaatgagaaggttaggtagccagggacttcatgtctcggaaatggggctggggtgtatgggcatggaccatggctacggctattcagttgaaatccgtgagcgaacaaagctgatagacaaggctgtagaactgggctgcaaccttttcgacactgcccccatttacggatttgaaaacgaagaactgctgggtgttgcgctcagcaaacacagggacaacgttatcatcgcgaccaaattcggcgtgaccggaatggaaaacattgatggacagctggtgccggtattagacagccgtccggcgtctgtcagagagcaactggaaggttcactcagtcgtctgcaaaccgaccatatcgacctgttttatcagcatcgtgtcgatccaaaagttgagccggaagtggtggcgggattaatgaaagagctaatcgcggaggggaaaattaagtactggggcttatccaatgcgcccgtatcttacatacgccgggctcatgcgatctgcccggtcaccgcggtcgaagaccagtattcaatgatgtggcgtaaacctgagcaggatttgttcaaagtctgcgatgaacttgatattggctttatggcctacagcccgctgggtaatggattcctgagtggtcaggttaccgctgatacaacttacggggaaggcgattaccggggcatgatggggcgcttcaaacctgaagtaatggaaaataaccaggcgctactggatttgattgctcaaatcgcggaaagaaacaacgcaacttcagcacagattgttcttgcctgggagctggctcagaagccttacatcgtaccgatcccgggaacaacgaaattacaccggctcgaagagaattttcacgccgcaaatattcagctcagtgacgctgaattaaatgatatcaatgaagctttatcccggcttgaaattgacgaaacattcttctga

SEQ ID NO: 107954 - DNA, 897 bp, Enterobacter aerogenes
atgatgaataaacttgatgcgctgaaattttttgttgccgctgcagaaacgatgaactttcgtgaagcagcagtcagactggccatttccccttcagtggtgacgcggactattgccgaactggaaaatcagctcggcgagccactttttaagcggaatacccgatcaattgtgctgaccagctttggtgagcttttcctgccgaaggccatgcggctacttgaagattcagaggccctttttcagacggcccgagatgacaatgacatgaagggcgttgtgaggatcacgttattccggtttcccggccacgagcaggtgttatatgagcttcttacctccctcgatccttatcctgagctgtttatagactggcggttagacatgatgaagctggatactgttcagaaccgcattgacatggggatccgtatagagcgggagccaaacccgaattttatcgtcaggcccattacgctggttcatcacgcgctgatgacatcacccgggctcattgagaagctgggcgcgccgaaaaatttcgacgatctgcgccagcgctaccctttcagtggcctgctgaatcctgaaaccggaaaagtattcgaatatatgctcgatggcgttgatacttttgtaccgcgccatctggagttttttaccaccgactcccagtcggagatccaggctgcgttagccggtaaagctgtcattcagtcgagtaatctggcctgcagggaataccttgaagacggcaggctggtcaatgtcctgcccgaactgaaactggaaacctggcagctttatctttacaggccctatcagaccctggtaccgcagcgcatcaggaccgtttttcacatccttgaaagtattttactcagacacttcagttga

SEQ ID NO: 107955 - DNA, 888 bp, Enterobacter aerogenes
gtggatcgtattcaggctatgcaggtttttataagggtggctgaggccggaagcttcgtccgggccgcggaaacactttccctgccttcttctactgttaccagcaccatcaaaaacctggagaaatatctgcaggtgcgtctgctgaaccggaccacaagacgtgtcagccttactccggaaggtctgcagtatctggcgcagtgccgggaaattctggccttagttgaacatacggaagccagtctggccgatttgaacaggcgcccccgtggccgtttacgcgttgatatgcccggcggtatagcgcacttcatcgtcatgccaaacctgaaagagttctacagccgttatcctgacatttacctgatgaccggcgtcagcgaccggcaggttgacctggttcaggagggtgtagactgcgtgatcagaaccggagagttacttaactccacgcttgtagctcgtccgctcggagaatttcgctggataacctgcgcctctcccgactatctcagggagtacggtattccgcagtcacctgaagatctgtctcatcatcgggctattcattatttttccggacaaagccggcgtacagacgaattgcgttttgtaaagggaacagaaacgctgtccgtatccgtcagtgggcaggcagccgtcaacgagacggggctttatataaaaatgtgccttgaagggttcggactggcgcagcttgctgaaaatgttgtagcagaacacctggagaaaggaacgttggttgaagttctggccgactggcagccgccgtctgttcctgtcacgctactttatcctcatcaacgttttctttcccctgctgtacgtgcatttgcagactggataggtgaaatattcagttga

SEQ ID NO: 107956 - DNA, 1398 bp, Enterobacter aerogenes
atgaccgattacatcagaaatattgttaataatcagacggaaaatgcgccggtaaccctgatccgcggtgcaaccatactgagtatggatgagaatgttggtaaccatgaacgtggcgatattcttgtcacaggttcaaccatcaccgcaatcggcaaggacctgaacgccgagggtgctcaagtcattgatgccacaaatatgattgccatgccggggatggtcgattctcatcgtcacgcctgggaaggtcagctgcgccgcatcaaccccaacgccacctgtctggacgactacagcaatgccacgcatttctcgttcgcgaaatattaccggcctgccgatatctatgttggcaacctgctgacggcgctgggcgcgattgatgcgggtatcactaccatgatcgataactcgcacaacagccgtaccgcagcgcattcagacgccgccgttgaagccctgcttgatgccggtattcgcgctattcatgcgtccggtgcgccggtagcaggcgaatgggataaagcgcactggcctggcaactggcagcgtctgcaggaaaaatatttcagggataatcctgatagtcttgtgacgctcggcgtcatggcccagctggagccggaattgtgggccgaggcccgcaggctggggctgccaatcgtgaccgagttctttggtgctgagatggcctccgagcttgaatcgctgcatcagcagggcctgttgggtccggacaatatctttaaccactgtaccgcgctgcctgatgagggctgggaaatcctgcgtgaagccggcgtgcgggtaaacgtctgcccgcgctcagattcgcactacggtattgaaagcgggatgtttgctattgaggctgcgcagcgtcatggcattacaccgggtctgagcgtggataacgaaacgtcttacagcaccgacatgtttatggaaatgcgcgtggcgttttatctgcagcgcgtaatgggtatgcataagcagcactgctgtgattcagatcattctttgacaacgatcccggcagcgcagctgcttaaatcggcaacggtcgatggtgcattttgtgccggtctgcaggataaagtaggcagcctgacgccgggcaaacaggccgatctgatcctgattaacgcggctgacctcaacctttacccgaacggaaatgcattcggaacggtggtacatgcagctgaacgcagcaacatcgataccgtgatgatcggcgggcgcatcgtcaagcagaacggcaaagtgctgggtgtggacagtgagcgccttcgcgccgccattgatgagtcacgcgagcatctatttgcggcagcagggtatgagccagacatctttgcggaaaaattcctgccgctggtccaggcaaactga

SEQ ID NO: 107957 - DNA, 861 bp, Enterobacter aerogenes
atgttttcagtggctgctgatgccagaaatttgctgggagagtgcccaatctggtgcgagaggacacgcaggatttactggactgacattgaaggcagcgaactgcttgcccttgaagaagacaccagtgttgtgatgcgctggtccctgccggagcgcctcggttcgtttgcacttactgaaaatcctgacgttttactgatggggctggcatccagattcgccttctgcgatctgaatacaggtacctttatgccgatagtggcgtcaccaggaggaccgggaacacggacaggggatggtcggtgcgaccgtgagggtaatttcgtcttcgggaccatggatgacgggtaccccgcgaaagtcataggaagatttcacaggctaaatgcagcgacactcagcattgagactctacccctgcctgaggtggccatcccgaacagcatctgcttcagtccggacggcagcacgatgtattactgtgactcgatgcagggccgtataatgtgctgtgattacccctctatgaataaccagcgcgtgttcactgtaacagaaggaaagggggcgcctgacggctcctgcgtggacgcaatgggctatatctggaatgccgaatggggaggaagccgtgttgtacgttatcgtccggacggaacgacggaccgtatactgccctctccaggaattcagagcacttgtccgacactcgcgggagaagcattcacaacgctgtattgtaccagtgccagcgtgggtctttctgtgccgtcaaggcatgatggagcgctgctgagagcgaaatcagccgtattccccggtttaccggagagccggttttcagcgcacacagcataa

SEQ ID NO: 107958 - DNA, 954 bp, Enterobacter aerogenes
atgaacaaaactgatcttaacgctacgtctgagaaaatcctcgtgctcggtgccggtgagctgggcctccccgttctgcgaaatcttgcccttcgggcaaaagatgtggagggaacgaaaatcagcgtactgctgcgcgaaagtaccgtaacgtcagatgaacctgtaaaaaaattagttatcacggaaatcagaaacctcggtattaatatagtcacgggcgatctcgtcatgagttctgtcgacgatttggccagcctctttgcgcaatttgacacagtcgttggctgcacggggtacgcggccggaataaatacaccaatgaaactggcgcaggcggccctgcaggcgcgaattccacgctattttccatggcagtttggtgccgattttgatgccatcggacgtggcagtccacaagacatcttcgacgcgcagattgacgtgcgtgatttactacgcagccagcatgaaactgagtgggtcatcatttcgaccggcatcttcatgagctatttgttcgaaccagacttcggtgtggtcgatctgcagaacgatactgttcacgcactcggcagcattgacaacaccatgacgctgacaacacctgatgatatcggggtgctgacggcagcgatcgtatttacaactcctcgcatccgtaatgaaattgtgtatatcgccggtgatacactgacctacgcagaggttgcagataagctgcaatcagcgcttggccaccctttcgactgcacggtatggagcgaagaatatctgatagataaactggcgctcaacccacaagacatgatgtctaagtatcgtgccgtttttgcgcaggggcggggagttgcatgggataaaaagcagacattcaatgaacgccataacattcgggtcaccgatgtggcagcctggattaatgcaaacctggccccgggcagctcgctataa

SEQ ID NO: 107959 - DNA, 414 bp, Enterobacter aerogenes
atggatcgggacgaaattcttcagtattcgcaggctgtttgtaagggtctgagagacgatgatgatggcttgcggcgggaggtactggctcatgcaggcagtcgatggtcactgggtatcgtcaacacgcttggcgtttatggcagactacgtcacgccgaaattggcaggcgtatgcacggagtgactcagcgcatgctgacacgtacattacgacagcttgagcgcgacggactggttattcgccatgatttcagtgaaatcccgccacgagtcgaatacgagctgtccgatacaggtatggagttacttgtgcgaatgatcccgctgtggacctggattgtcgataatgctgatcgctttcgtgaagaccggttgagatatgaaaaaaataacaataacccaagggcgtaa

SEQ ID NO: 107960 - DNA, 789 bp, Enterobacter aerogenes
atgtcttttcttgttcctcgtaccaacattttgaaaccaggtatcatttattttcctgggggtgggtttatgaccgctgaacacaacaaatttgtggagatgcgcatggctttagcggaggctggctttgttgttgcagcggcagaatacaggacaattcctgatactttccctgcgccagtgatagatgctaaagcagcagtaagataccttcgtcaacatgcccatgattatggcattgacccctcacgaattggtgtaattggcgattctgctggaggctggctggcgcagatgcttggtaccactaatggcgataagtcattcgatcacggcgattttctcagccagtccgctgatgtgcaggctgtcgctacgctttacggaatatcagatctgcgtaacataggtgacggttttccggatctccgacaaaaagtgcatcagtctcctgcagtcacggagtcactgctaattaatggtgtggctttcaagaattttgcaggtgcctcaatcagttctgtacctgaaaaagcgataaatgcaagccccatagggcgtctcaagggatgtaaacctccgttcctaataatgcatggaagtaaggatacattagtatcacctaaacagagcgcaacgctttacaaagcccttttggaatcgggaaacaaagcggactacgtccttatcgaaggcgcagaacacggtgatgatcactggtatcaacccgttgtcataaatagggttgttgactggttccgcgtgcatctttgtcctgaaaatatatga

SEQ ID NO: 107961 - DNA, 1389 bp, Enterobacter aerogenes
atgctgcgccttacccttgcatcaggtgtattgcgagtcggcgacaggatgatctccgcacgtaaactggccgaacgagagcaggttagcctcccaacggcactggaagcactccgttgtctcgaggccgagggcctgattgtagcgcgtccgcgttcgggctacttcgtttgccagataaacacatctcagaacatgccgtcttcccaggatttacctggcccagttcccgtgacaatgtcagcagtagcccgttcactatttagtagcgcagaagcccgtctggtgccacttggtgcagcgctgcccgatccaatatggttgccaacaaacacgctacagcgggcgctacagactgcaacccgccgccttgacgcgcacgggcagagctacagcctgccgccgggaagggcagacctgcgcagaaatatagccgtacgcgctgcacagtggggagcccgttttggttcggatgatctcgtcatcacggctggagcgacgcaagcactgcgtctggctctgcgggctgtatgtcagccaggtgacgtagtggcaattgagcaacctgcctacttcggtacgctcctgctgcttgaggacttaggcctcaaggcattgcaaatccccacggatcctgctgaaggcttgttgctggcatctctggatgaagctattcagcgtcaccgtcccgcagccgtgctggcttcgcccacggtgcaaaacccactcggtgccagtatgcccgtcacccgtaagcaggaacttgttgctctgattgaacgtgcaggcatccctttaattgaggacgatgtgtatggtgatctggccggtgaagggcagcgtcctccggcctgcaaggcgttcgaccagagcgggagtgtgatctactgcagttcattatccaaaacccttgccccgggctggagaatcgggtgggttgcggcaggacgctatcacactcaggtattgcaggctcgcatggccggggattgggctggcgcaccgctgcttgaggctgccgcgagcaatatactggcaagtggggactacgatcgtcatttacgacgcttgaagttccggatatcagagggggtacaagccgttatcgcccgggtcaaggcaagcttcccacagggcactcgtgttaccgtgccgacagccggtttcttgttgtggatagaactcccgcatccgctgaattcattggtggtacaccgtcgcgcgctggcgctgggcattggtgtcagtcctggcctcctgttttccccaggggccgagtttcagaacttcctgaggttaaattgtgcgaatgaaccctcgtccacgctgctcaatgcagttgaaaagatcggtgcgctttgtcatgaactggcaggtcagcgcaaataa

SEQ ID NO: 107962 - DNA, 789 bp, Enterobacter aerogenes
atgcatagcgataacttcgatctttctgcttatttccgtcgcataaactacaccgggcatgcagccgccgataccgccacgctgcacgcgctcatgcgtcatcaactcttttcggtgcccttcgagaatctggatgtacaggctggcaaagtcgtatccctggtacccgaagacattgcagataaactgctacatcgaggtcgtggcggatactgctatgaggttaatgggctatttgcaatggcattggacgctttaggtattacctaccgtttcgttgccgctcgcccgatgttctacccggcacgccgaccgaaaacgcatatggcattaattgctgaagttgatgatcgcctgtggctttgcgatctagggttcggcagctatggtattcgcgcgccgctcgctatagacatgacagataccgatatcgaacaggatttcgacactttccgacttatccgtgacgttaataacgagtatctgctacaagcgaaggtggagggtgcatgggctaatcaatacagttttgatctgtccccccaggagtggattgatttcgtcccggccaactacctcaattccacccaccctgatgccatctttgtgcaaaagttactgatcgtgcagcacgcccccgagggtcgcctgattttgctaggtaatttgctgaagacgatcaccgcagagggtatcgaaacgcaacaactgatggatgacggtattgccctggccctgaaaaatcgctttgctctgcctgtaccgcaatacatcgggaagagcgcttaa

SEQ ID NO: 107963 - DNA, 1524 bp, Enterobacter aerogenes
atgtacagaaaaaaaagaggaacaatcaagccagtagctattttgattgctatattttctgcttgcttgattttggactttcttttttttgtatatgatactaacaataaaaacaaagaaacaatatccgaaatatcacgcatcactgataacatgatctcgtatgcaaataaaacaaatgatacagtaatgagtattacatctagtggaaagaattgtgatgattatcttcctgatattagaaggcttgttactataactccctttatacgctccactttttttggtacgaatgatactataaaatgccattccctcattgggcgattagatataaaagacccacaaccatcttatgtgtccaataagatggctttgattgcaggaagtttgattcagacaaagcatccaattcttttggtcaggaagaaatataattcagacttctatgctactgcgatcgatggtatgtatttgcaaatgataatgaagcagttgtcagagtcaggtttgtcaatagagcttaaggttggcaatgtttacttatcagcaaatggtgaattatcattaacctccaataatagtaaaaatgtcgcatttcaattcataaactcagtaaaatatccataccggttaagtgcaggtcttaactatacttccgtttttattgcttacttatatatccaacgctatcatatctatgccctagtatgtctttttgtggcattgttatttattatcattaggcgttcaagactgcattacaccctaactgatgatatgatactgggtcttgaaggtggagaatttatagcttatggtcaaaagataatcaacattaaaacaggtaaagcaagtggcatagagattctggttcgttgggtccacccaacgcatggacttattcgaccagatatgtttatacctcaggctgaacaatctggaattatcatcccaataactcaaagtttatttaaacaagtctctttggctattaatcaaatagaggagcctttttctgaagagttctacatttcgtttaatgtaacagctaaacactttcataatctaactttatttaaagattgcttccaatttttaagccaattaaaagacaataaaataaaacttgttttagagctcactgaaagagaagaaatccctcagaatgaaacaagcctcagattatttagactgctaaaagacttgggtgttgaaatggccattgatgattttggtaccgggcattcaagttactcttatttacataatcattacatttcaatacttaagatagatcggtcatttatagataagattagtgtcgatgctgtatctggtgtactaattgatagtattatagagcttggacataaattatcattaaaaatgattgctgagggagttgaaactgaagaacagattaaataccttgaagaaatgaatgtaccatatgcgcagggctattattacagtagcccacagccgtttaaagatttaatttatgacttgaaagggatttaa

SEQ ID NO: 107964 - DNA, 1203 bp, Enterobacter aerogenes
atgaacgctgtcatcacatcttcccagcgtcgcgccctgcgcgcgctgagcatcgcatactttatacaggctaccggtgcgctgtctgtcgccggcagcctgcctgctatctccgcagcctggttgctgactgatgcgcagagtgcacgcttactgagtattttcggcctgacctttgcactggctgccccgctggttcaggtgctgtttggtcacctgcgtcgccgccagctggtgcttacgggcatcggattatttggtctgggtgccttcgcttttgcgttgtctccgacctacagcgcgctggttacctcccgtttaatgatgggcatcggcgcaggcttcatcggcccggtactggttgcgctgggttctgagctggtgcatgaacagcagcgcgggcgggctatcggcatggtacttctcggcgtatccatggcgagccttgccggcataccactcgccgcgtgggttgccagcttgtggggagcgaaagcattgtttgcgctggtcggagttgtgagcctgctgagcggtctgaacgtcctgctgacggtaccggatgaaagtgcggggacgcgtatccggctcagtgagatggctagcgtgctgtttgagggaaaatacctgacggcgttcctggtagtgttttttattacctccggagtttactgcttttactcttttatcgctccgctcatccgtgatacctacgccggcggcacgcatgcaatctccgcggcgctggcggtgttgggtgttgccggagtactgggaaatctctgggtcacccgcgcatcgacacgctttaggtctgaaacactgctgctgacgggcatgacactgctgatagtggatatggcgctgattgccctgttgccgaaagcgctgggagtgctgctgacggcactcgttttctgggccttttccactgatctgctctggcccagtcagcagcgcaggatcgttgaactttcgtcagtccggcaccgcggcattgcactggcgctgaccagtgcctttatgtttggagggattggatttggctcagcggcggcttcttgggtttatccggtagcaggattttatgggcttgctggtatgtctgtggtctttattgtgctggcgctggtcagcctgcagctgtcagaaaagttcagaaaatccgttaaaattgctcagccctgtaagaatgaagcctga

SEQ ID NO: 107965 - DNA, 762 bp, Enterobacter aerogenes
atgatactgacccataacaccatcttcatcaccggcggcacctctggcatcggacgtgcaatggcagaaaaatttcatcagctgggcaaccaggtgatcatctccgggcgccgcgaagcgttgctgaaggaggtaaccgctgctagcccgggtatggattatgtggtactggacgtgacgcgcgccgacagtatcaaggccgccgcacagagcgtgctggaacgctatccggcgctgaacgtggtcatcaataacgccggtatcatgccgtttgacaatgcggcgggcgagctggatgacgcacaggcggttacgctgctgaacaccaatattctgggcccggtgcgcgtcagcgcagcgtttattgggcacctcaagcaacagccagatgcggtgctgatcaacaacagttcggtgctggctttcctgccgctggccaccaacgcgctttactcagcaaccaaagccgcgatccactcctacaccctgtcacagcgcttcctgctgcgcgatacgggtgtgcaggtcattgaaatttctccgccatgggtagatacggatttgatttacaagagtggcgacccgcgcgccatgccactggatgagttcatcagcgagacgtttgacaagctgggcacgaacaccattgaagctatcgttgatcgcgtgctgcctattcgtaataacccgggcgcagacgagcatactctggtgaaccagttcaatcagtccgtggcggataacccaatccctgttcagtaa

SEQ ID NO: 107966 - DNA, 816 bp, Enterobacter aerogenes
atgacgcagcagacacacaccgaccgcggcaccgcagtcgtgaccggcgcttctaccggcatgggcgcactgtatgccggccgcctggcacgcatgggctatgacctaatcattgtggcgcgtaatcacaaccgactgaaccagctggctgaacacatcaccaccgacagcggacgtagcgtggaagtcgttgtagcggacctggccgatgccgctcaactgagcaagctggaagaaaagctgcgtcaggacgcgagcgtcacgctgctggtcaataacgccggtatcggcacgcacaccccgctgctacagagcggtgccgacgagatgacggccatgattaacctcaacgtcaccgctctgacccgcctgacctatgcggtagtgcctggcatggttgcacggggacgcggggccatcatcaacatctcctctatcgtcagcattgcccctgagctgttaaacggcgtctacggcggcagtaaggcttatgtactggcgttcagtcagtcacttcaccacgagctggccggtaagggcattcaggtgcaggccgtactgcccggcgccaccgccacgccgttctgggacaacgggggtctgccggtggaccagctcgatccaaacatcgtcatgagcgcgccggacatggtagatgcggccctcaccggatttgcccgcggcgagctcattactatcccgtccctgcaggatgaggccctctggacccgctacgaacaggcgcggcaggccatgatgccgcaccttggaagcgacgcgccagctgaacgctatcagcccgtatccgtacactga

SEQ ID NO: 107967 - DNA, 939 bp, Enterobacter aerogenes
atgcaccgggtaggcttactgatttccgatcatttccaggttctgggattatctacgctgagtatctttgaatttgccaatcaggttgccggcgaaccgttctatgactgtacggtttattcagagtacggcggttcagtgaagtcatcttacggcttcggcgtggacagccagccgattgctgcggacattaaagtggatacctggcttgtcgcgggtgtgcttactccgctggagttgccagcctcgccgggcatcgttgattttctgaagacccatgctccctgtgcacgacgggtggccggtatctgtaccggggctttcgtgctgggacaggccggtctgttatctgagcggcgcgccactacgcactgggtacacgcgcaaagtctgaagaccctgcaccccaccacgcgcgttgaagaagaccgcatctttattattgatgaccacgtctggacgtctgcgggactcaccgccggactcgatatggcgctgggcatggtagagaaagacctcggtgcgggggtggcccgctccgtggcacacctgctggtcatgcatcatcgccgctccggcgggcagacgcagcactccgaaatgctgatgctctccccacgtagcgaccgcctgcagtcagctcttgaatatgtgcgtaataacctcagcaaagcgctgaccattgaagacattgcggatgcggtccacgtcagtgcccggcaactcagccgcctgttccgttctgaaacgggcaaatctcctgccaaagccattgaggggctgcggctggaaaatgcccgactgctgatcgagcagagcaggctgtcgatggaggtgattgcgcgtgagtccggattccgcgaccgtcgtcatatgcgggaagtcttcattcgcggttacggcattccgcctcagtccctgcgcactggtaaagcctga

SEQ ID NO: 107968 - DNA, 210 bp, Enterobacter aerogenes
atgaaaactgtaaaatccgctctgatgattgccgtactctctgccgtttcatccgcaagcttcgcccaaagtatcactgctacggcttccacggtggatgatgcggaagcacaaattgctcagcaggcgcagaaggctggcgctcagtataaaattactgaaagctatgccggtaatcaggtccacatgactgcccgtctgattaaataa

SEQ ID NO: 107969 - DNA, 210 bp, Enterobacter aerogenes
atgaacactgtaaaaatcgctctgcttatttccgtcctgtccgcagcctcattgaatagctatgctcagagtatctccgaaaccggatcaacgcttgacgatgctgaatctcaaattgcacaacaatcgaagcaggctggcgcggattataaaattaccagcagctacgccggtaatcaggttcacatgacggcgacgctgctgaaataa

SEQ ID NO: 107970 - DNA, 966 bp, Enterobacter aerogenes
atgatacgtcttgaagatgtgactttgttcgtccgttccgccgcgctgggcagtttttccagtgcggcacgcgaagcagatattctccccggccaggtcagtgctgcggtcaatcgcctggagcgggatctgaacaagcgcctgtttgcgcgctcaacacgcagccttcgtctcaccgccgaaggtgaagcatggctgccctatgcgcaggagatgctgaatattctgcaggcgggatctgaacgactgcaaggcggggagaatgaaatacagggtgaactgaaaatttccgttccgtcagatctcggacgcaacgttttactgcccgtgatcaccgcgttctgcgagaagcatcccgggatatcgctacgcatcttcatgtccgataatgtcagcgacgtgttccgcgatccggtggacgtagccatccgctacggcgttctggaaaacagcagctacgttgctctgtcactggccgaggataaccggcgtgtgctggtcgcatctccatcctatctgaataagaatggccgcccccggcagcttgacgatctggttctgcatcactgtctgctttatacgcttaatggacatgtgtatgacaaatggtccttcccggaaaacggcgtcagacgccagctgacggtaagtagtcggatgctgtgtgacgacgccgatctggcgcggcgctgggcggtggcggggatcggtattgcgtataaatcatggatcgatgtgagtgcggacgtgctggcaggcaggcttgaggttctgctgccggaacagcctggcgaaggggtgccgctcaatcttatctgtccccaccgtaaacagttctcgcctgcgatacgcgaactgcatgcgcagctgcgtgagcacctgaaagccgtgacggcgctgatgcgcacccatccagcttttgtcccgaccactcaggccacactgcccgcgaaccagagcccataa

SEQ ID NO: 107971 - DNA, 558 bp, Enterobacter aerogenes
atggccagaccgagaaagataagtaatgaagacatcctgacccgcgtcattccggtcttctggaagagcgggctggcaggcaccagcctcggacagcttgaggaagccacgaacgttaaccgctcgagcctgtacgcgaccttctgcagtaaagaacagctgttcgtgagcgcgcttgaatactatgtcagtagcgcaccggcgcagtttttgctacaaaaacaaccgtatggctgggacaacattgaggcgttcctgttagctgcccccttcaacaatcccgcctttaacggctgctttctggtcaactcttcccgtgaggtgggcgaactgcctgatgaagcactggcgattgtgcgtaattttcgtgacgcggtcgtggcgcagatacagctgaacattccggctgaagaggccggaggcaacagcggggtaatggctgacatcatctggtctaccctggctgaagcctgccttgaggcgaacgatgccctcgacagggcggcctggcagcagcgtgtcatccacctgctaaagtttcttaagtcttcccgctaa

SEQ ID NO: 107972 - DNA, 666 bp, Enterobacter aerogenes
atgattgctctcctgaagtcaaccagctttgctttcgggatcagcgccgccgtcgtggcgcatacgctctggaccagcgcggctcccgcaatgatctatccgctttatgccgcgcagtggcagctatcgatgacagtgctggcgatcatctttggtctctatcccctgagcgtagtactgacgatgctgatgtctgctggtctttccgacaggctggggcgaaagcacgtcatgctgggcgggctggtcagctccgccgctggcgtactgatgtttgccgttgccggagaggtctataccctgatggcgggcagggtgctaatggggataggtgtcgggctgtctgctggtccttccgccgcagccctggtgacgtgggcgcctttgcctacgcgcctgagcttttacgttctgttcgcgctgctgcttgtgcttttgctgctgtgtctgttcatcccggctgaccggccatccgatccgacccaccgcctgctggcgcgccatcacgttccgccctaccccgacgtgagctctcttttgccgcatccgggattatggggccggccatgtatgcccttgaggatacgcgtcacctactcgacagactttacacacggggcgcgttgcgcctgtttgacgtggacggcagctttgaagaagaagtga

SEQ ID NO: 107973 - DNA, 393 bp, Enterobacter aerogenes
gtggacggcagctttgaagaagaagtgatcccgggtgtgacggtgcgtctgagcgggggccatactccgggttcgatatccgttctggtggaaacagcggaaggactggcaaatatctgtggggacgtggtgtataacctggagggtagccttattgatccctttctcgacagtctgaactccggtgaaccgaccatcaccggtaaccgggcaatgtctacactggaagaaaaaacggccatcaagaaagcgctgtccggcgtgcggtttataatgcccagccatgatctgccggcactggtacagggaggacgggtgacaggtatcctgcacaacgccatatcaaacccaaaagcccgcgtcactgacccttcagcctacagccttctgtaa

SEQ ID NO: 107974 - DNA, 1002 bp, Enterobacter aerogenes
atgaaagcgatcgtttatacccagcacggattgcccattactgacccccgatctctctttgagaccgaactgccaaaacctcagccggttggtcatgacatcctggtcaagatccgggcgatttccgttaaccccgcagacaccaaggtgcgcgcaagctcacccgttacgcagccgcgcattctcggctgggatgctgtgggcgtggttgaagccatcggtgaagacgttacgctgttcaggcctggtgatgaggtgtactacgccggtgcaattaaccgccctggctcctatgcagaatacggtctggttaatgaacgtatcgcggcccataaaccggcctcgctgagcgatgccgacgcagcagcgttgccccttacgtcacttaccgcctgggagttgctcttcgaccgcctggaagtcacagacggacatggtgatgcgctcctcattatcggcgcaggcggcggtgtgggttcggtgctcactcagctggccagcaggctgaccggcctgcgcgttatcggcaccgcctcacgagcggaaacggcagagtgggtgcgtgaactcggcgcccatgacgtcatcgatcactcccgtccgctgctggaaggcctgcgtgaaatcggcgtctcttccgtacgttacgttgcaagcctgacgcacaccgataagcactatcagcagattgtggaagtactggcgccgcagggtcgactggcggtgattgacgatccggattcgcttgatgcggttccgctgaagcgcaaatccgtttcgttgcactgggagctgatgtttacccgctcactgttccagacccccgatatgatgcgccagaacgaaattctggaaaacgtccgtcgcttgatcgaggacggcaccctgcgtaccacgagaggcgagcattacggaaaaattagcgcggaaaatcttcgcaaggcgcacgctttcatcgaaaacgggcgggcacgcggaaaaattgtactggaaggtttctga

SEQ ID NO: 107975 - DNA, 1200 bp, Enterobacter aerogenes
atgatgaaaaaacgtatgatgaaaacggcattagcgctgtctgtagcgctggtggcaggcagcaccgccctgaatgctcttgcagcggaagcccaggcgctgccagctctcagcgagctggctcaggatcgcaccatcggaaaacccgaagtggtggcgacgtttagcggtgccatgccgaccggggttaccgtcaccgaaacgggccgtattttcgtgaacttcccgcgctggggtgacgacgttccatttaccgtggccgaggtaaaaggtaaccagctggtaccttacccggacgcagctataaatatcgctgacaattctgcaccccgcacgcatctgctgagcgtacagagcgtggtggccgatggtcggggccgggtctggatactcgataccgccgcgccgggcttttcaaaaccggttacaggtggcgcaaagcttgtcgcggttaacctcaaaactaatcaggttgaaaaaaccattgttttcccggctgacgtgataagacctgccacctacgtcaacgatatgcgcttcgattttcgcatcggtaaagctggcgtggcgtacgtaaccgactcctcgctgtcaggtactggcgctatcatcgtcattgacctggacactggcaaagcgcttcgccgtctggaaggcgaccgcacaacctcgcctgaggcaggcttttcacctgtcgtagagggcgagacgctgctgcagcgtcacccggatggaacgacagcgccgttcagcgtggcctccgacggcattgccatctctccggacggtaaaacgctctactacagtcccctgtcgggtcgtcatctgtatgcggtttccacggcgcagcttcgcgatccggccgtaactgagtctcagctctcttcatccgtgaaggatttgggtgaaaaaggggcgtcagacggcctgcaaagtgatgcgagtgggactgtttatgccggtgactatgagcgtaatgctatccgtaagctgccggtaggcggggagtggacaaccattgcgcacggtcctgaaattctgtggccggataccctgtcagtcggaccggatggctatctgtacttcaccacgaaccagctgaaccgtcagcctggcttccacggcggtaaggatttgcgtcagaagccttatgccctgttacgcatcaaaattaatgcagcacccgcaccaacgcactaa

SEQ ID NO: 107976 - DNA, 375 bp, Enterobacter aerogenes
atgtatgaggttgatgaagaccacattgattttcaggaggtggtcgacgggctttactacccgttttatatggagtgggcccgtcacgccttcatgaaagaagcgctggggatcgatattgaagaggagttcagccagggacgcatttatatggtgctggagtataccttacgtttccgtcagagcctgaaaaaaggagacagaatggaggtgacctgccagctggaaaaaaatgtgaagcgcaaccgcgtgaatttttaccagcaaatccgggttgagggcgtgatctgcgctgaagccactttcaccgccgcctgcctgttcaatggccgcccgtcgatgcctgaagcagtgatgaatgccttagccttctga

SEQ ID NO: 107977 - DNA, 204 bp, Enterobacter aerogenes
atggaggatgctgcgacagagtccgaattcggtcccggtgatatgctgttttttgaacgcaacgttgtgcatgcactgcccaccctgctggaagagcccgtgatttttctgaccctggatacgccccggcgttcgcccgaagatgtcgtatttatcgattcggatgccggcaatgccggtacgtttatgcacagaaaccgctga

SEQ ID NO: 107978 - DNA, 537 bp, Enterobacter aerogenes
atgagccgcttacataccatcaccgaaggcgaagcaaccggtaaaaccgcacaactgttcagcgctatcaaaggcagtatgggtaaagtgccgaacgcctatctgaccattggcacacagtccccggaaatactggaccagatgctgcagctgaacgccgcactgcataaggggagtctgagtgggcgtgagctggaagccattaatcttgcggtaagcgaagagtctggctgtgactattgtcttgccgcccacacgctgatggcaaaaaaggccggatacactgacgagcagacgcgtgaattacgcgaagcccgcttcagcgatgatgagcatattgatgcgctggtgaagttcgttcagtatctggtttcatcgcgcggtaccgtggcggctgaacacgtcgagacgttccgtcaggcgggattcagcgaccagcaggtcgtggaaactatcggtgccgttagcgccatcctgtttaccaatatggtaaaccgcgtgaacgataccgttgttgactttcccaaagtgaactga

SEQ ID NO: 107979 - DNA, 888 bp, Enterobacter aerogenes
atggtttatgacacgattatcgtcggtggcagctacgccggtatttccgcaggcctgcagctcgcacgggcgcgtcggcagattttgatcatcgatgcagggaaacgccgcaatcgctttgctgacagttcgcacggctttctggggcaggatggagtgaatcccggcgcaatagccagcaaggcgcgcgagcagctgatggcctatcccacggtcgaatgggtgacggacaccgccatccatgcaaaagcggagcaagagggctatgccatctctgtcggatccgggctgtcctttgcggcgcgccgcctgattctggcgacgggggtgaaggatgagctgccgccccttcctggactgaccgcgctgtggggaaagaagatttttcactgtccctattgccacgggtatgaactgaacggcggaatgatcggcgtgctggcgtcatcgccgctggctatccatcaggcgttgatgctgccggactgggggccaaccacactgttcctcaatgaggcctacacaccggatgtcccgcagctcgcccagttggcccgacgtggcgtaacggtagaagccgagccggttttgtccattggggaaggtcaggctgatatcaccctcgctagcgggcgaatcatcagacttgccgggctgtttattcagcccaggacacgcctgagttcacctttagccgttcagctcggatgtgagctggaagcagggtcgaccggagagtttattaaggtggatgctatgcgcgaaacgaacgttcccggtgtatttgcctgcggggatgcggcggttgccgcaggcaacgtggccattgccgtcggcgacggcgcgcgcacaggcgccgccgctcatcagtctctgatatttcgctga

SEQ ID NO: 107980 - DNA, 429 bp, Enterobacter aerogenes
atgagaaatgacacccgtctctcccgcatgctgcatgtattgctccacatgtcccggcatgaccggcccgccacgtcggataacatcgcggagatgcttaataccaacccagtggtggtgaggcgcaccatggcgctgctgaaagaaaagggctatgtgcgttcggaaaaaggccatcggggtggctggacgctagcgaagcggctggcggatatcaccttactggacattcataaggcactgggtccctcttcactgttcgcgatcggcttgtcgaccgatcatccgaagtgcctggttgagcaggcggtgaacgccgcgttaaccgaagcgttcgacgcggcgcaggcgttgctgttgaaacgactcgaaagcgtcaccctggcagagttagccagcgattttgaatgccgctatatgacgcgttga

SEQ ID NO: 107981 - DNA, 1119 bp, Enterobacter aerogenes
atgcgcagcgccttccgggttatccggacagtacgtgaaaagcatgcctgtactcagtgcgatgccatcgtgcaggcccccgcgccttcacggcccatcgagcggggtatcgcaggaccggggctgctggcccgcgtgctgagttcaaagtatgcagagcacaccccgctgtaccgccagtctgaaatatacggccgccagggtgtggagctgagccgctcactgctgtcgggctgggtggatgcgtgttgccggctactgtcaccgctggaaggggcgcttcaggactatgtgctgactgacggtaagctccatgctgatgacacgcctgtcccggtgctgttgccaggtaataagaaaacgaagaccgggcggttatggacctacgttcgtgacgaccgtaacgccgggtcagagctggcgccggcagtgtggttcgcttacagcccggacagaaaaggtatccacccgcagagccatctcgctggcttcagcggtgttctgcaggcggatgcgtacgccgggttcaacgaactgtaccgcaatggacagataacggaagctgcctgctgggctcatgcccgccgcaggatccacgatgtgcacgttcgcaacccgtcagcgctgacggaggaagccctgaaacggatcggtgagttatatgccatcgaggcggaaataagggggatgccggcgaagcgacgccttgcagaacgtcagcaaaaagctaaaccgcggctgaaatccctggaaagctggctgcgtgaaaaggtgaaaacgctgtcgcgacactcagaactggcgaaagcgttcacgtacgtactgaaccagtggccggcgctggcttactatactgacgacggctgggccgaggtagataacaacatagctgagaatgcgctacggatggtcagcctgggccgcaaaaactacctgttcttcggttcggatcatggaggagagcggggagcgctgctgtacagcctgatcgggacatgcaaactgaacggagtggagccagaaagctacctccgttatgtccttgacgtcattgctgactggccgataaaccgggtcagcgaactactcccctggcgcgtagcactgccaactgaataa

SEQ ID NO: 107982 - DNA, 939 bp, Enterobacter aerogenes
atgaaaaaaaatattgttggtaaatattaccgccagcctcatgaaggctggccttctgttgaagatttacaagtgtttatcaccgttgcccgaaacggtagtttctcccgggcagcgcttgagcttgggcaatcggcttcctatatcagtaaacggatcgcactgcttgaaaaaaacctgaatacccgcttattttttcgcaataaccggatggtacgtctgaccgttgacggtgaaaatgccctctccggagcgatacagctggttgagcagatgggtgattacgtcagcagcattacagagccggatgatatgctcagcggcaatatcaccatcagttgctctttcggttttggaaacgagtatgttgccggggcgctgtcagggctgatacggtcgtatccagggcttaaagtaaaattactgctcagcgatcgcgatgttgatctggttgaagaagggatagatattgagatacacgtcgggaatgattttaaagaaatttatatagcgaaaaaactcgccacaaaccgtcgtattttgtgtgcctccccggattaccttcatcaggctggtatgccatcatcaattgatgagcttgttgatcatcattgtctgatgctccaggagcgtaatgctgttcttggaaactgggtgttgacggatggacaacaggaattaacctgccgtctgaatacgtttcatacgtcaaacagcggcagtgttgtgctgacctgggcattactgaaccacggaattgtattacgttctacctgggatgtggagaagtatatcgaaaatggcaagctcattcatatcctccctcaatggtatcaggaagcggatatctgggctgtgtatcctcagcgtccgtctaccagcgggagaattaaaacgtgcattacttatcttacccggtacttttctgagcgattttag

SEQ ID NO: 107983 - DNA, 477 bp, Enterobacter aerogenes
atgtatgcacggaccgataaagcttttgccactcgttatttctggtggttttttttgatccagccggagccattgccggaaaaaatgattgcgcatgacccggagtttttcttgcgaaaacatatcggaggtcagctcaagaccccaggggctactgaagataaggcatttaatgactatctgaggtgctaccagaatccggatatgattcactcagtctgtgaggattatcgggcttcggcttccatagatctggatgatgatcaacaggatcgacacaagcgtatcgagtgtccgctgcttttactgtggggggcaaaaggcacagtaggtcagttatatgatgttgttgagacctggtccggaaaggcaaaagatatcaggggagaagcgcttccctgcgggcattctcctcatgaagagatcccggaaatttttcttcaccgtgttcagtcttttctcggaacagtgctataa

SEQ ID NO: 107984 - DNA, 267 bp, Enterobacter aerogenes
atggccatcattgttattcgtggcaaccctgacgacagcgcgggcaccatgaataaaaagtgtccgcagatgcttgtcgccttttttcgtcatattcatcagcacctgtctgtcaccactcgaatgctggcgtggaaccagacccagccatgcagcaaagtggcggccattcttaaattcagttcctttgccaatagcagcaacaacggccgtggccgttttagggccaatgcctttaactctggcgatacgctgacaggcttctga

SEQ ID NO: 107985 - DNA, 318 bp, Enterobacter aerogenes
atgaatatcgtatttctgggtattgatctggctaaaaatgtttttcagctctgtgggttaaaccaggccggcaaaccggtttatacgaaacgaactggccgaaaagaattgctccagacgctggcaaatattcctgcatgtctgattgggatcgaagcgtccaccggggcattttactggcagcgtgagtttgagaaactggggcacaaagtaaaggtcatcagtcctcagtatgtaaaaccctttgtccgcgggcaaaaaaatgatggtaatgatgcacaggccatcgcagtggctctaatgcaaccgacaatgtag

SEQ ID NO: 107986 - DNA, 369 bp, Enterobacter aerogenes
atggccacctcaacaggtgccacgccggcttacctcctggcgccggaagtgagcgccctcctctggtatatgccggaccagcgtcaccacatgttgttcgccaccatgtggaataccgggagccgtatcggtgaagcccggacgctcaccccggaatccttcgacctggatggtctgcgcccttttgttagggtgctttcggagaaagtgcgggcgcgccgcgggcggccgccaaaagatgaagtgcgcctggtgccgctgacggatggcagttttgtgcgtcagatggaaagctggatggtcaccacccgccccgccggcgggagccgttatggccggtcacggatgagacaatgcgcaactggctga

SEQ ID NO: 107987 - DNA, 243 bp, Enterobacter aerogenes
atgaagcaacagtcagaatcacttttaccttttaaaatcagtaggattcatacagaaataggtgtattcaaagtctatggatacagatcatcattccgcgcaaggaaaatgactatcatcctctcaacggttttcatactttccacagatggctgggaagagctcgccttaacccaaaccaataatgattttatgaaacaactaattccttacctagaatgccatttaaaggcaagtttttag

SEQ ID NO: 107988 - DNA, 594 bp, Enterobacter aerogenes
atgtccgctttaaatcaacagaattcaatacatgagctagattgttatagcgatctggcttttttcatgggaacaattgacagcaacgttcttcttaatagtaaatttactattaagccagatatatttcaagttacccaagggaaatgggaatggtttgagcggacagtatacaatccattaaaatctttgactgctatcgaacctctaatccaagatgctaactcggtgctaaaaaaatatagcaacaagctaaatatttatacatcaaaagaaaacaaaaaaattaaaaatgatatagatcaagctaatcaattactggctggtaatatttcatttattagagaagtgatttcagagttagaagcaagcatcaataacatcacgacgtatagattggaaaacgcaaatcttggagtaatgattaacagcatcacctgcttgaaaaaatgtttagaaactagctttaataaagattcaatagatagttttgatagctttataaacacaacaaaacttcagggccttgcaaaaacgaatgcaaaaagtttattgccaaaaatattagattgtgaatcgccacggataatctag

SEQ ID NO: 107989 - DNA, 528 bp, Enterobacter aerogenes
atggaagataccagccagcaggtttacctgaaagctatgcaaaaaatgaaggaagatgatttctcaaaataccttataaagccactatttgaatctatgggtttttatcgtgttgacttctacgggggggcttatgaatcaggaaaagacttgatagcgtttgttgaggtacctgttaataaaactatgagttacgcgatccaatcaaaaaaaattggtgaagaatctaacacatcggagaaagcaattcttggagagcttgtttttcaactaaggcaatgttttacaaatcctagcaaattacataatggagatgaggtaatccctgatcaagtatatttggcaagcccctttcaaataagccttcgtttaattaatgaaatacatggaatgctaaaaatagatggaaagaaatttgaaatattggatgggccgttagtaattagcttgttaaaaaaacataagccaacgttgttagagaaattactttctgtagatgatatatttagtacacaagatactagttag

SEQ ID NO: 107990 - DNA, 990 bp, Enterobacter aerogenes
atgatcctgatgcccgacgacgaaccggagctgagtctccccgcggcggtccttccgccaggcgaggaattcctgccggcactgtccagtgagaatgctccggtcagcccggcccgggcctacctactgtcgctgaattcgccccgcagccggcagactatggcctcgttcctgaacatcgtcgccgggatgctcggcgccacgtccctggagtcctgcaactggggcagcctgcggcgccatcacgtgatggctgtcaccgagttgctgcgcgacaccggccgggccactgccaccgtcaacacctacctttcggcgctcaagggggtggcgaaagaagcctggatgctcaggctgatggacgtggaaagcttccagcatatccgggcggtgcgtaacctgcgcggcagccgtctgccccgcggaagggctctaccgccggaggagatccgggcggtgttcggagcctgtgaatcggatgactccagcatcggcattcgcgatgcggcgatgctggccgtcattctcggctgcggtctgcgccggtcggaggccgtggggctggattttcgtgacgttgtcacatttaagcgggcactccgggtgcttggtaagggaaacaaagagcggctggcttatatgccggcgggcacttggcaacggctcaggatgtggatcgatgaggtgcggggagaaaaagacgggccactgttcacacgtatccgccgcttcgacaccctgacgaacgaccggctgactgatcaggcggtgtaccatgttctgcaggtgcgccagcgccaggccgggatcgcaaaatgcgcgccgcatgacctgcgtcgaacttttgccacggccatgctggataatggtgaagatctcatcacggtgaaggatgcgatgggccacgcaagcgtcaccaccacccagcagtacgatcgccgcggtgaggaacgcctgcaaaaggcacgagaccgtctggatctgttatga

SEQ ID NO: 107991 - DNA, 183 bp, Enterobacter aerogenes
atgacgactcatgcagcggagttttgtactttggatgaggttaaccgactcaaaatcattcaggacatagtcgaccggcatctgatcacgcagatggccgctcatcgcctgggtatcaccgatgaactcagtgccgacgtcttccgtcgcattatacctaacctagccgcttggtatggctaa

SEQ ID NO: 107992 - DNA, 159 bp, Enterobacter aerogenes
atggataaaacaaatattaacttaatggaaaggtatctactactgcttgatcgattcgttgataaactcgctgaatctggtttctcagagcaacgaattgtcgaacaatcatatcttttttgtgcaggattttatatcaaagtggtatcgaaaaaatga

SEQ ID NO: 107993 - DNA, 1335 bp, Enterobacter aerogenes
atgaaagggatgcaaaaaatccgcagaggaaagagttttgctggtgtagtcctctatacgttaaagcccggttctcatcataaaaatgaccctatcgtgatcggtggaaatgtaacgatagttggcaatgccgctaaagatctgatcgctgaatttgatagcaccaaacagcttcgtcctgacgtgcaaaaggctgtttggcacaactcgcttcgtttgcctaaaaacgaggcattgactgatgctcagtgggctgaaatagcagatgattatatgtcccgaatgggcttctctgagacgcatctaagatgctatgtccttcatgacgataaggctggtcagcacatacatatcatcgccagtcgcatcgaactcagttcggggaagctctaccttggaaaaaatgaaaatctcatcagcacccgcatcatccagcagcttgaactcgactattcactgacaagaaccaaagggccggaagctaaggcacctccggcatcgccctcccctgaaccaaaacacaaaaaatcacgtaatgaagcgatgatggaggaaaggattggtgagttatgccctaaaaccatcatccagaacgctcttgaagtattccttgccaataaaccatcaaccactgagtttgtgcatcagcttgtggcacaaaacatcagagcaatcccgaacatcgcttctactggccgcatgaacggcttctcattcgaataccaggggattgtgttcaaagcatctcaattaggaaaagggtattcttgggctgaattacaaaacaagatcgattaccaagctgaacgcgataatgcttttctgttcgaactgaaagcatctgtcaatgaagattctgaaatagtcatccctacagaaaccataacagaagacgtgaataaagccatcgaagtgattatccccgttaacagtactggtctgggcgaagagtgtttacacgaagctgacgaaagccctcaaggtttactgagagtggaaataatatctggttctattgcaacagaagaggctgccgcagcacttctctcagaagcttgtggaggtactaaagaagtgtatgcaaccgaagcggtaaaagaagctcgcaacaatcagtccctgcctatggtgcagactggtttcagatggttggaaaccatcccctatctcgatatctttatgagaatattgaaaaagctaaaaatcccatttttgaaacccccagaaaagcacaagactatcacctgcgttaaggtagttgagacgtttccctcaagaccaaaaaactatattgagacgccttcatttcgtcgtaaagcaacacactcaatgtga

SEQ ID NO: 107994 - DNA, 414 bp, Enterobacter aerogenes
atgaatgatagaaatcatacttttaataatatcaagccattcagaatctgtagctatgaaaatttcgcttctgctgaattaccctctcagcagacacgttctcattgtattagtatcagattaaatgatgccgagttgtcttacgttgatagcctacgagaggatctcaaccgtgctgtttggatacgtatgtcagcattgaatcgtctccctcccaaaattccagaaataaatctaactgtctggaaagaccttgccaaagcatctcaggatctgaactaccttgttcagcatctcaacactaaatcacacgatagtccttttactatcactgaaatttatacggtgcaaaaaagaataaaagcactaagagatgcccttctgtcagcaaatcgatctgtcagtgataaataa

SEQ ID NO: 107995 - DNA, 1233 bp, Enterobacter aerogenes
atggggaatataataaaagacggaagtggcagttattttccaatgttgtttattctgccacttgccggactggctgaacttgcatcactgtactctattcaggcgctgctaccaaaactgagtgaggtttatcatattccgctgaatcaggttggcatgatattatctgccgaagtagggttcctggcatttgccatgttgttcagcggttcgttatcggatcgctttggtcgcaaacctgtaatatttgcatccctttttgccggaggtgttttgacgttactgtgcgcgctggcaccatcatggcaggttttagttatcttccgggcactgctgggtattgtggtcagcggtgttactgcagcaattacggtatatatcagtgaagaggtctctccgggtatggccgggatcatcaccagttattttatctttggcaattctctgggaagtatgtcagggagggttattgcgacccagatgatggagcatttttctgttgaagttatattttctctttttggttgtgtcctgattattattgctcttgcggtgaaattcctgttaccggcatcgagaaattttaaagcatcctcatcactacagttatcggttgtcttccgggggggactgaaccatatcagaaacattaaagtttcgttatgtttcataacaggttttattctgttcggttcatttacgtccatctttaattttttagcttttaatttacacaatgctccgtacaacctcgactatacatggattgggctaataccactgagtttttcccttacttttttcattgcaccttatgctgctcgtcaggcaatccgatatggatcaatgaatgttttaagttttttaattagttttatgatggttggggtgtttattacatttattgctgagtctgtctggttatttatatctggcgtggtgctcctttcagctgcattcttctcatcacattcaatcattcttgcctgggtcagtgccagaacatccagtgcaaaaggacaggccacctctttttatttactctcttattattccggtggtgcggtaatggggtatgtcaatggctggttgttcgccatacaagggtggggcggtctggcgatatcctgtcttgttatgctgggcattgggcttatgatcacacgggtgatatcagcgaaatacgagtatcaaaaagcagccgagaaaaacagtctttccgaaattatttag

SEQ ID NO: 107996 - DNA, 1437 bp, Enterobacter aerogenes
atgttagccaaaacactttacgaaaaactgattgaaacacatacagtgcgggaacttgataaagaagggcatgtccttctttatatagaccgttctatccttaatgaatatacaagcccgcaggctttcagtggcatacgggagcatcatcgtacggtacgccatccggaggcttttctgcttaatatcgatcacgttaatcccaccagaccagacagggatgcgtccatgaccgatcccggcggacaactgcaggtggattattttcgcaggaatgcccgggactttggaattgagctattcgatgtgatggatccgcgtcagggaattgaacacgtcgtagcgcatgaacagggattgattatgcctggtatggttattgccgcaggtgacagtcataccacgacatatggtgcgtttggcgcgcttggatttggcattggtacatcggaaatagaacatcttctggcgacgcagacgctcatatatcgtcgactaaagaatatgaaggtcatggttagcaatacattaccctgggcctgctcagccaaagatatcattctacagctgcttgaaaaaaccggtgcatctggtgctacagggtatgccatagaatttcagggtgaagcaatccgttccctcagtatggaaggacgcatgaccctatgtaatatggctgtggaagcaggcgcccgtggcgcaattattgccccggatcggaaagtgtttgattacattcaggggaaacctcagataccgaatggcgagttatgggaccaggcattagcccggtggtcaaccctgtacagcgatcctgatgcggtatttgacaaaacagtggaaattgactgccgggaaattgaacccaaagtgacctggggaataagccccgaccagaccggttcaattggcggttcagttccttttcccggaaaagaaccggaccccttaaagcagcaggctataaagaaggctctgcagtatatggagcttgcacccggtacaccatttcgcgatatccggatctcccatgcatttattggctcctgtacgaatggaaggattgaagatctcagagccgcagcccgtgtgctggcaggcagaaaaattgcgccccacgtaagaggcattattgttcccggttccacgcaggtccggaagcaggcagaaaacgaagggctggcgagaatattcattgatgcaggatttgaatggcggcagtccggctgttcaatgtgtctggccatgaatgaggatgtacttctaccgggggagcgctgtgcatccagtactaaccgcaattttcccggcagacaaggggcaggtgccagaacacatctgatgagccccgccatggtcgcagcagctgccgttgccggacaccttgaagatgtacgccttttgcttgattccggagaagaaaatggacgagtttaa

SEQ ID NO: 107997 - DNA, 624 bp, Enterobacter aerogenes
atggacgagtttaatcagattacaggtgtcattgctcccatgcctgacgcgaatattgataccgatgtcattatgccaaagcaattccttaagggaattgatcgtgccggtctggataaaggcgtgttttttgatctccgttttaccccggacgggcaactgaatgaggacttcatcttaaacaggcctagctggcagaatgcttcttttttgctgacaggtccaaattttggatgcggttccagccgggagcatgctgtatggggtctgaaacagctcggtatccgggcgctgatcggctctacttttgccggtatttttaatgataactgccagcgtaacggcatactgaccctctccctggacgatgcttcagtaaaacagttaagccggattgcaaacgatcctgaaatgaaccgtatcaccgtttctctcacggacggggagatcatcacacaaaatggtgtatttcctttccatgtcagtcagatggttcgtgagatgttatctgctggaggggatgctattggctggacgttaaaatatcagcaggacataacgcggtttgaaaaacagtatttttcccgctccccctggctgaaaccacaaccggtaacggactga

SEQ ID NO: 107998 - DNA, 870 bp, Enterobacter aerogenes
atgaaactcgttcagtacagtattcataaccgcagacgttacggcatcatcaaggagaatactggtattattgatctctttctgagactgggggacagatatccgaccctcaaatccttgctggaaaataatgccctgccggaagccgcaacatttcggtatgacaatccggatcacgatattcaggctataccgtttcttcccgtcattgatgagcctgggaaaattatttgcgcaggtatgaactacgcggaaaagcgaaaggaatttaatgaaataaatccggcacccaccttatttattcgttttccggatactcaggtcggtcataattcggtattgctcaaacccaataacacttgtgagtttgattatgaaggcgaacttgctgttgtgataggtcggcgttgttcacatgtttctgaagaacaggctttaagcttcgtggccggatacagctgctatatggatggttctgtaagagactggcagcacacctggtatacagcagggaaaaactggccatcaacgggggcttttggtccttggcttgttacggcagatgaaatcccggaaccacaaaatatacagcttgttacccgattaaatggtcgcgaagttcagcgggactccacggcgaatatgatacacagcatcgcatttctcattgcttatatcagcacatttaccgttctttctgccggtgatgtcattcttaccggatctcccggtggggtcgggaagaaacgtacgccgccactttttctgcatgatggtgatgttgtggaagtggaaattgagcatatcggggtactgcacaatgtcgttcgggatgcaggatatacagatgctgcggctatgctggtataa

SEQ ID NO: 107999 - DNA, 642 bp, Enterobacter aerogenes
atgaaagtgagttatctgacaccattattatgtatcggtatgctgacgctaagtggttgtaatgaccctaaaaaaccgtctgaaagtaatttcaaagaagcagctcagcaatatctggacactgtttatccggtatgttatatcaaagcaaatttcccgtataaaacggatggaatttcctttaacaacatgcctgaagtattacatgccatggcggaaaaaggtctgctaactgaaaaggaattatcgcgcaaacatattgatgcttcgtgggggattaaatctcatgatatagtggtaaatagttatgatctaacagaggaaggaagaaaatattataagccggatgcggcaaaaaatatgcgaggcgaaaatattggcggtttctgttttggtaaagctacagtaaccgaagtcagtaatttcactgaaccatctgatgccatggggcaaaaaatatccagagtatcattctcttataaagttactgaaattcctgaatgggctaaaactcctgaaatcctctctgctgaccgtcagattaaaaaagatgtcgattcagcaaataacggtatgaaggtgaccaacgtattcgtcctgactaataacgggtggatacatgagagattatttgggaagtaa

SEQ ID NO: 108000 - DNA, 507 bp, Enterobacter aerogenes
atgatccttcaactcagcaaaagttcgatttattcaacaaagccacctggagatgaaaacaggagttttaacatgtatttaagagtgttgtcagcgcccatactcaccctttttctacttataactgcctgttcaaaccatactcaaaaaacaaacgtcagggttatgcccgacagcgataaatctgcggaagttgatgatcttttaggtggcctacgatctccaacagttcccccggagcattcaaaaatactcggatatgcgacacaaataaggaatgccattgttgccgaaatgtatgaacccgatgcgcataaaggaaaaacctgctctatccgtatctctcttcagcctgatggttcagtgaacagtgcgacagcaaaagagggtgatgcaaaattgtgtaaagcagccatttcagcgattacacgagcaaaaatacccgccgcaccagatgacgaaacatatcagagggtcaaaaatgccgatcttgatttcagactatag

SEQ ID NO: 108001 - DNA, 123 bp, Enterobacter aerogenes
atggctgatgttctggaaggtttcatccccatgcgaaatatgaaaaacttacggttcgaattttctcttaaagattcatatgagaagattaaattattttggcgatgtctggatgttatatga

SEQ ID NO: 108002 - DNA, 180 bp, Enterobacter aerogenes
atggtttgccggtcggggcatcgcaccggcgtggtcaatgaagagagatatgctctctccagcctacacaacgaggtgggactcgataccgatcgctacactctgagtatcgcaatcaggaaaaatgccttccgtctgctggtggttgatatttgctctggtgttaccatttgggtataa

SEQ ID NO: 108003 - DNA, 1566 bp, Enterobacter aerogenes
atgctgtcactgtctgttggcggtgtcctgatgacgtccattctgctgctgagcgctctcactctggttcagaaagaaaatattgagaatagcctgctggaaggcaacatcgcttatgcccgcaaactggctgacacaacggaccgttatctcagtacagcccagcaggaactagcctacagtgcaggtctgattgttgattttcaagatcggaaacaactgcaggcagaagccgatcgcctgcgtctgcagtcgggattttttaactccattctggtcgtcaaagcgaatgcggtggtggctgccacgtctccggagagtctgagtctggtcgggatgcagttgcgttctcctgccagccagcagtcaatcatttctcgcaagcccttcatatcacagcctttcacctcagcgacgggcaactacattgtatttctttcccagcccattttttcgcaggagggtcagtatgagggctatattggcggaagtatttatcttaaaaagcatagtatcctcagtgagatccttgggcagcatttttacggtaatcaggcagaagtaagtattgttgctgctgacggccgcctgatttacagccgtgccccaagcgccgtcgggcgactgcttgatgtccatcaggcaaatctaacattactgtcaaaagcgcagagcggccattttgtcgatcatcatgccggtaaggctcatctcatcggttttgctagtctacagcaagctgactggaaggttttcattgctggaacgtcggacaatgtatcccgcattcttaaggaaaccatgatcagtgccttctggatcactctcgccattatcatcctggctaactgcgctgttatatatttctctgccagaatatcccgcccgcttgagagactggcaagctttacccgcacggccgacagcgaaacagcgctacggaagctggcgcagcttgaacccggctatcaggaagcagagcttctaagggaggctgtaagccagcacctggcgtcaatgaccatgcaggttagccttctgactaatgaggcgatgaccgatccacttaccggtctgctgaacaggaaaggcttcactacacggattaaggcgctcaatccgctaggaaatcattctgttatcgcaatcgatattgatcatttcaaacatatcaatgatcattatggtcacgacgtgggagatgccgtattgatcagcctcggccagatactgagattactgactcgccagaatgacattgtctgccgttttggcggagaggagttcattattttactgcctgactccaacctgaacgaaacacgtgttgtggcagaacggatccgtaccgtcacaggggaaacctcgtttgcggaaggaatccacttaactctctccgctggcatcgccacactatctgactgctctgcagatttcagacagctgcttcgtcaggccgatttagccatgtataaagccaaaaactccggacggaaccgggtttgtacttacgattcgggtaactatcaacaacccgagtgcccatccaaaaatgatacgcactga

SEQ ID NO: 108004 - DNA, 126 bp, Enterobacter aerogenes
atgccgatccagatccgggtgacgccgggctgcgtcattattaccattcagaatacccgcgagttgtacgactacgccaaagcactgggcatcgcaggtatcaaccagataaagatgctccagtaa

SEQ ID NO: 108005 - DNA, 627 bp, Enterobacter aerogenes
atgattgacatgacgacaatggttacatactgcgcagttgttctaggctttgtctttattccggggccagccacgctgctcaccgtggcgcgggctacaacttctggaacgaaggtcgggataaccaccggagccgggattgccgctggcgacctggtgcacacgctcatggccgtggtcggtatctcggcagttatagccgcctctgccatgctcttcagtatcgtcaaatatatcggcgctgcttatctcatttatctcggtatacgcgcgcttcgggaaaaaacctcagtcaatccgtcggccagagcgctgccgatttccgctggtcaggctttcagccaggccattttggcggaagtccttaatcccaagacagcattgttctttcttgcattcctcccgcaattcgttcggccagagaacgggtcgataacgcttcaactcatcattctagggatcatctttgttggcctaggcttcgtcagcacaatcgtattcgcagtgggcgctagcgggctgggcaatttcctgcgccgaaacccgtcggtgactaaatggcagggtaaagtggtctgctgcgtatactgtgctctaggggttcgactagcgcttcaagagcgctag

SEQ ID NO: 108006 - DNA, 354 bp, Enterobacter aerogenes
atggccgtcaaacggattatcgccaatatcgctacgccccatcctgaagccgctcggacattctattgtgacatattgggcctcgaagccgtcatggatcatggctggatcattacgtttgctgcgcccgctatagatagcagtcctcaggtcagcattgccagcgaaggaggttctggaacggctgttcccgatctatcggtcgaagtcgataacctcgaagaagtccagcagcgcgccgaaaaagccggaatgaaagtcgagtatggtccgaccgacgaaccttggggagtcaggcgcttctatgtccgcgacccgttcggacgccttatcaacgtcctcagccactcatag

SEQ ID NO: 108007 - DNA, 216 bp, Enterobacter aerogenes
atgtcgcattcgttattttggttatccaatgaagcttgggctgcgattgagccgcccctgcctaataaccagcctggcgcccggaaagttgacgaccggcgggtgatctccggcatcgtccacatgcttaagtgcgggggccgctggtcgcactgccctgtcgaatacggcccggccacgatagcctacaaccactggaatatatggagccgctga

SEQ ID NO: 108008 - DNA, 141 bp, Enterobacter aerogenes
atggtcgttcccttccatacccttatcaatggtaaagtgcttttcgataactttcgctccaagagcaacagcagcaatgggaacagaaatacctcgttcatgtccggaatatccaataatcccatttgttatattttgtaa

SEQ ID NO: 108009 - DNA, 123 bp, Enterobacter aerogenes
atggggtggtcaaaagattcaaagatgtctgaaaattataacttcaaacacatatcaatgaaagaaaaggaagttattggaagagtttatgactctttgaggaaaataactaaaggggaatga

SEQ ID NO: 108010 - DNA, 573 bp, Enterobacter aerogenes
atgataaagcatacccgtattttgcccggcgggctggcggtgctggccgccgcttttctctgcctgctgacggcctgccgcgaccacagtcgtgacggcatgagcggcgctgacataacgttgttaaaccacggtccggacgccatcgtttcgttgcaggttgacggctacggcgggccaagagctaatccctacggcggcggtggcggtttctgctgcgtcatggtgccagatgtctggcggccgggactgacggcaaaaatcacctggacttccgatcctaactcctggatgaaatccagtaatatgcctgataactattcgcaatactatcagcgccatggcccgatcaccgtgcccattgaacgctgggaagaggatcaggcttgcggctttcatgtgcatattttcccctgcgataaggtgcggatagtccgttcctgcattccaccgggacagccgggatatccggtaccccagtctccccctgactgggaggtgagggcacagaaaatactaatcaaacatatcaaggaggaagttgtatgtccgataccgcagtctccacgctga

SEQ ID NO: 108011 - DNA, 924 bp, Enterobacter aerogenes
gtggcaaagcaaaagttcaaaatcaccaactggcccacctacaataaagccctcatcaaccgtggctccataactttctgcctggatgatgaagctattcaggcctggtatgagtcggcaacgccttcatcacggggaagacctcagcgctattctgatctcgccatcaccaccgttctggtcattaaacgcgtgttcaggttgaccctgcgggctgcacagggttttattgattccatttttacactgatgaatgttccgttgcgttgcccggattacaccagtgtcagcaggcgcgcaaagtcggttaatgtcagtttcaaaacgttcacccgaggtgaaatcgcgcatatggtgattgattccaccgggctgaaggtctttggtgaaggcgaatggaaagtcaaaaaacacggccaggaacgccgtcgtatatggcgaaagttgcatctggcagttgacagcaacacacatgaaatcatctgtgcagacctgtcgctgaacaatgtgacggactcagaagccttcccgggtcttatccggcagactcacagaaaaatcagggcagcatcggcagacggcgcttacgacacccggctctgtcacgatgaactgcggcgtaagaaaatcagcgcgcttatccctccccgaaaaggtgcgggttactggcccggtgaatatgcagaccgtaaccgtgcagtggctaatcagcgaatgaccgggagtaatgcgcggtggaaatggacaacagattacaaccgtcgctcgatagcggaaacggcgatgtaccgggtaaaacagctgttcgggggttcactgacgctgcgtgactacgatggtcaggttgcggaggctatggccctggtacgagcgctgaacaaaatgacgaaagcaggtatgcctgaaagcgtgcgtattgcctga

SEQ ID NO: 108012 - DNA, 468 bp, Enterobacter aerogenes
atgatgatggtgatatcccatcattttcaaaataaaggaggaacattgacaaagaaaaaaacttttgaggtatcgattaacaacctaccagcagcattaaaacgtttagatttacccgccgaacaagtcaaggttatcgaagactataagaagcaatttccattcttgattgaagatgaagaaaatgttcttgtaagcttagatcaactttgggaagcactggatacaccttattatacgcggcccggaacgatacccgaaagttcgggtagcgtaaaatctcggtcaatacagcaggaaaaacaatataaacgcaataagtttaatcagtgggttgagtcagtattaaaagaaattgatggtgaaccttttagtagaatggtgtcaaatggaaaccccgccaacggtataccggatttaaattcaatagagagccgctcaaatttgaatatctctttgataatataa

SEQ ID NO: 108013 - DNA, 570 bp, Enterobacter aerogenes
atgataaagcatacccgtattttgcccggcgggctggcggtgctggccgccgtttttctctgcctgctgacggcctgtcgtgaccacagtcgcgacggcatgagcggcgcagatataaacgtcttaaaccacggtccggatgccattgtctcgttgcaggtgaacggctacggcggaccaagagctaatccctatggcggcggcggcggcttctgctgtgtgatggtgcctgatgtctggcgcccgggactgacggcaaaaatcacctggacctccgaccctaactcctggatgaaatccagtaatatgcctgacaactattctcaatactatcagcgtcatgggccaattaccgtgcccattgagcgctgggagaaggggcagggctgcggttttgaagtgcatgtctttccctgcgataaggtaagaattatacgctcctgtcacgatcgctcatctccggaatatccgatacatcgtgcgcccgatgaggatcaaaaggcagataacgtcatttttaaacatatcaaggaggaagtcgtatgtccgacaccgcagactccacgctga

SEQ ID NO: 108014 - DNA, 2196 bp, Enterobacter aerogenes; identical to SEQ ID NO: 91973

SEQ ID NO: 108015 - DNA, 1032 bp, Enterobacter aerogenes
atgtctgacaaaaaccattatacgacatgggaagaattgcttgaggagtacttcttcgcccgaaacctgcgcgctgcaacagaatggagctacgcaaaggttgtaaaggggttcctgaaatttacgggggctgacataaccccatcaatggttactcatcatgaagttctaagatggcggcgatatgtactcagagaaaaacaacaatcggcgcagacctggaacaataaaattgcacatctcagggccctctataactatgctatggaaagtggtttattgcctgcgggcaaaaacccttttaacaactgcactgtacagcgggacagaaagaaaaaacggactttaaaccgctctcagctaacccgcctttatctgataatgcagcaggctgaaattgaatccaaccggaaaattttcgcacgtggcgggcggagtgcgctttacccggcttggttctggataaccgtcctggatacgctcagatatacgggaatgaggcaaaatcaactgctgcatattcagctcagggacgtcaatctgacagaaggctatatagatctgcgccttgaggggagtaaaacgcacagggaatggcgcgttcccgttgttaagcagctgcgtttgcggctacagcttcttcttacacgggcaacggaggctggagccgggccaaaagataacctcttcgatgtcagtttttacattgccgggaaaaaagcaaaatctgacagaaatgatgtgacagtgatgcatcaaaagatccgctccttttttcgccgtctgtcaaaggaatgtggttttgccgtttcgccgcaccgtttcagacataccctggctacagaactgatgaaagcaccggaaaggaatcttcagctggttaaagatttactgggtcatcgtagcgtaagcacaacaatggaatatgtggaactcaagatggacattgtgggaaaaacactggaagaagaattgtccctgcacacagatctctgtgtagaaagggaattacaactattgacacaaaactga

SEQ ID NO: 108016 - DNA, 1620 bp, Enterobacter aerogenes
atgcgcgacagaatcaggaccctgaggtttctgttttcaaaaggtgaaccggaaccagtacatcatgtatccgttgtcacacctgccggctaccacactccgcgtacggtcgatacgctgtgccgtagtccgttaagaaaaacctgcctgcaacaaatatgggaaaacagctcacttccggcggatgtttatcaccggttttatataacgccactgcatagcttactggccagggtacagaatgtgccggcaacacagcagggaaggtggtcgcagtcagacggcttcggggaccttacgctgcagttcacaacctgtgcggtcagactggccaaaggatacatgtttccacccggagctgcgccagaagagcaggcagagcaaaacgtgatgtggaatgcggtcattttctggtctgcactgttctggcatttgccgctcctggcgtctctggagggtgagctgcttgacggtaaaagctggcttccgggaataaccgttccggactcatcttatcgatttcgcttccgggaagctgacaactcttcagcttttgcagcgctggcagccggacaacttatgccagcggaagcgacaggctggctggcagaaaatcccgaagctctgggcaatcttgccggttccctatggaatcagcatccggcgatgccacttatcagaagcttaatgaagcaggctgccgaaaaggtggaatcgccttcgctggaggtatccggggcaaatgagaaagttaacaccctcatagagccggctctttcagttccgcaaacgccgtctgatcaagagattgaattagaaccgtcagtagaaacaacactgaaaactacatcgccagaagctgcagatttgcagggaattcaactcgcatcttctattgcaccggtgccgatggctgatggcagcaatctcgtcagcaatgaaaaggcaggcgagaggagggaatgtgatccaaacgaaacagagaaggctgatacagagatgctgctaagcattttcagtgccattgaagagcctgatatgaccgggactgaagcatgtgatgaagagtcttcaatcagtacgagaacagaaaatgaggcagaattttccccccttaatgaactacttccagatgctgataagcctgagataaatcagacagtagcagaagactctttccctgaacacgctgtagaggataacatccctttacacagcattaacattgacgcacaaaaaacagtgataaaaaaacagactggcactgaatttctcaggtggctttctgaaggacttaagagcaagcgaattgatattaatcagcctgattcgagggcgcatgcagttgcagggttcatctttctcagggttccggacatattttatctttacatcagagaaagcggagcagagctaagcagggataccatacaaatggaatttgagaagctgcatattcacaaggtgcgccggggagagcgttttattaaagcgaaactgtaccactctcctggcaaagaaggcacgtttaaacctgtaagtggatatcttgtcaagactacacaccttttcagaggagcgtcttcccctgaagacagcgggcttctgtctttcctgtga

SEQ ID NO: 108017 - DNA, 1779 bp, Enterobacter aerogenes
atggctaatgaaaatctagatattgattcaaaaacagctgaagagctttacgaatggtttttagaccaaaaattaatagttaaccgtaggtatcaaagaaaattagtatggtctattgaagaaaaaaatgctttaatttcttcgatgatacagcaataccctattccattattgctattcgtttctattgatgctaaacgtgaaattcttgatggaatgcaacgccttgaagcacttatgagttttattgagcagcgattttcattgaatggctccttttttaatttagatgcaatagctctcacaaagcagcttaaagatagcgggaagctaatacaaaatgaaccaatgttatctcgtgaggaatcagcactgattgcaagatatagatttgccatttcagaatattcatccacagaggataatatcgatgaggtttttcgaaggattaactctaatggcaagattctttcgaagcaagaactacgcagtgcgggctgtgtaagtaacttttcagaaattgtaagaaagatttctactttaatacgaggtgacacgacgcattctgacgttatgggtttaaacaaaatacatagcatctcaataagtaatgaaggtttaagctatggcataaatatagacaatcacttttatatacgaaatcacattttaacaagaagaagtattcgagactcggatgacgaagaactggtagctaatattttaggttatatatttcttgaagacaaaccgacttccggctcaacctctttagatactttttatggagcaggaacctctagccatgctatcgggcagcgtgcgcatttagaaagtttcattcaaactaaaggtgctgaaaaaatcattgacagttatctaattgtttatgaaaccatacaaaaattatatgatgatcatttgatcaacttcagaagtcatatcttaggcaatgattctacatctcaggaatgtcctagatattatcaagctgtctttttagctatgtatagtctgttgattgaaaaaaacatgcagttagctgatccagaagggtttttctcccagctaggagaaagtgtaagtaagacgatggtgcagactgaaggaggccgatgggcagcaagtgctcgcgagaagtgcgttgaggatttgaaggcacttataattagatatttcaccccttctcaaaaacactatgagaatcatgcttggcaaactttaataagaaccattttaaacaactctaaaactgaacagccatcttatgattttaaacaaggtctatttaatctttcgggagaaaacaaggttgatgaaaacagcctaattaatattgtccaaacttgcgttgcaataaacaacattggcagatcatcaaggggctatatattagttggcatttccgaaacacaagccacttcggacagattagtaaggttatttaacatcaagccacaagagtttaatggcttttttataaatggattggatcatgaggcaaagattaactcaaaagatattgataattatttcttatttataaaacaaaaaattcaatcttataacttcaccaatgctttaaaacaacaaatattaaaagacattgagctttgctcttataacggcttgcatgttttgaaaattgaaatcaagagtgttggacaagtctgtcattttgaaaataaattttacataagacaaggatcttcaactgagtgtttagaagaaggcgatgaaataactgccttaaatgcttcttattattcaattagttaa

SEQ ID NO: 108018 - DNA, 153 bp, Enterobacter aerogenes
atgaagccggatattcctgattatgaatggatcatattcggggtcagggtcagcaaacagatcttaccaactgacggttgtatcgaatactgggggcaggtcaacctgaaaaggtgctctaatgcacacattacttcatcaacgttttactag

SEQ ID NO: 108019 - DNA, 267 bp, Enterobacter aerogenes
atgaaaaagtcacgattcaccgaagagcagattgtctttgccctgaagcaggccgagctggggacgtccgtgccggatgtctgccgcaaactcggtatctccgatgccacgttttacaccaggcgcaagaaatacggcggaatttccccgtctgaactcaaacatatgcgccagttggaagaggaaaacctgcgtctgaagaagctggttgccgatctgagcctcgacaaggccatgctgcaggacgtgctggcaaaaaagagttga

SEQ ID NO: 108020 - DNA, 648 bp, Enterobacter aerogenes
atgaaagacctgtcttcttccccggcttccatgtcggttgtctataccattgagcacgtcagcacggttccgttgcgacactggcatgctttcgttctggccgtaacagaaaccttctggcaactgccggtgcgtctgcgtccgggaaatatgtatctgccgtcgcttaaccgcgcggctgacctgtttccggttgctgatgtcatggcgttctgtggcgattcaggcggctgtttctggccggtcaacatgaccattgagcgggagcgcagccacaatacgctgagtatccaggagctggattttcagcatcagccctgcgatttctttgcgcgtgttgtgatggtcctgctgcataacctgtgtccggacagcttccggatacattcttcagacgagggtcgcagctgggcgttaccgttacgctggattgaacaacacctcggcctgcctgagcaaccgacgctgaccgtgcctcagccggtactgaaaacaccggtaggcgagggcgcgtttgattccctgctgctgcaactgctctccggtggtgagcgggtgctgagcaatgaggactggaatgccttcgtgctggcggaattccatctgtacgaactgaagcgggtcgcggaaaaatctgactcgttttaa

SEQ ID NO: 108021 - DNA, 363 bp, Enterobacter aerogenes
atgactgaagcactgcacgatgtcactttccgtattctgtcgatgtctgagacgcgacgggatgtatgtcctgctcagtatggccccgtaagtggcgttttcatccggggcgaaatcctcagagataacgtctcctgtggcgaacaggtttttgttgcaccgctcggtgattgtgatccggctgaccccgaactctgtgtatggtgtcagtattatggatactctccccgggttaaggccggcgacatactggatggcgtggccgtttctggcataaatttcgctgatccactgtcgttagctgtgctgcaacgcctccgatttaatcctgaatatgtgactgatcagcagtctgattcataa

SEQ ID NO: 108022 - DNA, 369 bp, Enterobacter aerogenes
atgtctgtcatctcttctgcgattttccctgaacatctccttactcagcttcagcagtctgctgacgcagctgtccggaaattgaaatctttcatttacctgcatcgcaacagcagctggtatgtcaacggctcgggcaattatgccgtccgtgcgcatatctcttctgtcaaagaccagggcgttaacgtctttcttaccgttcgtacaggttgccaccgcgccgagtatgtttttcaccgcctgccggtttcctttcctgagggaataacaggtcgtcgaaacgcataccgccatgcttgccgtcaggcacagcatctggcacacctgcgctaccgttttctttccggagggcattctcatgactga

SEQ ID NO: 108023 - DNA, 246 bp, Enterobacter aerogenes
atgaaagacccgaagacactgctgcgggtcagcatcattggcacaaccctcgtggcgctgtgttgcttcacccctgttctggtcattttgctcggtgtggtcggcttgtccgcgctgaccggctatctggactatgtgctgctgcctgcgctggcgattttcatcggcttgaccatctacgccatccaacgaaaacgccaagccgatgcctgctgcaccccgaaattcaatggagtaaaaaaatga

SEQ ID NO: 108024 - DNA, 615 bp, Enterobacter aerogenes
atgctgataggctacatgcgggtatcgaaggcggacggctcccaggctaccgatttgcagcgcgacgcgctgattgccgccggggtcgatccagtacatctttacgaggaccaggcatccggcatgcgcgaggatcggcccggcttgacgagctgcctgaaggcgttgcgaactggcgacacactggtcgtgtggaaactggatcggctcggacgcgacctgcgacatctcatcaacaccgtgcacgacctgactgggcgcggcatcggcttgaaggtattaaccgggcacggcgcggccatcgacaccacgaccgccgccggcaagctggtctttggcatcttcgccgccctggccgagttcgagcgcgagttgatcgcggagcgcacgattgccggcctagcctcggcccgcgcgcgcgggcggaaaggcggccggccgttcaagatgaccgccgccaagctgcggctggcgatggcggcaatgggtcagccagagaccaaggtcggcgacctgtgccaggaacttggcgtcacgcggcagaccctgtatcggcatgtttcacccaagggtgagctacgtccagatggcgagaagctactcagccgaatttga

SEQ ID NO: 108025 - DNA, 1218 bp, Enterobacter aerogenes
gtgaagccagcgccacactggccactgcatccggctcccagggaaggcgaagccttgtcttcgtggctcaaccgcgtggccctttgctatcacatggaggtgtccgagctgctggagcacgatcttggtcacggccaggttgatgacctggacaccgcgccaccactggcgctgctggcgatgctctcccagcggagcggcatcgagccggaccggctgcgttgcatgagtttcgccggctgggtgccttggctactggacagccttgatgatcagattccagacgcattggaaacctatgcgttccagctctcggtgctgctgccgaaactccgccgtaggacgcgatccatcacgagctggcgtgcctggctgcccagccagccgatacatcgcgcctgcccgctctgtctgaacgacccggcaaaccaagccgtactgcttgcatggaagctgcccctgatgctgagctgcccgctgcatggctgctggctggaatcctattggggcgtgcctgggcggtttctcggctgggagaacgccgacactgcgccgcgcaccgccagcgacgcgattgcggtgatggaccggcgcacctggcaggcactgacgaccggccatgtggagctgccgcgccgacgcatccacgctggattgtggtttcggctactacgcacgctgctcgatgagctgaacaccccgctttcgacgtgcggaacctgcgcggggtatctccgccaagtctgggaaggctgcgggcatccgctgcgtgctgggcaaagtctgtggcgaccgtatgaaaccctgaacccggcagtacggttgcagatgctggaggcggcggcaacggcaatcagcttgattgagatgagggatataagcccgccgggcgagcatgcaaagctgttctggtccgaaccccaaaccggtttcaccagtggcctgtcggcgaaaacgccgaagcccgaacccgtcgatcactggcaacgggcagtccaggccatcgatgaggccatcattgaagcgcggcacgaccccgagacggcacgctcgctgttcgcgttggcttcctatggtcggcgcgaccccgcttccctggaacagttgcgcgccaccttcgcaaaggaaggcatccccccggaattcctgtcacattacgtgcctgatggaccctttgcatgtcttagacagaatgacgggttaagtgacaaattttga

SEQ ID NO: 108026 - DNA, 2028 bp, Enterobacter aerogenes
atgaacgagtttacgggatcggcagcttcacaggctgactttatttggaagaacgcggaagacctgtggggggacttcaagcatacggactttggcaagatcattttgccgtttaccttgctgcgccgcctggagtgtgcgctggagccgactcgcgaggcggtgagagaagcgcatgacgctttcaaggatgccgatgttgagctggataccattctgcgctcaaccgctgaataccccttctacaacacctctgaatactcccttggcaccctgggtagcaccaagacgcgccgcaatctggaagactacatcgccctgttttcggataacgcccgcgctatcttcgaggagtttgagtttggcaatacggtgatccggctggagaaagcgggcttgctgtacaagatttgccagaactttgccaagatcgacctgcacccggacgtggtgccggatcgggtgatgagtaacatctacgaacacctgattcgccgctttggtgccgaggtcaatgaaggggccgaggacttcatgacgccgcgtgacatcgttcacctggcgaccgcattgctgcttgacccggatgatgccctgtttgaggccagccccggtttgattcgtactctgtatgacccgacctgtggcacgggtggcttcctcaccgatgccatgaaccatgtgggcgactacggtaaccgcgacaagatcccgccagtgctggtgccgcacgggcaggagttggagccggaaacccatgcggtttgtgtggccggtatgctgatccgccgtttggagtccgaccctggccgagatctgtcgaagaacattcgtcagggcagcacgctgtccaacgaccagtttgccggtgagcgtttccactactgcctgtccaatccgccttttggcaagaaatgggagaaggacaaaaccgccgtcgaagcggaacacaaaaaaggcgagctgggccggtttgggccaggcctgccgaaaattagcgatggctccatgctgtttttgatgcacctggcgagcaagctggaactgccgatcaacggcggtggccgcgccgctatcgtactgtcgggttcgccactgtttaacggcggtgccgcgtctggcgaatcggaaatccgccgttggttgctggaagacgacctgattgaagccattgtggctctgccaacggatctgttcttccgcaccaatattgccacctacctgtggattctgtccaacaagaagccgcaggagcgcaaaggcaaggtgcagttgatcaacgccaccgacctgtggacttcaatccgcaacgagggtaacaagcgccgtattgtcagcgatgagcagcgccgccagattctggacatctacgccgcaggcgaaaccggtacgctttcccggatgctggactaccgtacctttggctaccgccgtatcaaggtcttgcgtccgctgcgcatgaccctggagcttgataagatgggcatggagcggctggaagccgaagctgcctgggaaaagctctctgacgcgcatcagacattctggcgcgaagccctcaagccgttgatcgggcaaacgcagccctatagctgggcagaaacctttgtcagggacgcgatcaagtccgtcgaagccaagcagctcaaggtcaaatccagcaagacattgatcaccgcgctgatcaacgcctttggtcacaaagacccgaaagccgagccagtcacggattcaaacggcgagctggtgccagacacagatttaactgattacgagaacgtcccctatctggaggacatcgacgactactttgcccgcgaagtgcttcctcatgtgccggatgcctggctggatgagagctttaccgatgcaagggatggccaattgggccgcgttggctacgagatcaacttcaaccgcttcttctaccagtaccagcctccgcgcaagctgcatgatattgatgaagacctgaagcaggtagaagccgagattgccgcgctactggcggaggtggccagcgaatga

SEQ ID NO: 108027 - DNA, 1290 bp, Enterobacter aerogenes
atgagccagtacagagcatatcccgcgtataaggattccggcgttgagtggattgggcaggtgcctgagcattggaaggtagcgagagtcaagcgactggcgtcattgcgcaatgaacgacgaaatgatgtatctactgataccatttatatcggacttgaggatgtagaagcaggatcagggcagtacaagccaacgaatggaagctcccgtcaatcagaagattcaactgtaggcatcttttatgaaggggatgtcctgtacggtaagctgcgtccatatttgcgaaaagccattatttcagagatggcagggtgctgctcaacagaatttttggttctgagggctgaaaaaacagaacccagatggctgcaagaatggcttttaactcctgatgtaacgcatcaaatagagtcagggtgcgagggagcgaaaatgcctcgtgcagattgggggcatatcggttcaattgaagttgtatacccagatcagcctgagcaagcgaaaatactaacctccctcgaccgcgaaaccgcccgcattgatgcgcttatcgagaagaaaacccgctttatcgagctactgaatgaaaagcgccaggcgctgattacccatgcggtcaccaaggggctagaccccaacgtgaagatgaaggattccggcgttgaatggattgggcaggtgccggagcactgggaggtgaagcctatttgtcgcgtgacatcggtcaatgatgatgtgcttcctgactccacgactgacgacactcccattcgttatgtcgatatttcctcagtaggatacatggagggtattaagcaggcttcggatatgtgctttgcagatgcaccatcaagagccagacggaaagcatcttcaggtgatgtgatcatctctaccgttcggacatatctgaaggccgttgcagctgttacagatgaatatgctgattgtgtattttctactgggtttgctgtattgcgagcacgccatcttgatcgttcctttttaaagtggatggttctgaatgagcttctgattcaagctattgaagctcattcagaaggattgagttatccagcgattaatgcttctgcattagtgaagctcaaaagcgtcattcccccaccagaagaacaagccagcatcgccgccaccctcgaccgcgaaaccgcccgtattgatgcgctgatggacaaggcaaagcaaagcatcaccctgctcaaagaacgccgcgccgcttttatcaccgccgctgtcaccggccagattgatttgcgagggaaataa

SEQ ID NO: 108028 - DNA, 3258 bp, Enterobacter aerogenes
atgcaatcagcagcacatcatgaaaaacacctccagcaatatatcatcgaccggttggtagaacagggctggaagctgggtgattccaggttctacgacaccgagcgggcggtgtaccccgaagacctgaaaagctgggtcaaaaccagcggccagcaggaaaaatgggacaagctggaacggctcaacggggccaaaacccttgaagtgctgatggatcgcctggataaagcactggagaaacaaggcaccatgcaggtgttgcgccagggcttttccattgccggttgcggcctgatcgagatgaccgaggccgcaccggaagacaagcgcaatgcagcagtcattgagcgctaccaggccaatatcctgcgcgtggtgccggagctgaagtatcacccggcccgtgaatttgccattgatctggtgctgtttatcaacggtctgcctgtggcaaccgtcgaactgaagaccgacttcacccagtcctgcgaagcggccatggatcagtaccgcaatgatcgcctgccgtatgacgcccagaccaaacgccgggaaccgctgctgaccttcaagcgtggggcggtggtacatttcgccatgtccgactctgaaatcatgatggcgaccaagctggatggagaaaacacctttttcctgccgttcaataaggggcgcaaggacgaaagtggcacggtacatgcgggtaacccgccaggtgagattaaggccgatggtacccaggaatacccggtagcctacttctgggaggcggtctgccagccggatgcctggctgcggattttccatagctttgtctacgtcgagaaaaaggacgtggtggatattcagggtaactggtcgaagaaagaaaccctgattttcccgcgctttcaccaatggacggcagtgaaccagatgctggccgatgctcgcgaaaatggcgcaggcatgacctacctgtgtgaccacagcgcaggttccggcaagaccagcaccatttcctggacggcccatgacttggtgaaactgcgcgaagataacggcgacgcggtgtttaacagcgtgatcattgtcaccgaccgtaatgtgctggacggccagcttcaggacgcggtgaagcagattgaccatcagtttggtgtgatcgccgccattgaccggcagaagtcatccaagtccaagagcaaacagctctcggatgccttgttgtctggcacgccgattgtggtagtcacgatccagaccttcccctacgcgatggaagccatcatcactgacaaggccctgaaagggaaaaactttgctgtgatcattgatgaggcgcataactcgcagactggctctaccgccgctaagctgcaagccgcgctggggatgagcggacaaggcaagatgtccaccatgacggtggatgaactactggagcaactgcaaaagtcccgcgcccgcccggacaatatcagctacttcgcctttaccggcacgcccaagcactccactttgatgctgtttggtcgcccgacagatccaagccaaccgatctcggacgataacccgccgcaagccttccatctgtacaccatgcgccaggccattgaggagaaattcattctcgatgtgttgaacggctatgtgccctacaaaacggccttcaacctttccaagcagcttgaagacagcaagcgggtaagcggcaaggccgccaaacgcgccctggcacagtggatgtcattgcatcccaccaatgtgacccagaaggtacagtttatcgttgagcacttcaccaaaaacgtcgcccaccggctggatggcaaggccaaggcgatggtcgtgaccagctcccgtgccgctgccattcgctacaaaaaggcgtttgaccgctatatcgagcagcacagcgagtacggctttattcattcactggtggccttctccggcaagatgaccggtaagcaggtgatgcaccaggatgacagcgagttcaaggatgatgtgtttatcgtcgatgagaacgaggaattcaccgagcagagcatgaacccggatgtccacgggcaggatttgcgctttgcctttgaccgcccggaataccgggtgatgttggtggccgacaagttccagactggctttgaccagcccaaactggtcgccatgtacgtggacaagaaaatcgccaaccatgtggagattgtgcagaccttcgcccgcctgaaccggacggcacccgggaaggatgaagtctttatcatcgacttcgtgaacgatccagagaacgtgcgcaaggcctttgccacctatgacaagggcgctcacatcggcgaagtgcaagacctcaatgtggtctacgagatcaaggagcgactggacgagcacggcctgtacgacgagaaggacttggccgcgttcaaagaagcccgcttcaaaaccatacgtgacatcacccatactaaatcgccacagcacaaggcgctgtatgccgctacagctggagcgacggccttgtataacgacaagatgaaaatgttgcgcggtggtatggcaacctgggaagcagcgtttgagaaggcccgcgccaggggtgatgaggcgggcatgaagtctgccgatcaccaccaggatgagtatgccgagcaaatcaaggcgctgatgggcttcaagtcggacctggggcgcttctgccgtacctattcctatatcgcccaactgattgattttggcgacccggagttggagaactttgccgctttcgccaagctgctgcaaaagcgccttcagcacgaagcaccggaaaccgtggacttgacaggcctggtgcttactggctttgacatcaatgctcgacccgatgacgtagaagacgaaggcaaaaccccggtattgcaaccagcaggtgcaggcggtggtggcgcggcaggcgacaagccgaaattcgtcaaagagattatcgagaagctcaacagcctgtttggtgaggcgacgccgatccaggatcaggttgctttcgttaatcagatttcagcgattaccggtgaaagcgatgtcgtcatggctcaggtggaaagcaacacccgtgagcaggctatgaaaggcaacctccccggtgctgtgcagcaagcggttgttcgtgctttgtccagtcatcagaagctggcaacccaggtgctcaagtctgaccgtcagggcatgaccgcattggttgatatggtgtatgacctgctgcgtgaaggcaaagacatcgatctgggtatggattaa

SEQ ID NO: 108029 - DNA, 672 bp, Enterobacter aerogenes
atgaaagtggttgatatggatattttaaaacaacgccttatgattctgactttcggattctctaactttttattcttttatttattattaacctctattgatctaaatatattcttaatgactaggcttgatttctcaatattacatttgcagataattaagcctctgatgatgcttttaatttttttatccataactcacttattaaataacacctcactttaccaaggattaacctgggggaaacctaacaagcagtcatttgtttttttcttgctcataattattgcttacactgcttcatactaccttacgccgaaagaacccttcgttacagaatttactaaaggtttgtcacatggaatggcagctgtaaaaatcgcagccacaattattattttccctctactggaggaactggttttcagaggaattatcctgagttcttttttaaacgcccttggtgaaaaggcgggctatatcatcggtgggctgacagtttctgttttgtttgcagttatacacacacagtattcattgcccaccaaaatccaaatgttttcactttcattaattttctgtggagcaagatatcaaagcagagggcttcttttaccaattctactgcatgctttttgtatcgcgcttggcctatatattgagttaaaataa

SEQ ID NO: 108030 - DNA, 402 bp, Enterobacter aerogenes
atgtatcagtctcaagaaaaacgcgcctgggaacgtggtgttcgtctcgctgcaatatggaagggtatcaaaaaaatttttacacgtttagatcagcgctgcgtcatactggctaaacaatacaaactgccgaagtggttaggccacataccgctgcttttagctgtcctttgttcgttagttgcacttatagcaggcggtttcttgataagctgcagcgcagttttattatggacttttattgctgccataacacatataggatctagctctaaagatgcttcaataaatagttttaatgaaaagaaagatgaaaataattttcatgatgaatttgtaatgaatagcgccatcaataatgaatatgatggcgctccttacaaatccccgagtgaagattag

SEQ ID NO: 108031 - DNA, 1326 bp, Enterobacter aerogenes
ttggaactatacacagccaactctctgaatgaactagagaatatactttccaagcatggtactgatgtcttattccgtggtcaaaatactagatacggagatccagggttgccttcggtcaaaacttcttttgaccgacatggatgtatacctagtgaaatgctcaagtggagtcgttacgcaaaaaatgttcttagcacgactatcgggcatcacgttaacgactttaaatttatacaggcactcctccaacattatggttggcgctctttttatattgattgctcgtcgaacgcagctgttggggcgtggttcgccagccatcagtatgatcaacagcatacattagaaatgagtgaagactttgcagagcgacccgtctggttacgaaagctaaaggcgcgatatactcatagcgagggtgtgggttatctttatatcctagataagaaagcagcagaacaggttggtttagtcgatttagcttctttaaagttagagggtttccatcccaggatggaggctcaggcggcatggttagtgggacctctacagcaaactgatctccctcaaaattgttttctctctgaaattaaatgcagtagtgagattttgcgtaagtactcttcaaagaatggctttgatacaacaagtgaccttttccctcctataacggacgatcctattctaaggatgttactcggattaccttggagagaattagctgacgtaaaagataaatcattccccatccctgcgtttcatagggcccttgaattaccagagtatcatgagagctatgttaagattgcatggcctcaagctgcattttttcggggtaccaaaatatcacaaacctttaattcaattgatggcgaccctaacggctgtgtcataattaacgtacctgaggaggctctatatggtgagtctgatgaaaacgctacattacacttttctagaattgaagatctgataaatattaaaggttcagttgcattcgagatagacgatcttatccaacacgtaaatatgggacacttatctctttatcaaaaaggaattggtgttatatcccgtggtgccaatttatttgaggtaagcgaacttatggttgaacatccaggtatggatatgacccgagttgggtttgttagaggatggttttaccgaaaggatgaaaatggtttatgggcaagggaacagcatacaatggagtgtggttgtggggattcaagagtccacaaagcgcacatctcagcacttcaaatcatagaaatttacttgcaagagcaaactaacattgttggtgagctgaaaatatag

SEQ ID NO: 108032 - DNA, 945 bp, Enterobacter aerogenes
atgcctaaaagcatacaggattatacgccaatcctttccttgctctcaacggcaaggctaggggctgttcaaggtactttcaacgtccagcccggattagaaacgtatgggtttagcctctggctacagaatgcagcagcttccctgtaccccttaatgcaacaacttgaattggttttgagaaactcaattgataaagcggccaggcagcgattccaagataagtggtgggataagattaaatatgacactacaaaagataatcacagcaagtttataaactgcattagagaggcggaatccactctcaaaaaaagatggaaagaaaaagaagctgcgcgtctaggactggctagctcaaacttggtaaccacacaacctccggcatttgatcatgatgatattatcgccacaacaacattctcaacatgggagtcagtcctgttagaggcacttcatacagatgataattctgaaaaaaatgattatctttggcccctttctctttcaaaagccttcaggcgattaaatttaatcgataacaaacctattgaagcacgccgcaaactaattaacatgctaaaagaaattcgtgattatagaaacagactttttcatcatgattgcatctggataaaatctaaaacagtcgacgctcaaacggccatcgagtcaataagggaaaaaattaaccttatagaaaaaataataagagcgataagcccgataacttgcaacgcgttaaacgcatggggaatgtttgaaaatgcccgacgcatatgctcaacgtccgaattagctatatatacgaatctcgattatgaaactattaaggacgaagatctaaaggtactaaacaagatatttgagcggacaaatggtggaagatcatctgtaccgatgtacgtaggtgataactcgtgtgttttctataaaataagatga

SEQ ID NO: 108033 - DNA, 249 bp, Enterobacter aerogenes; identical to SEQ ID NO: 81053

SEQ ID NO: 108034 - DNA, 243 bp, Enterobacter aerogenes
atgcctgttatactgaggatcaacggtttccggttctttttttattctaatgaaggtaacccgctcgaacctgcacacattcacgtaatgaaagcaggtagtgaagccaaattctggttaacgccatcagtggctctggccagtaacgatgggtttaattcacgggtattaaaagaactgacggggatcgttgaagataaccaagcattgtttctggaggcctggaatgactatttcagctaa

SEQ ID NO: 108035 - DNA, 408 bp, Enterobacter aerogenes
atgcgcattggtcagttggcgcagttggtaggggtcgaaacacagacgatccgcttctatgaacagcagggcttgttgccgccgcctgatcggcaggacaacggttaccgtgtctataccgagaagcatggtgaggggctggccttcatccgtcgctgcagaatcctgggcctgtcactggctgagattcacgaactacagagctatcaggacgcccctcatcagccttgtaccgccgtcaacgccttgctcgatgatcacatctctcatgtgcggtcgcagataaccgctctgcaagcgcttgagaaacaactcgtttcactgagagcgagttgcaacgatgaccgggaagttgaggcgtgtggggttcttgctggaattagcgaaggaaacatgcaccagcagtag

SEQ ID NO: 108036 - DNA, 897 bp, Enterobacter aerogenes
atgagcaaatcctgtggtggcgcctgtggcggtgatgcaacgtccgcagcggataccgatatacaggcctcctccgaggcgccagggagatgggtcagtgtttatgccgtgccgaagatggactgtccatcagaagaacgaatgattcgcctagccctgaacggctttgaggagattcgggcgctgtccttcgacttgtcgaaccgccggctgaaggtcgtgcatgacggcgaggtcgagcccgtcacctcgaaactgaagaccttggggctaggcgcctcgcttcaggaaaccgtcgctgcaaatccggagaccatcaaggccgccgagttttcggcagcttctgctaagcaagaatccgggaccctgcgctggttgctcggcatcaatgcacttctgttcgtggtggaaatgactgccggtctgatcgcccggtccaccggcctgattggagaatccctggacaattttgccgatgcggcggtgtacgggcttgccctttatgcggttggacatagcgtgaaaatgcaggtacgtgccgcgcatcttgctggtgtactgcaactgatcttggctgtgggcgtgctcgtagaggtggtgagacgctttgtattcggtagtgagcctgaatcgctggtgatgatggctatcgcattcgtcgcattgattgccaataccagttgtctgctgctcatatccaaacatcgggaaggcggggcgcacatgaaggcaagctggatattctcggccaacgacgtggtgatcaacctgggggtcatcaccgccggcgccctggtcgcgtggaccggttccaattatccggatctgattatcggcaccatcgcggggggcattgtacttaacggtgccagacgcattttggcgttgaagggttaa

SEQ ID NO: 108037 - DNA, 513 bp, Enterobacter aerogenes
atgctcattattggcaaaaagctctcgccgtatgccctattgtccatatcgggcctgctggcagcgtctgatcaggctgtaaagtggctggtgcagcaatcaatggcctatggcgagtatgtttcggtgaccccgttctttaactgggtgcacctatggaacaccggtgccgcattcagtctttttgcgaatggtggaggctggcagcgctacttttttatcggaatcgcggtagtgatctcgatttttctgatcaagctgatccttgaaaatcgtcataaaggagaagccatcgcttacagtcttatcctcggtggcgccatgggcaacctgattgaccgggtctttcgcggctatgttgtggattcctttgatttctattggcgagactggcattggccggccttcaacctggctgatattgcaattgtcctcggtgccttacttttcgtttccagcagcttgttgggtaaaaaagcaaacaccaatgccgagtcggatggatctgactga

SEQ ID NO: 108038 - DNA, 1290 bp, Enterobacter aerogenes
atgaccgaacttcccgacaacatccttcacctgccgcaataccaagtactgggctgcaaatcaaccgacgacgaaatgcacttccaggtggacatgcccgatcccatcgcctgcgaggaatgcggcgtgcagggtgagttcgtacggttcggcaagcgtgacgttccctatcgtgatctgcccatccacggcaagcgggtcactctctgggtggtccgccgccgatacacctgccgggcctgcaagacaacattcaggccccagctaccggagatggtggacggattccgtatgacactgcggctgcatgagtacgtggagaaggaatccttcaaccacccctacacctttgtggcggcacagaccggcctggacgagaagacggtgcgcgacatcttcaacgcccgcgccgagttcctggggcgctggcaccgcttcgagacgccccgcatcctgggcattgacgagctatacctgaacaagcgctaccgctgcattctgaccaacattgaggagcgaaccctgctcgacctgctggccacccgccgccaggacgtggtgaccaactacctgatgaagctgaaagaccggcagaaggtcgagatcgtcagcatggacatgtggaacccctaccgggcagcggtcaaggctgtgctgccccaggcccgtatcgtggtcgataagttccatgtggtgcgcatggccaacgatgccccagagagagtgcgcaagggcctcagaaaggagctgaaaccgtcccagagccggactctcaagggagaccggaaaatcctgctgaaacgcgctcacgaagtcccagaccgggagcgcctcatcatggagacctggacaggcgcgttcccgcaactgctggccgcctacgagcacaaggagcgcttctacggcatctgggacgccaccacacggctccaggcagaagccgccctggacgagtggatagccaccatcccgaagggccaaaaggaagtctggagcgatctggtcagggcagtgggaaactggcgcgaagagaccatgacctacttcgagacggacatgcccgtcaccaacgcttacacggagtccatcaaccgactggccaaggacaagaaccgtgaagggcgcggttactccttcgaggtgatgcgggcacgaatgctctacaccacgaagcacaagaagaaggcaccgactgcgaaggtctctcctttctacaagaaaaccatcggttacggactgccggacttcgcagaggaactcaactacggagtcgatttatcaaccatctga

SEQ ID NO: 108039 - DNA, 726 bp, Enterobacter aerogenes
atgtctgatggtaaaacaaagggcggaacaaccgcttcacgagcgggggccctacagtcctctgttaatatcctgctccatacacattatgcaatccggctttgggagggcaggaaacgtgatgctccggacgagacaggggtgaaaaaaaagaggcctgaaataatcagcatgccgcaagctattgcgcgagctggtaatgcttcccgagactcagcggcagataatccctatgccgatatggctctggtacggctcgaagaagccctgcaacgagcaacacttaaaattaatgaaaacgtcagttcactggatgccagattgtcagccgtacccaaaggggtaacgctctcggaagttgaatcagccgatccgttaaatatcagcgttttcagccgttcaccgttaggataccggtgcgtatggcttctggttggatatgatcagttagcaatgaaagctttccaggcttttcattacggactgatttcgcgttcgcaacgtgacactatcctggacaatggtggccatgctgttcgtcaggtctatggcgtgattcagccttaccgaacacttgcagtgactcgccgtgatattgcagaaaaaaccacgcaagggcttgttgcgattgagcgaaatggcgaacctgatccggatgtgttaagcggtaaaaaacgctcttcgttctcacctccgcttaaaaacaacatagcagaggaggaataa

SEQ ID NO: 108040 - DNA, 351 bp, Enterobacter aerogenes
atggataccatgcatacgcataattttgatgccgtacgttatgcctggatcgccgattatgacgatgcggcgtcattcctgaataacttccgcaccggcgacagcgaaaacaccagccagtacagtaacccggcctatgataaggcgctgcatgatgcggcgaaggcggcggataccaccgcgcgaggcaaattctatcagcaggcggaggatctgttggctgaggatgtgcccgcgattccggtttatcactatgtgcgtacccatttagtgaagccgtgggtcggcggcttcgagccggataagctgggttactactacaccaaagatatgtacatcataaaacattga

SEQ ID NO: 108041 - DNA, 885 bp, Enterobacter aerogenes
atgaaaattgcttttgatgtcgatgtgattcgcgatctcgggatcaccagaatggttcagcaggtggcggagtggggctacaaatacattgaacagtcgccgcacccgcagattaacccattctacaaacatccgcgcgccagccgggagatcatggccgagtataagcaggcgctgcgtgacaacggcgttgaactctcctcgttcatctgcgtttatcgctggtccggcccggatgagctgcgccgtcaagcggcggtgaagaactggaagaggctcatcgaagtggcggtagagatgggcgtgcaggttatcaacaccgaattttctggcgatcctaaccagccggaaatttgcgaagaaatgttctaccgctcgatggaagaattactgccgatattcgaacgtgaaggtatccgcgtcgaaatccaggcccacccgtgggacttctgcgaagaaaacaacgagacggtggatatcgtgaagtccttccgtagcgacaacgtgaagtacgtctacagcgtgccgcacaccttcttctacgacaaaggtaaaggtgaagtcgagaagatgctgcgctatgccggtcaggacctgtcgcacgtgctgattgccgatacccgcaaccacaccaaacactgccgctatatcgtaaatccgccgggcgttgacgccgccgtacatcagcacgtcggcgtcggcgagggggatgtcgatttcgatgctctgttccgcaccctgcgcgatatgcgcttcgctgaacagaccttcaaagttggcggtgaaccgatcgtctgcacctcgctgtttggttacccggaaaagatgaaataccaggccgtggaaacgcgtgaacttatcgaacgtgaactgctgcgccggtaa

SEQ ID NO: 108042 - DNA, 414 bp, Enterobacter aerogenes
atgtcacaggaacaatatctcacactcaataaagcgtcggggccgaatagcgacgccccggcaacgccgtttgttaagatcgttgcgttgattgcgaccttaggcggtttactctttggctacgacaccggggtgatttccggcgccctgctgtttatgggtaaggaactgcacctcacgccgtttaccactgggctggtgaccagctcgctgctgttcggcgccgcattcggcgcactgctttctggccatctggccagcgccgcaggcagaaagaaaatcatcctctggctggcggtgatcttcgctatcggcgcggtgggtactgccctcgcgccggacgtcaactggatgattttcttccgcctggttctcggcgtagcggttggcggcgcggcggcaacggtgccctga

SEQ ID NO: 108043 - DNA, 888 bp, Enterobacter aerogenes
atgagcgctgaaatctcgccgctgatggtccgctcgcccgccgctgcgcgtccgctgtggttgcgcctgcgtcgctcacagccctttaccctgacggtaatcatgtgctgcctggcgctgctatgggtgagcccgtttatctggatgctggcgacctcgttcagcgccaccaccttcggcgaagatatggcctcattgctgccgcgcctgccgctgaccctcgataacttccgcgacgcctgggacagcgccgactggctgagcctgtacgccaacacccttatctttaccttcggcactttcttcgtgcagctacttaccatcaccaccgccggctacgtcttcgcctgccacgaatttcgcggcaagaaaatgctatttctgctgtttctcgtccagctgatgatcatgccggtggtgatgatggtgccgaacatgctgaccctgaaaaccttcggcctgctcaacactctgaccggcgtgatgatgccttactttacctcggcgttcggcgtgtttctgatgcgccaggcgttcctcgccatcccgaaagagctggaagaggcggcgctgatggagggctgccgctggtggcaagtgctattccgcgtactgctgccgatgtcctggccatcggtgctggccttcgccaccgtcagcattacctaccactggaacgagtacctgtggccgctgatgatgctcaacgatcccgataagcaggtactgacggtcgggctggtctctttcgctatgggcgctgaatccggcggccagtggggcaccatcggcgccgggacgctgatggtctgcctgccgctgatgctggcgttcatccttttccagaaacagttcctgcgaagcttcggcttctccgggatcaaataa

SEQ ID NO: 108044 - DNA, 684 bp, Enterobacter aerogenes
atgaaacggattttattagcaggtttatttatcgctatgcagcccgcgcatgccggagtggtgattttcggtacccgggtggtttatccggctgagaaacaagaagtggtcgtacagttgatgaatcatggcgcccgctcttcactggtgcagtcgtggattgacgatggcaatacttcattgccgccggaaaaaatcaacgtgcctttcctgctgtcgccgccggtggcgcgcataacgggtaactccggtcagcagctgcgaattaaaaagttagccaacaaacttccggcgaacaaagagtcgctgttttatctcaacgtactcgatattcctccgaatacaccaggaagtgagggggcgaatacgctgcggtttgccatgcaaaaccgcattaagcttttttatcgccctaaaggtatcgcggcggtaaataaagatacgtttaaaagtatttcgttgtcttcgcgcaaaaacgctctgcatattgccaatggttcggcaaattggttgacgattactgaaattaaactcagtaacgttaaagtcaatgagcgcagcgttatgcttgcgccgttatccagtcaggatgtctttttaaaaaataatctcgcccgccagtattcgctaacgatgattgatgataatggaaactttattagcgacaggctcaatgtaaaataa

SEQ ID NO: 108045 - DNA, 177 bp, Enterobacter aerogenes
atggtggataaagagattgccagcggggagtttgtggagctacttgccgacaagcgcttgccggtggagatgcctttcagtgcggtgtattacagcgacagagccgtcagcacgcgtatcagggcatttattgactttctgagtgagcacgtcaaacagctcccgaaggagctgtaa

SEQ ID NO: 108046 - DNA, 309 bp, Enterobacter aerogenes
atggtggcgtttcagaacttcgtcaagaagtacccggattcaacttatcagccgaacgccaactactggctcggacagttgaactacaataaggggaaaaaagacgatgcggcatattattttgcctcagtggtgaaaaactatccgaaatccccgaaagcgccggatgcgatgtttaaagtcggcgttatcatgcaggacaaaggcgacaccgcgaaagcgaaagcggtttaccagcaggtggtcagcaaattccctggcaccgatggtgcgaaacaagcgcaaaaacgccttaacgccctgggttga

SEQ ID NO: 108047 - DNA, 2256 bp, Enterobacter aerogenes
atggataggggtttaatcttgcaaagatataatcgttactatgcaaaactgctttttaagcttgttcaagctcaggcgtttctaacacaatggaaaaatgcgcataaaagaattttgattgttggtgcaattatttttcttttattatctacattcttattcctaatgccgtacaaacacgcgtttgaactgtatttttctaatgataatatactttcagttttaaggtctctcttaggcggaataggtgctgcactcataggcgccactgcgatagttttttcattgattgttttttcaatgcagacaaatattgagcgtatgccacatggattgtttagaaagtttggttcagacttactgttgctggggtcttttctaggttcctttgtcattgcaatattggttgcgtcaatgtctttgattccgaataataaattatccgtgtatgctatattcctttctgtatggggagtgattgctgtacttatcttatttttatatgcataccaaagagcccttaaattgattaatcccataacccaactgacactaatgtacaatgcggtacgcagggatttagttaaatgggatcgcctggcaacaagggctcaagacataatggtaaatcacgatgatgataaatcaaaaatagaaaatctcaatgaaaaagtcttagatgtaaaaagaataatctttttgaaaaataatcatggctgggaaacaacggctgttcaagcaatcaactactgtatttcttatgcgaagaggtatgcagagttaggtgattacgatgtttctgattattcctttgataggattatgtgtataaatgctaaatattgttcagtgaaaaggggaacctatatagaagataaccctttattaaatatagtagataatagtgatgcttttataaatttatctttagagcacttaagacaaacaatgcagacggcattagctaggggcgatgaaaaacttgcttccagtactctacgtggaatgagtggattatatggtgtttatttatcaatagagtacgcaggacgcactagaagcaagcatcatgcaatgctagctgcgggttatatatcttcagcagtagaatcagtgattccacaaaatatggccgacgtaatgatggaagggataaaattgatggggcggaattctgtcaaggcccttagttatgcgaatgcatcagatattgttggaacgattcaaaaaatatcgatgttctcaactataagttttaaaaatactgttcttcaacctgtaacgcttacggctttttcacagttttcagatataaatatacagttaataatcaaaggggatattaattcagggttcacaatggacatcttgcagaagagtatcagtgaagcggcgattgtttttttgcatacagaagatactcctattaattctcggcatagttatatactcagcccttattactcagttgctaatgttacagggttcattagtaggattaaagagatagtgaattacttgattgataataaaatcgaagctgaaagctcaaaagtaattattaggaatgttgagaaatgggctgataaactatatcaatctcaaaaggaggtgttgttggtagcagctaacaaacgctcatcttttatatatgatttaatcccttggaatgtaatggtatgtgaggttttactagctctatctgaaagtcaattgtgcgatgattatcatagtgaaaaacttaaaaagcattcgatttggttaattgcgacattatcatggattcctgaagagcaagaagttgtcacctttgttaacaatggttcacttgttgatagtattttcgaggctgctatgatggggttatctcgcaacagtcctgagttttatgacatgtgtaaaaaaatcttggaaggttgggttaagaagacagcacagcatgtgtctaccagaagcgggttcgaagatgcgataaagagtttggttgctctaactgtaaaagaaggtaccgttgatgcacaaaataaattactagataaacttaaagatattttatctaaaataaaatcaccatcaaaggaattgcgagaacttactgccaggcatctgttaaggaatactaaagattataggtatcgcgctggtttttattcgtcggtagatatttttctaagtcaatgtgatactgacagcacggttgcattatttactaaagttgcagaaattctaaacgcagagtcacctaaagtagaatga

SEQ ID NO: 108048 - DNA, 1518 bp, Enterobacter aerogenes
ttgtccagtcaaaaatatatcagtgtgattattctgatcgtgatttgcacaacctcagtgtttaccgcgctagctgtacgtgaagtgcacgatttacagaactatatggggtatgtcgctgaaaatgggaaatcagcgctttttcatgaagagtctattaaccagaatatagccacccggctttcgcgggaattttatcaccgaatagtcgatgcgcccctcgatgatagcgaacagacagcaatatgtcagcatcttgaaaccgagggcgatatttacggattcaatctgttgaagaaaaataggaataacctcgacggcacattgcaaacccgcaatagttcgtgtaatgagtgggcggaagacattgacgcgctatctgttattcacaccgctgaacgcgcagctcagtcgaagtacagtttttcaaattataccggctatactttcaggaatatcagatactatatcgatcttgctcacagctatatttatattaatcagctagttaacacgcgaaactacaccttcagtaactggctagtgggaaataatgacaacatcaatatcgctcgcagcgcacacacgatttcgattgatgataatgccctgaaagatctgttgaagggggacacaacgctgtcacatatttatcaggacggctatacccgcaataatataatcagcatgctaacccctgtatttttgggtgatacagtaaaaggtattctgattacagacatcaatattgacgatctagtggtttcgtttaacactgtcgaccgtccattattgtggcagttcctttctttgtatgtcaccgataatggaaccggcagtcatattgttttccataagccatatttcaaatcttatgctttgatcagttatgaagatgcgctcactcagtattacaccctacatgtgaaactggatgctatctacgtcattatttcgaatttatggtttttactgctttatttgctcgttacctggacattatgccggtatgcttataaacagttaatcaaacaaacgttgctttccagggataatgtgacggacgctatgaccggactatataatagaaaagtgattacgccggagatggaacataaaatccgctcactcgttgacagagttatccccgtcacggtcattgctattgacagtgatggactgaaaagaatcaatgactctctcggccaccatatgggcgataaagcgatacagatactgggtatggcgctgggtaatgccattcgtaaaagtgactatggtatacggcttgggggcgatgagttctgtctggttcttatcgattattctctgaataaatcccgtgatgttattacccgtgcacaggaacaattactcgcgattgacacggataaactggtggcattttcctggggggcctatcaattgctgccaggagacacactggaagtggcaatgttgaaagccgatgagttgctttatcagcataaacgcagcaaatatgaggaacgccgataa

SEQ ID NO: 108049 - DNA, 273 bp, Enterobacter aerogenes
atgttaaagctccagtctaaggggcagttgtatgatgacatgcaacgaagaaaccaatctatggaaagtccgggtaatggttttggagtgaatgtgacgtttcgtagcgatatagatggctactttttcctgttgcttagtatgtggccagtgctaatggttttattcctgggattgtcccctgcattttatggtgtgttaatgcctaaaacggcaattgcttgtctggtaatcgcagcagccttgggtattggtggttggttctatggatag

SEQ ID NO: 108050 - DNA, 264 bp, Enterobacter aerogenes
atgaatgcctgctgtaatgccttagctgacctgctcagcgccggtatcaaactgcgccagcgcttcggtcgctacctgaatcgcctagcaggttttcgtgacaatctcactttccgtgtaaacacgatcgaaagagtctgccaacagctcagctttgagatagctatcgccaactcagtcaatggccagcttcgccgcggcggtatcgtaattaactttcttgatgatagtcgggcggatttgttctgccggtgtaacttctga

SEQ ID NO: 108051 - DNA, 582 bp, Enterobacter aerogenes
atggcagttgattatctttcttatgaaacactcttagcagcaaaagatacggcgagatacacttactggatcatgattggcacatggattgccggaatagcaacttccttggcagtgataatcactctgtatgtaacacttaatcaaaaacgagttaggttgcgctttgagattagtgaaagaattatggtcggtgcattgtcacatttgattggcggcgatccaaaaggaatagtttttcagataactaatgtctcggatattcctgttttgataaataagttagggcttagttgtaaaacgctaccatggcaagaagagatgtattggtttttgaaattagatccgcatccttacagtgaacgtcttccaaagcgactagagcagggggaggtatgcagcttatggcttcctctcgatgaaagggatgacgattggtatgcttatcttgctgatataatctctaaggctggaaaaaaaccggagcagatgagggtagtgatcactactagctatggtaagtcgccacgttttaagttatctccagaaatagtaaaaaaacttaattctgctaagtcctag

SEQ ID NO: 108052 - DNA, 585 bp, Enterobacter aerogenes
atggaactatggattggctcaatgatcggtggcgcaatcggggcagtaataggccatggtgcaaaccactttatcgggtggttcaaagaaaataagcaatctagcccagaaagaaaattcatttgtgcagaattggtattcctccttgaaaattatgctgttaagtgtgctgaggttgtccaggatgatggcgagcctaatggtgatcaaggtgagtatgaagctacaacaaaacttcctgacaaaattgattattcattagttaagggcaactggaagtctctaaaatcaaaaacaatgtacgaaatttgtagccttccaatgaagcaaaatgaggctgtaaaatctattatctttgtcggtgaatacatgtcttcacctccagaacatcgagagtatttcgatgagagacaataccagttttccttacttggattaaaagccgctgagattgcttcgggaatccgcaaagagaatagcttccctgctaccgaacttgcaaagtgggttcttccaacacttgaggaaagacttcagaaaataaaagacaaaaggcttaaataccaagacgaagaagacctttga

SEQ ID NO: 108053 - DNA, 264 bp, Enterobacter aerogenes
atgtcgaaacacaacatagcagcaaaaagctcagaagagcagggcaaagtaagcgtagaccttgcctcatcaagcgtagcttacaaagagcggctgaatattccggttatccctgaggtggtaatgcgcgagcagcctgaacatttgcgcgattactttcttgagcggttgagtcattaccgggaggagagtttgaaacttcctaaggcaagcgatccacgctacatagaaatgacagacgccaatactaaaaagggaacctaa

SEQ ID NO: 108054 - DNA, 270 bp, Enterobacter aerogenes
atgcgcgacaaggttaacgtcgaccttgccgcttcgggcatggtttacatggagagcctgaacatgccggctctagcgagtgagcagccagagcaattgcgagagtattttatagagcatgtccattacaaccgagtgcagatcttacagttcccgcgcgcttccgatccgtgttacatcgaaatggctgaacagaatacaagtagtaacctgatggtgagctttttgatacagtgcgtgttagcaggccgccttttaagagataaatag

SEQ ID NO: 108055 - DNA, 201 bp, Enterobacter aerogenes
atgacctgcaaagatgcaattctgaattacctcaagacacacaaaacctgcagctcaccggatgtggctgaagcctctggcctgtcgcacacctgtatcaaccaggcggcgaacatcctggcaaagcagggcttattggttgcagttagcaaggtctggcgaatggtgacacatcgccgcgggaagaacaggcagatttag

SEQ ID NO: 108056 - DNA, 225 bp, Enterobacter aerogenes
atgcacagggaatttcactgggcgccgtgtctgcgtctttcgaccgtcgagaatggctcgaaccatttccccgttaaaaatcattccgcgctcaataattttcgtcatatcgttaccgggagggcgaccctcccgcctcccttagcccaggtattccggtttcatgtcgtccagggtgatacggaactggtcatacagttcatcacccaggtggcggcgcgatga

SEQ ID NO: 108057 - DNA, 561 bp, Enterobacter aerogenes
atgtctcagacagcgaaagtgttgctgctgtatgcccacccagaatctcaggattccgtggccaaccgggttttgcttgaaccggccttacagttgccgaatgtcaccgtgcacgatctttatgcgcactatccagatttttttattgatatcgcccatgagcaggatctcctgcgtcagcatgaggtgattgttttccagcatccgctgtatacgtggagctgcccggcattgttgaaagagtggctggaccgggtgctgagccgcggcttcgccagcggcgcgggagggaatcaactggtgggaaagtactggcgcagcgtgatcaccaccggcgagccggagagcgcttaccgccgcgatgctaaccgctatccgatgaacgatattctgcgcccttttgagttaacggccggcatgtgccgcatgcactggctgagtccgattattgtctactgggcgcgccgacagcggccggaagatttgcaaagccacgcccgcgcgtatcgcgactggctcgcgaatcctgttgcaacaggaggcgtcaatggcgggagctga

SEQ ID NO: 108058 - DNA, 327 bp, Enterobacter aerogenes
atgggttttccttctccagctactgactatgtagagaaacgtctttctgcagattctctgtgcggtaccgggccgaatacccggatcatcgaaacagactctggttacacggtcattgacgtgtcgctgaaaccccgacagcaaagcaccgtacttatcacatacgatgggcacactgatttcgcaaagcttatgggtagatcgttaatcaccagggaaggggaagcgattgagggagaggctttaaacgatgtcgtagtagcgggagttgtgacgttcattatcaaccgcgcatttcttgatgatgatgaatgcccagtaatgtga

SEQ ID NO: 108059 - DNA, 240 bp, Enterobacter aerogenes
atgccacgtcgttacgaaatcgaaatggcctgccgggcggcgatagtcatcgaggccaatggccggcgcactatcactaccggccgttttctgcaggaactggaaaaggtgaactggcactggtcgccacggcaggccaatcagtggatagagcactatgttactactttccgagatgtttcaacgcaagaaggcgacgatcgtacatttcagttattcaacccaaacggaggcctctga

SEQ ID NO: 108060 - DNA, 858 bp, Enterobacter aerogenes
atgtttgattttttccgggaaatatattcatctattagacagcattctatggagagagttaagagtcctgtccttggggcttttgtattctcttggttaggatttaactggcaaatgttagccatattattttttagtaaacaggacattgaggagagaataaatagcattcaatctcatcatgatatctcttcatatttgattggccctatattcacaacaatattgataagtttttttctcccaagagcgaataaattatttacgttattgcagaacaaacctaaccaagaaactataaaactaacaattgatgctaaaaaagatctagcggaaagacagcaagagattgctgaaatcgatgcaaaaaaacgcctagcattaaaaatcgcagaaaaagaaatcgaagaaaatatcagtaaaattaaatcacaaaacgcaatactatcttcagaggtaaaaaaatcagaggaagaaaatgaaaagctatcaaaatggcttgaggaagaaaaagaattaacaaagaaattaaaccttagtcttgcagagcaatatgagtcaattaataaatatagcaatgaaacgctctcactcattagtaagctagaagaaaaaaataatgaactatctattctttctaatgacaagctcagtctggaaagtgagttaaacaatacaaagattgaattagagaaaataaaattcacttcggaacacgcattgatgttccatatgcaactacgtgagagctaccctcacttatttcaaccggatgaaagtgggcaatatgcattaattcgttataagattcatgataaattagttgaactagatagctgggcgaaagacatgttgtga

SEQ ID NO: 108061 - DNA, 564 bp, Enterobacter aerogenes
atggtagccagtgggacattaagcgagcccgcatccttaagcgtgacaatcacctgtgtcagaactgtctgcgcagcgggcgtgcggtatccgcagatggccatctccaacccggtcacgtcaggaggaccgaatgccattatcaacccactctttctcgataccgtgaatggtctaccgtcaggatgggttgttgaaagcggaaccgtgtcattaaccactgatcctgatgtcgttggtaacgttctggtggtgactggcgccgggaataccagcgcgcgcgtgtcacagactatcccggttacgccaggtgagcgccggaaattcagtttcagagtgaaatttgatgtggatgaaaacgcggcaaccgcctgctttctcgaagccaatggagccaatattgccggaattcgcccctggaaccattcgacggacggattcagaacgttcagttatgacgtggtgatcccggagggtatgaccgaaatgaaattgaccattgtcgcgaatggagccactaccagcgtgggccaggtgggattattaaaactggaggaattatga

SEQ ID NO: 108062 - DNA, 312 bp, Enterobacter aerogenes
atgtcagatactaaaaacttgaaagaggcaatggatcacctcaaaacatatcgtaatgcagctagcgaaatgggaaatgagcaaattgctttcataacaaagctagttaaatctgctacgcaagcgtttgaaaaaccggaggaagaacgttcggtaattgataagtctttaattgaaacttttaaatttatggccgacgatattatggattcacttaaggccattgagaaatataacaaagcatcagaagattatttaaaagggtataaattgctggctaagatttcagggagcgagcaaagtgacatctga

SEQ ID NO: 108063 - DNA, 207 bp, Enterobacter aerogenes
atgtacagcagactgttagccatatgcctgatgacgatgttgatcgcgagctgcgcgaaaagtttacccgccccggtggtggttgatacggcctgcaactgggtacgaattatctacctgacggatcacgacatcgacgttctggaccgccagacgaagaaagacatcttgacgcataacaaggcatgggaggaaaattgcctctag

SEQ ID NO: 108064 - DNA, 855 bp, Enterobacter aerogenes
atggttgatagtttaatcaggtgggtaataaccaccattacttccgcaggattcttagctgttcttgcttatcttctgagagatacactggctagattttttacaaaggcagttgaacaccgttttgataaaaagattgagaagttcaaggctgatattagagctgaagaaaaagaattagaccagataagaacattcattgtttccgcgcgaagagaacgagacagcggattacaagcaaaaagatttgaagctgctgaaatgttattggctcacaggcaatttttgttggaattctacggtcttgtgaatatagtaaggatggttaattttgataaattaattaaagatcatgacaaaaataaggtcaaggatttaattgatattctgataaagccttataatattgatgtcaagctcgaagaatataaaaaatatgatctcggtaagcccaggctatatctaagtgaaagagttgtagcgttttttgaagcttataaaaatattattatatatgctgttaccaaaatgaagttacttagtattgggtcttaccagaatagcgatgatgtactgtcagaagagcttgtgaaggatatccaagggttggttccctcttctaaggaactatttgaaagaaatggcccattacatgctctttccatggttgattatttttataaagaggttttaagcgaactgcgtaatgatttgtttggctcagacactatgggtaaggatgctgaattagcagtgcgcctgattgttgatgcgaataacgcgcatgttaaggtacgcactgcatttgaaaaatacggactttccgaggactttttaaataaaaaatctgagtaa

SEQ ID NO: 108065 - DNA, 1212 bp, Enterobacter aerogenes
gtgaattttttgttgctcggtgctggcgcttctaaatcatactccgtaagtcctaccggtgtaagaatgcccattgcgaaggattttttctctactttcgagaaattagatatttatggtcatccatgggtacttaccgatggattattagactttgtcatgagggtaaagaaagaagatcccatggattttttttcaagagatgtagatattgaagagttatatacagagatagaagaaaatttgaattgctatatgggaaaagatgctggtcttgaaagagtcatggctttcaaatcatacactcagttaatattcattttctctgctgtaataaattttattcaaaatggacctatatcacgcccacattcagccctagcaaaaatgttaagtaacgatgatatggttgctactttcaattgggacactctcatggatagagcgttaaatagtgagactgaatggacaactgattatggatatggtttttggcccaaaagcatatacagaaattgttgggttgcgccaattgaaaagcaatcaacatcaccactccttatcaaattacatgggtctgtgaactggttaagtagccatcccatgagtcctgagaaggatgttgttttaatgcaagaatctgcacctgacaccgtatggatttacgaaagtacagaagagccttatgcgtgttttgcaggacggtatacacccggttttgacgatttttcctatggatactatcctcctaatctcttggatgatcgagggaggggcgctggtacggggcgaaaactggttagcgcaagattgaaattaccatgggtgcctgagggcacggcttcttctgagggattagtatcaatacctcttattataccgcctgtgaaacaaaaaaattataatggatacggaatgctatttgataacctttggacaaaggcacaagaaggtataacaaatgcagaacatataattatcataggctattccttcccgcgaacagacttgaaaagtaatcggctatttttagatgcatttttgaatcgcaaagacattccttatattacaatcttggatccatatccagagaaagtagcggagaagtttcgatttgaattcggaatacctaactcccatctaagagtgattaaaggattttttacagatgaaaccgatgtgaaagaattatttagttttcaaaattcatag

SEQ ID NO: 108066 - DNA, 180 bp, Enterobacter aerogenes
atgaaggatcgctggttcactcacaccgggctaacaaccgaagaagccaatgagctgatgattcgttatcagtctaaaggcgtaaccgtcgaaaaatgtctcgatattgatccccgtttttggatagatagcgcatttctgccgccgcaaaaaaccactccaaagacacagcaaatttag

SEQ ID NO: 108067 - DNA, 453 bp, Enterobacter aerogenes
atgagttgtcatgctatcaatggtgtcgatttttcattaattccagaagtgattgcgtgcagtgacaagagcgtttggcgatatatcatggaaggtggttattcaagtgacggggtaatcgatttagagtgttttgaaatattagaaaaggatgatttttatctttcattttatcattccaataaagatggcaaggaacataaggtagcacacattcataaactaataaaactttcaaaaacaaagccggcattatatctttgtattgatgtacaagaagttaatgatagcacagaagatagaacttatttttttgatgcgacatatccgcatattggaatgtcttataaaaacttggaagaacttaattccattgaaatcaaaacaattctaatggaattgtcagacgtatacgaacgtggacatggaggagcgatctcacgtatcctttga

SEQ ID NO: 108068 - DNA, 789 bp, Enterobacter aerogenes
  misc_feature (343)..(380): n is a, c, g, or t
atgaaagaaaagacatgtgatgaatttattgatatttcttatacggtgcctatagaagtaattgagcatcgtaatgaagatttgccattgtttttgcaatctgacattactcgaatggagatcaaggaaatctatgatacccaatcttcgtattatatgtgcgaatcatacattaatgattctaaatggcatgaatgggcaagtgcattagaaaatattaagttccatgatgacatgtctaatcaagaatttgccaatgagtcaaaagaatgtaattccagtctaatgttcatcgaaaattgcactcagcacttcgataatctttataatataactcataatnnnnnnnnnnnnnnnnnnnnnnnnnnnnnnnnnnnnnntaatttatctgtagattttaaagattctggtttttttttagattatattaaaaatgcaataactcgacacaaagagaaggtaactgaaaggcgtcgtgagcttagccatgagcatctttatactgcagctaagtctttcatggagtttttacggtatgtacctgcattttctattaaacgtaacattaaagtctacattgatgataaaacagggtgttttgggataatctacaagaaatcaattcataatgcaggaactttaaatattcttgtaaaagataattttgagatagacttctcttatgcaagaaaaagaaaaggtgtaattacaatcacaggcattgctaagtttggtaaacaccatgagaattctgatcaaatcctatctctttttaaattaatggagtga

SEQ ID NO: 108069 - DNA, 1101 bp, Enterobacter aerogenes
atgttcgatgttgacgatactgcacccgatactcccgacccccgtgaactcagtcaggatgtgcaggcgctgatcaacaatggtctggattttctggataaagcccgtgaagagttggaggcctcgaagccgaagttctccgtcgtcagtttctggactgcggtcgagattttactgaaagttccgctggcgcacgaacactggtcgttggtctgcagcccgaaaaagccaataaaaaagcaggcttacctagccggtgattttcagtcggtgacctacgaagaaacccgtgaaaggcttaagaacgtacttgaaagacccctagacagagaaacggacagtgcttttgataaggtcagaaagcaccgcaaccgcgtagttcatttctaccaccccactttcaccgaggctgaacaacgtcaaatactcaaagaacaagctgacgcctggtttgccctgaaccggttattaagggatgaatggaaagttatcttcggtgtcaaacataattggaagctggctttcggtgaaactcgtctgattaggggaaacaaattttatgccgaggtgcggtttaaacaggttaagcctgaactcgagcagctctctgaaaagaatattcaaatcggtaactgcaatgagtgccatcagcatgcgacggtaacagggactgaaacgaccggtaatgaaaaccgtaagcttgaagttacgcggtgtaaggtttgcaccagtgctgtaaggcaaattaccctagtttgtccagactgcgaaatacctcaattgctacctgagggagatagtgattttgaatgcgaacactgcgactacacttcggataggtataaactgctggatgaggagttgttccacagtgtggatgaacagctactctccgtatttcctgctggatgtaccaattgcatgactcctgaaagcgtatgtaaatttggagacggctatctttgcactcagtgtttcatctattacaccgagcttcatgtatgtggttgttgcggtcacctgagcgatagcgttcctgaactgagccatatccgaggatgtgaattttgtgatggtgaccaacgttattttgatgactga

SEQ ID NO: 108070 - DNA, 1368 bp, Enterobacter aerogenes
atgcctattgaagtccgtggacacctaatcgtgtctccctttacctttgtgtgtgatggtaagctttaccgcagctcaaatgcaaagggctggaccaatattcaggatcagttcggttactcggtgtttggtcgctaccaaaatgcttggcgtgtgcgtaacgttccttgtacgtctaatcgtgatagtgagctaacgcgtggcttccgtgcggccctgatgcgccagactggccttaactactctcagattgataactacatcaatgatcaggttagaaagggtaatcaggtgttggttgaaggaaatagcgtgaaagtctacaacggcaagaccacggttaaagtttctggtttctcaaatgatattccaaccgttccagcaaccacgcctgtgcccgtaaagacgaagaaaaacaagaccgagggcatggccgtacatttcgctatgcttcgtagtaaaggagtcccccttggtgacgaacaggcatttcatgactggtacaagcagaatcccaaacagtctaaaggcaagccgctgattgatgctattaagctctggggaaatctgaccgcggaggctgtcgctcagcccgaaccggaggtcatggccgcaatagaacctacctccgtgattaagtctgcgaaggtgaaaaagccaattgcggaaaacaatattgccgtgggatatcgcagaaacggggtaccagaggaacacctagaggcatatcacgactggtattcgaagcaagcggataagtatcacggtatgaaactcgctgaggtagttgacatttggaaagccgaaactaacttggccaaagccccccctgcgctcgttattttggatattcccgtgccgcaactttgtctgcctgccccaacgccagaatctctagctgcagacaaagtacaaaaagcgaagtcggccagagctacccataaataccgtgagcgcaaaaagcgcaagcttgtggaagatcgcgatcacgaagaagatgtgcctttctatgggcaccgccgtcgtaatcaggcgcagtttcgtgcagatgtagccactaactgtaacgatcgctgcgttgctacaggtgccagtataatccgctgtgaagctgctcacttggtgcagcatgctcgtaaaggtggggccagctttaaaaatggattattactacgtgcagacctacacagcctgtttgatatgggcgcaatggcgattgacccagaacagcttactatgcacttcacctcagaagttctagcctctgacccagatctgtggaaacttgaagcgatgaaaattcgtccgaccgataagccgattaaagttgagaatcttttgaaacgctgggaagatttcaataaataa

SEQ ID NO: 108071 - DNA, 1167 bp, Enterobacter aerogenes
atggaaagaaggaacataaataataatattaaaaaaatgatttttagcaaatacagcggcaaatgtgcaatatgtggcatatcaaacgaagacgtacggctggaaattagtcatatttatcctaaatcttttggtggggaaagcatagaagaaaatttaattctagtttgcccaaactgtcattttaaattggatcaggccatcctcaacgaaagagagttcataactgcacttgttgatcttttaaagaattcccataaatacaagaacattgaaacaaacaaacagctaggtaatcagattaagatcgaggttgatatttacgcagaattgacggagactcgtgaggataaaaaggaaatagttgtagaatgcaaatccttaagagccatttcagaattttatatagataaggtcattgatgaacttgaaacagtaaacagcatataccctagcgcaaaaataatatttgcaaccccttcaagaattccagaaaaaataaaagaagcacttgtaagacatgatatttttgcttgggatattgattatatacttaatgaatttagtgatgaaataggaaaatcgaataacccatatctaaacttactgattgggagtgttggccaaagcaaatctaatcttaagattcgaaatctaagtgacaggcttaaaaaatgctcacctggaaagaaagaatggtctatatatcaaaaactgataggtgaaattctggctgagatcttttgtcctccactacaatcccctatgcctgaaaacagcgattacttaaagaccaatagaagggattttatattatcaaactatgccaaagatggattctgggaatttcttcgcagtaattacaaagctgattacattgtggtcgacgcaaaaaattattctaataaaatcaaaaaggatgaggtgcttcaaatagcgaattatttgaaacctcatggtgcaggaatgtttgggatgatatttactcgcaaaggcggagatagccgaggatgcgaaaccacattaagagaacaatggatattacatgggaaattaattttagttttagatgatgaagatgttgaaaatatgctggttgcttcttcaactggaacaactactgacattattggccaaaaaatagaaaagttcaggctttcaatgtga

SEQ ID NO: 108072 - DNA, 978 bp, Enterobacter aerogenes
atgaagctgtacataactggaaacgggtttgatttacaccatggtcttgataccagctatttttcttttgcctattttctgcgttcgcgccagagggattcgtacaacaacttagttgagtttgttggtttcacggacctgcctgaaaatatggataaactgaataaggatgaacatcctctgtggtgtgaatttgaaagtaatctggcagggttagattctcaggccgtactggatgcatttaccgattatctcccaaatctgggtgacccagattttcgtgatagagactggcatgcatttgatattgaaatgcagcgaatccttgaaaatttgactgatggtcttttcacccagtttacgtcgtttatttcccaagtgaaatatccagagcttaccgctgataaaacactgcaactatgcaacaacgccctatttataaattttaattataccagaactattgagtactattatggcataaaaagtagccagattctttacatccacggcaatgcatccttacctggagataggcttattcttggacatggtattgatccagaaaatttcaaagaacatcctcaagaaccgcccacggacgtaacggatgaggagctggaacagtggtatcagcacatgtctgataattacgattttgcatatgaaagcggaaaacagactctgaatcggtactttacacattcattcaaaaatacagaggaagtgatgtatgcaggccaagcatttttctctgaactcaacgcggtaaacgaggtgatcattgttggacactctttatcggcggtcgacatgccttacttcgctgccattaaacaacacgtgcagcccaattcgacctggacagcgacatggttccttgaaaaagaacgtgaacaacacctacatgcgttgcagagcataggcattgaacatcccctaattgtgccagtctgtagcctgctggtacgatcgtga

SEQ ID NO: 108073 - DNA, 213 bp, Enterobacter aerogenes
atgctgcagcgtcatggagcgattgcgctatggtcaaagcctttatttgcatttcttcaggaccattcgaataaagaaaaacaggagcagtgtcattacgaggatggagtaataaatgtaccttttacatattcacctaatattacattcaaaaccattttgccgggcggtttcgtcaaaatgaaccatgccaataatctccctattcagtga

SEQ ID NO: 108074 - DNA, 357 bp, Enterobacter aerogenes
atggacaggatcgtggcaaaccgcggctacccgcagaagatgcggatggacaacgggccagagctggtctcactggcgctggcacaatgggccgaagaacatggcgtgcagctcgaatttatcaagccgggtaagcctacacaaaatgcttttattgaacagttcaaccggacataccagagagaaatccttgatttttacctgttcagaacactgaatgaagcacgggagattaccgagcgctggctgagggaatataacaacgagcggcctcatgaatccctgaataacctgacgcgtgaagagtatcggctgatggctgaaaaaccggaactctcaaaaaatgcatggaactga

SEQ ID NO: 108075 - DNA, 1698 bp, Enterobacter aerogenes
atgaaaataaaaggattagcagggttaatggcgctggtcgcggcgctgtacgcggcgcaggcgggggcggcgacgaaagttgtccagggggcgaagtccaacggttttgtctacattgaggaccagatcgatggcggtttttttgttactaacaacggaacgcttgaacctgaaatcggcgggacgaatcactatattagcaccctggattatgacaacggcggcgaagtaatgctccaggaaacgctgggctatattagcgccaatagtttgaatttgaggagcgccacgacaattaatgggttggaagatatgtggctggaaaactcgccggtctcctatcccatcattggtttgatttgtagtagatatgctagtaattgccaaagcacaggaacaactttttccgcggtgacggacgcacaaggtgtatatggagcagaggcctcggatctcggtataatattcaatatggacggagtcatgtccgatgccttttactcctacctgcagcaaatgggcacaggcggcagttttaccaccacgataaatgaatgcgccactgagtcttcgcgctatgacgccagcgctggcgcccgctgtaaagaccagagcgatgcgacctggtatgccacggatgtcacctacaccaaagccggacacctgcggctactcaacaccaacgccatggatgaagtctttatcaatagcgatggcgtccccacccccggcgaaggcaataccaactgctgggtgcagaccgtcagcggtattaacggtctctcctgtaagatggtgaactacagtctggagagcaacggttcaggtgataatatccgcttcgccccggtcattaataatcaagcgctgctatcctcaacgaccgtcggcgatatgcagttcagccttgacggcaatagctggaaagcggtagatatgaccagtcccatgaaaggaagttatttttccaattctgcttattcttacaccctgaatgagctagcctcttccagcacaatatacgttttcttctcgcaaaagtttttcaaacagatggttgcctctggtatcagcgatattaatagccgcgatttgctctattttcgcatcattaataaaaatgttaactccttcgcacaaggtggcagagccttcgactttaacacctccaattcactggagataaaaccccgcgaattcagcatcaatatctcctctgaagactacagcgacgccccaacgcgcgaaggatacgttggccgtgatgaaccctcgctggactttaactacattgtcaccaccagcggcaaaaccgccgccgacgaggtgctgattaaagctaccggcccgacgcagcaaattaacggccgcgcctactgtatcttcagcgccaacgacagcagcattaaggtccccttcccggccacgctctccttcaccaaacaggatggcagcatcaagacctatgacgcgggctgcgacggcagctggcgcgatatgaccgacgcgctgtggctcacttcggcatggaccgatatctccggcgaacccggcgtcatggataaagccacggtgaaattttcgattcccatgaatgatgatatttcgcagaaaacgctggataacaacgagtggtacggcgacgtcagcgcctcaggagaaattcacgtgcaggccacgtggcgcgatattaattaa

SEQ ID NO: 108076 - DNA, 1773 bp, Enterobacter aerogenes
atggcggtggaaaaactgattgtcgaccatatcgacacctggaccacggcgctgcaaacccgctccacggcagggcgcggcagctcgggtaagattgacctgtacggcattaagaagctgcgcgagctgattctggagctggcggtgcgcggcaagctggtgccgcaggatccgaacgatgaaccggcgtcggagttgctgaaacgcattgcggcggaaaaagccgagctggtgaagcaggggaaaattaagaagcagaagccactgccggagattagcgaagaggagaaaccgtttgagctgccggtggggtgggagtggacaacactcaatacgcttgcagaaataaatcccaaaataggtgtgtctaatgatgagcaagacatatcttttgttccgatgcctctcatatcaacaaaatttgacgggtctcatgattttgaagtcagaaaatggaaagaggtaaaaaaaggttatacccactttgccaatggtgatatagccattgcaaaaattacaccctgctttgaaaatagcaaagcagcaatattttctggattgaaaaataatgtcggtgttggaacaacagaattgcatgtcgcgcgcccgtacagccaagctgttaatcagcaataccttcttttaaactttaaatcaccaagtttccttaaaactggtgaatctcagatgacaggctccgcaggccagaagcgtgtgcctagaaatttctttgaaaactacccgctaccataccctccattacaagagcaagagcgaatagtaaacaactttactcaattaatgatcctctgcgaccaacttgagcagcactcactgaccagcctgggcgcccatcaacagctggttgaaaccctgctaaccacgctaaccaacagccagaacgccgatgaactgaccgaaaactgggcacgtatcagcgagcatttcgacacgctgtttaccaccgaagccagcattgacgccttaaaacagaccattctgcaactggcggtgatgggtaaactagtgccgcaggatccgaacgatgaaccggcttctgaacttctcaaacgtattgcgcaggaaaaagcgcaactggtgaaagacgggaaaattaaaaaacagaagtcaatgctaccggccagtaacaataagaaagaatttgaaattcccatgaactgggtctggacgacactaccagaattaggagctcaattccaaaatggattatctagtagagggagtacatctggtgaatcaactattgttatccgtctggctgatatccaaaatggggaaatatcacatgacgatatgagagagctaaaaataacaaaaaaaatgcaagaaaaatataagctatctgaaaatgacatactaataattagagtcaatggtagttctgatattgttggtagatttattttaaatcaagaatcattgtcttattgttattgtgatcattttataagaatgaatttttcatgcactaaagccataaatgaaaattatttaaaaaacattaccaactctccttttattcgtaaaaaaatcgaagagttatttatcaccacagctggtcaaaaaacagtaaatcaaacacatatcaactcattaccaatacctttacctccatataatgaacaggaaagaattaactcaagaataaacaatctatttatcatactggaaggacttcgcatgaatttaaaatccgcccaacaaacccagctccacctggccgacgccctcaccgacgccgccatcaattaa

SEQ ID NO: 108077 - DNA, 930 bp, Enterobacter aerogenes
atgccttatgatttatcgtcccgattagttataggtttggcatcaagcgcgctttttgatttagatgaatcagatgaaatatttcgaacaaaaggcgaagacgagtacaggaaatttcagcgtgaaaatcaagataagctcttagggaaaggtgttgcatttcctttcattagacgtcttttaacattgaataaaattaacccaagtaatcctcctgtagaagttatccttttatcaaggaatgatccagatactgggttgagggtaatgaattcaattgaaagttacgggttaggtattacccgggctgttttccttcaaggtcagtctcctcataaatatatcccagcattggatattgagttgtttctctccgcaaattctcaagatgttaatcaggctgtaatggctgggtatcctgcaggtcatattcttaaggggaatattaaggatgatgttcaggatcatgaactcagaattgcattcgactttgatggagttatcgcagatgattctgcggaagctgtataccaaaaaagccatgtgcttgcagattttcataattatgaagctcaacatgtcaatgagactcataatccgggaccattgaaagattttcttcaacgtatatctaatattcagaagatggaagaagaattagagagagaagatccagcgtatagacgtattcttcgcatttcaattgtaacggcgagaaacgcgccttcacacaagagaatgattaatacgatgagagcgtgggggatcaatgttaatgaagcattctttatgggcggggtagaaaagaacaaaatccttgaaattatgcagccacatatgttctttgatgatcagcgtctccatcttgaaccttcagcatctgttttaccttctgtgcatataccatttggtgtgacgaataaaaaataa

SEQ ID NO: 108078 - DNA, 279 bp, Enterobacter aerogenes
atgaactggagtttgatccacgagcctggcgcgaatggcagaagcttggcgagacggtcaaaaaacagttcaaaaaataagctcctgcagattgtgcagaatccgcgaatggagtcggccaggctgagtgatttaccggattgctacaaaatcaagcttaaggcgtcaggttatcggttggtgtatcaagtacgagatagtgtggtggtggtttacgttattgccattggcaaaagagagaaagctgccgtttatcatcaggcgaataaacggctctaa

SEQ ID NO: 108079 - DNA, 186 bp, Enterobacter aerogenes
atgtacacttttattgagctgcagggtttcagtaaacggcgtcaagcgcttctaccggatgacgagtttcgcgtttttcaggagatgttgattgaggatcctgaggctggcgataccattgcagggactggggatttcgaaaaattcgctggagccgaccggggatgggcaagcgtggcggggtga

SEQ ID NO: 108080 - DNA, 462 bp, Enterobacter aerogenes
atgcagattggacgaatattatatcatgtatggtggtttatattttttggcccattgttcggcgtaccggcagggatcatcactttggggctctttgatactaacagtttcgccgattatatatttcacattacaccactgctccctatcctgatattctttggctattactggggggctattcctgcgttattgaccggagctatcgttggctgtctgcctcgctgtatttataatcattgctggctgagaatattgtttagcggactcattggcgcgactatcgctttctgcttcagatacattattgatattaacgggtacgatatttttgctaatgaaatgttatgggtaatgtctagcgcaggtcttttttcaggattggttatggggtggttgattgttaaaatatcaaacattgatgatttacccattcgtaaagatattgaaactaaaacctaa

SEQ ID NO: 108081 - DNA, 192 bp, Enterobacter aerogenes
atgtcaaccatatcgcgcgaaaaaaaaccaaaaggtggggggcagtccccacagtttaaaatgcgcattgacccagcattaaaggaacaacttgatgccgtggcggcagaggaaggggtaagtctcgccagttggttgaaagaactggcgagaaaagaattattaaaaagaggaatttttcctaatggttga

SEQ ID NO: 108082 - DNA, 1032 bp, Enterobacter aerogenes
ttgcactataaaattagtaaacaaacgtttaccatcccttctctttctgggaaaaatattcggtcaatgtatgctcagagacgtattttcccagtagttgaaagtataaaacaattattacaaagtatagtatccttctctagtttatcggtaagtcgagctggcataagtgatttagataattatgaacaagatgaggtaattaaaaataacaaaaatatttcaatcgataatacattgcaagatttaatgagtagattaaaagtatatcaattgaaaaaagcagaggacctaaaggaaatagctagagagttccaagaggaagtttttatttctgtgttatataatccaaaaatagactctgcatatggtttaagagagttatctaaccaagatttgaagaaggaaatggaggattttcaaacgacatattatgaaatggggattttaaatatacaacgaaaagggaaagcacgggagttaattaaaaagcactttcaagccattcaagaaagtatagattatttgcagaaaacactttcaaaaaatgaaagtacgtttgaggtagataaaatatttgcatttcctttattgaaaaggactagaaatatacttaatgctggtaggattgcagaacaaaaaaggaagatattatttactcctttagaaatttataagagtgagttaggaaagttctttaaaggtaaatcagcatcgctccattcaaatggaatgctaaaatttaaagatcatcaaagaaatggcgaggagtatgattgttttaaactttcatcaggagaaaaacaagtattaatactactaactgagtccttattacaaggaggggattcgaaaatctttattgcagatgaaccagagttgtcattacacattgactggcaaagtatgattcttccatcaataaaaaaactgaattctcaggctcaaataatagtggcaacccattcacctgaagttgcgggtgagtaccctggtaatatccttgatatggaggatatttgtaatgggtaa

SEQ ID NO: 108083 - DNA, 180 bp, Enterobacter aerogenes
atgaaacttataatctttatctctagcaacaaatatcttaacatcatcatcaattatttttttaatataatcatctataatagtacaactgccggcaatatttatagatacattcttaatatcaaatacatcaaaaatagttttccaaaaaattctatcggtcggaccttcgacatataa

SEQ ID NO: 108084 - DNA, 642 bp, Enterobacter aerogenes
atgggaagtaagctttccttgattaaagatattctatcaagaagtgtttataaaaaatgcgacaaatatatctctattagtaatatatttgctagtgagcttacaaaaagaaacccaaatgctgctgttagagtgttgcgtaatgttatagttaattttaaccctgaaaatataagagggagtggttacacttaccgtcccaaggaaaatgaatttgttttgcttatggctggaagggtctattttcggcaaaaaggacaacacttactagttggcgctttaaaaaaaattaatgtcaagaaaaatataagagttaaggttattggtgatggtccagaccttaacaaaatgaaagagatgtcagacgcattgagttctaatgtgacttttgaatacatgggctggaagaataatatatgggaccataccaaagatgtggatgcattagttttaccttcattgtatgaaggggtaccgcttgtaatgcttgaagcaattaaggcaaatgtctccattatagctcctgctcgtgatggtatgcgtgattatatacctcagggttatttatataaaactggtagtgaagaagaagaaatagaagcattatcgcaaaagttaaaagaaattataagtagcaactaa

SEQ ID NO: 108085 - DNA, 315 bp, Enterobacter aerogenes
  misc_feature (287)..(296): n is a, c, g, or t
atgattcagcgaagtaatctttgtagagttttactcctgtgtcttagcatggttacattttcagtatttgctgagaaggtttcaacccctgcgactgcccgagtcttacaggatggatttcctggtgaaccacaggctttagcatctatcacttctgatttatttaaagagtatgaacgtactaacaaagttggcgcgctgatcttttattcgtggggaatgctgcgacaggctaactattatcagagtatcaatgatctcattaacgcttctgaatatgcaaagannnnnnnnnncgggctttttttatcttga

SEQ ID NO: 108086 - DNA, 408 bp, Enterobacter aerogenes
  misc_feature (34)..(43): n is a, c, g, or t
atgatctcattaacgcttctgaatatgcaaagannnnnnnnnncgggctttttttatcttgatgaagcggtagataccaatgaagacaacatgctgattcgatacttacgtgccagagttgatgcctggctaccagtggggttagggcgctgtgtgattaccatcgaggatactgacctactgctgaagaataaagataaatttagcagtgagatcattggtaatatactaataatgcgtttaagggcccttcataattgccatatgaaacagcaagaaaaacagctcgttaatcatctgcggagagttaatcagcagcgtgaaattgattttgaaaataacgaaatgccggcttgggaaatggttgaagtattacagattattgttcccgttattaaaggtgaatga

SEQ ID NO: 108087 - DNA, 513 bp, Enterobacter aerogenes
atgatcggcttcctggtattgggctactggctgaccaccaaaacgccgcttggtcgctacatctacgctatcggcggcaacgaatccgccgctcgcctcgccggcgtaccgatcgtcaaagccaaaattttcgtctacgccttctccggcctgtgcgccgccttcgtcggcttgatcgtcgcctcccagctacaaaccgcccacccgatgaccggcaatatgtttgagatggacgccatcggcgccaccgtgctcggcggaaccgcgctggcaggaggccgcggccgggtgaccggctctattatcggcgccttcgtgatcgtcttccttgccgacggcatggtgatgatgggcgttagcgacttctggcagatggtcattaagggcctggtgatcgtcaccgccgttgtcgtcgaccagttccagcagaagctgcagaacaaagtcatcctgatgcgccgccacgaagagaagctggccgccatcccgccgaacggcgccacctccagctaa

SEQ ID NO: 108088 - DNA, 270 bp, Enterobacter aerogenes
atgatgtcgccgttccatagcggcaacccgttggtcagcagcgcgcccgcgaccatcccgcagatacccgccaccgcgccgacggacaggtcaatgccgccggtgaggatcaccagcgtcataccgatggccaacaggccggtaatcgccacgtgctgggtcatgatcagcaggttagaggcggtcaggaagttcggtaccatcacgctgaagaatgcgatcaccagcagcagggcgatgaaggttctggccttcagcaggtacatataa

SEQ ID NO: 108089 - DNA, 801 bp, Enterobacter aerogenes
atggtcggcgacaagaaaaagcactttgattatcagcccgcgccaaaaggcaacgcggtgcttgaggtcaaggggctgaccgcgctgcatccgagcggcggctacaaactcaatgatgtcaccttcaccctcagcaggggcgaagtgatcggtatttacggcctgctgggcgccgggcgcaccgagctgtttaaagggctggtcggcctgatgccctgccagagcggcgaggtacatcttaacggcgaaagcatcggtaaatctcgctttcaacaccgcctgaaaaagggcctggcgctggtgccggaagaccgtcagggcgaaggcgtggtgcagatgatgtcgattcaatccaacatgacgctctctgattttagcctgcagggtttccgccgcgcctggcgctggctgaatccgcagaaagaagagtccagcgtaaaagagatgattcagcaactggcgatcaaagtaagcgacgccaatttgcccatcacctcgctgagcggcggcaaccaacaaaaagtggtgctgggtaaggcgctgatgacccagccgcaggtggtgttccttgatgaaccgacgcgcggcatcgacgtcggcgcaaaaaccgatgtctatcacctgatcggcaaaatggcccagcaggggctggcggttatgttctcctcttcggagctggatgaagtgatggcgctggccgaccgcatcctggtgatggccgatggccgcattaccgccgatttaccgcgccatgcggtgacccgcgaaaagttaatcgcggcttcaacacctcaagattaa

SEQ ID NO: 108090 - DNA, 255 bp, Enterobacter aerogenes
atggcttcagtggtgttcaggccgtgccagacaaacaacgaaatcactaacgcattcgccagcgacgccgtcgaccccaccgacagatcaaagccgccgatggtgagcgaaatcgacaccccgatggcaatcaccgtcacgatagcgatggagcgcagaatgttgatgatgttaaagggatcaagaaagttatctgaggctaaaccaaagacgccaaccagcagcaccacggtcagcaacataccccatttatag

SEQ ID NO: 108091 - DNA, 489 bp, Enterobacter aerogenes
atgcgctatcaggcggcctatctgaactccgagtttgatgaagaacacggcgttccgaacctggtctccaaatcgctgcagaccacccgccgcttcgacgcgctgaagctgtggatggggcttgaggcactgggcaagaaacagtacgcttccatcatcgatcatggcgtgacgatggcgaaaaacgtcgcggaatttgtgaaatctcagccaacgctggagctggtcatgcagccgcagctggcaagcgtgctgttccgctcacgtccggcgcaaatggctggtagtgatagcgccgcgatcgccctgctcaaccagcgcgtgggcgacgccctgctggaatccggccgcgccaacgtcggcgtgaccgagcataacggcgtaacctgcctgaagctgacgctgctcaacccggtggtgacgctggacgatgtgaaggtcttgctgagcctcgttgaacgcaccgcccaggaactgctggcgaaataa

SEQ ID NO: 108092 - DNA, 579 bp, Enterobacter aerogenes
ttgttatattccatcagccagcgcttagatttggatgaatggcagaaaattttcaacattgcagatgcaaaccataagtacaatggaaatgcaatgttactggcactcattactggccagcgattgggggatttctcacgaatgaaattcactgatgtatgggatgatcacctccatattgagcaagagaaaaccggaagcaagatagcaatcccgctggcactcaggcctgatgctattaactggggtctaagggaagtcatcgcacgttgccgggattatgctgtaagcccatatctggttcatttcctccactcaacttcgcatgcagaatgcggtgcacaagttaaagcaagaactctcaccatgaatttcagtaaagccagaggtaaagcaaatattgattggagtgccggcacacctgcaactttccacgagcaacgctcattagcagaacgtctttatgaggctcaggggattgatacacagaggctgctcggccataaatcaccaaaccagacggctcgataccacgacgaccggggtaaaggtggaccactattgcagtttaaagattag

SEQ ID NO: 108093 - DNA, 645 bp, Enterobacter aerogenes
atgattattgtcggatgggtattattagcgttattggtgattgttcttgcttggcaagctaggaatatctggcaaaaccatagtaatttcaataatattgccattgctttatgcgcaatcctgacattggtgtggggagcatacacatttgatgccttacatcagaaagataaggccgaagccgaatatgcggaacttcagcagaaaataagaaatacagaatcaactttttttaacattgatgctacctttactaggtcttcagacggatactatattactccagttgtgagcataaaaaatagtggttcagagccgatattcattaaactaaaaaatgactcggtgtctataagtgcaatcgaggtgcgtggtgataaagttaaatctataaagacttacacccctaatatatatgaagaaatagcatcaaatacaaaggagaaaaacataccaatatatgattggaaagttccaatttcggcagagcgaaaactcaattatgttgccaaagttgaatcacctggtatgtatttcataacgttttctgctacggaaactgatgcgaatttcaacgaaaaaaacaaggatataaacggaaagccgatgatttggtttgtttctaaatacgtttatgttgagtga

SEQ ID NO: 108094 - DNA, 1083 bp, Enterobacter aerogenes
atgccacacgatttaattattgatagtgtgaatgtaaattcaaagtgctgggttgtacgttctggtgttcgctaccgttacgcaacacaattttacgaaggtggctttattgcaactggtcatcttgatgactttgatttagatccaagtctatttgaccaagcgttaaactatgggaacatttcccaacatattcctgaactagatgaaacaataactaggaatattaaaactcagatcgaaaattttgtgcttgatatgagcattggtgatgttgttttcacgatggattcaagatacgtaattcctggtgtagtaaaatcggcaccctttattagtttagatgctatttctcaaaatgaacaattttgcgttagaagaactgtcgagtggggagagcctattctaagaaattcgatacctataacaattcagcgaagttttaatgcttatcaagcgatcttttctctaggtgaaaattccaaagaaatatttcactggttaatggcattctttatttcagaggaaagttattatggtagtttacgagtagaacaaccgaaagctatacaacatcatactttgaagcaattgaatgaacttattgacaggatacaagttctttcgctattaatcggtgaacatttagataacgacatccaggatgactttattttaacatttgaagatattcaagctgctacagagcgattttctgatactggcgagcttaatcttactgttcagcaaatgttgatgtcacctggcgatctttggttgaaatttacaagtgcctcgaacatagctggtacagcattcctttgcgcgcttctatcgttttcatcgccagcatcatctttaacatttgttaatggcgactataatgataacattgagcagattacacagatgatcaacgctaatcgcgatgttgtgtatcaaggtataaatgttgaagcagttaaaaggcagctgatcttggatgctgcggaccaaaacacggacttcgtagtgtctgagccaactaaaaattcagatgacgatttccctgaagatggtgacccaaggcatgttgggggatga

SEQ ID NO: 108095 - DNA, 255 bp, Enterobacter aerogenes
atggcttcagtggtgttcaggccgtgccagacaaacaacgaaatcactaacgcattcgccagcgacgccgtcgaccccaccgacagatcaaagccgccgatggtgagcgaaatcgacaccccgatggcaatcaccgtcacgatagcgatggagcgcagaatgttgatgatgttaaagggatcaagaaagttatcggaggctaaaccaaagacgccaaccagcagcaccacggtcagcaacatgccccatttatag

SEQ ID NO: 108096 - DNA, 372 bp, Enterobacter aerogenes
atggcgctcgtgcaactgctcgtcgagcgggccattggtacggttaaccatccgtccgcgcttcaccgccgggcgattgcccacgtcctgcgcccagcgcagcacgttaacgtagctgccggcatcgaggaattccgcggcgttatagacgttgcccagcaccacgttgccgtaccacggccagatcgccatatcggcgatagtgtactcttcccccgccacaaagcggccgcgcgccagctgcttatccagcacgtcgagctgacgtttcgcttccatggtaaagcggtcgatggcgtactcgatttttaccggcgcatagttatagaagtggccaaagccgccgccgaggaacggcgctgcgccctgtag

SEQ ID NO: 108097 - DNA, 312 bp, Enterobacter aerogenes
gtgcgcggccgcggcgataaatttggtgccatcgagcaccgaaccgccgccaaccgccagcaggaaggtcacgttctcttcgcgggcgagttttaccgcgttcatcagcgtttcgtaagacgggtttggctcaatcccgccgaactccagcacgtcaaagccagccagcgcgctcagtacctggtccagtacgccggttttcttcacgctaccgccgccgtaagtcaccagcacgcgagcgccggctgggatttgttcgcgcagctcggcgatggcgcctttgccgaacagaatgcgggttggggtatgtaa

SEQ ID NO: 108098 - DNA, 483 bp, Enterobacter aerogenes
atgccggaagtatcgctggtggcgatacttgatgccgataaagagggcttcctgcgttccgagcgctcgcttatccagaccatcggccgcgcggcgcgtaacgtgaacggtaaggcgattctttacggcgataaaatcacgccatcgatggcgaaggcgatcggtgaaaccgaacgccgccgcgagaagcagcagcgttataacgaagagcacggtattgtgccgcagggtcttaataagaaagtggtcgatattctggcgctgggtcagaacatcgcgaagaccaaagccaaaggccgtggcaaagcccgttctccggtggaagccgatagcgtcgaactgacaccgaaagcgctgcagcagaaaatccacgagctggaagggcaaatgatgcagcatgcccagaaccttgagttcgaagaagccgcgcagatccgcgatcaattgcatcagctacgtgaactatttattgcggcatcataa

SEQ ID NO: 108099 - DNA, 1203 bp, Enterobacter aerogenes
atggaccgcgtcttgcattttgtcctcgcgatcgttgtggtggctatactggccttgttggtcagtcacaaccgtaagcagatccgcattcgttatgttattcaattacttgttattgaagttttgctggcctggttcttcctgaactccgatgtcggtctgggttttgtgaaaggcttttccgagatgttcgagaaacttctcggtttcgccaacgagggcaccaacttcgtattcggtaacatgaacgataaaggtctggccttcttcttcctgaaggttttgtgcccaatcgtctttatttccgcgctgattggtattttacagcatattcgcattctaccgattgtcatccgcgctatcggtaccgtgctgtcgaaagttaacggcatgggtaaactggaatctttcaacgccgtcagctcgctgatcctcggtcagtcggaaaacttcatcgcctataaagatattctcggcaaaatgtcgcgcaaccgtatgtacaccatggcggcaaccgcgatgtctaccgtttcgatgtctatcgtcggcgcgtatatgactatgctgcagccgaagtatgtggttgccgcgctggtgcttaacatgttcagcacctttatcgtcctgtcgctgattaacccgtaccgcgttgagcagagcgaagaaaacctgcagatgtccaatctgcacgaaggtcaaagcttcttcgaaatgctgggcgaatacattctggcaggctttaaagtagcgattatcgtcgcggcgatgctgatcggctttatcgcgctgatttccgcactcaacgccctgttcgcgaccgtcaccggctggtttggctacagcatctccttccaggggatcctcggctacatcttctatccggttgcgtgggtgatgggcgtgccggcgagcgaagcgctgcaggtgggcagtattatggcgaccaaactggtgtctaacgaattcgtggcgatgatggatctgcagaaagtggcagcgacgctctccccgcgtgcggaaggtatcatctctatcttcctggtctccttcgccaacttctcttctatcggtatcatcgctggggcaattaaaggcctgaatgaagagcagggtaacgtggtttcccgctttggcctgaaactggtttacggttccacgctggtcagcgtgttgtcagcttccatcgctgcgctggtgctgtaa

SEQ ID NO: 108100 - DNA, 543 bp, Enterobacter aerogenes
atgaaaaagagcatttttatggccctggccggggtaatgatggtttcctcggcggcccatgctattagcgttaccggcgaagccggcgagcactataccaacctcggcgttggcttcggtaccgaatccaccggcctggctatttccggcaactggttgcatagcgataacgacggcgacgccgcgggcttaggcctgggtctgaatattccgctgggaccattcctggcgaccgtgggcggcaaaggcatctacaccaatccgaagcagggcgatgaaggttatgcggccgcggtcggcggcggcctgcagtggaaaatcggcgatagcttccgtctgtacggcgactattactactcgcctgattcactctccagcggcatcgatagctatgaagaagcgaacgttggcgccagctggaccatcatgcgtccgcttagcatccaggcaggttatcgctacctgaacctggcgggcaaagacggcaaccgtgataacaccatcgccgacggtccgtacatcggcgccagcgccagcttctaa

SEQ ID NO: 108101 - DNA, 1200 bp, Enterobacter aerogenes
atgctacaagtggaaatgctgtccaccggcgatgaagtgctgcatgggcagattgtcgataccaatgccgcctggctggcggattacttttttaatcagggtttaccgttaacgcgccgcaataccgtcggcgatgacctcgacgcgctggtggctattttgcgcgaacgcagcgaacaggcggatgtgctgatcgtgaatggcggcctggggccgaccagcgacgatcttagcgcgctggcggcggcgacggcgaaaggagaaggtttggtcctcaacgctgaatggctggagacgatgacgcgattctttgccgagcgcggtcggccgatggcggaaagcaatcgcaagcaggcggaaatccccgccagcgccgaaatgatcaataacccggtgggcactgcctgcgggttcgccgtacagctcaaccgctgcctgatgtttttcacccccggcgtgccgtctgaatttaaagttatggtcgagcaggagatcgtaccgcggttacgtacgcgcttcacgcttccgtcgccgcctgtctgtctgcgtttaaccaccttcggacgttcagaaagcgagctggcgcagagccttaatcacctgcagctcccccctggtgtggtgatgggctatcgctcgtcaatgccgattatcgagctaaaactaaccggtcctgccgagcagcgcgatgcgatgctggcgctgtggccggaagtgcgtaaggtagccggagagagccttatctttgagggcacggaagggttaccggcgcagatcgcgcgttgcctgcaggagcgtcagcttagcctgaccttgagcgaacagtttaccagcggtctgctggcgctgcagctgaggcgggcgaacgcgccgcttctcgccagcgaagtggtgccggcgcaggaggagaccttagcgcaatcggcgcgctgggccgccgagcggcgcgttaaccattttgccgggctggcgttgtcggtcagcggtcaggaggccgattacctgaactttgtgctggcgacgccggaaggtacgcacgcgctgcgggtcaagttcagcgtgaatcgccacgggctgtcggtgcggcaagaagtctgcgccatgatggcgctgaatatgctgcgccgctggctcgacggtaagccggtcagcggcgagcatggttggatcaacgtcgtcgagacgctgtttatcgactga

SEQ ID NO: 108102 - DNA, 1188 bp, Enterobacter aerogenes
atgaacgatacccgctttgaaagctgcataaaatgcacggtctgtaccaccgcctgcccggtgagccgggtaaatccgcgctatcccggcccgaaacaggcggggccggacggcgaacgtctgcgtctgaaagatggcgcgctgtacgacgacgcgctgaaatattgtattaattgcaaacgctgcgaggtggcctgtccatctgatgtgaaaatcggcgatattattcaacgcgcgcgtgcgcagtacagccagcaaacaccaaccctgcgcgatgccatcctcagccataccgatctgatgggcaccctttccacgccttttgcgccgctggtcaacgccacaacggggttaaaaccggtgcgccgcctgctcgacgcggcgctgaaaatcgaccatcgccgcacgctgccgaaatatggcttcggcacctttcgccgcgcttaccgccagctcgccgccgcacaggcgcagtacagcgagcaggtggctttcttccatggctgctacgtcaactataaccacccgcaattgggtaaggatctgattcgcgtcgtcaacgcgctgggtaccggcgtgcagctcttatcgaaagaaaaatgctgcggcgtcccgcttatcgccaacggcttttttgacaaagcacgcaagcaagcgcacagcaacgtcgccgccatgcgcgaaaacagcttgccgatcatcgccacctcttcaacctgtacttttaccctgcgcgatgaatatccccatctcctggatatcgataacagcgatctgcgggatcgggtggagttagcgacccgctggatttggaaacagctcgatgccggcaaaacccttccattgcgcccgctgccgctgaaggtggtctatcacaccccatgtcatatggaaaaaatgggctggtcgctatacacccttgagcttctgcaccaaatcccgggcctacaactggaagtactggattcgcagtgctgtggtatcgccggcaccttcggctttaagtcggaaaactattcgtcggcgcaggcgattggcgcgccattatttcgccagattgaggagagcggcgcggacgtagtgattaccgattgcgaaacctgcaaatggcagattgagatgtccaccagcaagcgctgcgaacatcccattactctgctggcgcaggcgctgagcgcgcctgcctga

SEQ ID NO: 108103 - DNA, 1260 bp, Enterobacter aerogenes
atgaaatttgattgcgccatcgtcggcggcggactggccgggctgttgtgcgggctggcgctgaatcaacacggcctacgctgcgtgataatcagccgtgggcaaagcgcgctgcacttttcctctgcttcattagacctgctctcggcgctgccgaacggcgataccgtcactgatgtcgtacaaggtcttcagcaactggccgttcagcttcctgaacacccctactcccgcctcggcgccgacgcggtgctcgaatacgccagacagaccgaagcgctgctggccgcctgcggcgcgaacatgcaaggcgaagcgcgccgaccgcacctgcgggtaacgccgctggggacgttgcgaccggcgtggctgtcgccggaagaggttccgctggcgcccatcgcgcagcaacgcgtatgcatggtggggattagcggttttgccgattttcagccgcatctggccgccgccgccctcggacagagcggagtggatgccgccgcggcggagattgatttaccgctgcttgatgtgctgcgcgataaccctacggagttccgtgccgccaacatcgcccgcgtgcttgatgatgaaaacctatggcctgccctgcagtccgcgctgctgccgctggcgcaagagtacgagctgctaatgatgcccgcctgttttgggctcgcggataatcgcctctggcattggctacaagaacatctgccctgcccgctgcgcctgctgccgacgctgccgccttcggtgccggggatgcgcctgcatagccagcttcagcgccagttcatccgcaccggcggcacctggcttgccggcgacgaggtggtgaaaatcagccatcagcagggcgccgtcgaggccgtctggacgcgaaatcacggcgatatcgcactgcgtccgcgctttaccgtgttggcgagcggtagctttttcagtaacggtctcgtcgccacccgtgatagcgtgcgcgaaccgatccttggcctcgatctgcagcaaacgctggcgcgcgatagctggtatcagcgtgatttcttcgcatcacaaccgtggcagcgctttggtttgaagaccgaccccatgctgcgcccacacctgctcggccagccgctaacgaatcttttcgctatcggctcgctgctcggcggtttcgatgccattcaactcggctgcggcggcggcgtttgcgccgtcaccgcgctgcatgccgccagacagatccacgcccttgcaggaggccggtcatga

SEQ ID NO: 108104 - DNA, 954 bp, Enterobacter aerogenes
atgttcccggcaaaaggctcgctgctgatcctcgatcaccgcattaataaccaggtgattaaccgctgccgcaagccggcggatgccgatattctggtgcccggcgataccatttcgttgattggcaccacctcgacgcatattccttatgacgaaattgacgataaccgggtgacgacggaagaggtcgatacgctgctgcgcgaaggtgaaaaactggcgccgatcatggggcgcacccgggtgctacgcgcctactccggcgtccgtccgctggtcgccagcgatgacgatcccagcgggcgcagcgtcagccgcggtattgtgctgctcgaccacgccccgcgcgacggcatggaaggctttatcaccatcactggcggtaagttgatgacctaccgtttgatggcggaatgggccagcgacgccgtctgccgcaaactcggcaatactgcgccgtgccgcaccgcggagcgcccgctaccgggttcgcaggaagccacagaaaccacgctgaaaaagattatctcgctaccgacgccgctgcgcgggtcggcggtgtatcgccacggcgaccgcaccccggcatggcttggcgacagccgccagcaccgtagcctggtctgcgaatgtgaagcggtcaccgccggagaagtgcagtacgcggtagagaatctagcggtgaagaatttgctcgacctgcgccgccgtacccgggtcggcatgggcacctgccagggtgaactgtgcgcctgccgcgccgccgggctgctacagcgctttaacgtcgccaccccggcgcagtcgttaactcagctgtcggaatttctcaatgagcgctggaagggcgttcagcccatcgcctggggcgacgcgctgcgcgaaagtgaatttacccgctgggtctacctcggcttatgcggactgcaaaaggagcatcaggatgaaatttga

SEQ ID NO: 108105 - DNA, 786 bp, Enterobacter aerogenes
atggatgtattcttcgggaaaacgcgtttttccaattactttatgaccatggcgcaagctgaaactaacggattaatgaataccgcgcaggcggtttctgcttatcaccttcatgatcccctgacccgaatcaggtttcaggaaagtgttaaaagatttgccctttcacagattaacattatccgtaatagcagtgatgataagcagtgccagcagtgcattcaagcaatcagacaagagcgggaaaatctgcttattcaggacagaatgttgcgaaccggtgaagctatgctcactgcctccgtgcggttctaccgggaaaatgaaaaagtcatcggctatatcatcgacggaatcggtgttgttcttggcggtatgcaggttatcggaggttttggaataacggctagctcattaatgacaggaaacgttattggcgttattgctggtgcaacattgatgtttcatggttttggaacaatggctgaaaagttagatggtgttaattttgcagaaatatattatgaagatgcatctcaatttttaggatttagtagagagttgggaaagctttcatatcaggtagtcgatctttcaacctctttttatggccttgccaaacttaccttaaaaccagaagtgtggcgcttgttttatttcactggcccagatttttaccgaaaagtaacaaccatgagtaaaccagccatggcgttaaaagggatatcctcaacggtaaaagggatacagataggaaacacgatgtatgaagttaaagataaatga

SEQ ID NO: 108106 - DNA, 408 bp, Enterobacter aerogenes
atggaacgccaacagcagcttttagccgcctatcagcagatccataccctgagcagccagatgattgccctggcgcgcgccgggcaatgggaagcgctggtggaaatgcagtttgcctacgtgacggcggttgagaaaaccgccgaatttaccggcaaagcggggccatcgctggctctgcaagagatgctcaacgctaagttgaagcagattatcgacaatgagggagtactgaaagggctattgcaacagcggatggaacaattaaaaacgctgatcgatcaatccacccgccagaacgcggtcaacaccgcttacggccagttcgacgatcgttcgctcctgcttggcgaactgcagtccgataacgtggtcgcaattaagagcaaaagcgaagaattacaataa

SEQ ID NO: 108107 - DNA, 411 bp, Enterobacter aerogenes
atgtataaccgtagcggcacgcaagcctacgcacaggtcagtctggaaagcagcgcgatgagcgccagtccgcaccagttaatcgtaatgttgttcgacggggcgcttaacgccctgcttcgcgcacgcatcctgatgaatcagggggatatcgccggtaaaggcctggcgctgtcgaaggcaatcaacatcatcgacaacgggttgaaaagcggcctcgaccaccagcaaggcggtgaaatcgccgataatctggcggcgctgtacgattatatgaagcgacgcctgatgcaggccaacctgcataatgacgaagcggcgatcgtcgaagtggtcaagctgctggagaatatcgccgatgcctggcgacaaattgggccaaactatcaacctgctcagggtacattgtga

SEQ ID NO: 108108 - DNA, 1404 bp, Enterobacter aerogenes
atggcatcgatcagttccttaggcatcggctcaggactcgacctcaacggtttactggacaaactcagcaaggcggaacaacagcgcctgacgccgtataccactcagcaaaccagctataacgcgcagctaacggcttacggcacgttaaaaagctcgctggaaaaattcgataacctgagcaaggagctggccaaaccggagtttttcaacagcaccactgccaccaagcacgaccagttcaccatcaccaccaccaataaggcggtgccgggcaactatagcgttgaagtgcagaagctggcgcagccgcaaaccctgaccacccaggcgacgattaccgatcaacaggaaaaactgggtaccgctggcaatagcgatcgttccattacgatcaccgccggtaatccgccgaaagagaccacgattccgctgagcgatgaccagacctcgctgctggagatgcgcgatgccatcatcggcgccaaggccggcgttaccgccagcatcatgcgcgtcggcgacaatgactatcagctggcgctgagctccaccagcaccggcgagaaaaacaccgtgtcggtgcaggtcaataacgacgataaactcggcgctatcctcaactacgacagcaatagcaaaagcggcgcgatgaagcagaccgttgccggacaggatgcggagattatcgtcaacggcaccaaaattaagcgcagcaccaactcgattgccgatgcgctgcagggcgtcaccatcgacctgaaaaccaccaccaaagccggcgaaccgcaaaacctggtgatcggcatcgataaaagcggcaccgccgacaaaatcaaagagtgggtggataattataattcgctgctcgacaccttcggctcgctgaccaaatataccccggtgaaaagcggtgaagcgcaaagcgccaagaacggcgcgctgctgggcgataacaccctgcgcggcattcagtcgtcgattaaaagcgcgctcagcgccgctcaggacaacccggagctgaaaggccttggcaacctcgggatctcaactaatcccaaaaccggcaagctggaagtcgacagcaccaagctcaataaagcgctcgacgagaaaccggatcaggtcgccaacttcttcgccggcaacggtaaagacaccgggatggccaccgaaatccataatgaaatccagaactatattaaagcgggtggcatcatcgagaactcgaccaaaagcatcaacaccaatctcgatcgcctgaatatccagatcgacaccgtttccgacagcatccagaacactatcgatcgctataaacaacagtttgttcagttggataccatgatgtccaagctgagcagcacgggtaactatttacaacagcagttctcgtcccagtaa

SEQ ID NO: 108109 - DNA, 525 bp, Enterobacter aerogenes
gtggtgcaaatcctgctgaccagagacgctgtagttaagcaaaccggcggcaataccttcatcccatcgctctggcgaaacgtagccacgggcggtgttgagcagggcaacctgcgggatagtgagatcaaagcgctgattcgccagatccattttctgttccagacccggaatagcctgcaggctggcgcactcgctggttttgtcctgttcgctaaagtagttatcgacccgcacattccaggctttcagctcagacacgctcaggcacgctccaacaacctgcccggcggtggtgtttttgtcgtccgacagcttgcgaaaggaaatggttttagtatccaccaggctaccgttgatataaatatcgacgttatagtcaccaggcggtacctcatctttggcaaacagactgagatccatcattggcgtctctgtactatccgtttccaaaagacgagggttaaaatgttcctgagcaatggcgctgaaagaactgaaggcaatactgagccccagccctaa

SEQ ID NO: 108110 - DNA, 1143 bp, Enterobacter aerogenes
gtgttaaaatttttatattccaccctgttattgctggggctgtttccgctggcggtccaggcggtttgtcatcgtaccgacgacaccccgtcgcaatcttatgttgcgatgccgcagcagctactggtctccagtaaaaattatgcgccgggcgagatcctttatgactccggatatatgtccggcggcacgacaactatcaagaactgtgcggggacttattacgttggttttcactacgccggcgcgttaaccaccgccagcccgctgcaggataatgtctatccgttgaccaatggttcaaccgccacagggctcggtattcgcgtctataccattaatcaggcaggcccgtttgatgacgaacgggcgatcgataacagctggcaggaacacgatgccggggcgggctccgaccacaccctcaacaattccgcttatcgggtgcaaattatcgccaccggcgggccgataaccagcggcacgtttaacgtaccgagcccgctggcgcgggtcgattatcgcgaaacgcagagtattgatagcagcgatggcgacatcgcctccacgctgacgctgtcgaccaccacggttgaagtacatgcgatgggctgtacggcttcagtctcttctttgctttttgatatggggagtgtcgatgtctcttcgtttgataaccagcaaacggtagaaggacctgaacagagcgtggggctttcatgcgaaccgggaactaacgtaacgctgaaatttagtggcgcggtggcgtcgggagacaatgacaacggttcggtcttcgcactgaccgacgccggctctgacggcgtagcgaccggcgttggcgtgaaaatcctaacctataatccgaatcgacaatcttttatttctctacctattggccagacgtttggcgtctttagctccgatcgtgacgcggcggcggcggcaaatagcggacaggatgccgatggcaatgccatttccgatattggctccgcaacgacctatagcgatgatgcgaataggggaggggcaggggcaagtgaagcgatccgcttccgggcggattactacaaaaccggttcggcggtgacccccggtaccgccaatgccaccgggacgatcactctgcaatataactga

SEQ ID NO: 108111 - DNA, 312 bp, Enterobacter aerogenes
atgctcgctaatcggcgtgcgtccgccaaaaatcagtaccggaatattgctgttggccagattgatgacgccgcaggcggcattggccaggcctacgttagtgtgaaccatgacggcctgcactttcccgctcccgagataatagccatgggccatgccaatagcggcgttctcgtggggacatatcaccagctccggtacctgttgtcccgtggcgcgcattttggcccacgcttcaataaccgggggataatcggtacccgaattaataaaaatataggccacgtcgagggcctgaagccggtgcagtaa

SEQ ID NO: 108112 - DNA, 285 bp, Enterobacter aerogenes
atgctcatcgttataaggcatgccgacgccagcctcttcaccctgctcgtagagcactatctccagcggctcaccccgttcaaccagggaatgaaaagtatagatcccggtcggcccaacgccgacaatcgccactttcttcatcgttatccttcctttggtgtggttcccgaactgaaagataagtgtggtagagaaaatgacgaaaggtggagttatttaggcaacgcgaggaaaagtgtgcgttcctgggtggtggaggctttgaatccgtggtgtaaatag

SEQ ID NO: 108113 - DNA, 234 bp, Enterobacter aerogenes
atggcgggcaaagctaccgtcaaaacgcaggtcggtgtgatacatcactcgcgtgccgggacgaaggtggcgggcgttgcggccaacggcggtaatcacccccataccgtcgacgccggggatctgatcctcctgccaggcgtcggagagaccggccatcagcttccagtcgaccggattaagaccaatggcgcggttctcgatcagcacctgatcgtcagcgggcgtgactaa

SEQ ID NO: 108114 - DNA, 522 bp, Enterobacter aerogenes
atggacatcccggtgttaccggccagcgcgaaactggctaccagtacgctgcccagcagcgagaatccccaaaaggcagggcgcggtctctcaccgccgcggatcaccgcgaaaatcgccgtcgctagcggcaataacccaataaaaacaattgagtgggcagacgtcacccgctgcagcgctagcgccgtcagcagcggaaaaccgatgaccacgccgccggcaaccagcgccagtgaacgccattgtcccgcttgcgggcgcggcaggcgtaaaagccagatcaggcccagcgcaagcaccccggcaatcgccccacggcagaaagtcaggaaaaaaggatcgaactcctgcacggcgatgcgggtggcgggtagcgagccgctaaaaatagcgacgccgataaaaccgtttatccaaccggatatagaagtggaagcacgatggttgtgcacgtgtgacctctttgtagtgatagttaaggtggttgaccgggtcgatagtaggtcgcacaatccatga

SEQ ID NO: 108115 - DNA, 207 bp, Enterobacter aerogenes
atggcggcgcccaacaccgaccaggaggcggcaatgccgctctcaaaggcggcctgtgcggttccgatagtggacttggcgccgatatattccgacatcagcaggataccgacaataaaggccggcatcgcgcgcgagccctccataaaatccccggagtttttacttctaatacggaacgtcagccaggtggtaaataagatatag

SEQ ID NO: 108116 - DNA, 246 bp, Enterobacter aerogenes
atggtcagcatgatcccgacctgggccgtttccatgccgaagctgtcggcgatatcagacagcaaaccgaccggcgcaaattccgtggtattaaagataaaggcggcaattgccagcgtgacgacccgcagccacgcgactctgcgtgagaccgtatttgtaagcataaattccgggctggtagtaatgagaagaagagaaggcgatcttaaaacgaatgctgctgaaaatacaatcactttgtga

SEQ ID NO: 108117 - DNA, 336 bp, Enterobacter aerogenes
gtgcgccagccgaaatattgcccgacgatacggccaatagggatgccgaacaccatggccagcgcggtaccggtggcgataagacttagcgcctgtgcgcgcttgccgggaggggccatacgaatagccagcgcggaggtgatcgaccagaacaccgcatgggcgaacgcaatgccaattcgactcaccaccagcaccgtgaagttccacgcgaaaaatgacaatacgtggctggcgataaataagacgaacaggccaatgagcaggcgacggcgctccatctggctggtcagcagcatgaatggcagcgacatcaatgccactacccaggcataa

SEQ ID NO: 108118 - DNA, 399 bp, Enterobacter aerogenes
atggttgtcgccgcgccaaattataacggcggcaagctgccagcgacgccggaggaggtggctgcgagcaacattattttttcgatggaatcatggaaaagctggtgcctgaacactgggctggagaaagagatcgagcctgggggactacgggttaatgattcaaatctggttcttgatgcggtacggctgggcgaaggtatcgctctggagcgtagatctctggttcagggggcgctggatagaggagagttggtgcagttaacggcaattactgcgccttatccctggcactactggttggcggtctctccgttggcggaggaaaaggaggaggcagcgctgtttatcggctggctttttgacgaaatcactatctggcagcaacaacggcaataa

SEQ ID NO: 108119 - DNA, 573 bp, Enterobacter aerogenes
atgccaagagcgaatgaaattaaaaaaggtatggtgctgaattacaacggcaaactgctgattgttaaaaatattgatattcagtcgccaagcgcccgtggcgcagcaacgctgtataaaatgcgtttttccgacgtgcgtaccggcctgaaagtagaagaacgttttaagggcgacgacatcgtcgataccgttaccctgacccgtcgtttcgttgacttctcctacgtcgatggcaacgaatacgtgttcatggataaagaagactataccccgtataccttcaccaaagagcagatcgaagaagagctgcagtttatcccggaaggcggcatgccggatatgcaggttttgacctgggatggccagctgctggcgctggagctgccgcagaccgttgacctggaaatcgtagaaaccgcgccgggaatcaaaggcgcttccgccagttcgcgcaccaaaccggccaccatgagcaccgggttggtgattcaggttccggaatacctgaccagcggcgagaaaatccgcattcatatcgaagagtgccgctatatgggccgcgcggactaa

SEQ ID NO: 108120 - DNA, 708 bp, Enterobacter aerogenes
gtgacgataggcgccagccgactcttttttaccgtcaccggaggcctgcggtttgccggatggctggtacggcttcgcttcagcaacggctttatccagctcctgcgcggttttcttcagtgccagtccggtggtggtgcgatacatcggtttaccggcgaacttcgccagatcgacttcgatatcggcggcgacgatcaccagatccgcctgctccacctcttccggggtaatggcattaccggcccccacggaaccacgggtttccactttcacccaccagccgcgttttttagcctcggtttcaatggcttccgccgccataaaggtatgagctacgccggtcggacaagcggtaacggcgacaatacgtttctgcccctgggcggcggccggaacggctaccgccgctggcgcaacgtacggcttagcgtgatctttcgcttcacccaggaacagctccggatgggcgacagcacggttaatatcgcccagaaaaacgtttttaccattcagcgcgctatcagccggcagcgcggtccccagtacgatggccatttcggcatcgttcgggttatcaatcagctcaaggtgcgctttctgcgccgcggcgctgagcagggtcttcgccatgtaggcgcgagcctggccaagcccggcatcaataatcagcagcgttttcattatgcctctcctgctgtcaattaa

SEQ ID NO: 108121 - DNA, 339 bp, Enterobacter aerogenes
atggcggaagacggcattacgcgagttgacgcgtttgccatcgatcaggatcagcgtatagctgctatccagaccgcggatgctgacacccttgcggttatccccttcgttagtgagctgaacgccaggcacatcgcgcaacacgtccttcaggttctgcaccggcttacgctgcaagtcctgttgggtgatcacgctgatactggcgggcgcatctttgacgctctgttcagtcgccgcggcggtgacaaccagcgtttcgtcatcatttgcggccagcgccggaaatgccaatgctacgacggacgcgcacagtcccgcccgggcaaaagggtttaa

SEQ ID NO: 108122 - DNA, 1359 bp, Enterobacter aerogenes
atggctcaacgacgtgaactacagacgttacttaacgcagcgccggttggcgccctgcagtggcgtgtgattatctgctgttttctggtggtgatgcttgatggatttgacaccgccgccattggctttatcgctcccgatatccgtgttcattggcaattgagcgccagcgacctcgcgccgctgtttggcgccggactattgggattgaccgccggggcgctgctctgcggcccgctttccgaccgtttcggtcgtaaacgggtgattgagttttgcgtggcgctgtttggcctgtttagtctgctctccgcattctcgacgaatctagagatgctggtttttctgcgtttcctcaccggtctgggattaggcggggcgatgcccaacaccatcaccatgacttcggaatatctgcccgcccgccgccgcggcgcgttagttaccctgatgttctgcggcttcacgctcggttcggcgctgggcggcgtggtgagcgcccaactggtggcgcatatcggctggcacggcattctggccttaggcgggatcctgccgctgctgctggccgtcgcgctgctgtgggcgctgccggaatcgccgcgctggcaggttcgtcgcgggctgccgcaggcgaccatcgccagaaccgtcagcgctatcaccggcgagcgctatcccgagacccatttctggctcgacgaaccggcagccgggccgaaaggcagcattagccagctgtttgccggccgacaactggcgatcaccttgatgctctgggtggtgttctttatgagcctgctgattatctatttgctctccagctggatgccgacgctgcttaaccatcgtggtatcgatttacagcacgcttcgtgggtgaccgccgcgtttcaggtgggcggcacgctcggcgcactgttgctcggcatcctgatggaccgtttcaatcccttctttgtgctggcgctaagttattgcctgggcgcgttgtgcatcgtgatgatcggtttaagcgaaaacggtttgtggctgatggcgctggcgattttcggcaccggaattggcgtgagtggttcgcaggtgggcctgaatgcgctgaccgccaccctttacccaacccagagccgcgcgaccggggtcagttggtccaacgccatcggccgctgcggcgccatcgttggttcgctctccggcggcatgatgatggcgatgaatctctctttcgacacgctgttttacgttatagcggtaccggcggcgatcggcgcggtgatgctcatcatgctgatgctggcggttcgccgtcctggatctgtacccgacgcgctgccctctgcgggtgtcgcgaataaataa

SEQ ID NO: 108123 - DNA, 315 bp, Enterobacter aerogenes
atgcgggtgaacaggccaataagcggaatgttcataataagcagcatcacgttggcgataagcagcgcggcgatgagcccccagacgatatccggctgttcggtgaacatcgccgggccgggcgtaatgttatatagcgtcagcgcgcccatcatgaccgcggtggtgccggaaccaggcacgccgagcgtcaacattggaataaacgaaccgcaggcggaggcgttattcgcggcttccggcgccgctacgccgcgaatatcccccttgccgaagttatcgctattaccactgatttttttctccgtcatatag

SEQ ID NO: 108124 - DNA, 174 bp, Enterobacter aerogenes
atggcaaacaccatcagcgcgaaatattccgccgggccgaacgccagcgaccactgggcgagaagcggcgcgaacagaataatgccgccgatcgcgataagcgaaccgaagaaagagctgacggcggaaatcgacagcgcgacgccgccgcgcccttgctgcgccatgggatag

SEQ ID NO: 108125 - DNA, 432 bp, Enterobacter aerogenes
atgagcgatcgtatctttgccggagtctggctgttgttatgcattggcggcctgtttatcgcctggcagatccacagcgaatactcgtatgaacccgtcggcccgcgtcctttcccgttgggcattatcggcctgatgctactgtgttcagcgctgatgctgctgcgtcgcccggacgccatcgagtggccgggacgacatgtcctgcaacggctgttaaccatggtcgtggtactggtggtctatgcctggggatttgaatggctgggctttccgctggcgaccgcgctgctgacggcggtgatcggcctgctattcggcgccacgctaccggcggcaggcattgccggcgtggtgatgggcgtctcgttatggtacgccttcgataccttacttgatgtgactctgccgcttggcgtctggttaaattaa

SEQ ID NO: 108126 - DNA, 981 bp, Enterobacter aerogenes
atgaaaacgccatttttccgccatcttagcgccatcgcgctgtgcctctgtacaaccaccgctttcgcggcgcaagccccgtcccgcaccgaatgtatcgcccccgccaaacccggcggcggcttcgaccttacctgtaagctaattcaggtgagcctgatggaaaccggtgcgatcgaaaaaccgatgcgcgttacctatatgcccggcggcgtcggcgcggtggcctacaacgccatcgtcgcccagcgcccggcagaggccggaaccgtggtcgccttttccggcggctcgctgttgaatttgtcacagggcaaattcggccgctacggcgttgatgacgtacgctggctggccagcgtcggtaccgactacggcatgattgccgtgcgcgccgattcgccatggaaagacctgaagtcattcatgagcgcaatggagaaaaatcccgccactatcgtcattggcgccggggcctccatcggcagccaggactggatgaaagcggcgctgctggcgcaaaaagccaacgttgacccgcacaagatgcgctacgtcgcctttgagggcggcggcgagccggtaaccgccctgctcggcaaccatgtgcaggcggtctccggcgatctgagtgaaatggtgccgtacctgcagggaaataagatccgcgtcctggcggtcttctccaacgaacgtctgccgggcgcgctggctgatgttcctaccgctaaagagcagggctatgacctggtctggccgattattcgcggcttctttatgggcccgaaagtaagcgatgccgactaccagtggtgggttgatgaattcactaaactgcagcaaaccgatgagttcaaaaagcaacgtgaactgcgcggcctgtttgaattcaacatgaacggcaaggaactcgatacctatgtaaaacagcaggtcagcgattatcgcgaacaggcgaaagcctttggcctggctaaataa

SEQ ID NO: 108127 - DNA, 678 bp, Enterobacter aerogenes
atgcgtctcttattagccgaggataaccgtgagctggctcactggctggaaaaagcgctggtgcagggcggttttgccgtggattgcgtttttgatggccgggcggcggatcacctgctgcaaagtgaaaaatatgcgctggtggtgctggatatcggtatgccgggcttagatggcctcgaggtggtacagcggttgcgtaagcgtggacaaacgctgccggtgctgctgttgaccgcgcgcagcgcggtagcggatcgggtgaaagggctgaacgtcggcgccgacgattacctacccaaaccttttgagctggaggagctcgatgcccggctgcgggcgctgctgcgacgcagcgaagggcaggtgcatgaggtgcagcagcttggcgatctggaatatcgcgatgaaggctattttctgctgcgtggtgagatgttgtccctgacgccgcgcgagctggcgctgttgaaagtgctgatgtttcgccgtacccgtccggtttcccgccagcagctatttgaacaggtgtttagcctcagcgacgacgtcagcccggaaagcatcgaactttacattcaccgtctgcgcaagaagctccagcagagtaatgtgcgtatcactacgctacgcgggctgggttatctgctggagtgtgagccgcatgaaatggggtaa

SEQ ID NO: 108128 - DNA, 1410 bp, Enterobacter aerogenes
atgaaatggggtaaaccgcagtcgctgtatgcccaactgctgctgttcctcggcctgccgctggcgctgttgtgggggctatcggcattcaatagctacgtgagcgcgctgcaggcggcgacgcaggcctacgatcgtacgctgctctcctcggcgcgcaccgtggcggagcggctggtagtgcgcggcggccatctggaggtcaatgtgccctgggtggtgctggacagctttgaactcaacatgaacgaccggttgtattacaaggtggtcgacccgcaggggaaagtgatctccggttttgacgatctgccggcgatgccgccggccacgtcacgaacccagctctatccggcgctggcatggttttatcataccgaatatcgcggccaggccatccgcgtggcgcgcttgctgcagccggtcaacgaaggcggcatcgtcggaatggcggagatttatattgccgaaacgctgcagtcgcggcgctggctggccggacaactgctgttttcatcctgggtgtcacagggcttattagtgctgttgacgttggtactggcggggtggctactgcgccgcgttctgcggccaatgcgtcagctctcggcgctgatggtgcgccgcgaacccggcctgctgacgccgctaccggaattgctgccgtggtcggaaacgcggctgctgatcgtggcttttaaccgctatattgaccgcctgcgggtgatgatctcccggcaagagcgctttagcgccgatgcctcccatcagttaaaaacgccgctggcggtcctgaaaacccaggcttcggtggcgctggccagcgaggatccgcggctgtggcgcgagagtttgcaggccatgcgcgcgacgctggatgatacgattttactcaccgaacgtttgttgcaactggcgacggtgaaacgccgggagcagggcgaacaggcttttgccgcggtcgatctgcaggaggtcgtgcaccatagctgtttttcgcgtattgcccaggcgcgcagtaaaaacatcgatctgggttatgagggcgaacagtcgccggtaaacgttttgggggatggcgttttgttgggggaactgtgcgccaacctgctcgacaatgcgattcgctacactccggcacgcgggacggtgacgctgagcctgcatcgcgatggcgaagccgtcacgctgagcgtggaggatagcggcccgggcattgatgaaaacctgattaaccaggcgctgacgccgtttcgtcggctcgataacgtcggcggcatacccggcgccgggctgggcctggcgctggtaaacgatattgcgcgtctacatcgtagccgcccgcagctgtcgcgcagcgaaagcctggggggattgaaggtgacgctgcgtctgttgaccgtggtttaa

SEQ ID NO: 108129 - DNA, 426 bp, Enterobacter aerogenes
atgcgtcaaaggacgattgtttgcccgctaatccaaaatgatggccattacctgttgtgcaagatggctgccgaccgcgggttttttcccggacagtgggcgctgtccggcggcggcgtggagccgggggaaactattgaagaggcgctgcgacgtgaagtccgcgaggagcttggcgaaaaattgcagttgacccacatcacgccatggagcttccgcgatgatacccgcgtgaaaacctatgccgatggtcgccaggaagagatctacatgatctatttgattttcgattgcataagcgccaaccgcgaggtcacgatcaacgaggaattcgacgattacgcctgggtgaagggcgaagacctgcaacattacgatcttaatgccgccacccgcctcaccctcagccagaaagggctgctttaa

SEQ ID NO: 108130 - DNA, 1131 bp, Enterobacter aerogenes
atgttccagttatctgtacaggatatccatcccggccagcaggccgcgaataaagaagaggcaatacgtcagattgctggcgcgctggttagcgcgggtaatgtggctgacggctacgttaacggtatgcttgcccgcgagcagcagacctccactttcctcggcaatggcatcgctattccgcacggcaccaccgatacccgcgaccaggttctgaaaacgggcgtacaggtgtatcagttcccgcagggcgtgacctggggagaaggacaaaccgcttatgtggcgatcggtattgccgccagctccgacgagcacctcggtctgctgcgtcagttgacgcacgtcctgagcgacgattcggtggctgaacagttgagaaccgtcaccaccgcagaagaactgcgcgctctgctgatgggcgaaaagcaaagcgaagcgctgaagctcgacaacgaaacgttgagcctcgacgtggtcgccaacgatctgctgacgctgcaggcgctgaacgccgcgcggctgaaagaggcaggggcggtaaacgccgatttcgtcagccgcactattaatgatgcgccgctcaacctgggccaggggatctggttgaacgactgtgcggaaggcaacctgcgcagcgccgttgccgtgagtcgcgccgccaatgcgtttaccgctgacgggcagccggtggcgctgctgatcaccgtcgcgatggccgatgagcagccgaccgcggtgcttaatcgcctgagcaatctgcttattgataaaaaagcggagcatctgctgaaagccgacgccgccacgctgctggcgctgctgaccagcgacgacgccattgctgaagacgtgctgaacgccgagtttgtggtacgcaacgagcacgggctgcacgcacgtccgggcacgatgttggttaatacgattaaacaattctccagcgacattaccgttaccaacctcgatggttccggcaagccggccaatggccgcagcctgatgaaggtcgtggcgctgggtgtgaaaaaaggtcaccgtctgcgttttaccgcgcagggtgaagatgcgcaacaagcgctggatgcgattggcgaagcgatcgccgcaggccttggggagggcgcataa

SEQ ID NO: 108131 - DNA, 939 bp, Enterobacter aerogenes
atgagcagacgtgtagcaacgattacattaaatccggcatacgacctggtgggcttcaccccggaaatcgaacgtggcgaagtgaacctggtgcgcaccactggcctgcatgcggcaggcaaaggtatcaacgtggcgaaggtgctgaaagatcttggcatcgacgtcaccgtcggcggcttcctcggtaaagataaccaggatggcttccagcagctgtttagcgagctgggtatcgccaaccgcttccaggtggtgcaggggcgtacccgtatcaacgttaagctgacggaaaaagatggcgaagtgaccgatttcaacttctccggtttcgaagtgaccccggcggactgggagcgtttcgttaatgattctctgagctggctggggcagttcgatatggtttgcgtcagcggcagcctgccgtccggcgtgagtccggaagcctttaccgactggatgacgcgcctgcgcagccagtgcccgtgcattattttcgatagcagccgcgaagcgctggttgcagggctgaaagccgcgccgtggctggtaaaaccaaaccgccgcgagctggaaatctgggctggccgcaagttgccggagatgaaagatgttatcgacgccgcccatgcgctgcgcgagcaaggtatcgcccacgtggtgatttcgttaggcgaagagggcgcgctgtgggttaacgcctccggcgaatggattgccaaaccgccttcagtcgaggttgtcagcaccgtcggcgccggtgattcgatggtcggtggcctgatttacggcctgctgatgcgtgaatccagcgagcataccctgcgcctggctaccgccgtcgccgccctggccgtcagccagagcaacgttggcattaccgatcgtacccagttggccgcaatgatggcgcgcgtcgacttacaaccctttaattga

SEQ ID NO: 108132 - DNA, 708 bp, Enterobacter aerogenes; identical to SEQ ID NO: 108120

SEQ ID NO: 108133 - DNA, 645 bp, Enterobacter aerogenes
atgcctgttccagaacgtcctaaaatttatcatattttgcatattgatcggttgcgttctgtaattgcagacgggctactttgcgatgaacaaatttcgcagcgtaacaatgctggtactgtgattggtatgaataatattaagcagcgacgtcttacggagttaacgcttgattgttatccggacttgtatattggacaatgcgtgccgttctacttctgccctcgttcggttatgttgtacttgattcatcgcggcaatcatcgtgatctcggttatcatggggggcaggatcctgttctgcatttggaagctgatttgtttacggtaatggattgggctgaacgaaaccagcagcgatgggcgtttacgttatctaacgccggggcactttatgtcgagtcacgttgtcaaagagatcaactgagcgagttaaactggcaagcaatcaatgcatcgcagtggagcggcaacggtctgaaggagtcgaagcaggcggagtttctggttgaacggcatttcccatggcaactggttgaacgcattggtgtacattcacgatccattcaccaacaggtagctgatattcttcccgctgatgggcatcgcccgccgattgagatacaggaagcctggtattactga

SEQ ID NO: 108134 - DNA, 1035 bp, Enterobacter aerogenes
atgattgagtacagacatggcgacattcttcatgccgatactgaagccatcatcaataccgttaactgtgttggtgtgatggggcgcggtatcgcgctgcaatttaagaacgcttaccctgataatttcaaagcctatgcgaaggcctgtaaagctgaacaggttaaacctgggaaaatgtttgtttttgaaacgaaccaattaaccggcccgcgttacattgttaatttcccgacaaaacggcattggaaggggaagagtcggattgaggatattgtttcaggactagaagatcttgtgcgtgttgttgaaaactacaatatccgctccatagccatacccccactagggagtggattaggcgggctggaatggcaggatgttaagccgttaattgaatccgctgttaagccgcttaagcaggttcagattgctatctacgatcccaaaggcgctccttcttcagagcgcatggcgcataagacggaagtgccgaagatgacaactggacgtgctgcattgattgaacttatgcagcgatatcttaacggtctactcgatccgtttatctcgctacttgagctccataagttgatgtatttcatgcaggaggccggggagccacttcgcctcaagtatcagaaagcgcattacggaccctacgctgagaatttgcgtcacgtgcttaatgctattgaagggcatatgatctccgggtattccgatggcggtgatttaccggagaagcagttaatactagtaccaggggctattgacgaggcccgacaatttctcgcccgatatgaagagacccaacatcgtttccaaagggtttccgaactggtagagggctttgaatcttcttttggtctggaattgctggcaacggttcactggacgatgaaacatgagtcaataacgtcttccgaagaagtgatgaattacatctacaactggaatgagcgtaagcagcagtttacaccccgccagatcacactggcaatggatatattgaaaaagaaacagtgggtgtag

SEQ ID NO: 108135 - DNA, 528 bp, Enterobacter aerogenes
atggcgacacggggttcaaagaatcaatatattagcacaatggctaaaaagaccgctcctttacttcctgtgactaaccagctgctcgctgaacttggtgagcggctgaaactggcacgactacgacgtaagctaacagcaaagcaggttgcagagcgggctggtatgtcaccgatgaccctccgttctcttgagtcaggcggcgctggtgtagcaattggcgcctacttgtccgttatgcacatattagggcttgaaagagatctgaataaaatcgccgccgaggatgagttggggcggcatcttcaggattcccggttaatcaataaatcgcatatttcccgttcttctgttgcctctcgtgcaaaaatacataccgaaaacgagataaaacacgatgcattcggcaagcaattaacggcatcacaagacaaatcagtaaagactgaagtaaaagcaccagtcgtgacatcggcatctcttgctgcactgttaaaaccaataaagaaacccactaagagtagctga

SEQ ID NO: 108136 - DNA, 639 bp, Enterobacter aerogenes
atgacggtgaaaattgcaggaaaaaaaactgtttccgaatggaatgcattgtctgctaaattaaaacatgatccaacagagttagattggaaacatgcaattcaatttttcgatgagagaataaatgaacgctacctggagccagcagagcgtataagaggagatggtacaactagtaatcttaaaggcgccggatttgctatttgtactttactgtgtgcattaatagagaatttggaaactttttatcgggggatgaattttaaacctaatcctaatggaatgtatgaatatggaaacggttgtagtcgaaccttgtttactgactttttgaaaacaaagtcaccatttataaattattttggcggtgatgatgaattggcaaaaagcttctatacgggtgttcgttgctctttacttcatgatgcatcgacgtgcgatggctgggtcattaacattactgaacatgaaacagtttcagttaataatggaaaaaaaatattgaaccggtccctttttatgtctgatatcagggaatatattcgagattatagagctcttttattgcagcctggaaatcaagaattaaaagatgcatttatcagaaagtttgatggcatttgtgctgctgcaacataa

SEQ ID NO: 108137 - DNA, 309 bp, Enterobacter aerogenes
atgcatctacagaccgcaatattactaacaattctgcctttcccggccctggcctacgcctccccggaatccacccagctcgcccttgcgctgaaacaactcaacggcgtgaaaacctcgctggaacgcgctcaaaccagcgccagcaccgatccgcagtcgcgctacttcttcgactacttacaggcgcagcaggacatcaccgccgttgaacaaggcatccaccgctaccttagcccggcaagagcgcagccgcacgccgtacagcccctgagcgccagctaccagcgggagaaccccgatgactga

SEQ ID NO: 108138 - DNA, 645 bp, Enterobacter aerogenes
atgagcgaacagcgatccccgtcgtcacgtccgccacaggggccggtcggctggctgctgtcgctggccggaaggttaatcgggttggttattggtgcgctggtgctgcgggtagtactggaactggcggggttatatttctggtggccgcaggagggaagcagacatgtttttctggtgatgaagcgagagcaggcggaactggttagtgcgttacagccgcatccgctgggggatgaaattacgatactactgaaaagtggagcaccccacattctgaaggccagacataagacaaactggccccacctggaacctttcaccattctggcttatacgctggtgagttttatgctgcgcctggtatggctcgccgtcatgctacccctgctctgtctgtgtgcattaatcgggctgacagacggactggtccggcgggatttgaggcggtttggctccgggctggaatcggtttttctccaccgctacgtcatcaggtccggcagttcagtcgctacaacgctttgggtgttttatctggcgcagccgctgtttctgcctgcgatgctggttttactgcctgccgccttatggtttgggataacggtatggatggtggcaggaagctttaaacgttggttataa

SEQ ID NO: 108139 - DNA, 2724 bp, Enterobacter aerogenes
atggcgattaagcgcttttcatcccgcacagaaagattagatacggaattcctcgctgaatcgttgaaaggggctgctaagtatttccggattgcgggttatttcaggagctctatctttgagcttgtaggcgaagagattgcaaagattccagaagttaagatcatctgtaattccgagcttgatctggctgacttccaagtagctactggccggaatacagcactcaaagagcgctggaatgaagtggatgtagaagccgaagcgctattgaaaaaggagcgctaccagattttggatcagctattacattcgggtaatgttgagattcgcgtagtccctagggaacggttattccttcacggcaaagcaggctcaattcattatgcagatggcagccgtaaatcttttattggctcagtgaatgaatctaaaagcgcattcgctcacaattatgagcttgtttggcaagacgatgatgaagaaagtgcggactgggtagaaagagaattttgggcactctggactgaaggcgtcccgctgcctgatgcgatcttagctgaaatccaccgtgtatctaatcgccgggaagtaaccgttgatgtattgaagccagaggaagtcccagcggcggccatggcagaagcacctatctaccgtggaggggagcagttacagccctggcaacgctcgtttgtgactatgtttctggaacatagggagatctatggcaaggctcgcctactattggctgacgaggtgggtgttggtaaaacgctatcaatggcaaccagtgcattagtcagtgctttactagacgatggccctgttttgattctggcaccttctacactcacgattcagtggcaaattgagatgatggacaagctcggtgtgcctgctgcggtttggtcctcgcagaagaaagtttggctgggtgtagaggggcaaatactctcacctcgaggtgatgcctcctctatcaaaaaatgcccttatcgaattgccattatctctaccggactgattatgcatcagcgggagaatactgactttgttaaagaagctggaatgcttctgaagaatcgtttcggtaccgttattctggatgaggcgcataaagcccgtattcgtggaggattaggagatcaagcttcagaacctaataatctcatggccttcatgctgcagatcggcaggcgtacacggcatctgatactgggtactgcgacacctattcaaaccgacgtacgtgagttatgggatttattgggtattttgaactctggtgctgaatttgtactaggcgatgctctgtcgccatggcatgaccatgaacaagcgattccgttgataaccggccagactcaggtgacatctgaggctgaagtttggcattggttaagcaaccccctgccgccaagcaatgagcaccatactgttcagcaaattcgtgactacctgtccattgataataagtcctttggatattctcatcgtttcgaagatctcgactatatgattcagagtctttggctctccgaatgcatgacacctagcttctttaaagagaacaaccctatcctacgccatacagtgctgcgtaagcgtaaacagctggaagatgacggtctgttagagcgtgttggggtgaatacacatcccattacgcgcaacctagctcagtatcagtcgcggtttgtggggcttggcattccgaccaatacaccattccaggtcgcttacgaaaaagcggaagagttcagtaagttgcttcagtcacgcactcgagccgcaggcttcatgaaatctttgatgttgcaacggatctgctcaagtttcgcatcaggcttaaaaactgctcaaaagatgttgaaacatacggtttctgacgaagacgaggatctagttgaagatgttgagcacttactttcagaaatgactcctgcggaagtcgcttgtttaagagagattgaaacacaactgtcacgccccgaagccgttgactcaaaactgaacactgtgaaatggttcttaacggaattccgtaccgatggaaaaacttggctggaacacggctgtattattttcagccagtattacgacacggcggagtggatagcgaaagaactggccaagtccttaaaaggcgaagtggtagccgtttatgctggcgttggtaaaagcggcttattcaggggcgaacagtttaataacgttgaacgcgaattgattaaatccgcagtgaagacgcgcgagattctattagtggttgctacggatgccgcctgtgaaggcttaaacctgcaaaccttgggaacactcatcaatgtcgaccttccctggaacccatcccgtttagagcagcgcctcgggcgaatcaaacgttttggtcagacacgtaagtttgtggatatgctcaatcttgtgtacagcgaaacacaagacgagaaagtttataacgtgctgtcggaacgcttacgcgatacatacgacatttttggcagccttcccgatacgattgatgatgaatggatcgacaacgaggaagaactcaacactcgcatggatgaatacatgcatgaacgaaagaaagctcaagatgcgttctccgttaagtatcgcggtactctcgatcctgatgctcatctctgggaacgttgcgctacagtactgtcacgtagggacattgtaagtaagctcagcgaaccatggggaagctaa

SEQ ID NO: 108140 - DNA, 2838 bp, Enterobacter aerogenes
atggccttgcaaccgtttgaatggagagacaaaccgtctcttattgagcacctgttcccggtacaaaaaatatctgccgagacctttaaagaacgaatggcaagccacggtcagttgctggtgtcgttgggtgctttttggaaaggcagaaaacctctcatcttaaacaaagcgtgcattctggggtcattgttaccagcaactgacaacccgcttgaagatttagaggtatttgagctgttaatgggcatcgactctgagtcaatgcaaaagagaattgaggcttcactaccagcatcaaaacaagaaacaatcggcgattacttggtattaccctatgccgagcaaatcaggattgctaagcgcccggaagaaattgatgaatctcttttcgtccatatttggaagcgggtcaacaagcatcttggtacttccgctcacacttttgcgcaactagttgaggaactaggtgttgcacggtttggccataggccaagagtggcagatgtattttctggttcgggtcaaattccgtttgaggctgctcgcttaggttgcgatgtctatgcctctgacttaaacccgatctcctgcatgcttacttggggcgctttgaacgttgttggtgcgagcgcgcaaaaaagagtagaaatagacaaagcccaacgggatatcgttaagaaagttcaaaaagagattgatgagcttgacattgagtccgatggccgaggatggcgagcaaaggtattcctatactgcgttgaggtgacctgccctgaatccggttggcgtgtgcctttaattccaagtttgattatcagcaatagttttcgagttgttgctgagcttaagcccgttcctgctgagaggcgatatgatattagtatccgtgaagtatcgactgatgaggaactggagttctataaatcaggcaccatacaagatggcgaggtaattcactcgccagatggaaaaactcagtatcgcgttaatatcaaaacaattcgcggtgactataaagaaggcaaggagaacctaaacaagctgcgaatgtgggagaaaacagactttgctcctcgtcctgacgatatttttcaggatagattattttgcgttcaatggatgaaaaaaaaacctaaaggatcgcagtattactacgaatttcgtactgtaaccaatgacgacttaaaacgcgaaaaaaaggtaatagaacatgtcgcatccaaattagatgactggcagaagcaagggcttgttcctgatatggttattgaagcgggcgataaaacggatgagccaatcaggacgcgaggctggactcattggcaccatttattccatccaaggcagttgctatttttgagcttggtgaacaaatattcactcgcagaaggaaaatttaacttcttgcagtgcatgaatcacttgtccaagctaactcgctggcgaccccaggccggtggtggtggcggttctgcggctacatttgataatcaggcactcaatactctgtacaactacccagttagagcaacaggatctatcgaaaatatcttggctgctcagcacaaccactgtggaatcagcgagaatgtttcctttgtggttaattcacatccagcgccagagttagatgtggaaaacgacatttatattactgatcccccatatggcgatgctgtcaagtatgaagaaatcacagagttctttattgcctggctgaggaaaaatccgccgaaggaatttgcccactggacttgggatagtcgccgatctcttgcggtaaaaggagaagatgagggtttccgtacaggcatggttgctgcttatcgcaagatggcgcagaagatgccagacaatggtttacaggtgctaatgtttacccatcaaagtggcgctatctgggcagacatggccaatatcatttgggcgagcggccttcaagttactgccgcatggtacgtagttactgaaactgactctgcattacgtggtggttctaacgtaaaaggcaccatcatcctgattttacgcaagcgccatcaggcattagagaccttccgcgatgatttaggttgggaaatcgaagaagccgttaaagagcaagtcgaatcgttaataggattggataagaaggttcgttcccaaggcgcggaaggcctctacaccgacgctgacctgcaaatggctggttacgcagccgcgttgaaagtactgacagcttattcccgtatcgacggtaaagacatggtgactgaagccgaggcaccacgccaaaaaggcaaaaaaacttttgttgatgagttaattgatttcgccgtgcaaacggcagttcagtttttggtgccggttggcttcgagaaaagcgaatggcagaagcttcaagcggttgaacgcttctatctgaaaatggccgaaatggaacaccagggtgcaaaaaccttggataactatcagaacttcgccaaggcattcaaggttcaccattttgatcaattgatgagtgatgcctcaaaggctaactctgctcggctaaagctttctaccgagttcagaagtaccatgatgtcaggtgatgccgaaatgactggcactcctctgcgagcccttctttatgccttatttgagatatcgagagaagttgaagtagacgatgttcttttgcatctcatggaaaactgcccgaattacctgcccaataagcaactgcttgccaaaatggcggattacctggctgaaaagcgtgaaggtctaaaaggtaccaaaacgttcaaccctgagcaggaagcaagcagcgcgcgtgtccttgcggaagccattcgaaaccagaggttgtaa

SEQ ID NO: 108141 - DNA, 588 bp, Enterobacter aerogenes
atgaataaaaccgttgattttggggcaccgccagaattcggtatgcatcacttctatgtggagattcccgcagcgccccgtgacgctgttgtgatctatgaagactatggctttgacggtgaagattctcgccgagaaacagtagagtgtcgcctgatattagccagagagctctggactaagatccgcgatgacgttcgccgtgactttaacgctcgcctaaagattaagaagcaaggctccggtacttggtctaccggtaaagtgaagcttgaccgctttcttggacgtgagttgtgcgttcttggctgggcagcagaacatgcctcacccgatgaatgtctggttatttgccaaaagtggctggctttacgcccagaagaaagatggtggctttacagtaaaaccgcagctgaagcaggtcgtgatgatcaaacacaacgaggctggcgtaaagcgctctattgcgcgctatcggatggggccaatatcaaattggaaaccaaaaagaagcccaagtctaaaaagctacaagttgaagatgagacccaggatctgtttgggtttatggaaaagggagagttttga

SEQ ID NO: 108142 - DNA, 3069 bp, Enterobacter aerogenes
atgaaaaccgtacgtagtgcatgccagttgcaaccgaaggccttggaaatcaatgtcggcgaccagattgaacagcttgatcaaatcatcaacgacaccaatggccaagagtactttaaaaagaccttcatcactgacggttttaaaactttgctctccaagggtatggcacgcttagccggtaaatcaaacgatactgttttccacctgaagcaagctatgggtggtggtaaaacccacttgatggtcggctttggtttattagccaaagatgctgcccttcgaaatagccacttaggatcaatgccataccaatcagattttggctcagccaaaatagcagcattcaatggacgcaataatcctcattcctatttctggggtgagatcgctcggcagctaggtcgagagggtgtattcagggagtactgggaatccggagccaaagctcccgatgaacaagcatggataaatatttttgatggtgaggaacccatcctaatcttgttggatgaaatgccaccatacttccactactacagcacccaagtccttgggcaaggaactatagctgatgtagtgacacgggctttttccaatatgttgaccgcagcgcagaagaaaaagaatgtatgtattgtagtttccgatcttgaggcagcttacgatacaggaggcaaactgattcagcgtgcattggatgatgctacgcaagaactcgggcgcgccgaggtatccattacgccggtaaacctcgaatccaatgaaatctacgagattctgcgtaaacgtttgtttttgtctctgccagacaaaagtgaggtctctgaaattgcgtcgatctatgcatcaagacttgcggaagccgctaaagccaagaccgtagagcgcagtgcagaagcattggcaaatgacatcgaatctacttacccattccacccaagctttaaaagcatcgttgctttgttcaaagaaaacgaaaagttcaaacaaacccgtggtttgatggagttggtttctagactgcttaaatcggtgtgggaaagcgatgaagaggtgtatttgatcggtgcccaacactttgatctttcgatacacgatgttcgtgagaagctggctgaaatttcagaaatgcgcgatgttatcgcaagagatctttgggactccaccgacagcgctcatgctcagatcattgacctcaataacggcaaccactatgcacaacaggttggtacgctattgctaacagccagcctctccaccgcagtgaactcagttaagggcttaaccgagagcgaaatgctggaatgtttgattgatcctaaccatcagggtagtgactaccgaaacgcattcactgaacttgctaaatcagcttggtatttgcatcaaacacaagaagggcgcaattacttcagtcaccaagaaaatctcaccaaaaagctacagggatatgccgacaaagcacctcaaaataaggttgatgaattaattcgtcaccgactagaggaaatgtatagaccagtcacgaaagaagcatacgaaaaagtactaccactccctgaaatggatgaagcacaggccacactgaggagtggtcgtgccctgttaataatcagcccagatggtaaaacaccacctggtgtagtcggcaacttctttaagggcttggtaaacaaaaacaacattctggtattaacgggcgataaatcctctattgccagtatagaaaaggctgcacgccatgtttatgctgttaccaaggcagacaacgaaattacagcatcacatccgcagcgcaaagagttggatgagaagaaagcacagtatgagcaggacttccaaactacagtgctctctgtattcgataagctcctgttccccggtaacaatcgaggtgaagacgttttacggcctaaagcgctggatagcacctatccatccaacgaaccatacaacggtgaacgccaagtcgtgaagactctcacgtccgaccccatcaagctttacacccagattaacgaaaatttcgacgcactgagagcccgagcagagtcattactgttcggtactttggacgaggcaagaaagacagatttgctcgataagatgaagcaaaaaacacagatgccttggttgccaagccgtggcttcgatcaactcgctatcgaggcataccagcgaggtgtatgggaggatttaggcaatggctatattacgaaaaagcccaagccaaaaaccactgaggtaatcatcagcgaggactcatcaccggatgatgccggcaccgttcgtcttaaaatcggcgtggctaatgcaggtaacagcccacgcattcattatgctgaagatgacgaagttaccgaaagcagcccagtacttagtgataacacgctagcaaccaaagcattgcgagtgcagtttttggcagtagaccctaccggtaaaaaccttactggaaacccaaccacctggaaaaatcgactgacattacgcaatcgctttgacgaagtggcgagaacagtcgaattgttcgttgccccccgtggcacaatcaagtacaccctagatggttcagaagcacgtaatggtgaaacctacaccgtgccaatccagctcgctgatcaggaagccactatctatgtctttgctgaatgtgatggcttagaagagaagcgaaatttcacctttgcggcagcaggttctaaagaaataccgatcataaaagataagcccgccactctggtcagcccctcacccaaacgtatggatagctcggcaaaaacctacgagggtttgaaaatcgccaaagagaaaggcattgagttcgagcagattagcttaatggttggatctgcaccaaaggtgattcatatatcgctaggtgagatgaaaatcagcgccgaattcattgaaaccgtattaacgcacttgcaaaccgtgttaagtccagaagcccctgtggtcatgaccttcaaaaaagcctacacacagactgggcatgatcttgagcaatttgttaagcagcttggcattgaaatcggtaacggcgaggtggaacaacgatga

SEQ ID NO: 108143 - DNA, 372 bp, Enterobacter aerogenes
atgccctggcgaataataaggggcgaagaaaattatgcctcccgcttcatcgggctgatgtgtgaaaaagagccgcagctgaaaatagcacagcaactggcgttggacttctaccggatcctgaaaaccaaaaacaagccaatgctaagtaggtggttcactcatgtcagcgaaagcggctctgttgagcttcagcgcgttgcaggcgggatggaagctgatgcagcagcaatatgtgcagccattatcagcagatggagtaacggtgtagttgaagggcatgtaaatcacctgaaaatgctgaagcggcagatgtacgggcgtgccgggttcgagttactgaggcaacgggtgatgagtcctctggcttga

SEQ ID NO: 108144 - DNA, 1491 bp, Enterobacter aerogenes
atgaaaatgaatccgattctggctatcgatggttataaagtttcccatcgcgttcagtatccacaggggacgactaaggtctattcgaattttacgccgcgcggcgaccgtttctttcagtcgccgctagcggatggcaagttggtattcttcggcttacagggttttttacagtggttcctcatcgatctgtttaacgagggctttttcgctcgtccggaagaggaagtggtcagcgagtataagcaggttatggacggctacctgggacgggatagtgtcgcggtagatcatatccgcgagctgcatcagctaggctacctgccgctgcacatcaaagcgctggatgagggcacgaaagtgccgatgaaggtaccggttttaaccatcaccaataccctgccgcagtttttctggctggtgaactatctggagacggtcctttcggcagaactgtggaaaacgtcaactaatgccactatcgcgcatcactatcgtctgatctgcgaacgctgggcggagcaaacctgtagcgatttgacacatctggattttcaatgccacgacttttcgtttcgcggcatgtccgggctacatgacgccgcacagtctggcagcggacatctgattagctttaaagggacggatagcctgcctgcgctgctctacgctcgtgattactatactcggggtgaagaagacacgatcggcgccagcatccccgctaccgagcatagcgtgatgtgtatgggcgagcgggctcgggagatagaaacttttcgccggctcatcgctgacgtccacccgcaggggtttgtctctattgtttccgatacctgggattactggcaggtactgaccgagtatacccgcgaactgaaagccgtcattatgcaacgccagggacgtgtggtattccgaccggacagcggcgatccggtggctatcctctgcggcactgccgccgatgatgatacccgcagcgatcgtcgcgccgaggagaaaggttcggttgaggtgctgtgggaaatctttggcgggacgattaacgagaaggggtataaggtgctggacccccacgtaggtctgatttatggcgattctattacgcttgcgagagcggatgagatcctgcgtcgcctggaagccaaaggctttgccagcgctaacgtggtattcggggtgggttcatatacctaccagtataatacgcgtgatactttcggctttgcgatgaaagccacctggggagaagtgaatggcgaaggaagagcgctctttaaggagccaaaaaccgacaacggcctgaaacgttctgcgcgcgggctgttacgcgtagcgcgcgatgccagcggcgagctacggctgcatgacgatcaaagccaggagcaagaaggtcagggagagctaaccactcgtttccttgatggccagctgtttggttacgaatcattgtcacagatccgcgcccggctggcggcgcagcgttga

SEQ ID NO: 108145 - DNA, 1905 bp, Enterobacter aerogenes
atgattgttttctcctcgttacaaattcgtcgcggcgtacgcgtcctgctggacaacgccaccgccaccatcaatcctggccagaaggtcggtctggtgggtaaaaacggctgcggtaaatctacgttgctttcgcttttgaaaaacgagataagcgccgacggcggctccatgaccttcccgagcaactggcagctggcgtgggttaatcaggaaacgccggccctgccgcaaccggctattgattatgttattgatggcgatcgcgagttccgcaagctggaagccgatttacagcaggccaatgagcgcgacgacggccacgccatcgctaccgtccacggtaagctggatgccattgacgcctggactattcgttcccgcgccgccagcctgctacacggccttggtttcagtaacgagcagcttgagcgcccggtcagtgatttctccggcggctggcgtatgcgcttaaacctcgcgcaggcgctgatctgccgttccgacctgctgctgctcgacgaaccgaccaaccacctcgatcttgatgcggtgatctggctggaaaaatggctgaaaggctataccggtacgctgatcctgatttcccacgatcgtgatttcctcgatccgatcgtcgataaaattattcatatcgaacagcaaacgatgttcgaatacaccggtaactacagctcgtttgaaatccagcgcgcgacccgtctgtcgcagcagcaggccatgtatgaaagccagcagcagcgcgtagcccacttgcagagctatatcgaccgcttccgcgccaaggccaccaaagcgaagcaggcgcagagccgtatcaaaatgcttgagcgcatggagcttatcgccccggcgcacgtcgataacccgttccacttcagcttccgcgcgccggaaagcctgccgaacccgttactcaagatggaaaaagtcagcgccggctacggcgaacggattattctcgactccatcaagctgaacctggtgcccggttcgcgtatcggtctgctggggcgcaacggcgccggtaaatcaacgctgattaagctgctggccggtgagttacagccgctgtccggtgaaattggcctggcgaaagggattaagctcggttacttcgcccagcatcagctcgaattcctgcgcgccgatgagtcgccgatacagcatctggcccgcctggcgccgcaggagctggaacaaaaactgcgcgactacctcggcggctttggattccagggggataaagtcagcgaagagacccgccgtttctccggcggtgaaaaagcgcgcctggtgctggcgttaatcgtctggcagcgccctaacctactgctgctcgatgaaccgaccaaccaccttgatcttgatatgcgtcaggccttaaccgaagcgctgatcgacttcgaaggggcgctggtcgtggtctcgcacgatcgtcacctgatccgctccactactgacgatctgtacctcgtacacgacggtaaagttgagccgtttgatggcgatctggaagattatcagcagtggctgagtgattcgcagaagcaggaaaaccaggcctctgaagcgccgaaggataacggcaacagcgcgcaggcgcgtaaggatcaaaaacgccgcgaagccgaactgcgcacgcaaacgcaaccgctgcgtaaagagatcgcccgtctggaaaaagagatggataaactcaacgcgcagctggcacaggcggaagagaaactgggcgacagcgagttatatgacgcctcgcgcaaagcggaattaaccgcgtgcctgcagcagcaggcgagcgccaaatcagggctcgaagagtgtgaaatggcgtggctggacgcgcaggaacagctggagcggatgctgcaggaaggttaa

SEQ ID NO: 108146 - DNA, 561 bp, Enterobacter aerogenes
atgtctcagacagcgaaagtgttgctgctgtatgcccacccagaatctcaggattccgtggccaaccgggttttgcttgaaccggccttacagttgccgaatgtcaccgtgcacgatctttatgcgcactatccagatttttttattgatatcgcccatgagcaggatctcctgcgtcagcaccaggtgattgttttccaacatccgctgtatacgtggagctgcccggcattgttgaaagagtggctggaccgggtgctgagccgcggcttcgccagcggcgcgggaggaaatcaactggcgggaaagtactggcgtagcgtgatcaccaccggcgagccggagagcgcttaccgccgcgatgctaatcgctatccgatgaatgatattctgcgcccttttgagttaacggccggcatgtgccgcatgcactggctgagcccgatcattgtctactgggcgcgccgacagcggccggaagatttgcaaagccacgcccgcgcatatcgcgattggctcgcgaatcctgttgctacaggaggcgtcaatggcgggagctga

SEQ ID NO: 108147 - DNA, 540 bp, Enterobacter aerogenes
atgaagcagtttctcgattttttaccgctcgtagtcttcttcgctttttataagatttacgatatctacgccgcaaccaccgcgctgatcgtcgccaccgcggtggtcctcatttatagctgggtgcgctatcgtaaagttgaaaagatggcgctgatcacttttgtgctggtcgccgtcttcggcggtctgactatcttcttccacaacgatgaattcattaagtggaaagtgaccgtcatttacgccctgtttgccggcgccctgctgttcagccagtgggtgatgaaaaaaccgctgatccaacgcatgcttggtaaagagctgacgctaccgcagcaggtttggtcgcggctgaatctggcctgggcgctgttctttattctctgcgggctggccaatatctacatcgcgttctggctgccgcagaatatctgggtcaacttcaaagtcttcggtttaacggcattgaccctggtcttcaccctgttgagcggcgtctatatctaccgccacatgccgcaggacgataagcactaa

SEQ ID NO: 108148 - DNA, 744 bp, Enterobacter aerogenes
atgtctatcacggcgaagtccgtctaccgtgacacggggaatttttttcgtaatcagttcgttactattctgctgattgcgttgttatgcgcgttcatcacggtagtcattggtcatgccttttcgcccagtgacgagcagttatcgatcctcagcgagggcgataacctggcgggcagcgccggcttgtttgagctggtgcagaacatgacgccggaacagcagcagatcctgctgcgcgcgtcggcagcctcaaccttctcggggctggtggggaatgccatcctcgtcggcggcgtactgttgctgatccagctgatctccgccgggcatcgcgtcagcgcgctgcgggcgatcggcgcggcggcgccggttctgccgaagctgttgctgcttatcctgttcaccaccttcgtggtgcagatggggatgatgctggtgctggtgccgggcgtgctgctggcgattgtcctggcgttcgcgccggtgatgctggtgcaggataaaatcggcatctttagcgcaatgcgcggcagtatgcgtctggcgtgggctaatatgcgtctggtggcgccagcggtactcggctggctgctggcaaaaacggcgctgctgctgcttgcttcaagctttgcaacgctttcgccaaacgtcgccgccgtggtcattaataccatcagcaatctgttctctgcgctgttgctgatctatttgttccgcttgtatatgcttattcgcaactaa

SEQ ID NO: 108149 - DNA, 414 bp, Enterobacter aerogenes
atgagtgaaatcaacccgtgcatgacgtgcggtgcctgttgtgcgtattttcgagtctccttctattgggctgaagccgacgacgccggcggcgtggtacctacgcagctcaccgaaccccttaccccttttctgcgctgcatgagcggcaccaatcagcggcaaagccgctgcacagccttaagcggcgaaatcggcgaatcggtgcactgcaccatctatcatcagcggccttccccctgccgcgagtttgctatgtcaggcgaaggcggcgaactcaacgaagcgtgcgatcgcgcccgtgcccgctacggcctgccgccgctgggaactctttacaaagatatacttaccgtgacagcggcagagactgctacccaaccacgttttgcggtacaatccccggctagttaa

SEQ ID NO: 108150 - DNA, 207 bp, Enterobacter aerogenes
gtgatcgccaggtttcaggctggtcacgccctcgccgacttcaacgacgataccgccgccttcatggcccaaaaccgccgggaacacgccttccgggtcgtcgccagagagagtaaaagcatcggtgtggcaaacaccggtgtgggtgattttgaccaggacttcgcctttctttggcggcgcgacgtcaatctccacgatttttaa

SEQ ID NO: 108151 - DNA, 1374 bp, Enterobacter aerogenes
atgcgcattcatattttaggaatctgtggcacgtttatgggggggctggcaatgctggcacgttccctcgggcatcaagtaaccggctcggatgctaatgtttatccgccaatgagcaccctgctggaaaatcagggcatcgatctgattcaggggtacgacgccagccaactggacccgcagccggacctggtgattatcggcaacgctatgacccgcggtaatccgtgcgtcgaagcggtactggaaaacaacattccgtacatgtccggcccgcagtggctgcacgacttcgttctgcgcgaccgctgggtgctggccgtcgccggtactcacggtaaaaccaccaccgccgggatggcgacgtggatcctcgaagcctgtggctataagccgggcttcgttatcggcggcgtaccggggaacttcgatgtttccgcacgcctgggcgacagcccattcttcgtgattgaagccgacgaatatgactgcgccttcttcgacaagcgttccaagttcgttcactactgcccgcgcacgctgatcctcaataaccttgagtttgaccacgcggatatctttgacgacctgaaagcgattcagaaacagttccaccacctggtgcgcatcgtgccgggcaaaggcaaaattattctgccggagagcgacatcaacctgaaacaggtgatggcgatgggctgctggagcgaacaggagctggtgggcgagcagggccactggcaggcgaagaaacttaacgccgatgcctcgcagtgggaagtaatgctcgacggtgaaaaagttggcgaagtgaactgggcgctggtcggcgagcataatatgcacaacggcctgatggcgattgccgcggcgcgtcatgtcggcgtggtgccggcggatgccgctaacgcgctgggcagctttatcaacgcccgccgccgccttgagctacgcggcgaagccaacggcgtgaccgtctacgatgattttgcccaccatccgacggccattctcgcgacgctgcaggcgctgcgcggcaaagtaggcggcacagcgcgtattctggcggtgctggagccgcgctccaacaccatgaaaatgggcgtctgtaaagacgatctggcgccgtctctcggccgcgccgatgaagtcttcctgctacagccgcagcatatcccgtggcaggtggcggaagtggcggaagcctgcgtacagccggcgcactggagcgccgacgtcgatacgctggtggacatgatcgtgaaaaccgcgcatccgggtgaccatattctggtgatgagcaacggcggcttcggcggcattcatcagaagctgctggataaactggcgcaaaaagcggccgcggcagaataa

SEQ ID NO: 108152 - DNA, 900 bp, Enterobacter aerogenes
atgaacaaagacaacgtcaaactggctatcgcccctatcggttggactaacgacgatatgcctgagctggggagcgaaaacaccttccagcaaacggtcagcgaaatggcgctggccgggtttaccggcagtgaagtcggcagcaaatatccgcgcgatccggcggtgctgaagccgatgctggatattcgcggcatgcagatttgcaacgcctggttcagcaccttcttcgcgaatggccaaagagaaaaaaccatcgatgaattcgttaaccacatgaatttcctccatgcgatgggcgcaaaggtgattggttgctctgaacaaagcgacagtatccaggggctcgataaaccgattctcggcgatgtaaaaccgtgctttagcgacgaagagtggcagcgggtagctgaaggttataacgcgcttggcaaactggcggcagagaaggggatgcaggtttgcctgcatcaccatatgggcaccggcattcagactaccgcggagatcgacaagtttatgtcgctggtggacgaacgcgtcttcctgctctacgacaccggtcacgcctggtattcagagggcggcgaggcgccgatgctgacgatcctgaaaaaatatctgccgcgcatcaaccacgtgcatctgaaagacgtccgccccgcggtaattgagcaggtgcgccgcgaagggctctcattcctcgacggcgtcaagaaaggcacctttaccgtaccgggagatggcgaaatagatttccgtccggtcttccagttgctggatgactacggctacaagggttggatggtagtggaagccgaacaagaccctgcgctggcgaaccccttcgaatacgccgtaaaggcgcgtaagtacatccgcgaaacggcaggaatctga

SEQ ID NO: 108153 - DNA, 1311 bp, Enterobacter aerogenes
atgtttaaccccctcaccgccctgacggttgggctcagcctcgccctgagcggcgcggcgctggcgaaagagaaaatagacttcatgttcccggctccggtagacggcaagctgacgatggagatgacccgcgttattaaagcgttcaacgactcgcagcaggatgtcgaagttcgcggcatcttcaccggcaactatgacaccaccaagatcaaagccgaatccgcacagaaggccggacaaccgccggcgctggtgatcatgtccgccaacttcaccaccgatctggcgctgaaggatgagatcctgccgatggatgagctgtttaaatatggcgatcaaaaggctggcgattttctgcaaaaggaattctggcccgcgatgcataagaacgcccaggtgatgggcaccacctacgcgatcccgttccataactcgacgccgatcctctactacaacaagacgctgttcgatcgggcgggaatcgcgcaaccaccgcagacctgggccgagctgctggccgatgccaaaaagctgaccgacgagagcaaaggccagtgggggatcatgctgccgtcgaccaacgacgactacggcggctggatcttctcggcgctggtgcgcgccaacggcggtaaatatttcaatgaagactatccgggtgaggtttattacaactcgccgaccgctatcggtgctctgcgcttctggcaggatctgatctacaaagacaaagtgatgccttccggggtactgaattcgaagcagatcagcgcttcattcttctccggcaaacttggcatggcgatgctcagcaccggcgcactgggctttatgcgcgagaacagtaaagattttgaactcggtgtcgccatgctaccagccaaagagcagcgcgcggtgccgatcggcggcgccagcctggtgagctttaaaggcatcaacgacgcgcagaagaaagcggcctaccagttcctgacttatctggtgagcccgcaggtgaacggcgcatggagccgctttaccggctacttctcgccgcgtaaggcttcttacgatacgccggagatgaaagcatatctgcagcaggatccacgagcagcgatcgcccttgagcagctgaagtacgcgcatccgtggtactccacctgggagaccgtcgccgtgcgtaaggcgatggagaaccagctggcggcggtggtcaacgatgccaaagtaacgccggaagccgcggtacaggcggcgcagaaggaagctgacgcgctaatgaaaccttatgttgataagactgcgctgggagaagtgaagtag

SEQ ID NO: 108154 - DNA, 807 bp, Enterobacter aerogenes
gtgcgcgacaacatcaccttcggcatgaaggtacgcaaggaagagaaaagcggctggcagccgagagtagataaagtggcgcagatgctgcagctggaggcgctgctcgatcgcaaaccggcgaagctctccggcggccaacggcagcgggtagcgatggcgcgggcgatcgtgcgtaatccgcggctgttcttaatggatgaaccgctgtccaacctcgacgcccgcctgcgcagcgaagtccgtgacagcattatggacctccaccagcagttgaaaaccagtaccgtctacgtcacccacgatcagaccgaggccatgtcgatggctgaccgcatcgtggtgatgaacggcggccacgtgcaacaggtaggacggccagaatatctgtatgccaacccggccaatctgttcgtggccggatttatcggttcaccagcgatgaatctgctatcgctcccctgcgttgacggcaacgttcagcttggcgaactacgccatccgctaccgccgcgccaccgcagccagacccgcgtctggctgggcattcgcccggaacatattaccgaccgcgtggagcaaggccatctgcgcctgccgggcaccgtcctgcaacgagaactgatgggagccgattatctgctccacgtcagcacgccgatcggcaccctgcgctttagccgccgccaccgtggcacggtacctgaaaaaggcgaatcgctgatcctcggcttctcgcctgccgatgtgcatctttttcatgctgagacccagcataatttactgatggagtgtaatcatgtttaa

SEQ ID NO: 108155 - DNA, 297 bp, Enterobacter aerogenes
atgcgcagggttgatggtttcggcgctcacctgcgccatgcgcatcccgtcccgggtacgcgccatagtcaattcggcgttgaccgcgttacgttcgcgttcggcatattttttatccagcagcggcgcggcaatggcatcggccagccgatcgacggcaccgttgagcgcgtcattttccacttcaaggtagaacgcggtgcgatacggcgccgtgctggcattatgactgccgccgtgcattttgaggaattcagcaaggctgtcaggctgcgggtacttctgcgagcccattaa

SEQ ID NO: 108156 - DNA, 3372 bp, Enterobacter aerogenes
atgttaagggtgtaccactcaaaccgtctggatgtgcttgaagcgttgatggagtttatcgtcgagcgccagcggctggatgaccctttcatgccggaaatggtgctggtgcaaagtaccggtatggcgcaatggctacaaatgacgctggcaaagcgcttcggcattgcggcgaatatcgagtttccgctgccggccagctttatctgggatatgttcgttcgcgtgctagacgatattcccggcgagagcgccttcagtaaacagagcatgagctggaagctaatgactctgctaccgcagtatctcgacgatgacgccttcacattgctgcgccactatctgagcgatgacagcgacaagcgtaagctattccagctagccgcgcgggtagccgatctgtatgaccagtatctggtctatcgcccggagtggctgatgcgctgggaagccgatgaacgggttgacgggctgggcgacgctcagcagtggcaggctccgctgtggaaagcgttagtcgaatacaccgcggagcttgggcaaccgctgtggcaccgcgctaatctgtaccagcgctttatcagcgcgctggaaaatgctgaccagccgccagccgggctgccgtcgcgggtctttatctgcggcatctccgcgctgccgccggtgtatttgcaggccctgcaggcgctgggcaagcacgtcgatgtctatgtactcttcactaacccctgtcgctactactggggcgatattaaagatccggcgtttcttgccaaactgatgtcgcgccagcgccgccaccaccgcgaggcgcgcgagctgccgctgttccgcgacaccgaacaggcgccggggttgtttaatgatgatggcgagcaggatgttggcaacccgctgctggcctcgtggggcaagctcgggcgcgattatatctatctgctggccgggctggagcgctatgaagagctggacgcctttgtcgatatcgcccccgataacctgctgcataaccttcaggccgatattctggatctgcgcaacgccgcggtggcagggcgcaccgcgcaagagttcgccagcagtaagagcaagcgtccgctggcgactgacgaccgcagcctggctatccacgtctgccatagcccgcaacgcgaagtggaagtgctgcatgaccggctgctggcgatgctggaagaagacccggagctgacgccgcgcgatattatcgtcatggtcgccgatatcgacagctacagtccctatattcaggcggtattcggcgcagcgcgcggcgaacgctggctgccgtgggcgatttccgaccgtcgggcgcgggaatcgcacccggcgctacaggcgtttatcacgttgctttctctgccggatagccgtttcgccagtgaagatgtgctggcgctgctggatgtgccagtgctggcggcgcgcttcaatatcaatgaagaggggctacgctatctgcgtcagtgggtcaatgaatccggcgtacgatggggtatggatgacgacaacgtgcgcgaaatggatctcccggcgaccggtcagcacacctggcgtttcggtttaacacgtatgctgctgggatatgcgatggacagcagccagggcgagtggcagtcggtgctgccctatgatgaatccagcgggctgattgccgaactggtggggaatctcgcttcgctgctgatgcagctcaatctgtggcgccgcggtctggcacaggatcgcccgctgacagagtggctgccggtgtgccgcgatctgctcacggatttcttcctgccagacagtgaaaccgaagcggcgctggcgctgattgaacagcaatggcaagccatcatcgatggcgggttggatgcgcagtacggggctgccgtgccgctatcgctgctgcgcgatgagctggcgcagcgcctcgatcagcagcgcatcagccagcgtttcctggccgggccggtgaatatctgcaccctgatgccgatgcgttctattcccttcaaagttgtctgcctgctggggatgaacgacggcgtctacccacgcaccctcgcgccgctgggtttcgatttaatgagccaaaaaccgcagcgcggcgaccgtagccgtcgcgacgacgaccgctatctgttcctggaagcgctgatgtcggcagaacagaagctatacatcagctatatcggccgctctattcaggataatagcgagcgttatccttcggtgctggtacaggaactggcggactatatcggtcagagccactgtcttgaaggcgatgaagcgctggactgcgatgccagcgaacgccgcgttaaagagcacattacccatctgcatacgcgcatgccttttgatgccgccaattacctgccggatgaagatcagagctatgcaagagagtggctggccgccgccagccagcagggagaggcgcatagtgaatttatccagccgcttgcgccgctcgatatcgacacgctgccgttcgaacagctgttacgcttttggcagcatccggtgcgcgctttcttccagcagcgtctgcgggtgaatttccgctctgaagagagcgagatccccgaagatgagcctttcgtgcttgaagggctaagccgttaccagttgaaccaacagttgctgaatacgctgattgaacagcaggatgcgtcagcgatgtatcgtcgttttcgtgcggcgggtgagctgccttttggcgcgtttggcgaactggcatgggaggcgcagcgtcaggaaatgcagaacctggctgagcgggttatcgccagtcgtcagcccgcgcaaagtatggagattgacctacagtgcaacggtatcaatctcaccggctggctacagcaggtacagccggatgggctattgcgctggcgtccgtcgctgctgagcgtctctcagggcgtgcaactttggctggaacatcttgtctattgtgctagcggcggtctcggcgaaagtcgcttgttcgtgcgcaaggaaggcgaatggcgtttcccgccgctggcggcggagcaggcgcagacgtatctaaatgagctggtagaaggctacctgcaggggatgtcaaaaccgctactgctgttgccggaaagcggcggcgcgtggctaaaagcctgttacgacgcggaaaaggatgtcatgttaatggatgacgatacgcaacaaaaagcgcgtagcaagttccttcaggcctacgaaggtaatatggtggtgagcggcgaaggtgccgatatctggtaccagcgcctgtggcgcacccttgagcctgcgtactatgaagaaattatcgcgcaggcgcagcgttatctgttgccgatatttcgtttccatcagtccgaataa

SEQ ID NO: 108157 - DNA, 324 bp, Enterobacter aerogenes
atgcctgatgccgtagcgcgccagcgcggttttagcctggcggagacattattagcgatggcgctgttaatcatgaccatcgcggcgcttggcggttatcaccgcgggctggccagcggcgccgctcaattgaacgcctaccgccagcagtggcgggaggcgtggcgctttagccagctcattcccccggcacagcccgcgcaagggcaaataagccgcttgcagacatccaggcaaagttgtgtcagcatcacggtaacgatcaccatgcccgccgctaagcgggtgcagatgaaccggctacattgtccggcaaatcagtag

SEQ ID NO: 108158 - DNA, 375 bp, Enterobacter aerogenes
atggtgctgctgttactggcgctgggcagcctgctgttgcaggggatgaatcagcagcagcgatctctgctggcgcaggtgagcgccgaaacccaggcgattcgcgatacggccgccgcgcagtcggcgctgcaatggggcaaaggggtgaactggccgctgcagagcgatgtggtgtgtcaacaggaaaacagccaacgctggcgagcgtgcctgcggctttttaatgatggccgcgcgctgcttatcgccggcagcggcacagtacagctgtggcagtcagcatgggttgaaaagggcgtgctgcgctatttagcgcatggctggagcgatttttgcccgttaaaggagagtgcgttatgcctgatgccgtag

SEQ ID NO: 108159 - DNA, 564 bp, Enterobacter aerogenes
atgccagtagcagcgcgcggcttttcgctcattgaaacgctgattgccatggcgattggcgcggtattactgctcggagctgctcgtttccttccggcgctacagcgccaggttcttcgccaaacgcagcagcaggcgctggaaaatgagctatggcagcgagtctatgcgttagccaaacatttgcagcgcgccggatattgcgcaggtcaatgtcatggtcaggcgctggtgattgccagcggcgggcagtgcgtcatcgttcgctgggatggcaacagcaacggcatttgggaactggcgccggaggccgatgccgattccaccggttttcgcctgcgcgacggagcgctggaaacgcggcgcggcgtcgctgactgcggcggtaaaaattgggagaaaatgaccaatcccgccgctctcacggtcacgcgcttttacgttgagcggcaggcgataagcgggttttctcctgaacttatcgttaccctgggggcgcaggcgcaatcggactcgcgtatttctgccgaggcgcaatatcgggtgacggggttcaacctgtga

SEQ ID NO: 108160 - DNA, 465 bp, Enterobacter aerogenes
atgaacagacagcatggctacaccctaattgaaatgctggtcaccatgatgctggtggtcatcctcagcgccagcggtatgtacggctggcagcgctggcaacagcaacagcgcctgtggcaggtcgcctgtcaggtgcgcgattatctcgtgctgctgcgcgatgacgccaactggcacaaccgcgagcgcgtcattcgcgtcggacaatcgcccgccggctggtgtctgagcgcaagcggcgtggaggctgactgtcacgcgaaaacaccttttaccctgcagccgctatggccggggattacgctgcaacatttgacggcaggcatcggtttttacggtctgcgcaacagcgcctgggccgggcatatcctgctgcaaagcgaggtcgggtcgtggcggatcgttgtttctaactgggggcgcatacgcctgtgccgggaaggagaggaattatgccagtag

SEQ ID NO: 108161 - DNA, 354 bp, Enterobacter aerogenes
atggcgggtgtagagcacgatggcgtcgcactggcggtcggccaacatttgtaccgcttcttcctcccgctcgggcgcatcgtggccgtcggtgacgataagttgtttgccccaggcttccgtttggcgcgacgcctgttgcagcaagcgaccaaagtaaaaaccgtcgaatgtcgataccaccaagccaatgctgttgctggtgcgattcgccagcgagcgggcgagaaaattaggccggtagcccagctcttccatcgctttgaatacctgttggcgggtactctcttttacctgacctgtgccgttcaacacgcgggaaaccgtcgctttcgagacgcctgcgcgtattga

SEQ ID NO: 108162 - DNA, 195 bp, Enterobacter aerogenes
atggcatctggattgtcatccgagaacatgttaaccacaaagctgttccagccgtgggcccgcgccgtctcttcgatagagagcgttatctctaccgagaatggagtggtcaccgtatccagcgccagcacgccgatggtgctcggcgttgcccgggcgccgcgaattttcttcgccgacaggtcggggacgtaa

SEQ ID NO: 108163 - DNA, 513 bp, Enterobacter aerogenes
atgtttctgtttccgccgctggcgctggccggcaaccactggaacgtcacggtggctgggggaaacatgcgttttcagggcgtcatcatcgctgagtcctgccgtgttgaagccggcgaccagcagatgaccgtcaatatggggcagatcagcagtaatcgctttcattcagccggggaagataccaacccggtgccattcgatattcaccttcaggattgcagcaccgcagtcagccagcatgtcggcgtgtcttttcgcggcgtggccgacggcaaaaatccggatgtgctctcggttggcgaaggaccgggtatcgccaccggcgtaggcattgcgttatttgataaagaagatcaattgattccactgaatagcccgccgggcgcctggcggcggctgtataccggccccaccacgctacattttgtagccaaatatcgggcgaccggtaatcaggtcaccgggggagcggcaaacgcgcaagtttggttctctctgacctatcagtaa

SEQ ID NO: 108164 - DNA, 309 bp, Enterobacter aerogenes
gtgggtgcggtcggcaagtttgatgaggatgacgcggatatcctgcaccatcgccatgatcattttgcgaaagttttcggcctgcgcctctttcttatcgcggaacttgagcttatcaagtttcgacaccccctctaccagttcggcgacgcttttaccaaaaagctgttccatgtcctggtaggtggcaggggtatcttcaatcacatcatgcagcagcgcggccatcagcgtttcgtagtcgagtttcatctcggccagaatgcaggccaccgctaccgggtgcgtgatatagggttcaccgcttga

SEQ ID NO: 108165 - DNA, 1284 bp, Enterobacter aerogenes
atgcacagcctctacaagccgcgtcccggtcgtttcaaagattacatcgccattccaaaagcgaacggctatcaatctttgcacacctcgatgattggcccccacggcgtcccggtcgaggtacaaatccgtaccgaagatatggaccagatggcggaaatgggggttgcggcgcactgggcttataaagagcacggcggcgaaagcagcacgaccgcgcaaatccgcgctcagcgctggatgcaaagcctgctggaactgcagcagagcgccggtagctcctttgaatttatcgagagcgttaaatccgatctgttcccggatgagatttacgttttcaccccggaagggcgcattgtcgaactgcctgccggcgccacgccggtggacttcgcctacgcggtgcataccgatatcggccatgcctgcgtcggcgcgcgcgtcgaccgtcagccctatccgctgtcgcaaccactctccagcggccagactgtcgaaatcattaccgcgccgggcgcacgcccgaatgccgcatggctgaactttgtcgtcagctcaaaagcgcgcgccaagatccgccaactgctgaagaaccttaagcgcgacgattcggtcagccttggccgccggctgcttaaccacgcgttaggcggcagccgcaagctggcagagatcccgccagagaacatccagcgcgaacttgaccgcatgaagctggccacgcttgacgatctgctggcggaaatcggtctcggtaacgcgatgagcgtggtggtggcgaaaaacctgcagcagggcgaagcctctgccgcaccggtgccggccaacgcgtcgaatcacggccatctgccgatcaagggcgccgatggcgtgctgattactttcgccaagtgctgtcgtccgattccgggggatccgatcatcgcccacgtcagcccaggcaaagggttggttatccaccatgaatcctgtcgtaacatccgcggctaccagaaagagcctgagaagtttatggcggtcgaatgggataaagaaactgcgcaggaatttatcgccgaaattaaggtggatatgttcaaccaccagggcgcgctggctaacctgacggccgcaatcaacaccgcgtcttccaatattcagagcctgaatacggaagaaaaagatggccgcgtttacagcacctttatccgcctgaccgcgcgcgatcgtgtgcatctggcgaatatcatgcgcaaaattcgcgtcatgccggacgtgattaaagtcactcgtaaccgaaattag

SEQ ID NO: 108166 - DNA, 564 bp, Enterobacter aerogenes
atgcaccaacaccaggtttttgaagcgatccaggtctttcccttcttccagaatcgacaaataggggccaatcgccgtaccggtggcgagcatccacagcgtgtcgcagtccggcacctcttccagcacgaagaaaccggcggcttcgctgactatctgaacgtcgtccccgggtttcagcgcggccagtcgcgggctgagtttaccctccggaacggtgaccaggtagaactcaagatcgggattgctgggggcgttgacgtaggagtaggcgcgctgcacgcgctcgccgtcaacatccaggcccagtttagcaaactgccctgcggtgaacggctcaacgggcgcgtgaatggtgaggctaaacagtgcatcggtccagttttgcacttttacaactttacctgtaacccagtttgccattgcgtctctcctttcaatctcgtcagtctatcttcaccgcgacgggagaagatttccagcccgaaaaggctggaaagctcgattgatcaaatgttttacaggatgtgttgctggacgtccgggtcttttcggtcgaggtaa

SEQ ID NO: 108167 - DNA, 792 bp, Enterobacter aerogenes
atggcagctgctgatatggataaacagccagattctgtctcttcagtattaaaagtttttggcatcctgcaggctttgggcgaagagcgtgagattggtatcaccgaattgtcacagcgtgtgatgatgtctaaaagcacggtgtatcgttttttacagactatgaagtcactgggctatgtcgcacaggaaggcgagtctgagaaatattctttaacgttgaagttgttcgagcttggcgcgcgggcgttgcagaacgttgacctgatccgcagcgcggatatccagatgcgtgaaatttctcgcctgaccaaagagacgattcacctcggcgcgctggatgaagacagcatcgtttacatccacaaaattgattccatgtacaacctgcggatgtattcgcgtatcggccgacgtaatccgctgtacagcaccgccattggcaaagtgctgctggcgtggcgcgaccgggcggaagtcgagcaaatcatggacggtgtcgagtacaaacgtagcaccgagcgaaccattactgataccagcgcgctattgaaagtgctggaccaggtgcgcgagcagggctatggcgaagacaatgaggagcaggaagaaggattacgctgtattgcggtgccggtcttcgatcgcttcggcgtggtgattgccggcctgagtatctccttcccgacgctgcgtttctctgaagaacgtttgcacgaatatgtggcgatgttgcacgctgcggcgcgtaagatttccgagcagatgggttataaccgttacccgttctga

SEQ ID NO: 108168 - DNA, 240 bp, Enterobacter aerogenes; identical to SEQ ID NO: 90118

SEQ ID NO: 108169 - DNA, 144 bp, Enterobacter aerogenes; identical to SEQ ID NO: 98388

SEQ ID NO: 108170 - DNA, 291 bp, Enterobacter aerogenes
atgagtgagttactgaatcctgggattgtaagtctggcgtctctggcgctttccgttgtactgctgttggtggggctgctgttatggttctttgtgaatcgcgccagttcacgtagcaatgagcaaatcgaactgctgcagtcgctgctggatcaacaaaagcggcaaaatgcgctgctgcgccgtctctgtgaagccaatgcgccgcacaaagaagaggttgctgaaccttcagcggatgagaaggagaaaaacgacgacgatttcattcgtctcgttgccgaacgttaa

SEQ ID NO: 108171 - DNA, 210 bp, Enterobacter aerogenes; identical to SEQ ID NO: 90120

SEQ ID NO: 108172 - DNA, 267 bp, Enterobacter aerogenes
atgcacctgaatttttggaaacacctgtttccagaaaagcgccttatggcgatccactacgatcaggggaatcaggccggcattgagcatttcgagaagatcctcatcttcgagcgcctctggcgcttcctgcagaataaccggcggcagcgacgctttagcgaagcgggcgttaagcgtctgcaaactttcgtaatagctggaggagcggcggacaaacacggttttaccggaaagctgctccaggtttttcacgtcgggcgatga

SEQ ID NO: 108173 - DNA, 426 bp, Enterobacter aerogenes
atgatcgatcatccagcgcatatacttaacgccggcatgaatgttggggtcgatttttttgatatcgccaaccttcaattccttgccggtcgcgggcatgacctgcattacgccgattgcgccgacgtggctgcgtaccgattgattgagccgcgattcctgatatccctgggcggccatcagcagccagtcgacatcatagcgttcgccatattttctaaaaatttccaccatctgcaaaaacttagcgcgctctctgttggctgcggcgtttttaacgtaggtcgtgcttttcaggtagcgcagcagaatcatgtttcccagggtgctgccttgacgattatttttcacgaaattattcagtaccgcgagaagctgtgggttatctttgcggaccgcccaggcgatgctaccgccatcccgtaa

SEQ ID NO: 108174 - DNA, 702 bp, Enterobacter aerogenes
atggccgtcatgcgccagctggcgtacgcgctcggcattgtgcacgttaatcccctggtacagacggttccaggtaaagcccagaatacggtcagtcaggcggatcatttcataagagaagttagcggcaatctcttccatcagcgcaatggcgttctgctgggccttctcgtgagatatcttcttgctgcgcgcttcatcttctaccgcgcgggcgatagctttcgacgccagcagcttgttgaagagatcctggcgggcagggaggcgcgggccgacggcggccagacgttgacgggcgaagtgcatacgcgccacgcgggccagcttctgggcgatgattttatcggtcccgtgctcatccgccatgcggcgcagagagaccgacggcgagaaacgcacgaagctatcgcggccaagccaggagacggcgaagaatttctgaataccgttaagcatccgcagcggcggattctcttcgcctttttcacgacccggcgcgcggccgaacatgaccgacaccggtaccatttgcacgtcgaggtcgggatggttacggtgcagatccaggtagtcgtggaacagcttgatggactcttctttcggcgtgtagtaagtaaacacgcgcgggccgccgtggatgaaaacgtagcgcggcagcagtgtgccgtcgatttccagcggttcaaaagggtcgggtaa

SEQ ID NO: 108175 - DNA, 444 bp, Enterobacter aerogenes
gtgcgccggattgacgctcatctcatcgccattcagcaccaccagcccctgacgctgcatctctgccatcagcgcatcgataacgcccgccagttcttctttttcccagcgcaggaacaattcggctttcaggaacggatagaacatctcgacatgacgcagcacttcgctacgggagatgcggcgatgctgggtcacgatagcggccagcagcgatggcatcaccagcatatgggcgatgttgttgcgatagtaggtcatcagcaccgcctgctcgcgcggcaggatgatgatatcgccgatggtgtctttctcgacttcgaacttgttcatctgcagcgcgtggtcgataagctcgctggcggaagccgtcggcgcggtcgaatcggtggagtacggcacgttacgcagcaggtcgaggtagcaatccaactgttgggttag

SEQ ID NO: 108176 - DNA, 720 bp, Enterobacter aerogenes
atgaaattgattgttacggaagattatgaagagatgagcctggtcgcctgccatcatcttttaggctatatcacggtgccgcgacggatgaatctggcggtgacggcggggagtacgccgaagcgcatgtatgagcatttgaccgccgccatcaaagggaaatcattctatgatcgggttcactattacaactttgatgagataccttttcgcggccagcagcgtgaaggagtgacgatttccaacctgcgccagctgtttttcactccagcgcaaatcaaagaagagaacatccataaattgacgctggagaacgcggctcaacacgatcgccgcctcgaagaggccggcggtcttgacctggtcgtgctggggctgggcgccgacggccatttttgcggcaacctgccgaacactacacgttttcatgatgagacggtcgaagtaccgattcagggggagctgattggcattgtcgcgaacggcgaaatggggggcgatttcaatgtggtgccggatagctatgtcaccatggggccgaaaagcgtgatggcggcaaaaaacctgctgctgattgtcagcggcgcggcaaaggcgcaagcgctaaagcaggtggtggaaggcccggtcagcgaactggtgccggcctctgtactcaagttgcacccttcgttggtgattattgcggataaagcggctgcggcggaattgcagcactaa

SEQ ID NO: 108177 - DNA, 1167 bp, Enterobacter aerogenes
atgaaacgacatgcaatctacttcaccctggcgctggctggcgccacatttacggcacacgccgcgccgctgccgacgatgcctgatgccgccattcctgtcagccaatatattactcaggtgaatacggataacagtgtgactttccggttatttgcccccgatgccaggcgtgtttccgtcgtcacggggtcgacgccggatacctttgtctctcatgacatgaccaaagataccctgggcgtatggacgtggaagagcgatcgcctggccgccaatctttatgagtactatttcgacgtggacggttttcgttctgtcgataccggcagccgttatcagaagccgcagcgccaggtgaataccagcctgatcctggtgcccggcagcattcttgacgaacgggcagtcccgcacggcgatctgcgtaccgtcacctaccattcgacggcgcttaagtcagaacgccgcgtctacgtctggacgccgccgggctataacggcagcggcgaaccgttgccggtgctctatttctaccacggttttggcgatagcggcctgtcggccatcgatcagggacgcattccgcaaatgatggataacctgctggcggagggcaaaatcaagccgatgctggtggtggtgccggataccgaaaccgatattccacaagcgatcgcggaaaacttcccgccgcaggagcggcgtaaaaatttctatccactcaatgcgaaagccgcagacaacgaattgatgcacgacatcattcctctgatcgattcccgatttaacgtgcgtaaagatgccgacggccgggcgctggcggggctgtcgcagggcggttaccaggcgctggtgtccgggatgaaccatcttgagagcttcgggtggcttgccacctttagcggggttacgacaaccacggttcccgatgctggcgtggaggcgcagctgaataaccctgacgccatcaataagcaactgcgtaactttacgctggtggttggcgaaaaagactccgtcactggcaaagatattgccggcctgaaaagcgaactggaaaagcagaagatcaaatttgattaccactcttatcctggcctgaatcatgaaatggacgtctggcgtccggcctatgccgagtttgtgcaaaagctctttaaataa

SEQ ID NO: 108178 - DNA, 258 bp, Enterobacter aerogenes
ttgggctacttcaaacagcagaacaaagatgtgacgggcaagaaatataacgaatccggttataagaccaccttattccataccttcaaagttaataccagtatgctgacctcgcgcccggaaattcgtttttatgcgacttatattaaagccgaagatatcgacctggataaggccgctaacaataccaccgcggtttttgaagatggcaagaacgaccaattcgcactcggcgcgcaggccgaaatttggtggtaa

SEQ ID NO: 108179 - DNA, 669 bp, Enterobacter aerogenes
atgtcagcgaagcgtcagattcttgccgctattttcgatatggatggcctgcttatcgattcagagccgctatgggaccgcgcagagctggaggtactggacagcctcggagtggatattagccgccgtgatgaattgccggacctgctggggctgcgcatcgacctggtggtcgatttgtggtttgcgcaacagccctggcgcggcccggaccgcgcagaggtaaccgccagcattatccgccgcgccattcaactggtcgaggagtcacggccgttgctgcccggcgtgcgtgaagccgtggcgctgtgtaaagcccagggactaaaaatcggtctcgcctcggcgtcgccgctgcatatgctggaaaaagtgctggaaatgtttgaactacgcgaccagtttgacgcgctggcttccgccgaacatctgccatacagcaaaccgcacccccaggtctatctcgattgcgccgctaagcttggcatcgcgccgatgtcttgcgtggcgctggaggattctgttaacggcatgattgccagcaaagcggcgcgaatgcgctcaattgtggttccggaaacagaaaacagccgcgatccgcgttttgtactggccgatgtgaaactgacgtctctgcagcagctgacggtagcagatctgcgcggctaa

SEQ ID NO: 108180 - DNA, 591 bp, Enterobacter aerogenes
atgacggcggaaggccacctcttcttttctatcgcctgtgcggtatttgcaaaaaatgcagaattaacccccgtgctggcgcagggggactggtggcatatcgttccttccgccgtgctgacctgcctgctgcccgatatcgaccatcctaaatctttcctcggccaacgtttaagctgggtctcaaaaccggtagcccgcgccttcggccatcgcggttttacccacagcctgctggcggtattcggcgcgctggcgctgttctatcttaaagtgcctgagagctggattatcccggccgatgcgctgcagggtttagtgctcggctacctcagtcatatactcgccgatatgctcaccccggccggcgtaccgctgctgtggccctgccgctggcggttccgcctgccgatcctcgcgccgcgcaaaggcaatcagctcgagcgcgcgctgtgcatggcgctgttcatttacgccgtctggatgccgcagagcatggccgaaaatagcgccgtgcgctggtcatcaaatatgattaattcgctgcaaataacctttaatcgctttattagccatcaggctgaacgataa

SEQ ID NO: 108181 - DNA, 1392 bp, Enterobacter aerogenes
atgaattttccattaatagcgaacgttgtcgtgttcgcggttttactgtttgcgctggctcaaacccgccacaaacagtggagcctcgctaaaaaagtactggtcggtctcgttatcggcgttatctttggtctcggcctgcagctggtttacggctccgacagccaggttctgaaagattctattcagtggttcaatatcgtcggtaacggctatgtgcaactgctgcagatgatcgttatgccgctggtcttcgcctctattctgagcgcggtggcgcgcctgcacaatgcctcacagctgggtaaaatcagtttcctgagcatcggtacgctgttgttcaccacccttatcgccgcgctggtcggcgtactggtgaccaacctgtttggcctcaccgctgaaggcctggtacagggcagcgcggaaaccgcccgtctgaacgccatccagagcaactatgtcggtaaagtatcagatctgagcgttccgcagctgatcctgtcgtttgtgccgaaaaacccgtttgccgatctgaccggcgcgaacccgacctcgatcatcagtatcgttatcttctcggcattccttggcgtcgcggcgctgaagctgctgaaagacgatgtggagaaaggccaacgcgtcctgaccgccatcgacacgctgcagggctgggtgatgaagctggtgcgtctggtgatgcagttaactccgtacggcgtgctggcgctgatgaccaaagtggttgccggttccaacctgcacgacatcatcaagctcggcggtttcgtagtggcttcttacatcgcgctgggcatcatgtttgtggtgcacggtctgctgttagccgtcaatggcgtcagtccgctgaagtatttccgtaaagtctggccggtgattaccttcgccttcaccagccgttccagcgcggcttctattccgctgaacgtggaagcgcagacgcgccgtctgggcgtaccggaatccattgccagcttctccgcctcattcggcgcgacgattggtcagaacggctgcgccggtatctatccggcaatgctggcggtaatggtcgcgccaaccgttggcatcaacccgctggatccaatgtggattgccaccctcgtgggtatcgtcaccgtgagctccgcgggcgtagccggcgttggcggcggcgccaccttcgcggcattgatcgtgctgccggcgatgggtctgccggtcacgctggtcgcactgctgatttccgtcgagccgctgattgatatgggtcgtaccgccctcaacgttaacggttcaatgaccgccggcacgctgaccagtcagtggctgcgccagacggataaagccatcctcgatagtgaagaagacgccgaactggcgcatcgctaa

SEQ ID NO: 108182 - DNA, 273 bp, Enterobacter aerogenes
atgttcccgctttgcttagtgaatccatctgttatgaaatcattgcgccaacaaaatcgccctatcattagctacgtgccgcgcgtcgagcctgcgccgccggatcatgccgttaaaatggaccattttcgcgatgtctggatattgcggggcaaatatgtcgcctttgtactgatgggcgagcgtttccgccgctcgccggcgttcaccgtgccggaatcggcgcagcgctgggctaatcagattcgccaggaaggtgaaatagaggcatga

SEQ ID NO: 108183 - DNA, 1131 bp, Enterobacter aerogenes
atgattccatttaacgcaccgccggtggtggggactgagctcgattacatgcaatcggcgatgaacagcggcaagctttgcggtgacggcggttttacccgtcgctgccagcagtggtttgaacagcgcttcggcaccgccaaagcgctgctgacgccatcctgcaccgcgtcgctggagatggcggcgctgctgctggatattcagcctggcgatgaagtcatcatgcccagctatacctttgtttccaccgccaatgcctttgtgctgcgcggggcgaaaatcgtcttcgtcgatatccgtcgcgatacgatgaatattgatgaatcgctgatagaagccgcaatcactgataaaacccgggcgatcgtgccggtgcattatgcgggcgtggcctgtgaaatggacaccatcatggcgctcgccgccaaatataatctgtacgtggtggaagacgccgcgcagggcgtgatgtccacctataagggccgcgcgctgggtaccatcggccatattggctgctttagcttccatgagacgaaaaactacaccgccggtggtgaaggcggtgcaacgcttatcaacgatcgtaaactggtggaacgcgcggaaatcattcgcgaaaagggcactaaccgtagccagttcttccgcggtctggtggataagtacacctggcgcgatatcggttccagctatttgatgtccgatctacaggccgcctatctctgggcgcagctggaagccgctgagcggattaaccaacagcgcctgacgctgtggcaaacttattatgacgcgctgctgccgctggcgcgcgcgggccggatcgatctgccggcggtgccggcggattgcgggcaaaacgcgcatatgttttacattaagctgcgggataacgatgaccgcgcggcgctgattaactggctgaaagaggcagaaattctggcggtgttccattatattccgctccatagctgcccggctggcgaacagttcggcgagttctgcggcgaagatcgttataccacccaggagagcgaacgcctgctgcgtttgccgctgttctacaacctgtctgcggtaaaccaacggacggtgattaattcactgctgagctacttctcctga

SEQ ID NO: 108184 - DNA, 1251 bp, Enterobacter aerogenes
atgtcgttggcaaaagcatcactgtggaccgcggcgtccaccttagtcaaaataggcgccggtctgctggtggtaaagctgctggcggtctcatttggtccggcgggcgtaggccaggccggtaacttccggcaactggtcaccgttctgggcgtcctggcgggcgccgggatttttaatggcgtcactaagctagttgcccaacatcacgacgatccgctacgcctgaagctggtggttggaacctcgtcttcaatggtgctcggtttttccaccctgctggcgctggtctttttgctggcggcggcgcccataagccaggcgctgttcggccattcgcactatcagaatctggtacgtttggtggcgctggtgcagatgggaattgcgtgggccaactatctgctggcgctgatgaaaggttttcgcgatgcggcgggtaacgctttttcgctgattgccggtagcctgattggcgtggcggcctactacgcctgttactactttggtggttatcagggggcgctgttagggctggccttagttcccgcgctggtggtggttccggccgccattatgctatggcggcgcggcgcgatcccgctgaacgcgctacgtccgcgttgggataacgggcttgcggggcagttatcgaaatttaccctgatggcgttgattacctcggtgacgctgccggtggcctatgtgatgatgcgtaatctgctggcggcgcattacggctgggaggcggtcggtatctggcagggggtgagcagtatctcggatgcctacctgcagtttattaccgcttcctttagcgtatatctgctgccgacgttgtcgcgactgagcgccaagacggacatcacgcgtgagatagtgaagtcgttgaaattcgtcctgccggcggtggcggcggcaagcctgatggtctggctgctgcgcgattttgccatctggttactgttttccgcgcgcttcaccgcgatgcgcgacctgtttgcctggcagttggtgggcgatgttttaaaagttggcgcttacgtctacggctatctggtgatcgccaaagcgtcattgcgtttttatattctgacggaaatcagccagttcacgctgctgaccgcattttcacactggcttattccggcgcacggcgcacttggcgcggcgcaggcgtatatggccacttatattgtttatttcgccctttgtagtggcgtgtttttactctggcgtaaacgggcatga

SEQ ID NO: 108185 - DNA, 2445 bp, Enterobacter aerogenes
atgatgattttgagtattgttgcaaccgtagtgttactcggcgtgctcttctatcaccgagtcagcctgcttctcagcagcgtgattttgctcgcctggaccgcggcgctcagcgtggcggggctatggaatatctggctgctgttgccgctggcgattatcctgctgccgttcaactttgcgccgatgcgtaaatcccttttctccgccccggcattccgcgccttccgcaaagtcatgccgccgatgtcgcgtacggaaaaagaggccatcgatgccggcaccacctggtgggaaggcgatctgttccgcggcaacccggactggcacaagctgcataactatccgcagccgcgcctcaccgccgaagagcaggctttcatcgacggcccggtagaagaagcctgccgcatggcgaacgacttcgaaattacccatgaaatggcggatctgccgccggagctgtgggcgtacctgaaagagcatcgcttctttgcgatgatcattaagaaagagtacggcggcctggagttttccgcctatgcccagtctcgcgtactgcaaaaactgtccggcgtttccgggatcctggcgatcaccgtcggcgtgcctaactccttagggccgggcgaactgctgcaacattacggtaccgaagagcagaaaaatcactacctgccgcgcctggcgcgtggtcaggagatcccatgcttcgcgttgaccagcccggaagcgggctccgacgccggcgcgatcccggataccggcgtagtctgtatgggcgactggcagggtcagcaggtgctggggatgcgcctgacctggaacaagcgctatatcaccctcgcgccaatcgccaccgtactgggcctggctttcaaactctcagacccggaccgtctgctgggcggcgaggaagaactcggtatcacctgcgcgctgatccctacctcaacgccgggcgtggaaattggccgtcgtcacttcccgctgaacgtaccgttccagaacggccccactcgtggtaaagatattttcgtaccgatcgattacatcatcggcggcccgagcatggccggccagggctggcgtatgctggttgagtgcctgtccgtgggtcgcggtattactctgccgtccaacgccaccggcggcctgaaatccgtcgctatggcgaccggcgcctacgcccacattcgccgtcagttcaaaatctcgattggtaaaatggaagggatcgaagagccgctggcgcgtatcgcaggcaacgcctacgtaatggacgccgccgcttcgctgattacctacgggattatgcttggcgagaaaccggcggtgctgtcggcgatcgttaaatatcattgtacccaccgcggccagcgttcaatcatagacgctatggatattaccggcggtaaaggcatcatgctgggcgaaggcaacttccttgcccgcgcttatcagggcgcgccgatcgccattaccgttgaaggggcgaatatcctcacccgcagcatgatgatctttggtcagggggcgattcgctgccatccgtatgtactggatgagatggccgccgcgcagaacaatgacgttaacgccttcgataagctgctgtttaaacatatcggccatgtcggtagcaacaaagtacgcagcttctggctgggcctgactcgcggccgcaccagcagcgcgccgacccgtgatactacacgccgctactatcagcacatgaatcgcctgagcgccaacctggccctgctgtcggatgtatcaatggcggtactgggcggcagcctgaagcgtcgcgaacgtatctccgcgcgtctcggcgacgtgctgagccagctttacctggcatcggcggtgctgaaacgttatgacgatgaaggccgtaatgaagcggatctgccgctggtccattggggcgtgcaggatgcgctgtatcaggcagagcaggctatcgatgacctgctgaagaacttcccgaaccgctttgtcgccggcgcgctgcgtctcgccatcttcccgaccggccgtcactacgatgcgccgtccgacaagctggatcataaagtggcgaaaattctgcaggttccgagcgcgacccgctctcgtatcggtcgcggccagtacctgacgccaagcgaacataacccggttggcctgctggaagaggcgctgctggatgtgatggcggcggacccaatccaccagcgcatctgcaaagagctgggtaaaaatctgcctttcacccgcctggatgagctggccactaatgccctggccaaagggttaattaatcaggaggaagcctcgattctgacccgtgcggaaaccagccgtctgcgcagtattaacgttgatgatttcgcggcggatgaactggcgaccaaaccggtaaagctgccggaaaaaatccgcaagattgaagcggcataa

SEQ ID NO: 108186 - DNA, 582 bp, Enterobacter aerogenes
atgtaccaggatcttattcgtaacgaactgaacgaagccgcggaaacgctggccaactttctgcaggacgaggccaacattcacgctatccagcgcgcggcggtactgctggcggatagcttcaaagctggcggtaaagtgctttcctgcggcaacggcggttctcattgcgatgcgatgcattttgcggaagagctgaccgggcgttatcgcgagaaccgccctggttatccggcgatcgctatttctgacgtcagccatctgtcctgcgtgagtaatgattttggctatgaatatgtcttctcccgctatgttgaatctgttggccgcgcaggcgatgttctgctgggcatttccacctccggcaactccggcaacgtgatcaaagcgattgaagccgcgcgcgcgcagggaatgaaagtgatcaccctgaccggtaaagacggcggcaaaatggcgggttccgccgatgtggaaattcgcgtaccgcatttcggttacgccgatcgcattcaggagattcacattaaggtgattcatattctgattatgttgatcgaaaaagagatggttaaagcttaa

SEQ ID NO: 108187 - DNA, 768 bp, Enterobacter aerogenes; identical to SEQ ID NO: 101792

SEQ ID NO: 108188 - DNA, 741 bp, Enterobacter aerogenes
atgcgcaaaatcgcattctttattgcgatgcttctgttgccgtgcgtgtcatttgctgggttactcagcagtaacagcccgacaacgccggttagcaaagaatataaacagcagttaatgggctctcccgtttatatcgagatcttcaaagaagagcggatgctcgatctctacgtcaaaatgggcgaaacctaccagcttctcgatagctaccggatctgtaactactccggcggcctcgggccgaagcaacgccagggcgattttaaaagtccggaaggattttataacgtctcgcgcagtcagctaaaaccagacagccgcttttataaagcgatcaatatcggcttcccgaatgcctacgatcgcgcgcacggctatgaaggtaaatacctgatgatccacggcgcctgcgtttccgtcggctgctacgcgatgaccgataccggcattgacgagatcttccagtttgtcaccggcgcgctggtatttggccagccaagcgtgcaggtcagcatctacccgttccgcatgaccgacgccaacatggcgcgacataagttctcgtactatgcggatttctggaagcagttgaagccaggctatgactacttccagcagacccacaaaccgccggtggtttcggtgatggatggccgttatatcgtcagcaagccgctcagccacgaggttatccagccgcagctggcctcaaactatacgctccccgaggcaaaataa

SEQ ID NO: 108189 - DNA, 1122 bp, Enterobacter aerogenes
atgcataaccaggctccaattcaacgtagaaagtccaaacgcatttacgttggtaatgtgccgattggcgatggggctcccatcgccgtacagtcgatgaccaatactcgcaccaccgatgtggccgcgacggtaaatcaaatcaaagcgctggagcgcgtaggcgcggacatcgtccgcgtttccgtcccgacgatggacgcagcggaagctttcaagctcatcaaacagcaggtcaacgtcccgctggtcgccgatatccactttgactaccgtatcgcgctgaaagtcgcggaatatggcgttgattgcctgcgcatcaaccctggcaacattggtaacgaagagcgtatccgcatggttgtggactgcgcgcgcgacaaaaacattcctatccgcatcggcgtcaacgccggttcgctggaaaaagatctgcaggaaaaatacggcgagccgacgccgcaggcgctgttagagtccgccatgcgtcacgtcgatcatctcgatcgtttgaacttcgatcagttcaaagttagcgtaaaagcctcagatgtcttcctcgctgttgaatcctatcgtctgttggcgaagcagatcgatcaaccgctgcatctcgggatcaccgaagccggcggcgcgcgtagcggcgcggtaaaatccgcgatcggtttaggtctgctgctgtctgaagggatcggcgataccctgcgcgtgtcgctggccgccgacccggtggaagagatcaaagttggcttcgatatcctgaagtcgctgcgcatccgttctcgcggtattaactttatcgcttgcccgacctgctcgcgtcaggagtttgacgtcatcggtacggtgaacgcgctggagcagcgtctggaagatatcatcactccgatggatgtttcgatcatcggctgtgtggttaacggccctggcgaagcgctggtttccactctcggcgtcaccggcggcaacaagaaaagcggcctgtacgaagacggcgttcgcaaagaccgactggacaacaacgacatgatcgaccagctggaagcgcgtatccgtgcgaaagccaccatgctggatgaagcgcgtcgtattgaagttcagcaggttgaagcaaaataa

SEQ ID NO: 108190 - DNA, 999 bp, Enterobacter aerogenes
atgaatactgaagccactcaagaccatcaagaagcaaactctacgggcgcgcgcctgcgtaacgcccgcgaacaactcggactcagccagcaagcggtggctgaacgcttatgcctgaaggtttccacggttcgtgatattgaagaagataaggcgccagccgatctcgcttcgaccttcctgcgtggctatatccgttcctacgctcgcctcgtacatattccggaagaagaactgctgccgatgatggcgaagcaagcgccgattcgcgccgccaaagtggcgccgatgcagagcttctcgctgggtaaacgtcgcaaaaaacgcgacggttggctgatgagctttacctggctgattttgtttgtggttatcggcctgagcggcgcatggtggtggcaagaccacaaagcgcagcaggaagagatcaccagcatggctgatcaatccaccagcgatctgaacagtagcgatagcggcagccagtcaatttcgctggataccagctcggcgaataacgcgccggatacgacggcagccaatgccaatagcgcgccggtcgatacctccaccgcacctgcgccaagcgcgccagcggctacccccgcgccggtggataacaacgccgtggtcgctccttcgcaggctaacgttgataccgccgccgccgcgccggctgcgccagccccgacctccgcattgccgaccgatcaggcgaatgccgcgacgacggcttccgctcaggatctggtgatgaactttagcgccgattgctggctggaagtgagcgatgcgaccggtaagaaactgttcagcggcctgcagcgtaaaggcgggaacctgaacctgagcggtcaggcgccgtataagctgaaaatcggcgccccggctgcggtacaaatccagtatctgggcaaaccagtcgatttgagtcgttttatcagaactaaccaggttgcgcgtctgacccttaatgccgaacaatcaccggcgcagtaa

SEQ ID NO: 108191 - DNA, 1167 bp, Enterobacter aerogenes
atgtctgaacaaattgtcacacctgataccgccgctctgacggtgccgaataaagatgccaaaatcaacctgctggatttaaaccgtcagcagatgcgcgagtttttcaaaaacatgggcgagaagcctttccgcgccgatcaggtgatgaaatggatgtatcactactgctgcgatgactttgatgaaatgaccgacatcaacaaagtcctgcgcggtaaactgaaggaagtcgccgagatccgcgcgccggaagtcgttgaagagcagcgctccagcgacggcaccattaagtgggcgattgccgttggcgatcagcgcgttgaaacggtatacatcccggaagaagaccgcgccacgctgtgcgtctcttcacaggttggctgtgcgctggaatgtaaattctgctccaccgctcagcaaggcttcaaccgtaacctgcgcgtttccgaaattatcggccaggtctggcgcgcggcgaaaatcgtcggcgcggtgaagactaccggcgtgcgtccaattaccaacgtggtaatgatgggtatgggcgagccgctgctgaacctcaacaacgtcgttccggcgatggaaatcatgctggatgacttcggttttggtctctccaaacgccgcgtgaccttgtctacctccggcgtggtaccggcgctggataaactcggcgacatgatcgacgttgcgctggcgatttctctgcacgcgccgaacgacaccatccgcgacgaaattgtaccgattaacaaaaagtacaatattgagactttcctgaactcggtgcgcggctatatttcgaaatccaacgccaaccagggtcgtgtgactatcgagtacgtcatgctggatcacgtcaacgacggtaccgagcacgcccatgaactggcggcgctgctgaaagatacgccgtgcaagatcaacctgatcccatggaacccgttcccgggcgcgccgtacggccgtagttctaacagccgtatcgatcgtttctccaaagtgctgatggaatatggtttcaccaccatcgtgcgtaaaacccgcggcgacgatatcgatgctgcctgcggccagctggcgggcgacgtaatcgaccgtaccaaacgtacgctgcgtaagcgtatgcagggcgaagcgatcgacgtgaaagccgtctga

SEQ ID NO: 108192 - DNA, 432 bp, Enterobacter aerogenes
atggctattgaacgtactttttccatcatcaaaccaaacgcggtggcaaaaaacgttattggcagcatcttttctcgctttgaagctgcagggttcaaaatcgtcggcaccaaaatgctgcatctgaccgttgagcaggctcgcggtttctatgctgagcacgaaggtcgtccgttcttcgacggtctggttgagttcatgacctccggcccgatcgtggtttccgtactggaaggcgaaaacgcggttcagcgtcaccgtgacctgctgggcgccaccaacccggacaacgccctggccggtaccctgcgcgctgactacgctgacagcttcaccgagaacggcacccacggttccgactctgtagaatccgctgctcgcgaaatcgcgttcttctttgctgaaggcgaggtttgcccgcgcactcgctaa

SEQ ID NO: 108193 - DNA, 1734 bp, Enterobacter aerogenes
gtgctgccgcaggcgccgagccgtttacgcccggaccgctggccgcagcgggcgcaggcggctcgcgataaggtgctggagaggatgctcagccagggcgtctggccgcagcgagcggtacaggaagcgatggaagagccggtgtggcttttcccgcggcagatgccgcagctggcgccgctgtttgcgcgccgggcgctggtgacaagtcgtgatgaaaaggtgacgacaacgctcgatgccgggcttcagcggcagcttgaagatttggcgatgaactggaaatcacgtctgccgccgcgcagctcactggcgattgtcgtcgtcgatcacactgatatgaaagtccgcggctgggtgggatcggcggatatccgcgatgatagccgcttcggccacattgatatggtctcggcggtgcgctcgccggggtcggtgctgaaaccctttatctacgcgatggcgatggatgacgggctgattcacccggcatcgctattacaggatgtgccacggcgctttagcgattatcgtccaggtaatttcgacagcgggtttcatggcccggtgagcgccagcgaggctctggtgcgttcgttgaatctcccggcggtgcaggtgctcgaagcctatggaccaaaacgctttgcggctaatttacgcaatgccgggctccctctgatgctacccgccggcgccgaaccgaatctgtcgctgatcctcggcggcgccggagcgaggctggaagatattgtcgcggcgtatggcgctttcgcccgtcatggcaaagcggcgcggctgcgcatgaaacccgacgaccctctggtggaaagggcgctaatgtcgccaggcgcggcgtggatcacccggcggatattggcaggcgaagcccagccattacccgatgcgtcgctgccgcaggcggtgccgctggcgtggaaaaccggtaccagctacggttatcgcgatgcgtgggcggtaggcctcaacgcgcgttatttgattggcatctggaccggacggccagacggtacgccggtggtggggcagtttggttttgccagcgccgtgccgctgttaaaccaggtcaataatatgttgctggcgcgtccgttaatgagccgcggcgagctgccggtcgacccgcgtccgccgtcggtcagccgcggcactatctgctggcccggcgggcaggacctgccggttggcgatagcaattgccgccggcgcttagccagctggcttctggatgccagccagccgccgacgctgctgctgccgggtcaggagggcgtgcgcggtatcctcttcccggtgtggcgtaacgcagcaggagaaagggtcgccgcggattgtccgggcgcgacagaaacttctgttgatgtctggccgctgccgctggaaccctggctgccggttagcgagcgccgccgggcgcggctgggtacggcatcgaaggcgtgtccgccgctgcagactcaggatgccgcgccgctggtgctttccggcatccgcgaaggcgcagtgataaaacgactgccgggcgaggcgcgggtgatgttacccgtacaaacgagcggtggggaagggcgacgctggtggtttattaacggcgaaccattagaggcaacaggcgcaagaacgacaattacgctagatagacccggcgagtggcaactggtggtaatggatgaggcagggcaaacggcggccgccaatttcaccctacaataa

SEQ ID NO: 108194 - DNA, 717 bp, Enterobacter aerogenes
atgccggaaactgcggaaaacgtcgccgatgagtttgccatttctcgcgccgaccaggacacttttgcgctacgcagtcagttacgtaccgcggcggcgcaggaagcggggcgtttcgccgatgaactgatcgccgtatcggtgccgcagcgcaaaggtgagccgctgcgtttcagccgcgatgaacatccgcgcagcacctcgctggaggcgctggctaaactgcgcggcgtggtccgcgccgacggcagcgttaccgccggtaacgcctccggcgtcaacgacggcgcctgtgcgctgttgttggccagtgaacaggcgatgtcggcgaatgatttacagccgctggcgcgggttgtcggcgtggcgacggcgggggtggcgccgcggattatgggcttcggcccggcgccggcggtgcgtaaggtgctggcgcaaaccgggctgacgctggcgcagatggatgtcatcgaactgaatgaggcttttgccgcgcaggcgctggcggttacccgtgatttaggtctgccggatgatgccgcccacgttaaccccaacggcggggccattgcgctgggtcatccgctgggggcttccggcggacgtctggcgatgaccgccgcttatcagctgaagcgtaccggcggccgctatgcgctgtgcacgatgtgtatcggcgtgggccaggggattgcgctgattattgaacgcgtttaa

SEQ ID NO: 108195 - DNA, 474 bp, Enterobacter aerogenes
atgaatcaggcatttatctgtgatgcggtgcgtacgccgtttggccgttttggcggcgcattatccagtatgcgcgccgacgatttggcggcgctgccgctgaaagcgctgctggagcgtaacccgggactcgatccggcgctgatcgacgatgtgatctacggctgcgccaaccaggccggagaagataaccgtaacgtggcgcgcatggcgctgttgctggccgggctgccggagagcgttcccggcagcacgattaaccgcctctgtggttccagtctcgatgcgatcggcgtcgcggcgcgggcgattaaaagcggcgaaactcaactgatgatcgccggtggggtggagagtatgtcgcgcgcgccgtttgtgatgggcaaagccgagagcgcctttagccgctcgatgcagctggaagataccaccatcggctggcgctttattaacccgcagatgaaagcgcagtag

SEQ ID NO: 108196 - DNA, 687 bp, Enterobacter aerogenes
atgattgataaaagcgtgtcgacgctgagtgaggccattgccgggatccacgacggcgcgaccatcatgattggcggttttggccccgccgggcagccgacgtatctgattgatgccctgattgaacagggcgcccgcgacctaaccattattaataacaacgcgggtaatggcgaagtggggctggcggcgctgctcaaagccgggcgggtgcgcaaaatgatctgctcattcccgcgccaggtggattcacaagtttttgatgacctgtatcgccgcggtaaggttgagctggaactggtgccgcagggcaatctggcggcgcggatccaggccgctggcgcggggctcggcgcggtctttaccccgaccggctacggcacgccgctggcggaaggcaaagaaacccgggaaatagatggccgccactatgtgcttgagtatccgattaaagccgattttgctcttattaaagcccatcagggcgatcgctggggcaacctggtctaccgcaaagcggcgcgcaacttcggcccgattatggcgaccgccgccaaaaccaccattgttgaagtctcgcagctggtcgcccttggcgaactcgacccggaaaacatcatcaccccggggattttcgtccagcgtgtattctcgctggaaaatctgtccgtcgcgcaaagcgcctga

SEQ ID NO: 108197 - DNA, 648 bp, Enterobacter aerogenes
gtgctgaaactgctgcaggcgggttatggttatgaaacctaccagctgctgcgcgaatacagcctgttccagccgctgttcccgacgatcacccgctacttcaccgagcgcggcgatagcccgatggaacgcatcatcattcaggtgctgaagaacaccgataaccgcctgcataacgatatgcgcgttaacccggcattcctgttcgcggtcatgttctggtatccgctgctggaaatggcgcagaaaatcgcgcaggagagcgggctggcctattacgacgccttcgcgctggcaatgaatgacgtgctggatgaagcctgccggacgctggcgatccctaaacgcatcaccaccctggtgcgcgacatctggcagttgcagcttcgtatgtcccgccgtcagggcaaacgcgcgtggaaactcatggagcatccgaagttccgcgccgcctatgacctgcttgaactgcgcgcaggcgccgagaacaaccacgaactgcagcgcctggccaaatggtggggcgagttccaggtggccgcgccgccggaacagaaagatatgctcaacgacctcggcgacgatccggctccgcgccgccgccatcgccgcccgcgtaaacgcgcgccgcgccagggtaacgcatga

SEQ ID NO: 108198 - DNA, 480 bp, Enterobacter aerogenes
atgaccctggtctatatcgccattggcagtaatctcgcctcgccgctcgaacaagtgaatgcggctatccgcgcgctggccgacattccggacagccgcgtggtgagcgtatcttcactgtaccgtacgccaccgctggggccgcaggatcagcctgactatctcaatgccgccgtcgcgcttgaaacctcgctcgcgccagaagcgctgctcgatcacactcagcgcatcgaactgcagcaggggcgggtgcgcaaagccgaacgctgggggccgcgtacgctggacctcgacatcatgttgtttggcgacgcaatcattaacagcgagcgcctgacggtgccgcactacgatatgaaaaatcgcggttttatgctctggccactgtttgaaatcgccccgctgctccacttccccgatggcctcgcccttcgcaccgcgctggaaaatctgggcgccgaaaagcctgccatctggtaa

SEQ ID NO: 108199 - DNA, 744 bp, Enterobacter aerogenes
atgcatacccctgttctcttcgaacatccgctcaatgagaaaatgcgcacctggctgcgcattgaatttttatttcagcagctctcttcccgcccggccattgccagctacgcggacgctctccattttttccgcaataccggcgatctactggacgtgctggaacgtggcgaagtgcgtaccgatctgctgaaagagctggagcgacaacagcggaaattacaaacctgggccgaagtgcccggtgtcgaccagcagcgtattgaagccctacgtcagcagctcaaactgtccggcagcaccctgatttccgctccgcgtattggccagtttcttcgtgaagatcggctgattggcctggtgcgccagcgtctgagcatccctggcggctgttgcggctttgatttgccaacgctacatatctggctgcatatgccgcaagagtatcgcgatgagcaggtggcaaaatggttagcgagcctgacgccgctgatgcagtcgctggagctgatccttgatttgattcgtaactccgcgcctttccgtaagcagaccagcctcaatggcttttatcaggataatggcgacgatgccgatctgctgcgcctgcgcctggatctcgcaagccagctatacccgcaaatttccggccataaaagccgcttcgccatccgcttcctgccgctggacagcgagcatggtatcgtgccggaacgctttgattttgaactggcttgttgctaa

SEQ ID NO: 108200 - DNA, 195 bp, Enterobacter aerogenes
atgtcagaagagactatcgttaactgcccaacctgcggtaaaaacgtcgtctggagcgagcaaagcccgtttcgccctttttgctcgaagcgctgccagctgatcgatcttggcgagtgggcggcggaagagaaacgtatccccagttccggcgacttatccgacagcgatgactggagcgagccgcagcagtaa

SEQ ID NO: 108201 - DNA, 393 bp, Enterobacter aerogenes
atgaaaaaactgcaaatcgccgtcgggataattcgcaatccgcaaggcgaaatttttattacccagcgtgccgcagacgcgcatatggccaataaactggaattccccggcggcaaaatagaatcaggtgagacgccggaacaggcgctggtacgtgaactgcaggaagaggtcgggattacggtgacgacgtccacgttgttcgacaaactggagtatcaattcccggaccgccatatcacgctatggttcttcctggtggaaaactggcaaggtgagccgtggggcaaagaaggacaaccggggcaatggatggcgcagcaggcgttggatccgcaggcatttccgccggcgaacgagccgataattaataaacttattacgcttgcctga

SEQ ID NO: 108202 - DNA, 213 bp, Enterobacter aerogenes; identical to SEQ ID NO: 87623

SEQ ID NO: 108203 - DNA, 759 bp, Enterobacter aerogenes
gtgtggcaagagtttgtgccacgcttcaaggccaccctcgaactgggcgtctgcgcgatgattttcgccgtcgccgtcggtattccggtgggcgtgctggctgcggtaaaacgcggctccatctttgaccacactgccgtgggtctggcgctgaccggctactcgatgcctatcttctggtggggcatgatgctgattatgctggtttcggtgcagctgaatctgacgccggtctccgggcgtatcagcgatacggtattccttgacgataccctgccgctgaccggttttatgctgattgacaccgccatctggggcgagcagggcgactttattgatgccttaatgcatatgatcctacccgccatcgtgctgggtacgattccgctggcggttatcgtgcgtatgacccgctcatcgatgctggaagtgcttggcgaggattacatccgtaccgcacgcgctaaggggttgacccgcatgcgggtgattgtcatccatgcgctacgcaacgcgatgctgccggtggtgacggtgattggtctccaggtgggcacgctgctggcgggcgccattctgaccgaaaccattttttcgtggccaggtttaggccgctggcttatcgatgcgctacagcgccgcgattatccagttgtgcagggcggggttctgctggtggcgacgatgattattctcgtcaacctgctagtcgacctgctgtacggcgtggtgaacccgcgtatccggcataagaagtaa

SEQ ID NO: 108204 - DNA, 2127 bp, Enterobacter aerogenes
ttgtgtatcacccagccgtttaacccgctgtcgcagtttatcttcctgctgttactgtggggcgtcgcgctgctggtgcggcgtattccggggcgtttctctgccctgatgttgatcgtgttgtcattgaccgtttcttgtcgctatatctggtggcgctatacctccacgctgaactggaacgatccggtcagcctggtgtgcgggctgattttgctgtttgccgaaacctacgcctggattgtgctggtactgggctatttccaggtggtgtggccgctgaatcgccagccggtgccgctaccggaagatatgaacgaatggccgacggtggatatcttcgtgccgacctacaacgaagatctcagcgtggtgaaaaataccatctacgcttcgcagggtatcgactggccgaaggataagctcaatatctggatccttgatgacggcgggcgcgaagagtttcgccagttcgcaaaagatgtcggcgtacattacatcgcgcgtaccagccacgaacatgccaaggccggtaatatcaacaatgcgctgaagtatgcgagaggcgagttcgtctctattttcgactgtgaccacgtgcccacccgctcgtttctgcagatgactatggggtggttcctgaaggataaaaagctggcgatgatgcagacgccgcaccacttcttctcgccggatccgttcgaacgcaacctgggccgttttcgtaaaacgccaaatgaagggacgctgttttacggcctggtgcaggacggcaacgacatgtgggatgcgacctttttctgcggctcctgcgcggtaattcgccgcggcccgctggatgaaatcggcggtatcgccgttgaaacggtcaccgaggatgctcacacttcactgcgcctgcatcgtcgtggccacacctccgcctatatgcgcatcccgcaggcggcggggctggcgacggaaagtttgtcggcgcatatcggccagcgtattcgctgggcgcgcgggatggtgcagattttccgtcttgataaccccttattcggtaaagggttgaagctggcgcagcgtatctgctacgtcaacgcgatgctgcactttttgtccggtataccgcggcttatcttcctcaccgcgccgctggcctttctgctgttacacgcctatatcatctatgcgcccgcgctgatgatcgcgctgttcgtgctgccgcatatgattcatgccagcctgaccaactcgaagatccagggcaagtaccgccactccttctggagtgaaatctacgaaacggtgttggcctggtatatcgcgccgccgaccttcgtcgcgctgattaacccgcataaaggcaagtttaacgtcaccgccaaaggcgggctggtgaaagacgagtatgtcgattgggttatctcccgcccctatatttatctggtgttgctcaatctggtgggcgtggcggtcggcatctggcgctttatgtacgggcccgagaacgaaattttaaccgtctgggtcagtatcatctgggtgttttataacttaatcatcctcggcggcgccgtggcggtgtcggtggagagcaaacaggtacggcgttcgcaccgcgtcgagatgtcaatgccggcggcgattgcccgcccggatggccacctgttctcctgtaccgttcatgactactcggacggcggcctggggataaaaattcacggtgaagcgcgggtactggaagggcaacacgtgaatctgctgctcaaacgcggacagcaagaatatgacttcccggtacgcgtcgcgcgggtgaacggcggcgaagtcggtctgcaattgctgccgctgacaaaccagcaacatattgattttgtgcagtgtacgtttgcccgcgctgatacgtgggcgctttggcaggatagcttcccggaagataagccgatggaaagcctgctggatatcctcaagctggggttccgtggatatcgtcacctggcggagttctcgccgccgtcggtgaaggttattttccgctcgctcacctcgctggtggcctggattgtatcgtttttaccgcgccgtcccgaacgcgccgcggcggtgctttcggcagaaccggcaatggctcaacaatga

SEQ ID NO: 108205 - DNA, 588 bp, Enterobacter aerogenes
gtggtgctggtactgggttctatcgcgcgggccactggatttagcatcttcaagttcattcgctatatccgcgaagagctgctgattgtactggggacctcttcgtccgaatccgcgctgccgcgaatgctggataagatggagaagttgggttgccgtaaatcagtggtggggctggtgataccgaccggctactcctttaacctcgatggcacctccatctacctgacgatggcggcggtgttcatcgcccaggccaccaatagccatatggatatattccatcagatcaccctgctggtggtgctgctgctctcttcgaaaggggccgcgggcgtcaccgggagcggatttatcgtgctggcggcgaccatctctgcggtagggcatctgccggtggcgggcctggcgctgattctcggtatcgaccgctttatgtccgaagcgcgcgcgttgaccaacctggtaggtaacggcgtggcgaccgtggttgtcgcgaaatgggtgaaagaactcgatgccaaacagctcgatgatgtgttgaataaccgcgttcccgcggacaaatcgcaagaattatcctcgtaa

SEQ ID NO: 108206 - DNA, 1176 bp, Enterobacter aerogenes
atggcgcacgcctgttatgggcacaactccttctttaaaaacaactatctgttccgcagctggaccgatgccagctcaatcatcgactacctgatctttgcgcgtaaatacattaccgaatgtgaagagcgttatggcgtcgatgaagtcgaaaaattgctcgactcctgccatgcgctaatgaactacggcgtcgaccgctataaacgcccgcagaaaatatcgctgcaggaggagaaggcgcgacagaaaagccgcgaagagtatctgcaaagccaggtgaacatgctgtggcgtactctgccaaaacgggaagaggaaaaagccatcgaggcgagccgccgttatccttccgaaccgcaagagaacctgctgtacttcatggagaagaacgcgccgctgcttgagtcctggcagcgcgagatcctgcgtatcgtgcgtaaggtcagccagtatttttatccgcagaaacagactcaggttatgaacgagggttgggcgacattctggcactacactatcctcaatcatctgtatgacgaaggaaaagtgacagagcgctttatgctggagtttctgcacagccacaccaacgtggtgttccagccgccctacaacagcccgtggtacagcgggatcaacccctacgcgctgggtttcgccatgttccaggatattaaacgtatctgccagtcgccaacggaagaagatcgctactggttcccggatatcgccggttccgattggctggagacgctgcatttcgccatgcgcgattttaaagatgagagttttatcagccagttcctgtcgccgaaggtgatgcgcgatttccgcttgttcaccgtactcgacgacgaccacaataattacctggagatttccgccattcataatgaggaaggctatcgggaaattcgttctaagctgtcggcgcagtataacctcagcaacctcgaaccgaatattcaggtctggaacgttgacctgcgcggcgaccgttcgctgacgctgcgctatgtgccgcacaaccgcgtgccgctggataagagccgccgcgaggtactcaaacacgttcaccgcctgtggggctttgacgtgatccttgagcagcagaatgccgacggcagcgttgagctgttggatcgcacgccgccgcggcagaacgcgctgtaa

SEQ ID NO: 108207 - DNA, 1371 bp, Enterobacter aerogenes
atggaaaaaaaacttttggatggcctgcctgttccgcagcgttacggcgccattctgacgattgtattaggcctgacgatggccgtcctcgacggcgctatcgccaacgtcgccctgccgactatcgccaccgacctgaatgcctcgccggcatcttcaatctggatagtcaacgcctatcaaatcgctatcgtcatcgccctgctgccactctcgtttcttggcgatatggttggctatcgacgaatctataaaattggtctggtagtgtttaccatcacctcgctgatttgcgctctctcccgaagtctcgagatgttaacgctggcgcgtgtggcccagggcctgggcggcgcggcgctgatgagcgtcaacacggcgctgattcgccttatctatcctaagaggcagctaggtcgcggaatgggcatcaactctttcgtcgttgccgtctcctccgccgcggggcctaccattgccgccgctatcctctcgcttgcttcctggcaatggctgtttttaatcaacgtaccgctggggattatttccatcttcctcgccatgcgctttttaccgcccaacagcagcgccagcaagattacccgtttcgatctgccgagcgcgatgatgaacgccctcaccttcgggctgctcatcacggcgctcggcggctttgcccaggggcaatccggttacctggtattggccgaggtcattactatgctgattatcggcttcttctttgttcgccggcagctgcgcatgccggtcccactgctgccggttgatttactgcgcattccgatcttttcgctctctatctgcacctcgatctgctctttttgcgcgcagatgctggcgatggtttccctgccctttttcctgcaaaccgttatcggtcgcagcgaagtagagaccgggttactgttaacgccgtggccgttggcgaccatggtgatggcccctctggcgggttatttgatcgaaaaggttcatgccgggctgttgggggcaatgggactgctgatcatggcctgcggcctgtttggccttgcgctattaccctcttcaccttccgatctcgatattatctggcggatggcgttgtgcggcgcaggtttcggactgtttcagtcgccaaacaaccataccattgtctcctctgcgccaggccatcgcagcggcggcgccagcggtatgctgggtaccgcacgcttactggggcaaagtagcggcgccgcgctggtcgccctgctgtttaacctggcaggcaatagcggcacccacaccgcgcttctgctggccggttccctggcggtcattgccgccgccatcagcggtctacgtgtaactcaaccgcgcgccgcctga

SEQ ID NO: 108208 - DNA, 885 bp, Enterobacter aerogenes
atgatgcgaatcgcgcttttcctgctgactaacctggcagtcatggtggtgtttggcctggtgcttagcctgacggggatccagtcgagcagcatgaccggcctgctgatcatggcgctgctgtttggttttggcggctcgatcgtttcgctgttgatgtcgaaatggatggcgctgaagtcggttggtggggaagttatcgaacagccgcgtaacgaaactgagcgttggttgatgaacaccgtcgcacagcaggcgcagcaggcaggcatcgccatgccgcaggtggcaatttatcacgcccctgacatcaacgccttcgccaccggcgcgcgccgcgacgcttctctggtcgccgtgagtaccggtctgctgcagaatatgagccgtgacgaagcggaagccgttatcgctcacgaaatcagccatattgctaatggcgacatggtcaccatgacgctgattcagggtgtagtgaacacctttgttatctttatttcccgcgttatcgcgcagattgcggccggtttcctcggcggtaaccgtgaagatgaaggtgaaagcagcaacggtaacccgcttatctactttgcggtcgctaccgtactggaactggtattcggtattctcgccagcatcatcaccatgtggttctcgcgctatcgtgaattccatgccgatgcaggttccgccaaactggtcggtcgtgagaaaatgattgctgcattgcagcgtttgaaaaccagctatgaaccgcaggaagccagcagcatgatggcgttctgtatcaacggtaaagcgaaatcgatgagcgaactgttcatgacccacccgccgttggacaaacgtattgaagcgctgcgtagcggagaatacctgaaataa

SEQ ID NO: 108209 - DNA, 2049 bp, Enterobacter aerogenes
atgaacaaactttttaagctcaccgcgcttgcgggcctgctagcaatagcaggccatgccttcgccgtggacgatatcacccgagtcgatcaaattcccgtgctgaaagaagagccgcagcacgcgacggtgagcgagcgcgttacctcgcgctttacccgctcccattatcggcagtttgatctcgacaacgccttttcggcaaagattttcgaccgctatctgaatctgctggattacagccataacgtgctgttggccagcgatgtttctcagtttgcggcgcaaaaaaataaaatcggcgatgaactgcgcagcggcaaactggacgttttctacgacctgtacaacctcgcgcagaagcgtcgctttgagcgttaccagtacgccctgaaggtactggatcgtccgatgaattttaccggcaacgacaacttcaacctcgatcgcagcaaggcgccgtggccgaaggatgaagccgagcttaacgcgttgtgggacgccaaggtgaagttcgatgaactgagcctgaagctggcgggtaaagacgataaagaaattcgtgaaaccctgacccggcgttataagtttgcgattcgtcgcctggcccaaaccaacagcgaagacgtcttctcgctggcgatgaccgctttcgcccgcgaaatcgacccgcataccaactatctctccccgcgtaacaccgaacagtttaatactgaaatgagcttgtctctggaaggtattggcgcggtgctgcagatggacgacgactacacggtgatcaattcactggttgccggcggcccggcggcgaagagcaaagcgattagcgttggcgaccgtatcgtcggcgttggtcagccgggtaagagcatggttgatgttatcggctggcggctggacgatgttgtcgcgctgatcaaagggccgaagggcagtaaagttcgcctggaggttctgccagcgggcaaaggggcgaaaacccgtattgttactctgacccgcgaacgtattcgtcttgaagatcgcgcggttaagatgtcggtcaaaaccgtcggtaaagaaaaagtcggcgtgctggatatcccgggtttctacgttggcctgactgatgatgtcaaagtacaactgcagaagctggaaaaacagaacgtcagcagtatcgtcatcgatttgcgcagtaacggcggtggggcgctgacggaggcggtttcgctttctggtctgtttatcccatccggcccggtagtacaggtgcgtgataacaacggtaaggtccgcgaagatagcgataccgacggtgtggtttactataaaggcccgctggtggtcttagtcgatcgcttcagcgcttcagcatcggaaatttttgctgccgcgatgcaggactatggccgtgcgctgattgttggcgagcagaccttcggtaaaggcaccgttcagcagtatcgttcgctgaaccgtatctacgatcagatgctgcgcccggaatggccggcattaggttccgtgcagtacaccatccagaagttctaccgcattaacggcggcagcactcagcgtaaaggggttactccggacatcatgatgccaaccggtaaagaagatcgcgataccggcgagcagtatgaagataacgcgctgccgtgggatagcatcgatccggcgacctacgtgaagtccggcgatatgaaaccgttcgaacctgaactgcttaagcgccatgaagaccgtatcgcaaaagatccggaattccagtacatcatgaaggatattgcgcgctttaacgccatgaaagataagcgcaatatcgtttctctgaactacgcgcagcgtgaggaagagaatgaagaagatgatgcgattcgtctggcgcgggtaaacgatcgccttaagcgcgaaggcaagccgcttctcaaaaagatagacgatctgccgaaggattatcaggagccggatccgtatcttgatgaaaccgtgcatatcgcgattgacctggcgcaacaggaaaaagcgcagcctccggtagaaccaccggttagcaaataa

SEQ ID NO: 108210 - DNA, 684 bp, Enterobacter aerogenes
atggaaaatcaacctaagttgaatagcagtaaagaagtaatcgcgtttctggccgaacgttttcctcagtgtttcagcgctgaaggcgaagcgcgccccctgaaaatcggtatttttcaggatcttgtagagcgagttggcggcgagatgaatctcagcaaaacccaactgcgcgctgccttacgtctttatacttcgagctggcgttatctgtacggcgtgaaagcgggagcgattcgcgtcgatctcgacggcaacccgtgcggtgaactggaagagcaacacgttgctcacgcccgtcagcagctcgaagaagccaaagctcgcgttcaggcgcagcgcgccagccagcaggctaaaaagcgcgaagccgctgccgcggcaggccaacaggaagaaggtgcacgccgcgagcgtaaaccgcgtcctcagccgcaggctcgccgtaaagaaggtagtgaacagcgtaagccgcgtcctgcagctgccaaagcaccgcgtgaagagcaacgtcttaccccggtgtctgacgtctctgtattgagcgtcggtcaggctctgaaggtgaaagcaggcaacaacgcaatggacgccaccgttgtggaaatcaccaaagatggcgttcgtgtacagctgacttctggtatgtcaatgattgtacgcgcagaacacctggtgttctga

SEQ ID NO: 108211 - DNA, 498 bp, Enterobacter aerogenes; identical to SEQ ID NO: 90112

SEQ ID NO: 108212 - DNA, 1284 bp, Enterobacter aerogenes
atgctgataaaaacaccctcaatcacgccgacgaagaagattaccgttcattcggtcagttcgccaacgccgcatgcgcactatcagcgctgtacgcagtgcgacatgctgtttcgcataccggttgtgaaacgaaatcaatgcgcctggtgtccgcggtgcaacgcgaaggtacgcgacggccgcgattggtccctttcccggctcgccagtatggcgtttacaatgatgttgctgatgccgttcgcctggagcgagccgctactgcgtttgcatctgctcggcgtgcgtattgacgccaacgtcctgcaggggatctggcagatgaccaaccagggcgatcccattaccgctgcgatggtgctcttctgcgcggtggttgcgcccgtcctgctggtggtctccatcgcctacctttggcttggcaacgtgctggggatgaacctacgtccggtgctgctgatgctcggcaaactgaaagagtgggtgatgctggacatttatctggtcggtatcggcgtcgcctccattaaggtccaggactatgctttcctgcagcccggcatcggcctgatcgcctttatcgcgctgaccctactcagcatcctgacgctcatccacatgaacgttgaagagttgtgggagcgtttttatcccgaacgaccggccatgcgctacgacaccaatcttcaggtttgcaccggctgtcactataccggttatcgcgactcccgcggccgctgccgccggtgccatacctcactgcatcatcgccggccgcaaagcctgcagcgcagttgggcggccttgattgcgtcgctggttttcctgctgccggccaacctgctgccaatttcgattatctacgtcaatggcgcgcgccaggaagatacgattctttcggggatcatttcacttgccaacagcaacatcgcaatcgccggcgtagtgttcatcgccagtattttggtaccattcaccaaagttatagtgttatttaccctgctggtcagcatacaattcaagtgcgaacaggggctacgtacgcgtatcctgctgctgcggctgattacctggatcggccgctggtcgatgttggatctgtttgttatctcattaaccatgtcgttgataaaccgcgatcagctcctggcctttaccatggggccggcggcggtctatttcggcggcgcggtgattttaactatccttgcagttgaatggctggacagccgcttactttgggacgctcatgagtcaggaaacgcccgcttcgccgactga

SEQ ID NO: 108213 - DNA, 540 bp, Enterobacter aerogenes
atgaatcatcagttcgccgttgttgatgcggtatttcggttgagtatccagggcgacgaaatgatcttccggttcgcctttgcccggcatcataccgatatagttaccgccgaccagcgcatccagcccggaaacgccggccagagaggcttttggcgtcaccagccagaactgggtatctttgcgcagcgcgtctttcatatcgctcttcacgctggcggaaacttcaatcttgctgaggtccttactcaaagagatatcctgtaccgtaccaacctctaccccttgatagcggataggggtacgtcccggaacaatcccgtttgcggactggaaatcgatggtaatcgtcgttccccgaccttcaaagctggtccagatgagccatccggcaatcatcagcgcgataaccggcaacagccagaatggcgagatacggcgtttggtttttattttggcttcagtcggcgaagcgggcgtttcctgactcatgagcgtcccaaagtaagcggctgtccagccattcaactgcaaggatag

SEQ ID NO: 108214 - DNA, 1269 bp, Enterobacter aerogenes
gtgaaaaaagaattaccattactcgcacttggcattattgccgccgcgccggctttcgccagccaacaatctaccagtcagggctttattgaagacagccacctcgatctctttttacgtaacgcttatatcaaacgcgattatcgcgatggtttgccggataaagccgaatggggtcagggtatcatcgctaccttcgagtccggctttactcaagggccggtcggcttcggcgttgacggcatttcgcagtacgccgtgcgcctcgacggcggccgcggccgcagcggcgcgggcggtatcgactttttcgcccaggatgatgatggccgcgcgaagtccgatttagcaaaatttggcgctaccgctaaaatgcgcttctcgaataccgtactcagctacggcagccagcgcccgatgctgcctatcgtctacgccgatgactcgcggctgctgtatgagagctataccggtaccatgctgacctcaagagaaatcgacggtctggaaattaacgccggttatctcaccgatcagcagcgcaaaagcgacgacagccacaatagcggcctgaagagcctgacctttggcggcgccagctatcaattcaacgaccagctcagcggcgcgctttacgcttcgcacgtcgaggacgtgctgaataagcagtatctcggcctgaactacaagcagccgttcgccgccgaccagcagctgattgttgacttcaatggctataactcccgcttagatcaagagtatgccgacgccaatgacaccgggcgcagcaacagcatctggagcctggccgccagctatatctgggatattcatacctttaaagtcgcttaccagcaaagcagcggcagcaccggctaccactacggcgggtatcagaatcagggcggcgttggcgatggcggcaacaccatctggctggctaactcctactggtccgattttaacggcgaggatgagcgttcctggcaggcctcctatggcctggattttgccggactgggcgtaccgggcctgagctggaccaccgcctacgttcgcggcgataacattaaaaccgccgagaccagcaacggcaaagaacacgaatggttcaaccaggtgcagtaccaggtgcaaaacggcatggcgaaagatttgaaattgagactccgctattcggtgctgcgcgtttccagcaacgccagcgactataacgtcagcggtaatgaagtgcggttctacgtcgaatatccgtttaacgtgttttaa

SEQ ID NO: 108215 - DNA, 759 bp, Enterobacter aerogenes
atgaaaattcgctcaacccttcttgccttcgggatcgcagcaacgttaaccggatgtcagaacatggactccaacgccctgctgagctcgggcgcggaagcattccaggcctactctcttagcgacgaacaggtaaaaaccttaagtgaccaggcgtgtaaagagatggacgccaaagccactatttctccggccagcagcgagtacagcaaacgcctgagcaagattgccgcggcgctgggcgataacatcaacggtcagccggtcaactataaggtttatgaaacaaaagacgtcaacgcctttgcgatggccaacggctgcatccgcgtttatagcggcctgatggacctgatgaacgataacgaagtagaagcggttatcggccacgaaatgggccacgttgcgttgggccacgtgaagaaaggcatgcaggtcgcgctgggcaccaacgccgtgcgcgcggcggcggcctccgctggtggtatcgtcggtagcctgtcgcagtcgcagctgggcgatctcggcgaaaaactggtgaactcgcagttctcccagcgccaggagtcggaagcggacgactactcttacgacctgctgcgtaaacgaggcatcaatccatcggggctggccaccagcttcgaaaaactggccaagctggaagccggccgtcagagctccatgtttgacgatcacccggcatcggaagcccgcgcgcagcatattcgcgatcgcatgaaggccgacggtattaaataa

SEQ ID NO: 108216 - DNA, 588 bp, Enterobacter aerogenes
gtgcagactaacgacatcgctcatgttcagcaggtcggagaggtgctgaacctgcgtggcgttgcccagcggcagtttgttttcgatatcataaaaatagacgtgcatccccagcgattccgccagaataccgagctgggtgccgatatggccgtaaccgataatccccagttttttgccgcgcgcttcaaagctgcctaccgcctgcttattccacacgccgcgatgcgccttggcgttagcttccggcacgccgcgcagcatcagcagcagctcgccgatgaccagctcagccaccgaacgggtgttcgagaacggggcgttaaataccgggataccgcgcttcgccgccgcatccagatcgacctggttggtgccgatacagaagcagcccaccgccaccagtttctccgccgcggcgaagatctcttcagtcagatgagtacgggaacgcaggccgataaaatgggcatcacggatcgacgctttcagctcttcagtatccagcgcgcctttgtgaaattcgatgttggtgtaacctgccgcacgaaggttatcgattgctttctgatgcacgccttcaactag

SEQ ID NO: 108217 - DNA, 528 bp, Enterobacter aerogenes
atgaacgtcagcggcaacgaagaagcggttggcgttcttcagtttgctcacgcgtttggccatcgccatcgcttcggcggcggcggtggcttcatcaagcagcgaagcggaagcgatatccaacccggtcagatccagagtgacctgctggaagttgagcagcgattccagacggccctgggatacttccggttggtaaggggtatatgcggtgtaccagcccgggttttccagcatgttgcgctgaatgaccggcggcagttgcacggcggtgtagcccatgccgatgtaagacttgaagcgcttgttgcgaccggcgatcgccttcagctccgccagcgcggcgaattcggtagtcgcgtcgcccacctgtggtggggtcgccagctggatatcctgcggcacaatctggccaatcagggcgttaagcgaatccgcgccgacggtcttcagcatctcttgctgctgctgagcgtccgagccaatgtgacgttcaataaaggcgtcgcggttttcaagctgacttaa

SEQ ID NO: 108218 - DNA, 1020 bp, Enterobacter aerogenes
atgataaccttccgcctgctcgaccgggcagaacgggtgcagctcggcaaattccggccaggtgatcgggatcatctccgccgcggcgttcagtttcatggtgcaggagcccagcgggatcatcgcctggttcagcgccagatctttacgctccagcgcgtgcatgtagcgcatcatctcggtttcgctatggtagcggttaaacaccggatgggtgaggattgcatcatcgcgcagcatcgccgccgggatcgaacggctatccagcgccacgtctttatccagggtatcgatatccagaccgtgatcgtcgccaacgatggcgcggaacaggttcagcacatcttcgcgggtggtcgcttcatcgagcgtaatgccaaccgcgccgtgaatatcgctacgcaggttaatctgcagcgcttcggcacgcgccagcaccgcggctttatccgccacttcgacgcaaagggtgtcgaagtagtgagcatggcgcagcttcagccctttcttctgcaggccgtcggccagaatgtcggtcaggcgatgaatgcggccagcgatacgtttcaggcccgccgggccgtggaataccgcgtacaggctggcgatgttggccagcaggacctgcgaggtacaaatgttggagttcgctttctcgcggcggatatgctgctcgcgagtctgcatcgccatgcgcagcgcggtattacccgccgcatctttcgatacgccgatgatacggcccggcatggagcgtttgaattcatctttcgccgcgaagaaggccgcgtgcgggccgccatagcccatcggcacgccgaaacgttgcgcggaaccgaagacaatatcggcgccctgcttgcccggcgccgtcagcagcaccagcgccataaagtcggcggcgacgctgacaatcactttgcgcgctttcagctcggcgataagtttactgtaatcgtggatttcaccggtggtgccaacctgctgcagcagcacgccaaaaacatcctggtgatctag

SEQ ID NO: 108219 - DNA, 873 bp, Enterobacter aerogenes
atggaaaccaaagtcgatcaggcgtttagcaatatccagctcgctaatgccggtctcttctttcagcggacgaatatcaagaatacattcgtgcgccacgcgaccatcgcggccggtatagagcaccgggtaagcatctttcagccgggtagcgatatagttggcgttgagaatcgcgttctggctcgcctgtttcagcccttccgcgcccatcatgcggatatacatccagctgatcggcagaatggaagcgctgccgaaaggcgcggcggaaaccgcgccctggcgggtcagcatgccttcaatctgtaccacgctgtggcccggtacaaacggcgccaggtgcgctttcacgccgatagggcccatacccggaccgccgccgccgtgcggaatgcagaaggttttatgcaggttgaggtgcgaaacgtcagcgccgataaagcccggagaagtgatcccgacctgggcgttcatgttggcgccatcgaggtaaacctggccgccgaactgatgcactatctcgcacacttcacggatggtctcttcatacacgccgtgggtcgacggataggtgaccatgatgcaggagagattcgcccctgcctgctctgctttttcacgcagatcggcaagatcgatgttgccgtttttatcgcaggcaacgaccactacctgcatacccgccatctgcgcggaagccgggttagtgccgtgcgcggagcttgggatcaggcagatatcgcgatggccttcgttgcggctctcgtgatagtggcgaatcgccagcaggccagcatactcgccctgcgcgccggagttcggctgcatacagacggcgtcatagccggtcagtttcaccagccagtctga

SEQ ID NO: 108220 - DNA, 411 bp, Enterobacter aerogenes; identical to SEQ ID NO: 89342

SEQ ID NO: 108221 - DNA, 261 bp, Enterobacter aerogenes
atgtgtttgccatcgtcagtgacgtacagcacgccgctgtcggtgagcaccgtgctcatcccggaaaccggcgacggttggatatcggtgctctgcacacccagtttcgccagcgactgtttgatcgccgcgctatcggcatgcgccgcgccggagagtgaagccgccagcagggtgaacatcaataaaccttttttcatactcagtccttttattcagcactcacgcccgcgggtgatgctgttgatgaagttgtcgtaa

SEQ ID NO: 108222 - DNA, 726 bp, Enterobacter aerogenes
ttgctcagcgatagcgcgaacctggtcgagatacgggttattttcaaaaccgtcttcgttaacgttggcgatatacatggttggcttcagggtcaggaagctcagatagcggatggcgtctttctcttctttgctcagatccagcgcgcgcagcatgcccgctttttccagctgcggcaggcatttttccagcgcggccagctcaatcttagcgtctttatcgccgcctttggctttcttggacacgcggtggatagcgcgttcgcaggtatcgaggtcagacagcgccagctcggtgttaattacgtcaatatcttccgccggatcaactttacccgcgacgtggataatgttgtcattttcaaagcaacgcactacgtggccgatggcttcggtttcacgaatattggtcaggaactggttacccagaccttcgcctttggacgcgcctttaaccagaccggcaatatcaacgaattccatggtcgtcggcaggatacgctgcggcttgacgatctcagccagtttgtccagacgcggatcgggcatcggtacgacaccggtgttcggctcaatggtacagaacgggaagttggccgcttcaatacctgctttggtgagcgcattgaacagggtggatttgccgacgttgggcaaaccgacgataccgcatttgaatcccatgatttaaatcaccttaatctttggataatcagtctgttatga

SEQ ID NO: 108223 - DNA, 1080 bp, Enterobacter aerogenes
atgtctaaaatttttgatttcgtaaaaccgggcgtcatcactggcgacgacgttcagaaagtgttccaggtagctaaagaaaacaactttgctctgccagcggtaaactgcgtgggtactgattccatcaacgccgttctggaagctgctgcgaaagttcgttctccggttatcgtacagttctctaacggcggcgctgcgttcatcgcgggcaaaggcgtgaaaactgacgttccgcagggcgctgctatcctcggcgctatctctggcgcgcatcacgttcaccagatggctgaacactacggtgtgccggttatcctgcacactgaccactgcgcgaagaaactgctgccgtggatcgacggtctgctggacgcgggtgaaaaacacttcgctgccactggcaaaccgctgttctcttcccacatgatcgacctgtccgaagaatccctgcacgaaaacatcgagatctgctctaagtacctggctcgcatggctaaaatgggcatgactctggaaatcgaactgggctgcaccggcggtgaagaagacggcgtggacaacagccacatggacgcttccgcactgtacacccagccggaagacgttgattacgcctacaccgagctgagcaaaatcagcccgcgcttcaccatcgctgcttccttcggtaacgtacacggcgtttacaagccgggtaacgtggttctgaccccgactatcctgcgcgactctcaggaatatgtttctaagaaacacaacctgccgcacaacagcctgaacttcgtcttccacggcggttccggttcttccgctcaggaaatcaaagactccgtcagctacggcgttgtgaaaatgaacatcgataccgatacccaatgggcgacctgggacggtatcctgcagtactacaaagcgaacgaagcttacctgcagggccagctgggcaacccgaaaggcgaagaccagccgaacaagaaatactacgatccgcgcgtatggctgcgtgccgctcagacctctatggtgacccgtctggagcaggcattcaaagagctgaacgcgatcgacgttctgtaa

SEQ ID NO: 108224 - DNA, 981 bp, Enterobacter aerogenes
atggagctggaagaaatcgtggcccttagtgtaaagcataacgtctccgatctacacctgtgcagcgcgtatccgccgcgctggcgtcgtttgggaaagcttgagcctgcaccgtttacttcgccggatgttgaggaaatcctcactcgctggcttaacgacccacagttggcgcagtggcgtgccgatggccaggtggactttgcccttgccctctcagatgggccgcggctgcgtgccagcgcttttgcccacgcgcgcggcttgtcgttggcgctgcgtcttttgccgcagcgatgcccgcagttgggtgatttgggcgcgcccgccgcgcttagcgaactgttaaatgaagagagtggtttgatcctggttaccggcgctaccggtagcggcaagtcgaccaccctggcggcgatggtggactacctcaatcaacatcgccatggtcatattttaacccttgaggatcccgtggagtttattcacgccagcaggaactgcctgatccagcagcgcgaaatcggccgccattgctcctccttcgcggcggcgctacgcgtggcgctgcgtcaggacccggacgtgatcttattaggtgagctacgcgatagcgaaaccatccgcctggcgctgaccgcggccgaaaccgggcacctggtgatggcgacgctgcatacccgcagcgcggcgcaggccgtcgagcggctggtggatgtgttcccggcggaagaaaaagagccggttcgcagtcagctggcggggagtttatgcgccgtggcggcgcaaaaattgttgccaaatgcttccggcggccgggttgcgctatacgaacttttagtgaacacgccagcggtggcaaatttgatccgcgaaggaaaaacgcatcagctacccggcgtgatgcaaaccagtcaacaggcaggaatgcaaacctttgcgcagagttttcaacaacgtgcgttagcaggtgagttatag

SEQ ID NO: 108225 - DNA, 705 bp, Enterobacter aerogenes
atgaacgatattgcgcataacctggcacaggtccgggataaaatctcaggcgccgccgcccgctgcggccgcgcttcagaagaagttacgttgcttgcagtgagtaaaaccaaacctgcgagcgctatcgaagaagcaatgaccgcaggacagcgggcattcggcgaaaactacgtccaggaaggggtggataaaatccgctatttccagcaggcgggcgccagcggtctgcagtggcacttcatcggcccgctgcagtccaacaaaagccggctggtggccgaacattttgactggtgccacaccgtcgaccggttgaaaatcgccacccgcctgagcgagcaacgtccggcggatttaccgccgctgaacgtgctgattcaaatcaacatcagcgatgaacagagtaaatccgggatcccgctggcggagcttgacgctttagccgccggtgtcgccgccttaccgaatctccagcttcgcgggttaatggccattccggcgccagagtcagaatatgaaaggcagtttgccgtcgcccaacaaatggcggtagcattcgcgcaactgaaaacgctctacccttcggttgatacgctctctctgggcatgtcggatgacatggaagccgctatcgcggcgggaagcactatggtgcgcatcgggaccgcaatcttcggcgcgcgcgactacagcaaaaaataa

SEQ ID NO: 108226 - DNA, 567 bp, Enterobacter aerogenes
atgaagacgttgaccttcctgctctcaacggtcattgagctctacacaatggtcatgttgttacgcgtctggatgcagtgggcgcgctgcgacttttacaatccgttttcacagttcgtcgtgaaagcgacccagccaatcgtcgggccgctgcgccggattatcccggcaatggggccgctggatagcgcctccctgctggtcgccttcgtgctctgcgttatcaaggcgatcgtgctgtttatggtggtcaccttccagccgattatctggattgccgcggtgctgatcctgctgaaaaccatcggttcgctgattttctgggtgctgctattgatggcgatcatgagctgggtaagccagggccgcagcccggtggaatacgtgctgatgcagttggccgacccgctgctgcgcccgatccgcaacctgctgccatccatgggcggcatcgacttttcgccgatggtgctggtcctgctgctgtacgtgattaacatgggtatcgccgagctgctgcaagctactggcaatgtcctgcttccggggctgtggatggcgctatga

SEQ ID NO: 108227 - DNA, 291 bp, Enterobacter aerogenes
atgagtgccgttgaagtctgcgctgacgggctggtgctcaggctgtatattcagccaaaggccagccgcgacagccttgttggtctgcatggcgacgagctcaaagtcgccatcaccgccccacccgtcgacggccaggcaaatgcccatctggttaaatatctcgctaaacagttccgcgttgcgaaaagccaggtgcttatcgaaaaaggcgaactgggccgtcacaaacaggtaaaaatcattcacccgcagcagatcccgcccgccgtcgcggcgctgactgactaa

SEQ ID NO: 108228 - DNA, 594 bp, Enterobacter aerogenes
atgcaaaaagttgtactcgctaccggcaacgccggtaaagttcgcgagctggcctcgctgctggaagattttgggctcgacgtcgtcgcccagaccgagcttggcgtcgattccgccgaagaaaccggcctgacctttatcgaaaacgcgatccttaaagcgcgtcacgccgcgcagatcaccggcctaccggccatcgccgacgactcgggtctggcggtggatgcgctgggcggcgcgccgggcatttactccgctcgctactcgggtgaaaacgccagcgaccagcagaatctggaaaagctgctggatgccctgcaggatgtgcccgatgagcaacgccaggcccagttccactgcgtgctggtgtatctgcgccatgccgaagacccgacaccgctggtgtgccacggcagctggccgggcgtgattactcgccaggcggcgggtagcggcggctttggctatgacccgattttctttgttccgtccgagggtaaaaccgcagcggaactgagccgtgaagagaaaagcgccatttcccaccgtgggcaggcgctgaaactgttactggaagcattacgtaatggctaa

SEQ ID NO: 108229 - DNA, 564 bp, Enterobacter aerogenes
atgcaacgttgcggatgggtaagccaggatcctctttatatccagtatcacgataacgaatggggagtcgccgagagaacgccgcaaaagctgtttgaaatgatctgcctggaaggccagcaggcggggctctcgtggatcacggttctgaaaaaacgtgaaaactatcgtcaggcctttcaccagtttgacccggttcgcgtagcggccatggatgaagcagacgtcgagcgcctgctacagaatgcgggcattatccgccatcggggaaagatccaggccatcatcggcaatgcgcgggcgtttctcgccatggaagccaacggtgaagcattcagcgatttcgtctggtcgtttgtcgataatcagccgcaaattacccatgcggccacactcgccgaaatccccaccaccacaccggcctccgatgcgctatctaaggcgctaaaaaagcgcggctttaaatttgtcggctccactatctgttattcatttatgcaggcctgtgggttagtcaacgatcatgtgaccggctgctgttgctaccccgggagaccagcatga

SEQ ID NO: 108230 - DNA, 441 bp, Enterobacter aerogenes; identical to SEQ ID NO: 105942

SEQ ID NO: 108231 - DNA, 2331 bp, Enterobacter aerogenes
ttgccaacttcatctgcaactaaaaccatcttaaccgcggcccactgggggccaatgctggtggagacggatggtgaaaatgtgatttcgtcccgcggcgcgctggacacccccttcgccaactcgctgcaaacggcggtgcgcgaacaggtgcacagtaaaactcgcgttcgctatccgatggtgcgaaaaggctatctcgcctcgccgcaacagccgcagggcgtacgcggccaggatgaattcgtgcgggtaagctgggagcaggcgcttgatctgattgatgcccagcatcgacggatccgcgaaagctacggcccgcagtcgattttcgccggttcctatggctggcgttctaacggcgtgttgcataaggcggcaaccctgctgcagcgctatatgagtcttgccgggggctatactggacacctcggcgattattcaaccggcgcggcgcaggcgatcatgccttatgtggttggcggtaatgaagtttatcaacagcaaaccagctggccgcttatcctggagcacagcgaggtggtggtgctgtggagcgctaatccgctgaatacgctgaaaatcgcctggaacgcctcggatgaacaggggatcccctggtttgatcgcctgcgccagagcggcaagcggctgatctgcatcgatcccatgcgatcggaaagcgttgatttctttggcgaatcgatggaatggatcgcgccacatatgggcactgacgtcgcgttgatgctggggatcgcccataccctggtagagcatggctggcaggacgatgaattcctcgcccgctgtaccagcggttatgacattttcgcccgctatttgagtggtgaaagcgatggcgtcgccaaaaccgccgaatgggcggcggcaatttgcggcgtagcggcggataaaatccgcgaactggcgaaacttttccacgaaaacaccaccatgctgatgtccggctggggcatgcagcgccagcagtttggcgagcaaaaacactggatgctggtgacgctggcggcgatgctggggcagattggcacgcccggcggcggttttggtctttcttaccactttgccaacggcggcaaccccacgcgccgcgccgcagtgctggcctccatgcagggcagcgtagcgggcggcgtagacgcggtggaaaaaatcccggttgcccgcatcgttgaggccctggaaaaccccggcgcaagctatcagcacaacgggatgacgcggcgctttcccgacatccgctttatctggtgggcgggcggcgccaactttacccatcatcaggataccaaccgcctgattcaggcctggcagaagccggagctgattgtgatttccgaatgcttctggaccgccgccgcgcgccatgctgatatcgtcttaccggcgaccacttcgtttgagcgtaacgatctgaccatgaccggcgactacagcaatcagcatctggtgccgatgaagcgggtggtcgcgccgcgcgatgaagcgcgcgacgatttcgatgtttttgccgatctgagcgaacgctgggaggcgggcggccgcgaacgcttcaccgaaggaaaaaacgatttgcaatggctggagaccttctaccagattgccgcccagcgtggggcgcagcagcaagtgacgctgccgccgtttaccgaattctggcaagcgaaccagctaattgaaatgccggaaaacccgaataacgcccgtttctcccgcttcgcggcatttcgcgcagacccgcaggctaacccgttaaaaaccgcgagcggaaaaattgaaattcactcgccgaccattgccgggtttggctatgccgattgtccgccgcacccgatgtggctcgaacctgacgagtggcacggcaacgccgaggtgggtcagctgcagatactttccgcccatccggcgcaccgcctgcatagccagttgaaccagacttcgctgcgtgaacgctatgccgtcgccgggcgcgaaccgctgactatccatccgctggacgctcaggcgcgcaatatcgccgacggcgatctggtgcgggtgtggaattcacgtggtcaggtactggccggcgcggtggtcacggaaggtattcgtccgggggtgatttgcctgcatgaaggcgcgtggccggatatcgaccccgatgccggaatatgcaaaaacggcgcggtgaacgtgctgacgaaagatattccgacctcgcgtctgggcaatggttgcgccgggaatacggcgctggcatggctggaaaaatacgatggacccgcgctggcgcttagcgcatttgatccgccggccaatgcataa

SEQ ID NO: 108232 - DNA, 663 bp, Enterobacter aerogenes
atgaaaaaacgcgtactcatgattgctgctatcgttagcggcacactggctatttctggttgtactaccaacccttataccggcgaacgcgaagcgggaaaatccggcatcggcgcgggtatcggctccttagtaggcgcaggcgtcggcgcgctctcctcttccaaacatgaccgcggcaaaggcgcgctgattggcgcagcggcaggcgcggcgctaggcggcggcatcggttactacatggacgtgcaggaagcgaaactgcgcgaaaaaatgcagggaaccggagtcagcgtgacgcgaaatggcgataacatcgtgctcaacatgccgaataacgtcacctttgacagcagcagcgccaacctgaaacctgcaggcgccaacaccctgaccggcgtcgcgatggtgctgaaagagtacgagaaaaccgccgttaacgtcgtcggctacaccgacagcaccggcagcaacgatctgaacatgcgtctgtcgcaacagcgtgccgacagcgtcgccagcgcgctcatcactcagggcgtagcggccaaccgtattcgcactaccggcatgggcccggcgaacccgatcgccagcaacagcacggcggaaggcaaagcgcagaaccgtcgcgtggaaattaccctcagcccgctgcagtaa

SEQ ID NO: 108233 - DNA, 1017 bp, Enterobacter aerogenes
atggcgaaagcggcgcgagcaaccatcagcgacgtggcgaaagccgcgaagaccggtaaaaccagcatttcacgctatctcaacggcgaaaagcatctgctttccgacgatctgctggcgcggattgaaaaagcgattgccgagctcaactaccgtcccagcctgatggcccgtggcctcaaacatggccgtacccgcctgattggcctgatcatcgccgatatcaccaacccttactccgtgaacgtgttaagcgggattgaagccgcctgccgcgaaaaaggcttcaccttgctggtatgtaataccaacaacgaggtcgatcaggagctgcactaccttgacctgctgcgtagctatcaggttgaaggaattgtggttaatgcggtcggcatgcgcgaagaaggcctcaaccgcctgcagcaatcctcgctaccgatggtgcttatcgaccgtaaaatccccgatttcgcctgtgatgtcgtggggttggataacactcaggccgccaccaccgccaccgaacatctggtggaaaagggttttgaagcgctgttgtttttaagcgagccaatcggctccgtaaacacccgccgcgagcgcctggacgcctttcgcgcgaccctacagcgctatgctggcgtggtggcggaaaacgccgaggtgccgctcaacgacggcgccatgatggataacgtcctgcgccagttccacgcccgccaccgcggaatgcgcaaagcggtgatttccgccaatggcgccctgacgttacaggtcgcccgttcactgaagcgcgttgacctcatctggggcagcgatatcggcctgctgggcttcgatgagctggaatgggcggagctggcgggcgtcggtattaccaccctcaaacagccaacctggcagattggctatgcttcggtcgaacaggtcgtcaggcgtatcgaaggcggcagcgaccccatctgcgagcgggtcttctccggcgagcttattgtccggggatcaacgtctcgttaa

SEQ ID NO: 108234 - DNA, 750 bp, Enterobacter aerogenes
atggccagaaaaatcattgtcgtcaccgccgcttatggcaacgaccacgttaaagcgcttggcgggcagtccgccgtattaccctttatcgccggttccggcgccgatggcgtggaaattcgccgcgagttgttcagcgcggcggaactgaagcagttgccgacgctggcggccgacattgaaaaacaggggctgctggcctgctactccgcgccacaagcgctgttcaccgacaacggcgagctcaatccccatctcccgtcgttacttgaagaagcgcaaaccctcaacgccctgtggctgaagctctccctcggtcatttcatccataaccaacagctggagacgctgcgcgacattctgagcgccagcggcatggcgctggtggtggaaaatgaccagaccgattgcggccaactggcgccgatgcagcgcttcaaagccgcctgccgggtccatcagatgccggtgacgctgactttcgacatgggaaactggctgtgggttggcgattcgccggaagaagccgcgcgccatctcgcccccgctgtcagctatattcatgtgaaggcggcggagcctcatcatgagaagtatcgcgccgtcccaccggaccaggcggacgctcgctggctagcgctgctcgataacctgcccgccgacgcgccgcgcggtattgaattcccgctggtcggcgacgacctgaccgccgtcacccgccattacgttgatctgttacgcgaggattaa

SEQ ID NO: 108235 - DNA, 936 bp, Enterobacter aerogenes
atggaaaacttagatgtcattaccattggcgaagccatggcgatgtttgtcgccaccgaaaccggcgaactggcggaggttgaacgctttatcaaacgcgtcgccggcgctgaactgaacgtggcgaccggcctggcgcgcctggggctgaaggtgggctgggtgagccgcgtcggcaacgatagctttggccgcttcgtgctgaattcgctggccaaagaaggcatcgacgcgcgcggcgtggccgttgacgagcgctacgctaccggcttccagatgaaatctaaagtcgaaaatggaaccgatcccatcgtggaatatttccgtaaaggatcggctgccagccatctgtcgacggaagatttccgcgctgattacttcaccagcgcccgccatttgcacttaagcggcgtcgccgccgcgctgtccgacagctcgtatgcattgctggaacatgcggccagggtgatgaaagccgaagggaaaaccctctcatttgatccaaacctgcgcccggtactgtggaaaagcgaagccgagatggtggagaaactgaaccgcctcgccttccaggctgactgggttttgccaggcttaaaagagggcgtgattcttaccggccagcagacgccggaaggtatcgctgatttctatctgtcgcgcggcgttaaggcggtggtgattaaaaccggctgcgacggcgcatggttcaagaccgccaacggcgaacagggcgccatcgcagccattaaagtcgacaacgtggtggacaccgtcggcgcgggtgatggctttgccgttggcgtaatcagcgcgctgctggaaggcaaaacgctgacgcaagccgtgaaccgcggtaacaaaattggctcgctggccattcaggtacagggcgatagcgaagggctgcccacccgcgaagcgctgggcgaataa

SEQ ID NO: 108236 - DNA, 1056 bp, Enterobacter aerogenes
atgcgcgcgccggtcacgctggaatacgatctcgacgatgccggacgcggtcatcgcgaccgggcgctggccgatctgctgtgccggatcaccggcgcggaagatgcctgtatcgtcaataacaacgcggcggcggtgctgctgatgctggcggcgacggccagcgggaaagaagtggtggtctcgcgcggcgaactggtcgagatcggcggcgcatttcgcatccccgacgtcatgcgccaggccggttgtttgctgcatgaagtgggcaccactaaccgcacccacgccaaagattattgtcaggctatcaatgagcagactgcgctgctgatgaaagtgcataccagcaactacagcattgaaggctttaccaaagcggtcgatgaggcggagctggcggaaattggccgcgaacatggcgtgccggtggtggccgatctcggcagcggctcgctggtggatttgagccagtacggtttgccgaaagaaccgatgccgcaggaattgattgcggcgggcgtgaacctggtgagcttttccggcgataagctgctcggcggaccgcaggcggggattatcgtcggcgatcgggcgctgatcgctaagttacagagtcatccgcttaagcgtgcgctgcgggcggataaaatgacgttggcggcgctggaggcgactctgcgcctgtatctgcatccggaggcgctggccgacgagctgccgacgctgcgcctgctaacccgccgcgccgaggatctccgccagcagggcgagcgtattcagcctgcgttagcggcgcactatagcgattttgacgtgggcgtcgaagcgtgtttatcgcagatcggcagcgggtcgttgccggtcgaccgactgcccagcgccgcgttaacctttacgccgcgcgatggtcgcggcagccagctggaagcgctggccgcgcgctggcgcgccttgccgataccgacgatcggcagaatttatgatggccgcttatggctggatctgcgctgtcttgaagatgaaccccggtttatggagatgttattgagatga

SEQ ID NO: 108237 - DNA, 366 bp, Enterobacter aerogenes
atgatcggcagagtgacagtagccttaagcaaagttaaaggatcgttaggaagcaacgagcgccatgccttgcctggcgttatcggggacgatcttctgcggtttgggaagctgccactctgcctgttcatttgcatcatcataacggcagtgaccgtggtgacgacggcgcaccatacccgtctgttaaccgcgcagcgtgaacaattggttctggagcgtgacgctctggatattgaatggcgcaacctgatcctcgaagagaacgcccttggcgatcacagtcgggttgagcggatcgcgacagagaaattgcagatgcaacacgttgatccatcacaagaaaatatagtggtacagaaataa

SEQ ID NO: 108238 - DNA, 1767 bp, Enterobacter aerogenes
atgaaagcagcgccgaaaacgccaaaagcaaaacgtcaggaagaacaggccaactttattagttggcgttttgcgttgctgtgcggatgtattttaatcgctctcgccttcctgcttggccgcgtcgcgtggctgcaggtggtgagcccggatatgctggtgcgtcagggagatatgcgttccctgcgtgtgcaggaagtgtcaaccgcgcgcggcatgattaccgaccgctccggccgcccgctggcggtcagcgtgccggtcaaagccatctgggccgacccgaaagaactgcatgatgccggaggcgtgacgctcgataaccgctggaaagcgttagccgatgcgctgaacatgccgctggaccagctggcatcgcgcatcaacagcaacccgcggatgcgttttatctatctggcgcgtcaggtaaaccctgacatggctgactacatcaaaaaactgaagctgccagggattcatctgcgtgaggagtctcgccgttactatccgtcaggcgaagtaaccgctcacctcattggcttcaccaacgtcgatagccaggggattgaaggggttgagaaaagctttgataagtggctgaccggccagccgggcgagcgtatcgtgcgtaaagaccgctatggtcgcgtgattgaagacatttcttccaccgacagccaggcggcgcataacctcgcgctgagcatcgacgagcgcctgcaggcgctggtttatcgcgaactgaataatgcggtggcgttcaacaaagcggaatcaggcaccgccgttttggtcgacgtcaacaccggtgaagtgctggcgatggcgaatagcccgtcgtacaacccgaataatttcgcgggtacgtccaaagataccatgcgtaaccgcgccatcaccgacgtattcgaaccgggttcaacggtcaaaccgatggtggtgatgacggcgctgcagcgcggcatcgtcaatgaaaataccgtgctgaacaccattccatatcgaattaacggccacgaaatcaaagacgtggcgcgctatagcgaattaaccctgaccggggtgctacagaagtcgagtaacgtcggcgtttctaagctggcgttagcgatgccgtcctcagcgttagtagatacttactcacgttttgggcttggaaaggcgaccaatttggggttggtcggagaacgcagtggcttatatcctcaaaaacaacggtggtctgacatagagagggccaccttttctttcggctacgggctaatggtaactccgttacagttagcgcgagtctacgcaacgattggcagctacggcatctatcgcccgctgtcgattaccaaagttgatccaccggttccgggtgagcgcgtgttcccggaatcactggttcgtaccgtcgttcatatgatggaaagcgtggcgctgcccggcggcggcggcgtgaaagcggcgatcaaaggctatcgcatcgcgattaaaaccggtacggcgaaaaaagtggggccggatggccgctacatcaacaaatatattgcttacaccgcaggcgttgcgcccgccagccacccgcgtttcgcgctggtggtggtgatcaacgacccgcaggcaggtaaatactacggtggcgccgtttccgcgccggtattcggtgccatcatgggcggcgtattacgcaccatgaacgtcgaaccggatgcgctggcaacgggcgaaaaaagtgaatttgtgattaatcaaggcgagggaacaggtggcagatcgtaa

SEQ ID NO: 108239 - DNA, 1488 bp, Enterobacter aerogenes
gtggcagatcgtaatttgcgcgaccttctcgctccgtgggtgccaaatgcgccggagcgaattctgcgagagatgacgctggacagccgcgtggcggcgtccggcgacctctttgtcgcggtacagggtcatcaggcggacgggcgtcgttatatcccgcaggcgatagcgcaaggtgttgctgccattattgctgaggcgcagggcgaggccgcagacggcgaagttcgcgagatgcacggcgtgccggtcatctacctgagccaactgaacgagcggttatccgcgctggccgggcgtttttaccaacaaccttcgcagcagatgcgtctggtgggcgtcaccggtactaacggtaaaaccacgactacgcagctgttggcgcagtgggcaaagctgctcggcgaaaccagcgcggtgatggggaccgtcggtaacggcctgctggataaagtggtgccgaccgaaaacaccaccggctctgcggtcgatgttcagcacgtgctttccggcctggtagggcagggggcgactttcggcgcgatggaagtctcttctcacgggctggttcagcatcgcgtggcggcgctgcagtttgccgcctcggtgtttaccaacctgagccgtgaccacctcgactaccatggcgacatggaacattacgaagcggcgaaatggctgctctattccacccaccattgcggccaggccattgttaacgctgacgatgaagtcgggcgtcgctggctggcgaaactgccggatgcggtggcggtgtcgatggaagatcatatcaatccgaactgccacggccgctggctgaaggcgaccgcggtcaactatcacgacagcggcgcgaccattcagtttgactcgagctggggcaagggcgaaatcgaaagccgcctgatgggcgcctttaacgtcagcaacctgctgctggcgctggcgacgctgctggcgctgggctatccgctggcggatctgctgaaaacctcttcgcgtttacagccggtgtgcggccgtatggaagtgttcagcgcgccgggcaaaccgaccgtggtggttgattacgcccatacgcctgacgcgctggaaaaagcgctgcaggccgcgcgtctgcactgcagcggcaagctgtggtgcgtcttcggctgcggcggcgaccgcgacaaaggtaaacgcccgctgatgggcgctatcgcggaagagtttgccgatatcgtggtcgtgactgacgataacccacgtaccgaagaaccgcgggcgattatcaatgacattctggctggcatgcttgatgccgggcaggtgaaggtgatggaaggccgcgcggaagcggtgaccggcgcggtgatgcaggcgaaagcgaacgacgttgtgctggtagcgggcaaaggccacgaagactatcagatcgtcggtaaccgccgtctggattattccgaccgcgttaccgttgcgcgtctgctgggagcggtagcatga

SEQ ID NO: 108240 - DNA, 1359 bp, Enterobacter aerogenes
atgattcgctttacattaagccagctcgccgagatcgcccgcggcgaactgcagggtagcgatatcgctatcgatgacgtgacgtccgatacccgcaaagtcacggcaggttgcctgtttgtggcgctgaagggcgagcgattcgacgcgcatgattttgccgaacaagcgaaagcggcgggcgcaggcgcgctgctggttagccgcccgctggcctgcgatttaccgcaggtggtggtgaaagatacccgtctggctttcggcgagttagcggcctgggtgcgtcagcaggtgccgacccgcgtcgttgcgctcaccggttcgtccggtaagacctcggtgaaagagatgaccgcggcgatcctcagtcagtgcggcaacacgctgtataccgccggtaatctgaacaacgatatcggggttccgatgacgttgctgcgtctgaataaagatcaccagtatgcggtgattgaactcggcgccaaccatcagggcgaaatcgcctggaccgtcagcctgacgcgtccggaagcggcgctggtcaacaacctcgccgccgcgcacctcgaagggttcggctcgctggcgggcgtggctaaggcgaagggcgaaatctttaccggtctgccgcaaaacggcatcgcgattttgaatgccgacaataacgactggctgaactggcagagcgtgattggcgatcgcaaagtgtggcgcttctcgccgaacgcggcgaacagcgacttcacggcgaccaacgtgcatatcaccagtcatggtaccgaatttacgctgcagaccccgttcggcaacatcgacgtactgctgccgctgccggggcgccataacatcgctaacgcgctggcggcaacatcgctggcgatggcggtcggcgccgatctggccgcggtgaaaaccgggctggcgcagctgcaagcggtgccgggacgtctgttcccgattcagttggcggaaaatcagctgttgctggatgactcctacaacgccaacgtcggttcgatgaccgccgcggtacaggtgctggcggaaatgccgggcttccgggcgatggtggtcggcgatatggcggagctcggcgcggaaagcgcggcctgtcatcgcgaagttggcgaagcggcgaaagcggcggggctggattgcgtcctcagcgtcggttccctgagcacggatatcagcagcgccagcggcgtgggcgaacattttaacgataaagccgccgtggtagctcgcctgcgcgagctgctggcagagcataaaatcatgaccattttagtgaagggttcacgtagtgccgctatggaagaggtagtacgcgcattacaggagattgcgacatgttag

SEQ ID NO: 108241 - DNA, 474 bp, Enterobacter aerogenes
ttgattggcggcgacatagcgcccgctgaccatcagcgaggctttgtcccacagcggaatatctttgtaacgcacatccagggtattggtattaatttgctgcttattagtcaaagagcggtcgtaatcatcaatatcttcgcgcaccagcgcgatatcaaatttaccggcgcccactttccagttttcaagccctacgccagctgccgcatcggttctttgtgttttccagtccagcatctggatctcgattttcggcgcaccgtgcttaccgacccaaaaatccgcttccggggcaaacggcaaaaagcctttggtgttgacgtacatatccgagaactgaaggtagttttcgccgccggcgttgtcgccaaaccagccggcagaatattgctgacccacgttgccatcgagcatcacgatggcgtccacacgtttgtcgccttcctgaaaaacacgctgtttaagctgtaa

SEQ ID NO: 108242 - DNA, 726 bp, Enterobacter aerogenes
atggataacttaaatcttaataaacatatttccggccagttcaacgcagaactggagtacattcgcacccaggtaatgaccatgggtgggctggtggagcaacagctttctgatgcgatcaccgcgatgcacaatcaggacagcgatctggcgaagcgcgtaatcgatggcgataagcaggtcaatatgatggaagtggcgatcgacgaggcctgcgtgcgcatcatcgctaaacgtcagccgaccgccagcgacctgcggctggtgatggcgatcatcaagactatcgccgagctggaacgtattggcgacgtggcggataaaatctgccgtaccgcgctggagaagttttcccagcagcaccagccgctgctggtgagcctggagtcgctaggccgccataccgtacagatgctgcatgatgtgctggatgcctttgcgcgtatggatcttgatgaagcggtacgtatctatcgcgaagacaagaaagtcgatcaggaatatgaaggcatcgtgcgtcaactgatgacctatatgatggaagattcacgtactattccgagcgttctgaccgcgctgttctgcgcgcgctccatcgagcgtatcggcgatcgctgccagaatatctgcgaatatattttctacttcgttaaaggccaggatttccgtcacgtaggcggcgacgaactggataaactactcgcgggtaaagatccgaaagagtaa

SEQ ID NO: 108243 - DNA, 774 bp, Enterobacter aerogenes
atgagtatggtgaacgcgaatccgggtaaaatttcagttcgtgacctgaacttctactacggcaaattccatgccctgaagaacatcaacctggatatcgctaagaaccaggtgacggcgtttatcggcccgtcaggctgcggtaaatccactctgctgcgtacgttcaacaagatgtttgagctgtacccggagcagcgtgcggaaggcgaaattctgctggatggcgacaatattctcaccaatacccaggatatcgcgctgctgcgcgcgaaggtggggatggtattccagaagccgacgccgttcccgatgtctatctacgacaacatcgccttcggcgtgcgcctgttcgagaagctgtcgcgcgccgatatggacgagcgcgtgcagtgggcgttgaccaaagccgcattatggaatgaaaccaaagataaactgcaccagagcgggtattctctctccggtggtcagcagcagcgtctgtgtatcgcccgcggtatcgcgattcgcccggaagtgctgctgctcgatgaaccttgctcagcgctggacccgatctccaccgggcgcatcgaggagcttatcaccgagttgaagcaggattacaccgtcgttatcgttacccacaacatgcagcaggctgcgcgttgttccgaccatacggcatttatgtatcttggcgagctgattgaattcagcaacacggacgatctgtttaccaagcccgctaagaagcaaactgaagattatattactggccgctacggttga

SEQ ID NO: 108244 - DNA, 891 bp, Enterobacter aerogenes
atggcaacgatcgaattgcaaaccaccgccgcgctggcggaatcccgtcgcaagatgcaggctaagcgccgcctgaagaaccgcatcgccctgaccctgtcgatggcgaccatggcgtttggcctcttctggcttatctggatcctgatgtcgaccattacgcgtggcatcgacggcatgagtctggcgctgtttaccgaaatgacgccgccgccgaataccgcgggcggcggtctggcgaacgccctggcgggcagcggcctgctgatcctgtgggcgaccgtttttggtacgccgcttggcatcatggccggtatctatctggcggagtacggcagaaagtcggtactggcggaaatcatccgctttattaacgatattctgctttccgcgccatctatcgtcgtggggctgttcgtctacaccatcgtggtggcgcagatgcagcacttctccggctgggcgggcgttatcgcgctggcgctgctgcaggtgccaatcgtgattcgtaccactgaaaacatgctgaagctggtgccggatagcctgcgtgaagcagcctatgcgctggggacgccgaaatggaagatgatttccgcgatcacccttaaggcgtcggtatccggcattatgaccggtatcctgctggccattgcccgtatcgccggggagacggcgccgctgctgttcaccgcgctctccaaccagttctggagcaccgatatgatgcagccgatcgccaacctgccggtgaccatttttaaatttgccatgagtccgttcgcggaatggcagcaactggcatgggccggggtattgattatcaccctgtgcgtcttgctgctgaatattctggcgcgcgttgtcttcgcgaagaagaaacacggttaa

SEQ ID NO: 108245 - DNA, 960 bp, Enterobacter aerogenes; identical to SEQ ID NO: 90497

SEQ ID NO: 108246 - DNA, 423 bp, Enterobacter aerogenes
atgccgacccatactcgtattcggatgttcaataccaaagagacttaccctaatcagacgctggacaatgatttatgtcaggcggtgcgcgccggtaataccgtctacgttcgcggccaggtagggaccgattttgaaggcaatctggtgggccttggcgacccgagagcgcaggcggaacaggcgatgaaaaacgtcaaacagctattggaagaggcggggagcgacctgtcgcatatcgtcaaaaccactacctatattatcgatccgcgctatcgcgaaccggtctatcaggaggtaggcaagtggctaaaaggcgtgttcccgatctcaaccgggctggtaatttccgcgctggcgcaaccgcagtggctaatggaaattgatgtaatcgccgtcatccctgatgacgcggcgaaataa

SEQ ID NO: 108247 - DNA, 249 bp, Enterobacter aerogenes
atgattagcctcgcgcacatcaaattccgtcgcgctaagcagcaagaaggcgtgaaaacacgtttcccggcgctgttctacccgctgggtaactggatatgcctgctatttatggtcgcggtactggccatcatgctgatgaccccgggaatggcgatttcggtgtggctgataccggtgtggattgccgttctcggcgttggctatctgtttaagcagaaaagcgccggcgtcgtaaaagcacaataa

SEQ ID NO: 108248 - DNA, 1407 bp, Enterobacter aerogenes
atgacaggcaatacactttcgctgaaagaaaagattggctacgggatgggcgatgccggatgtaacattatctttggcgccatcatgttgttcgttaactatttttatacggatatttttggtcttgcgccggcgctggttggggtgctgctgctttcggtgcgcgtcatcgatgccgtcaccgacccgatcatgggggcgatggccgaccgcacccgcagtaaatatggccgctttcgcccatggctgctgtggatggccttcccctacgccctgttcagcgtgctgatgttcaccaccccggaatggacctacaacagcaaggttatctatgccttcgtcacctacttcctgctgtcgataacctataccgcgattaacatcccctactgctctttggggacggtgatgacatccgacccgcaagaacgtgtcgcctgccagtcataccgctttgtgctggtcggtatcgcgacgcttctgctctcgctgactctgctgcctatggcggagtggttcggcggcgccgataaagcgaaaggttatcaaatggcgatgaccgtattggcgttcatcggcatgtgtatgtttttgttctgcttcgccaccgtacgcgagcgcatacgtcctgcggtacaaaccaacgacgagctgaaaaaagacctcaaagacgtgtggaaaaacgaccagtgggttcgcattttgctcttaaccctgtgcaacgtttgccccggctttatccgcatggccgccaccatgtactacgtcacctgggtgatggggcaaagcacccacttcgccactctgtttatcagccttggcgtggtcggcatgatgatcggcagcatgctggcgaaagtgctgaccgaccgctggtgtaaactgcaggtctttttctggaccaacattgtactggcagtcttctcctgcgcgttctacttctttaatccgcatgccacaacgctgattctggtgctctacttcctgctcaatatcctgcatcaaatcccgtcgccgctgcactggtcgctgatgtccgacgttgatgactacggcgagtggaaaaccggtaaacggatcaccggcatcagcttctccggtaacctgttcttcctgaaagtggggctggcggtcgccggggccatggtgggtttcctgctgtcgtggtacggctacgatgccggcgcgaagcaacaaagcgcctcggcgctaaacggtatcgtactgctgttctcagtgatccccggcgttggctacctgattaccgcaggcgtcgtacgcctgttgaaagttgaccgtgatctgatgcgccaaatccagagcgatctggaaaaacgccgcagtaactacagcgaactgaatgaactccaggaattgaaaaccagtgaacacgtaaggaaagcctga

SEQ ID NO: 108249 - DNA, 951 bp, Enterobacter aerogenes
atgaacaactggcctaacccctttattgaacaacgcgcggacccttttatcctgcgccatcacgacagctactattttattgcctccgtgccggaatacgatcggctggagattcgccgcgccgccacgctggaaggcctgcgtgaagccgagccggtgaccgtctggcgcaagccgcaaagcggtccgatgagccagctgatttgggcgccggagctccaccacatcgacggcaagtggtatatctatttcgccgccgccccgacccatgacctcgacgcccaggggatgttccagcaccggatgttcgcccttgagtgtaccgacagcgatccgctcagcggccgctggcaggaaaaagggcaaattatcaccccgttcgataccttcgccctcgatgccaccactttctgccatcaagggaaacgctggtatttatgggcgcagaaagacccgcagatcgccggcaataccaatctctatctggcggagctggaaaacccgtggacgctaaaaggcgcgccgatcatgctgagtaagccggagtttgcctgggaatgccggggatttatggtcaatgaggggcctgcggtgctggtacacggcgataagctgtttatcagctattccgccagcgcgaccgatgaaaactactgcatgggattattatggatagatattcaggccgatccgctacagccggctaactggcacaaatccccgcagccggtatttcgcaccagctacgaaaaccgccagtatggtcccggccacaatagctttacgcaaacgccggagggggaagatgtgctggtgtaccacgcgcgcaactacaccgaaatcgaaggcgacccactgtacgatcctaaccgtcacacccggctaaagctggtgcgctggcaagaaaacgggatgcccgacttcggcatcccgcccgctgatacgctgtag

SEQ ID NO: 108250 - DNA, 855 bp, Enterobacter aerogenes
atgacgttgtttactacgctgctggttctcatcgccgagcgtctgttcaaacttggcgagcactggcagctcgatcatcgcctggaggtactgttccgccgcgtgaggcatttctcgctgttcggcaccgtgctgatgaccgtcgttgcggtggcggtggtatacgttattcaacgcctgctacaggggcagctatttaacgtaccgctgctggtgttctggattttgctcggcctgctgtgcattggcgcgggcaaggtgcgcctgcattatcatgcctatctgaaggcggcggcgaacaacgatagccacgcctgcgattcgatggccagcgagctaacgcttattcacggcgtgccgccgggctgcgatcgccaggagtatcttcgcgagctgcagaacgcactgctatggatcaactatcgctactatctcgcgccgctgttctggctggtggtcggcggcccgtgggggctgttgacgctaaccgcttatagcgtcctgcgcgcctggcagacctggcttgcgcgctatcagacgccgcgccatcgtttacagtccggcattgacggtattctgcatattgtcgattgggtgccggtgcgcctggttggcgtggtatacgcgctgctggggcacggcgaaaaagcgctgccggcgtggtttgcctcgctaggcgatcgtcactcttcacagtatcaggtattaactcgtctggcccagttctcattggcccgcgagccgcacgtcgatgcggttgagacgccaaaagcggcggtttccatggcgaagaaaacctcgctggtggtggtggtgattatggcgctgctgaccatctacggaacgttgatttaa

SEQ ID NO: 108251 - DNA, 564 bp, Enterobacter aerogenes
atgcagttgaatggcggatggctggtgggcgcgcgtcgggtgccttcgccgcatcacgattgccgcccggacgatgaaaacccttctttactggtggtacataatatcagcctgccgccgggggagtttggcggcccgtggattgacgcgctatttaccggtacattggatgccgacgcgcatccttacttcgccgggattgctcatctgcgcgtttcggcgcattgtctgattcgccgcgatggcgagatagtccagtatgtaccctttgataagcgcgcatggcatgcgggcgtctccagctatcacggccgcgagcgctgcaatgatttttcgatcggcattgagctggaagggacggatactcaggcttacaccgaggcgcagtaccagcagttagtggtgattacccaggcgctcatccagcgttatcctggtattgctgataatattaccggccattgcgatatcgcgccgatacgtaaaacggatcccggcccggcctttgattgggcaaaataccgcggtatgttggccgcatcgtcacataaggagataccatga

SEQ ID NO: 108252 - DNA, 894 bp, Enterobacter aerogenes
atgacgcctcgtcgctacagccccgaccgccgccgtgacgcgctgctggaacgtattaatctcgatattaccgacgccgtcgcgcaatcactacgcgaagatctgggcggcgaagttgacgctaacaacgatattagcgcgcaattattgccatcggacgcgcgctctcacgccgtcgttatcacccgcgaagatggggtattctgcggtaagcgttgggtagaagaagttttcattcagcttgccggcgacgatgtccgcatcacctggcacgtggctgacggcgatacggtaaaagccgatcagccgctgttcgaactggacgggccgtcgcgggtgctgctgaccggcgaacgcaccgcgctgaatttcgtgcagaccctctccggggtagcaagcgaagtacgccgctacgtcgacctgctcaaaggcaccaaaacgcaactgcttgatacgcgtaaaacgttaccaggcctgcgcaccgcgttgaagtatgcggtgctgtgcggcggcggcgcgaaccaccgtctgggcctcttcgacgctttcctgatcaaagaaaaccatatcatcgcctctggttcggtacgtcaggcggtggaaaaagccttctggctgcacccggacgtaccggtggaagtcgaagtcgaaacgctggatgagctggatgaagcgttaaaagccggcgctgatatcatcatgctcgacaatttcaccaccgacctgatgcgtgaggcggtgaaacgtaccaacggccaggcggcgctggaagtctccggcaacgttaccttcgataccattcgcgaattcgcggaaaccggcgttgactatatttccgtcggcgcactcactaagcacgtacgggccctcgacctgtccatgcgttttcgttaa

SEQ ID NO: 108253 - DNA, 432 bp, Enterobacter aerogenes
atggataagcaacgtggttttaccctgatcgaattaatggtggttatcggcattatcgccatcctcagcgccatcggcatccctgcctaccaaaactacctacgcaaagccgccctcaccgatatgctgcaaacctttgtgccctaccgcacggcaatagagctgtgcgcgttggaccacggcggactaaccagctgcgatggcggcagcaacggtatcccttcaccgtcgactacccgctatgtatcggcgatgagcgtcgcccagggggtggtcacgctgaccgggcaggagagccttaacggcctggccgtcaccctgaccccttcctgggataacgccaacggtatcaccggttggcagcgcgtctgcgccatcggcgatgacagcgcgttaaagcaggcctgcgaagatgtcttccgctttaactga

SEQ ID NO: 108254 - DNA, 1386 bp, Enterobacter aerogenes
atgaaaaccgaacagctactctcactctgtcagcgccatcacgcactgttgttgaagagcgacgagcagaccattgttatcgccgttgtggatacgccgtcgccagaactgatggaagcgctgcgcttcgctacccaaaagcgcatcgatattgaatgctggagccaggagcggatggataagcatcagcatgaggcacagcgatcagcagcagactccgccacgggtacctcccagggcgtaaccgatctactgaatcaaattctggagcaggcgctgcgccagcgagcctctgatatccatattgagccggcggaaaatcagctgcggatacgcctgcgtgtcgatggcgtgttgcatgccctaccgttacttgaggccgcgctggctgcgccaatagccgcacggcttaaggtgctgggcaacctcgatattgccgagcatcgtctaccgcaggatggacagttcactctgacgcttaccgggcgcacggtctcctttcgcatcgcaaccctcccctgccgcggcggggagaaaatcgtcctgcgtttattacaccaggtggagcaggcgctggatctggaagctctggggctatcctctcgtcagctggcttttttccgcgccgcattgaaccagccgcaggggttgctactggttaccgggcctacggggagtggcaaaaccgtcaccctgtacagcgcgctgcaggcgcgaaaccgcgaagaggtcaatatctgcagcgtggaagatccgctggagatcccgcttaccgggctcaaccaaacgcagatcaacccgcgatccgggcttaccttccagagcgtcctgcgggcgctgctgcgtcaggatccggatatcgtcatggtcggagaaattcgcgatgccgaaaccgcggaaatcgccattaaagccgcacaaaccgggcatctggtgctctctacattgcatactaactccaccagcgaaacgttaattcgcctgcaacaaatgggcgtagcgcgctggatgatctcctcggcgctatcgctggtggtcgcccagcggctggtgcgaaaactgtgtccccactgccggcgcgatggcggccgccctaccgaggtgccgcacagtctttggccacgcccattacccggctggctggcggttggctgcccacagtgctaccacggttactacggccgcctggccttattcgaactgctgccggtggatagcgcgctgcgtcaggccattaatcgcgatctcagcgcggcggaaatcgaaacgctggcccgcgaagccggcatgatgacactgtttgaaagcggctgtgaagcggtggagcgcgggttgaccagcctggaagaagtcgtgcgcgttctggggatcccacatggcgactaa

SEQ ID NO: 108255 - DNA, 1206 bp, Enterobacter aerogenes
atggcgactaagcagctttggcagtggcgggggatagataagcaaggaatgcagtgtgagggcgtcctgtggcacgagacgcgcgcgcaggcgctggcatcactggaacagcagcggatcctgccgctggcgctacggcgtaaaacggtacagaattcgctgtggcgcccgcgctacagcggtgaggttatccgccagcttgccacgctgctgcaggctggtttaccgctggctgaagggctggagctgctggcccaacaacagccgcacaaacagtggcaggcgttgctacgagtgctggcgcaggaactggcaaatggcgtttctctctccagcggcctggcgcaatggccgcaggtcttccctccgctctatctggcgatgatccgcaccggcgagctcaccggtaagctggaacgctgctgctttcaactcgcgcaacagcagcaagaacaacagcgtctgacagaaaaggtaaagaaggcgctgcgctatccgatcgttatcctgacattagcgctggcgctggtcgtggcgatgctgtttttcgttctgcctgaatttaccgccatctatcggaccttcaacacgccgctccccttgctgacgcaaatggtcattcaccttggcgacgcgttagcccgctactggcccttgctgccgcctctttttgctattctactttttctcaaccggctagcccggcgtcggccacgctggctgctgttaaggcaaagattatttcacgcgattccaatagcgggtcggctgatcaacggtcagcaactgagccagatatttaccattctttcactgacacaaagcgcgggcataagctttgtccaggggctggagagcgttgaggaaaccgtgggctgcccgctgtggcggcagcggattgcacaggcgcgcgcagagattacccatggccaaccaatctggcaggcgctgacgaattgtggcggatttacctcgctgtgcctgcagctcattcgtaccggagaggcatcaggagcgctggatacgatgctcgataacctggcgcgccatcatagcgagcaaactcatcaacaggcggataatctggcgacgctgctggagccaatactgctggtggtgaccggaacgatcgtcggtgtgctggtggtagcgatgtacctacctgtttttcatctgggggacgcgctgggcacaatggggagttaa

SEQ ID NO: 108256 - DNA, 1044 bp, Enterobacter aerogenes
atgcgtattgaagaagatctgaagctaggttttaaagacgttcttatccgcccgaaacgctctaccctcaaaagccgttctgatgttcaactggaacgtgaattcacctttaagcattcaggccagacctggtccggcgtaccgattatcgctgctaacatggataccgtcggtaccttcagcatggcgaaagccttgtccgcttttggaattctgaccgccgtgcacaaacactacagcgttgaagaatggcaggcgtttgtgcagagcgagtccgcagaagtgctgcagcatgtgatggtttccaccggtacctctgacgcggactttgaaaaaactcagcagatcctgacccagaatccacagctgaacttcgtctgcatagacgtggctaacggctactctgaacacttcgttcagtttgtggcgaaagcgcgcgccgcctggccgcaaaaaaccattattgccggcaacgtagtgaccggtgagatgtgtgaagaactgattctttccggcgctgatatcgttaaagtcggcattggccctggctccgtctgtactacccgcgtgaaaaccggcgttggctacccgcagctgtctgcggtgattgaatgtgccgatgccgcgcacggtctcggcggccagatcatcagcgacggcggctgcaccatgccgggcgatgttgcgaaagcttttggcggcggtgccgattttgtcatgctcggcgggatgctggcgggtcacgaagagagcggcggtaccgtggttgaagagaacggtgaaaaattcatgctgttttacggtatgagctctgaatcggcgatgactcgccacgtcggcggcgtcgcgaaatatcgtgccgcggaaggtaaaaccgttaagttgccgctgcgcggcccggttgataataccgcgcgtgatatcctcggtggcctgcgttcagcatgcacctatgttggcgcttcccgcctgaaagagctgaccaaacgtacaacctttatccgcgtacaggaacaagagaaccgcgtgttcaacagcctgtaa

SEQ ID NO: 108257 - DNA, 621 bp, Enterobacter aerogenes
atggggtatacggtagcgttaacaggcggcatcggtagcggtaaaagtaccgtcgccgacgaatttgctcacctgggcgtaaccgtcatcgacgccgatattattgcgcgtcaggttgtagagcccggtactcccgccctgcttgctatcgctgaaaggtttggtccacagatgatcaacgacgatggcagtctgaatcgccgccgcttacgcgaacgcatttttgctcatagcgaggacaaggcctggcttaacgcgctgctgcatccgctgattcagcaagaaacgcgccgtcagatgcaggcctcaacctcaccttatctcctctgggtcgtacccttgctggtcgaaaaccgcctgaccgataaagccgatcgcgtactggttgtcgatgtgccaaaagagacgcaaatcgagcgcaccatacgccgcgatggggtcagtcgtgaacacgctgaacatattcttgccgcccaggcgacgcgcgaacagcgtcttgccgcagcggatgatgttattgaaaacatgggctccgcggatgccgtcgcatcccacgtcgcccgcctgcacgataagtatttaatgctggcatcgcaggccgcctcacaggaaaaaccgtaa

SEQ ID NO: 108258 - DNA, 999 bp, Enterobacter aerogenes
atggataccctggcgcaggtagtccatcgccgccaggtgctctttccacagggaatccagcgtttgcagcatgacgcctttctcgaagtgacgcatcatttcggcgccgaccacttcttctttacgctggtaggtttctaccgcgctctgcagaatacgttcacgcagggtctcttcgtgcagctccggctctttatccagccactctttgattggcagctcaaggtcgaagtcgtttttcagacgttcctgcaggccttcaatatcccacatctcttccagcgactgcggcgggatatgcgcatcaatagtggctttgaagacgtcttcgcggatgctgttgatggtttcgctcacgtcggagatatccagcagctcgttacgctgggtgtaaatagcgcgacgctgatcgttggcgacgtcatcatattccagcagctgtttacggatatcgaagttgcggctttccactttacgctgagcgttagcaatcgctttggtcacccacgggtgctcgatagcttcgcccggcttcatccccagtttacgcatcatgccggatacgcgatcggaggcgaagatacgcatcagagcatcttccatcgacagatagaagcgggaagaaccggcatcaccctgacggccagcacggccacgcagctggttatcgatacgacgggattcatgacgctcggtaccgatgatgtgcaggccacctgcggccagtaccgcatcgtggcgcacctgccagtcagctttgattttttcaatctgctccggcgttggattttccagcgcggcgacttctgcctgccagctaccgccgagcataatatcggtaccacggcccgccatgttggtggcgatggtgaccgcagccggataacccgcctgagcgacgatatccgcttcgctggcgtggaacttggcgttcaggacgttgtgcttgatgccggctttcgtcagttcgcgggaaaccacttcagatttttcgattga

SEQ ID NO: 108259 - DNA, 459 bp, Enterobacter aerogenes; identical to SEQ ID NO: 87432

SEQ ID NO: 108260 - DNA, 1005 bp, Enterobacter aerogenes
gtgaaactggatgaaatcgcccggctggccggtgtttcaagaaccaccgcgagctatgtgattaatggcaaagcgaagcagtatcgcgtcagcgataaaacggtcgagaaggtgatggcggtggtgcgcgagcacaactaccacccgaatgcggtcgctgctggcctgcgcgcaggacgcacgcgttcaatcggtctggtgatcccggatctcgaaaataccagttatacccgtattgcgaactatctggagcgccaggcgcgtcagcgcggctaccagttgctgatcgcctgctcggaagatcagccggataacgaaatgcgctgtattgagcatctgctgcagcgtcaggtggatgcaattatcgtttcgacttcgctgccgccggagcacccgttctatcagcgctgggcgaacgatcctttcccgattgtcgcgctcgaccgcgcactcgatcgtgaacactttaccagcgtcgtcggcgccgatcaggacgacgccgagatgcttgccgccgagctgcgcaaattccccggtgaccgagtgctctatctgggagcgctgccggagctgtcagtgagcttcctgcgcgagcaggggttccgttcagcctggaaagacgacccgcgcgaggtgaacttcctctatgccaacagctatgaacgcgaagccgcggcccagctatttgaaaagtggctggaaacgcatccgatgccgcaactgctgttcaccacctctttcccgctgctgcagggggtgatggacgtcacgctgcgccgtgagggcaaactgccatctgagctggccatcgccaccttcggtgataacgaactgctcgacttcctgcagtgcccggtgctggcggtcgcgcagcgtcatcgcgacgttgccgagcgcgttttagagattgtactggcaagcctggatgaaccacgtaagccgaaaccgggtttaagtcgtattcgtcgtaacctctatcatcgcggaagtttgaatcgtcgctga

SEQ ID NO: 108261 - DNA, 492 bp, Enterobacter aerogenes
atgcgccggatattatctgtattactggagaacgaatcgggagcattatcccgggtgatcggcctcttttcgcagcgcggctacaatattgaaagcctgacggtagcgccaaccgacgatccgacgttgtcccgcatgaccatccagacggtgggcgacgaaaaagccattgagcagatcgaaaagcaattacataagctggtggacgtgctgcgggtcagcgaactgggtcagggctcccacgtcgaacgtgaaatcatgctggtgaaagtgcaggccagcggttatggccgcgaagaggtgaaacgcaacaccgagatcttccgcgggcagattattgacgtcacgccatctatttataccgtgcagttggccggaaccagcgataagctggatgcgttcctggcttctttacgcgatgtcgcgcgcattgttgaagtggcgcgatccggagtagtcggcctgtcgcgcggcgataaaatcatgcgctaa

SEQ ID NO: 108262 - DNA, 1353 bp, Enterobacter aerogenes
atgaaagtgtggccggcgtcattgcagtcgcgcttaatgataatgatttttctcgctctgctgctcgctaatgccctgacgctatcgcttctgctctacgagcgcatgagcagcgcccgtagcgtcatgctgggcaaccttgaatacgatgtcgccaccagcgtggctatccttgatcgtcttcctgcgcaagaacggccgcattggttggcgcgtctggcgcgcggtaactaccgctatcagctttctgccggacaaactggcgattatcccaccagctggcgtacccgtgatgcggtacgctcgttacaggaagccctgagcggtcgctatcctgtgagtattatcgccgtccctggaccgcgcgaacatattcaggcccacgtgacactgcgcgacggcgcgccgttaagcattgacctgtggccaaagctgccggccatcgcacgttggctaccgctggtgctggtcgcgcagtttctgttactactattttgcgcctggtacgccgtccgccaggtggtcgcgccgatgacccgctttacccgcgccattgatacgctgcaaccggctactccggctgcagggccgctggccgagaagggaccacaagaggtgcagcgcgcggcgcgcgccttcaacgcgatgcaaaagcgaatacaggaccatttgcaggagcgcgcgcggatcctggcggcgatctcccacgatttgcagacgccgattacccgtatgaagctaagagtcgagatggccgaccaaccggcgctccgcgataagctgttacaggatctcgatagcatgacccgactggttcgcgaaggcatcgcgctggcacgatcggccgaaccgctggcagaagcgccgcagcggatgagtctcaatgcgttactggatagcatcgcctgtgattatgccgatatcggtaaagcggtcagttttcgtggcggtaaaggggcggacgtcatgacgcttcagccgcaggcgctgcggcggatcatgagtaacttaatcgataatgggctgaaatacgccgaaaaggtggaaatcagcctgagttacccgccgaatggcgatgttatcattcacgttgttgatgacggccccggcatcccggaaggagagctcaccgccgtactgcagccgttctatcgcctcgagctgtcacgtaatcgcgataccggcggtaccggtttggggctggcaatcgccgcccagctcgccgggcagatgcagggaagtttgaccctgcacaatctgcaacagggcggtcttgaggcgcgggtacgtctcaatgccgccgttttgtatccttctgtatccattccaactgcagataaatccatatactaa

SEQ ID NO: 108263 - DNA, 1020 bp, Enterobacter aerogenes
atggcgatttttgatggtcacaatgacctgctgctcaatttatggcttcaccatcgcgatgatccttcaaccgctttctttgccgggattgagaacggtcatctcgactatccgcgcatgctgcaaggcggatttgccggcgggctattcgcgctattcgtgccaccgcaggaatatattgcccgtatggcgccgcaatacgccagccaacgatgggatccgatcgatatcctctggcagcaactggccatcctgaagcaacttgtcgcgcactccgctggacgcttgcgattatgtctgagcgcggcggatatcgaacgatgccgcgaggataacgtactggcaatggtggcgcatattgagggcgccggaggttttgatggcgagggcggcgacctgcaggccttctatgccgccggggtccgcagcattggtccgttctggaacattgcaaaccgcttcggcagcggcgttaacggttcctttcccggcagcccggacactgggcctggactgacagcggcaggtatcgatctgattaagcaggccaatgccttgaagatgcagattgacgtgtctcatatgaatgaaaaagcgttctgggataccgcccaacactcgacgtcaccgctggtcgccacccactcgaatgcccacgcgctatgcccgcagccgcgtaatctcaccgatgaacaactgcgggcgattcgcgacagcggcggcgtggtcggcgtcaatttcggcaacgctttcctgcgcgccgacggcaaacgcgacagcgacaccccattagctaccatcgttcaccatatcgactatcttattaacattatcggcgacgatcacgtggcgttggggtccgattttgacggcatcaccctgccggacgaattgggcgatgttagcggtttaccacggctaatcaacgcgttgcgccatagcggttatgaacaattggtgctggataaactgctttggggcaactggcaaaaggtattaaaaaatgtttggcaacaatag

SEQ ID NO: 108264 - DNA, 513 bp, Enterobacter aerogenes
atgaaggacaccaccttcaccccatcgccggatcagtgtcaacgcttgatggtggcggagaaaggcgccagcccgtgtaataacaccctcgcggccatcggcagcggcggcgtgtattcgaccccgggcgatatgatgcgctggatgcagcagttcctctcttcggatttctatactcgcggccagcaggccgatcgcatgcagacgctgatttatcaacgtacccagctcacccgagtgatcggcatggatgttccgggtaaagccgatgcgctgggtcttggctgggtgtacatgaagccgaaaaacggccatccgggcattattcagaaaaccggcggcggcggcggatttattacctatatggcgatgaacccgcaggctaacgtcggggtcttcgtggtggtgacccgttccgcgttgacccgtttcagcgccatgagcgacggcgtcaacgacctcgtcagcgccttaagcggcgtgcagccgaatatggaaaccgccagccagtaa

SEQ ID NO: 108265 - DNA, 687 bp, Enterobacter aerogenes
atgcgtttatcaattattttggtggcgcccgccagggcggagaacgtgggcgcggcggcgcgagcgatgaaaaccatgggattcagcgaattgcggattgtcgatagcgaagcgcatcagcagcccgccgcgcgctgggtggcgcatggttcgggagatattttagataatataaaaacctacccgacgcttgagcaggccctgcacgatgtcgactttaccgtcgccactaccgcccgcagtcgcgcgcgttttcactactacgccacgccgcagcagttgctaccgctgctggaagaaaaagcacaatggatgaaacatacggcgctggtctttggccgtgaagattccggattaactaacgatgaactggcgctggccgatgtgcttaccggcgtgccgatggtcgccgattatccctccttgaatcttgggcaatcggtgatggtgtattgctatcagctgagctcactgcagcagcagactgcggttcagcagcctgaaaccgacgaaaaacaactgcaggcgcttcgtcagcgggcgctttcactacttggacggttgggggtcgatgacgacatgaaactggccgactggctacaacagcgaatcgggctgttacagcagcgcgacaccgccatgctgcatcgtttgttgcatgatattgaaaaaagtcttccggaataa

SEQ ID NO: 108266 - DNA, 717 bp, Enterobacter aerogenes
atgcagaccccgcacattcttatcgttgaagacgagttggtaacacgcaacacgttaaaaagtattttcgaagcagaaggttatgatgtattcgaagcgaccgatggcgcggaaatgcatcagatcctgtctgaaaatgatatcaacctggtgatcatggatatcaacctgccaggtaaaaatggtcttctgctggcgcgtgaactgcgtgagcaggctgacgtcgcgctgatgttccttaccggccgagacaacgaagttgataaaattcttggcctcgaaatcggcgccgatgactatatcactaaaccgtttaacccgcgtgaactgactatccgcgcgcgcaacctgctctcccgtaccatgaacctcggtaccgtgagcgaagagcgtcgcagcgttgagagctacaagttcaacggttgggaactggatatcaacagccgttcgttggtgagcccaaacggcgagcagtataagctgccgcgcagtgaattccgcgcgatgctgcacttctgcgaaaacccgggcaaaatccagtcgcgcgcagagctgctgaagaaaatgaccggtcgcgagctgaagccgcatgaccgtaccgtggacgtgaccattcgtcgcattcgtaagcatttcgaatccacgccggataccccggaaatcatcgccactattcacggtgaaggttaccgcttctgtggcgatctgcaggaataa

SEQ ID NO: 108267 - DNA, 1356 bp, Enterobacter aerogenes
atgatgaaatcaccgttgttctggaaaattagtacgttgttgggctgtattttgctgttgtccgtgccgctgatgatggtcagagcgcttattgtcgagcgggcggactatcgtagcgatgttgtggatgcgatagagcacagcaccagcggttcacaaaagctggccgggccgctgatcgccatcccggtaaccgagacgctgacccgaatggagaaccaaaaagaggtcgaatatcagcgtagctggatctactactggctaccggaatcgctggcggtcagcggcgcgcaaaatgtggagtcgagaaaagtcggcatttacagtgggcaggtctggcataacaccctgcaaattaaggcgcagtatgatcctacgcggctgacggagctgaaaaaagcgaataccacgttaggaaagccgtttttagttctcagcgtgagcgatgcccgcggcataggcgccatcaacgcgccagtcattaacggtacggcactggtcgttgaaccggggctgggattgaacggcggcggtatgggcattcatatgccgatgccggcattaaccgcagacaacaaaccgctggagattgcttttaccctcgatcttaatggtaccggcgacttctccgtcgtaccgttgggccgcaacagcgagctgcggctaaccagtaactggccgcatccgggattcctgggcaacttcctgcctacaaagcgcgaagtgagcgcctcgggttatagcgcgcactggcaaagcagctggttcgccaacaatatgggcagctatttcaacgatgataccgatattgaatggccgcgtttacccgccttcagcgtggacgtgatgtcgcaggccgatcaatatcagctcaccgatcgggcgactaaatacgccatcctgttaatcgcgttaacttttatggccttcttcgttttcgagagcctgacgcatcgccgtctgcatccaatgcagtatctgctggtggggttatcgctggtgatgttctacctggtgttgctggcgctctcggaacatgttgggtttacgcctgcctgggtcgttgccagcctgattggcgcggtgataaacggcgtttatttacaggcggtactgaaagggtggcgtaatagtctgttatttgttgcagcgctactgctgctggatggcgtgatgtggttactgttgcgttctgaggatagcgcgttgctgcttggcaccggagtgctactgctggcgctgtgcgcgttgatgttcctgacccgccgcgtggactggtacgccttgtcactaccgcaaagcaatccggaaaaaccgcaaagtaaggatgacgacacgttacgtatctggaagtaa

SEQ ID NO: 108268 - DNA, 1275 bp, Enterobacter aerogenes
gtggcaaagaacattcaagccatccgtggcatgaacgattatctgccgggcgaaaccgctctctggcagcgcattgaaggctcactgaagcaggtgctcggtagctacggttacagcgaaattcgtttgccgattgtagagcagaccccgttattcaaacgcgcgatcggcgaagtgaccgacgtggttgaaaaagagatgtataccttcgaagaccgcaatggcgatagcctgacgctgcgtccggaaggaacggcgggctgcgtacgtgccggcatcgaacatggtctgctgtacaatcaagaacagcgtctgtggtacgtggggccgatgttccgccacgagcgtccgcagaaagggcgctaccgtcagttccatcagattggcgcggaagtctttggcctgcagggcccggatattgacgctgagcttatcatgttgaccgcgcgctggtggcgcgagctgggcatttccgatcatgtcagccttgagctgaactccatcggttcgctggaggcgcgtgccgcctatcgcgacgcgctggttgcctatctggaacaatttaaagataagcttgatgaagactgcaaacgccgcatgtataccaatccgctgcgcgtgctggactctaaaaatccggaagtgcaggcgctgctgaacgatgcgccggcgctgggcgattatctggacgacgagtccaaagaacacttcgccggtctgtgcgcgctgctcgacgccgctggaattcgctataccgtcaaccagcgcctggtgcgcgggctcgactattacaatcgcaccgtatttgagtgggtcacgaccagcctcggttcgcagggtaccgtctgcgccggcggccgttatgacggtctggtagagcagcttggcggacgcgcaacgccgggcgttggctttgcgatgggcctggaacgtcttgttttactggttcaggcagtcaatccggaatttaaagccgatcctgttgtcgatatatacctggtagcctccggtaccgatactcagtccgcagcaatgcgtctggctgagcaggttcgcgatgcgctgcccggcgttaagctgatgactaaccacggcggcggtaactttaagaagcagttcgcccgcgctgacaagtggggcgcgcgcgtcgcgctggtggtcggtgagtcagaaattgctgacggaaacgtggtagtgaaggatttacgctcaggtgagcaaactaccgtaacgcaggatagcgttgccgcgcatttgcgcacacttctgggttaa

SEQ ID NO: 108269 - DNA, 687 bp, Enterobacter aerogenes
ttgccgcgcatttgcgcacacttctgggttaatttcccggaaactattagtcaggagaaggactgcgtggaaactttcaacaacgaaaacgagcaggtcgacgccctcaagcgtttctttgccgagaacggtaaagcgctggccgtcggggtgattttagggatcggcgcgctggttggctggcgctactggacttcccatcagctggattcggcccgggattcctctctggcctatgagaatgccatttccgcactgaagtcagattcgcctgaaaccctgaccgcagcggagaaattcgccgccgacagcaaaaacacctatggcgcgttcgcatcgctggagctcgcgcagcgtctggtcgataaaaacgatctgcagggcgcggagaagcagctgcaacaagggctggcggccgcctctgacgataacctgaaatcggttatcaatatgcgtctggcccgcgtacagctgcagcttaagcagccggatgcggcgctgaaaaccctggaaggcattaaaggcgaaggctggaccgctatcgttgccgatttgcgcggtgaaattctgctgagcaaaggcgacaagcagggtgcccgcgcggcctgggaagcaggcgtgaaaagcgatgcatcgccagcgctcagcgaaatgatgcgtatgaaaataaataatttgtccatctga

SEQ ID NO: 108270 - DNA, 1179 bp, Enterobacter aerogenes
atgcaattgcgtaaattacttttgccagggctgctttccgtcaccttactgagcggttgctcgctgtttaacagcgaagaagatgtggtgaaaatgtcacctctgccgacggtggaaaaccagtttacgccgtccacgtcctggagcacttcagttggcgatggtatcggtgatttctattccaacctgcacccggcctttgccgacggcgttgtgtatgcggctgaccgtaaaggcaccgtgaaagcgctgcacgctgaagacggtaaagaagtctggtcagtgaacctggcggaaaaagacggctggttctcgcgcgccccggcgctgctctccggcgggctgaccgtttccggcggccacgtttatgttggtactgaaaaggcgcagctgttcgcgctgaataccagcgacggtaccgtcgcgtggcagagccgtgtggcgggtgaagcgatttctcgtccggtcgttagcgatggcatggtactggtgcataccagcaacggtcagctgcaggcgctgaacgaaaccgacggcgcggtaaaatggaccgtgaacctggacatgcctgcgctctccctgcgcggtgagtccgctccggccaccgcttatggcgcggcgattgtcggcggtgacaacggtcgcgtcagcgccgtgctgatgcagcaggggcagatgatttggcagcagcgtatttctacggccaccggcccgactgaaatcgaccgtctgaacgacgttgacaccacgccggttatcgttaatggcgttgtttatacgttggcttataatggcaacctgaccgcgctggatctgcgcagcggccagattatctggaaacgcgaactgggttctgtgaacgatttcatcgttgacggcgaacgtatctatctggtcgatcagaatgaccgtctgctggcgctgaccaccgatggcggcgtaacgctgtggacccagagcgatctgctgcaccgtctgctgacctctccggcgctgtataacggcagcctggtggtaggcgacagcgaaggttacatgcactggattaatccggaagatggccactttgtggcgcagcagaaagtcgatagctccggtttcctgaccgacccggttatcgccgacggtcgcctgcttatccaggccaaagacggtacgctgtattcgatcacgcgttaa

SEQ ID NO: 108271 - DNA, 1479 bp, Enterobacter aerogenes
atgatacctgtggtcgcgcttgtcgggcgccctaacgttggaaaatccacgctcttcaaccgcttaacgcgcactcgtgacgcgttggtcgcggatttcccggggctgactcgcgaccgtaagtacggtcgtgctgaagtggaaggccgcgaattcatctgtatcgataccggtggtatcgacggtacagaagaaggcgtggaaacccggatggcggaacagtctctgctggcgattgaagaggccgatgtggtgctgtttatggttgatgcgcgcgcgggcctgatgccggcggattccgcgatcgccaaacatctgcgttctcgagaaaaaccgaccttcctggtggcgaacaaaaccgacggcatcgacgtcgatcaggcgatggccgacttctggtcgctggggctgggcgatatttatccgatcgccgcttcgcatggtcgcggtgttaccagcctgctggaacacgtgctgctaccgtgggtagatgaggttaatccgcaggaagaagtggatgaagacgccgcctactgggcgcagtttgaagccgagcaaaacggcgaagaagttgaagaaccggaagacgacttcaacccgcaagatctcccgattaagctggcgatcgtcggccgtccgaacgtcggtaagtcaacgctgactaaccgcattctcggcgaagatcgcgtggtggtttacgatatgccgggcacaacccgcgacagtatctacatcccgatgcagcgcgatgaacgcgaatatgtgctgatcgataccgccggcgtgcgtaagcgcggcaaaattaccgatgtcgtggagaaattctcagtcatcaagacgctgcaggcgattgaagacgccaacgtggtgatgctggtcattgatgcccgtgaaggtatctccgatcaggatctgtctctgctgggctttatccttaatagcggtcgttccctggttatcgtggtcaacaaatgggatggcctgagccaggaagtgagagagcaggtgaaagaaaccctcgacttccgtctgggcttcatcgacttcgcccgcgtgcactttatctccgctctgcacggcagcggcgtcggcaacctgttcgaatcggtgcgcgaagcttacgacagcgccacccgtcgcgtgggtaccgccatgctgacccgcattatgaccatggcggcagaagaccatcagccgccgctggtacgcggtcgccgcgtgaagctgaaatatgcgcacgccggcggttataacccgccgatcgtggtgattcacggcaaccaggtgaaagacctgcctgattcctataagcgttacctgatgaactacttccgtaaatccctggatgtcatgggtacgccgatccgtattcagttcaaggaaggggaaaacccgtttgccaataaacgcaataccctgacgccgaaccagatgcgtaagcgtaagcgcttgattaagcatatcaagaaaagtaaataa

SEQ ID NO: 108272 - DNA, 603 bp, Enterobacter aerogenes
atgtcctacgcgggggcggcgaatttactgacgctgatcctgttcccacggctggtaaaagggctgtcgcggcgcattctgtgggcgggggcatcgatcatgccggtgctgggctgtggcgtgctgttgctgatggcgctgagcggcgtttacaacctcgcgctgatttcgctggccggagtgctgttgaatatcggcaccgcgctgttctgggtgctgcaggtcattatggtggccgataccgtcgactacggcgaatatacgatgaatatccgctgcgaaagcatcgcctactcggtgcagacgctggtggtcaaagctggttcggcgtttgcggcctggtttatcgccatcgtgctgggtatcattggctacgtgccgaatgttgtgcagtcgtcccacacgctgctggggatgcaggcgattatgattgcgctgccgacgctcttttttgccctgacgctgtttctctatttccgttattacaagctgaatggcgatatgttgcgacgtattcagattcacctgctggataaatatcgtcgggtaccggaaaatgtcgtcgagccggaacggccgattgtggtacccaatcaggtgtaa

SEQ ID NO: 108273 - DNA, 957 bp, Enterobacter aerogenes
atgcgcatttttatcgatgatggttcaaccaatatcaaaatgctgtgggaacaagatggcgaaactttcacccatatcagccccaatagttttaaacgaggctggtctgccaccttcggcgccgggaagccatttaactacaccgtggatgatgaaaagtactctttcgacctgatcacccccgatgcgttacccaccaacaatattgattggcaatacagcccgttgaactccatcgctgtccaccatgcgctgttgaccagcggtctggaaccgcaggatgtcgagattgtggtcaccctgccgctgactgaattttatgatgaagatgcgcaatatcgtcttgataacattgagcgtaagaaaaagagcctgcttcgcgaagttaaactgaataaaggcgtggtgttcaatatcaccaaagtcaccgtgcgtccggaatccattccggcgggtatcagcctgtgtgatgagctgaaaccgtcgcattcggtgctgattgtcgacctcggcggcaccacgctggatatttcgatggtggccgggcaaatgacctcggtttcgcgcatttacggcgacccgaagctgggcgtgtcgctggtgaccgacgccgttaagctggcgctggcgcgggcgaataccgatacctccagttataacgttgatcagataatcatcaaccgccacgacgaagagtatttgaccgataacatcaacgatccggatgcggtatccgaggtgaaaaaggttatctccaatagcatcgaacgcctgacgactcgcgttctgacggcgattgatagttttaaaggctattcgcacgccatcgtgattggcggcggcgcgccgctggttgccgatgcgattcgcgaacgtatggggctgcgcgaagatcgctttgtggtggccgacgagccgcagttcgccctcgtgcgtggtctgaaaattattggttaa

SEQ ID NO: 108274 - DNA, 372 bp, Enterobacter aerogenes
atgactctggatcgcagaaaggttctgatatacctgcgcccggatatcagcgccagcgagcgctttgcggacgcgaaaattgaggcccatcatcgcggcgatcgcggggatatgtcgcgtacggcgctgttggcagggttagcgctgggtgaagttgatagccggctgccgtcaatgctggcggcgctgctgacggaagatacgccaccggagacgctgcgcagaatgctggcctcgtttcttgagattcagccggcgtcttccgctccggcatccgcgccagcggccgcgccggtaaaggcgcccgagccgccagccccggtgagcgagagcgtctccgcgcgtaatctcgccggctcgctgccggattaa

SEQ ID NO: 108275 - DNA, 2337 bp, Enterobacter aerogenes
gtggatatcgtctttaatggtcaatacctcgatacccaaactataaaatttgtgattgataatagccgtgaaagtcttgcgagtgatgagattaaactagcaccctgtttcagtctgaaagacttatcgcaatatggcgtaagaatcaaagcatttccggccttgaaagaagatgctaatggctgcactaacctcacgattattccggataccaaagcggattttgattttaacgcccagcgtttaaatgtctccattcctcaggcggcattatccactgtcgtgcagggatttattcccgaggatcaatttgatgacggtatcaacgcgctactggtaaattaccagttcagcggttcggatgatttcgaaaccgaagatgaatactacagtcttaaccttcagtccggcttaaaccttggcccctggcgcatacgaaacctgagtacttggaacaaaagtaaaggtgatagcggcgactgggagtcggcatacctgtacatgcagcgcagcatacgccctattaacagtaacctggtaatgggtgaaagctcctcgctttccgggatctttgacagcgtaccatttactgggctccaactcgcgacggatacctccatgctgccggagagccttcgcggctatgcgccaattatccgaggaattgcaaaaaccaatgccagggtgatcgttaagcagaatggctaccaggtatatcagacctacgtagcccccggcgcctttgaaatcaccgatatgtacccaagcggcggtagcggcgacctgtatgtaacagtagaagagtcggatggctcaaaacaagaatttatcgtgccgttcgccacgctgccggtcatggtacgtgaaggccagctgcaatatgaaatcacttcaggtaaatatcgcccatatgatgacggcgtccatgaaacgccatttacccaggcaacggccagctatggggtatccagtagcctgacggcctacggcggggtgcaaatggcctcacattatcaggcattgtcatccggtctcggctataaccttggtgatttcggcgccgcgtcagcggatgtcacccaggcttggtcaaaaatgcaggatcgggaaaagacttcgggacagtcctggcgcatccgctacggtaaaaacatccttgataccggaaccaacattaccatcgctggctaccggtactctactgagggatttaacaccttatctgaggtgctggatagctatgctaatgacagtagctataccacccgttcattacgcaatcgaaccaacctgacactcaaccaaagcctgggtaaaggactcggtagcatatctattagcgggctggttgaggattattgggatgataaacgcaccaataaatctatcagcgtcggttataacggtggctttagaaatgtgaacttctatctgggctatagctatagccgctatacttggagtaacaatagctccgacagcgacgcgcaggacgatcagcgcattacgctgaccgtcacgctgccaatcagcaactggcttcctggtacctacaccagctatcagctcaccaatagtaacccaggctcaacggatcagtccgtcgccatcggaggggttgggctggaaaacgatagcctcgactggagtattcagcagggatatagcaaccgtgaatattacagcggcgacatgcgtgcgacctataacagctcccagggcagccttaacgccggttacagctatgaccgcgatagccagcgtgtcgattatggcgccagcggcagtatcatcgcccatgctgatggcatcactttaggtcaggatatcaccgatgccgccgtgctggttaaagctccggggctggatgacgtcaaactgacgaccgataacaccatctcgaccgactatcgcggctatgccatcgtaccttacgttaccccatatcgccgcaccgatattacccttgatagcgccacgctcggtgatgatatggaattgccggaaaccacgcaaagcgtagtacctacccgcggcgccatcgtccgagccaactacgaaggcaagataggacagcgcgcctttattcacctgaaaactgccagcggcaatgatgttccttatggcgctatggtcctactggcgggggatgcgaaaagccaggccagcatcgtgagtgatgccgggatggtctatatgtccgggttgcagcaaaccgggacgctcaacgtgcagtggggaaaaagtacttcccagcagtgtaatgcccccttcacgttaccgccacgggaaggcaaaaccgctggcttaagccaggtcgaaacggtgtgtcgctag

SEQ ID NO: 108276 - DNA, 798 bp, Enterobacter aerogenes
gtgcaccgataccagcacgccggaacgcacaagaaaagtccccagcaggcacagcgagaaagctgccagcgccagcagtaccgtccaggcgcggaagctgccgcgcttttcggttaccgccagcgaatgcagcaacgcggtgccgaccagccacggcataaacgaggcgttttccaccgggtcccagaaccaccaaccgccccagcccagttcgtaataggcccacgccgagcccagcacgatcccaagtgtcaggaacatccacgccgcctgcgtccacgggcgcgaccatcgcgcccacgcggtatccagccgccccgccagcagcgacgcaatcgcgaaggcgaaggccaccgagaagccaacgtagcccatgtagaggatcggtggatgaaaaatcatcccgatatcctgcagcataggattgagatcgcggccatctacgggatacagcggcaggctgcggctgaacggattggaggtgaacaggataaaaagcaggaaaccgaaggcgatcattcccatcaccgccagcacccgcgctaccgcgtcgggcggcatctggcgactgaaaagcgcgacggcgaacgtccacacgctgagcagcagcacccacagcagcaaagagccttcgtgcgctccccaggtggccgccaccctgtaccacaccggcagcgcgctgttggagttttccgccacatagcgcacggtgaaatcattgattacaaaagcatgcaccagcagcgcaaacgcgccgatgatgcagataaacagcgcgcaggccagcggccgggctaa

SEQ ID NO: 108277 - DNA, 138 bp, Enterobacter aerogenes
atgcccatgctggcgcgtatcggtaaagactcgccgttgatctccatcgtctgctcgccaataagcgtggcgctgcacggtgttgccggggcgatgagcacgtcggcatgggtgaatagcgacgcgacttgctgctga

SEQ ID NO: 108278 - DNA, 306 bp, Enterobacter aerogenes
atgctcaggcgggaggacttgcgggataatcataaacgcatttaccgactctacagcgagcaggggctgtatccgaatcatgtctggggcatggactttgtctctgatgccttatttgacgggcttcggttacgtctgctgacagtcattgatctctacacacgcgaatgtctggggaactgcgtgggccagaatctgcactcaacggaggtcgcagagatgctgaacaccattgcgctcagacgtcccttaccacagttgctgaaaaccgataacggctctgaatttgcagggaaaatgctgtga

SEQ ID NO: 108279 - DNA, 255 bp, Enterobacter aerogenes
gtgaataaccttgaccgggccggcgccgatacggtggccgatagctcgcccttcggcaatgatctgcccctgggcatgcagcgtataacgctccatcacctgaccgcgcgaacggacggtttccgggcgcgcctggacgataaacagcttaccggtatggccatctttcgcccactcgatatccattgggcgaccgtagtgcttctcgatctgcaccgcctgcttcgccagctcttccacttcctcgttggttaa

SEQ ID NO: 108280 - DNA, 369 bp, Enterobacter aerogenes
gtggcgaacaccggtgaaggcctccagccgatccggctccagataaatcatccggtagcgccagccttcggcggtttccgcctcgccggtatggagctcatccggattcatggtgacgatggaattggcagaggcgacgtgctggctgccgcgatagcgaaagcgttcggcgccttgttcaatcacgccgatgccgaaggcttcatgggtatgcggttcaaaggcataacgggaaatatgggcgtgatagagctcaacgccgggaagttgttcgagatggcgaaagcgcgcgtggtctttttcatcgctaaattgtggtggtacgccctgcatgccgtgtctcccgacgattcatcccttcaatattag

SEQ ID NO: 108281 - DNA, 267 bp, Enterobacter aerogenes
ttgcgtctggtctggctgttcatcctgaatggcttcaggcgccacaggcgcaacctggtcggcatcgctgaccgtcggtgtattggtgattggcggaagcggcacggcctgattgcccgaaccttgcggctgagactgggactgcagatcgagattagcttcgcggctggcctgggtcggcgtgctgttatcgccggaggggagcaggaaaccaataatgaccagcaggaagccggcgatgatgccgcggcgatgcatgggcggtag

SEQ ID NO: 108282 - DNA, 204 bp, Enterobacter aerogenes
atgcgccagcagaacgctgaagaacgtcccggtggcattcataatcgatcccttcactccggtggtgaatgccaggccaacgtagaagaaggcgtactggatagcggtctgcgtcagccccagcatcgccagctgcccgcactggcggccattgagccgggcgatgggtttgcgctgcgcgagcgcaaacagcagcaacaataa

SEQ ID NO: 108283 - DNA, 198 bp, Enterobacter aerogenes
atgaatgcaacaatttggctggcactggcgctggttttagttctcgaaggtcttggcccactgctttatccccgcgcctggcgcaagatggtagcgaccatgagccaactgccggataatttattgcgtcgctttggcggcggtcttgtggtggctggtatcgtcatctactacatgttgaggaaatcgattggctga

SEQ ID NO: 108284 - DNA, 684 bp, Enterobacter aerogenes
atgaacgaaatattgagtcagtgggacttcgccgtcattttgctacaaatcatcgccatcgatttgttattaggcggcgataacgcggtggtcatcgccatggcctgccgcaagctgccggcgcatctgcgcaccaaagccattgttatcggtactctcggcgcgattatcgccagggtcgcgctgctggcggtggcaatctatttactgtcgttgccgtggcttaaaatcgtcggcgcgctactgctactgtggattggcattaagctggtcgccaacgaggaagaagagagcgatatcagcagctcaagcagcctatggcgcaccgccgtcaccatcaccgtcgccgatgtcatcatgtcgctggataacgtactggccgtggccgccgccggtaaaggccatctgttactggtggcgctaggggtattaatcagcattccgattattgtcgccggtagtaagctggtgttggcaatcctgactcgctttccctcggtcgtattactgggcggcgcgctgattggctggattgccggttcaatgatgataaccgacccgacctttgttcagctgttcccccattccccgaattatctacattttgttgccggggccattggcgcggcgttggtgctgctggaaggatggcggcgcaactaccgccccagcaccccagaataa

SEQ ID NO: 108285 - DNA, 792 bp, Enterobacter aerogenes
atgtctggcatcaagaatctacttattctcgccctggcgggcgcttccctgctgccggcgctggccagcgccgctgacgcgccggccgcgactttcaccgcggagcaggaagcgcgtattggcaaaatcgccgctgactacctggtcgctcatccggaagtgctattgcaggccagccaaaagctgcagcaaattcaggcggaacagcaggccagcgccgctacccaggcggtaatcaagaatgccgacaagctgacgcaggataaggccacgccaacctacggcccggctaacggtaaagttaccgttatcgagttcttcgattatcaatgcatctactgtagccgcctcgcgccggttatggagcaggtaattaaagaccatccgcaaacccgctttgctttcaaagagtggccgattttcggcagccgctgggcaacctcgctggacgcggcgaaaaccggcctgcagatttatcagcagaaaggggccgaggcctacctgacttaccacaacggcgtttacgccaccgggcataacgaaggtaaactgacggcggcggatattcagcagcaggcgaagaaggtgaactttgacgccaaaaaagcggcggatgtcgaaccggcgctggaaaacattaaccagctggcgcaggagattggcttaagcggtacgcctggcgtgattgtcatgccgactaccggcgcgaccgaagcgaccattaccgtcttccctggactggctgacaaagcctcgctggatgcggcgattaagaaagccggcggccagtaa

SEQ ID NO: 108286 - DNA, 435 bp, Enterobacter aerogenes
atgaacgaacaaaccctgatattaaccgagcatcgtatgctgccgcggatctttgacggcgtgttaaccgctatcgcgtgggccggcttcgccttttttctgtatgccaacctgctgatgcagtttaccgagcgcggtaacgacagctgggacgcaattatggcgtcgtttaataccgtgctggtctatttactggtagcggcaattaacggctggctgctgattttgtggtatcagtacaatctacgccgttataacgcccggcggcacggcagcatggcctcgctgcgccatgaagagctggcagagagctttaatatcgcgccgcagatcatttccgagatgagccaatataacctgctgacggtataccacgaccagattggcagaatcattgatttaaaaatcaatcagagccaagaagacgaacgctaa

SEQ ID NO: 108287 - DNA, 1332 bp, Enterobacter aerogenes
atgactgatcgcattatcgcattttcgattttatgcctggttttcgggctgcctctgggcgtggccgccgttttcaccggcgagttgatactggatttcgtctttttttggccgctgtttatgtcggtgctgtggataaccggcgggctctacttttggtttcaactggagcgccactggccgtggggtaaagagaccccgccgccggagctggcaggtaatccgttgatctccattttgattccctgctttaacgaggagaaaaatgcccgcgagaccatcgaagccgcgctggcgcagcgctatcgcaacattgaggtgatcgccatcaacgacggctcctccgatgataccgccagggtgctgaatcaactggcggaagagtacgctctgctgcgggtgattcatctggccgaaaatcaggggaaagcggtagcgctgaaagccggcgccgccgccgcgcgcggggacttgctggtgtgcatcgacggcgatgccctgctcgatcgcgataccgccgcctacctagtggcaccgctgattcagtatccccacgtcggcgcggtgaccggcaacccgcgaattcgtactcgatcgacgctgattggccgcattcaggtcggcgagttctcttcgataatcgggctgattaagcgtacccagcgtatttacggccgggtgtttaccgtctccggagtgattgccgcttttcgtcgccaggcgctggcggacgtcggctactggagcccggatatgatcaccgaagatatcgatatcagctggaagctgcagctacgccattgggcgattttcttcgagccgcgggcgctgtgctggatcctgatgccggagacgctgaaggggctgtggaaacagcggttacgctgggcgcagggcggcgccgaggttttcctggtcaatctgcgccgcctgtttcgctgggagcatcaccggatgtggccgctgttcctcgaatatgccctctccacgctgtgggccttcgcctatgcggtcaccatttttctgttcatcgccagccattttgccccgctgccggaaaacctgaccgtccgcagcctttttccgccggaatttaccgggctactgctgggggtgatgtgtctgctgcagtttatcgccagcctgtacatcgaacggcgctatgaacgcggcgtcgccggctcgctgttctgggtgatctggtttccgatggtgtactggatgatcggcctgttaaccaccatcgtcgccttccccaaagtcatgttgaaacgtaaacgcgccagggctcgctgggtcagccccgatagaggtaaaggaagaatgtcatga

SEQ ID NO: 108288 - DNA, 963 bp, Enterobacter aerogenes
atggagctattaaccgatgacttgctggcgcgcagccctgaagacctgagcacgcaaaaattagtccgcgctcgcgaggtgcaccatatgtcggaattgcgtctcaacagtactcaggggatccactcggataacccggtcagcggtagccacgattttagctgggatgcggcgatttacggcccgccaatcgctgataactggcggcttttcgccggtaatcgcttcgccaaagggaattttgatgaaggaaaaggctccagccgccagctatttggcggtatcgaatggcgcccgcgtgatgcctgggctgaactggaaatctccaacaacaatttcgccggcgacaacaaacccggcgcccggctttccgcctggcaaagtttcaacgaccaatggcagattggcggcgaggtcgaacgtctgtcacggcagacgccgctgcgcgcgctgcgcaatggtatcagcgccaaccgcggcgagggctgggttcgctggtatcaaaacgaacgacgcgaatatcgcttcagcgccgccgccagccgcttctccgaccacaaccgtcgtcaggaatataccttctccggcaaagagcggctctggcaatcgccaaccatcacgctcgatctggaacctggactctccgccagcgccaacagccgggcggataccctctactacaacccgaaacgcgacttctccgccacctcggcgctggtcgccgatcacgtcatgtatcagcactacgataccgtctggagccagcagcttgcggcaggcggcggcgcctactggcaaaaagcgtattcggccggcgctatcgccatgttcggctacggccagcgtattcgctggaacaacgtgatcgacaccggcgtgatgctgaactgggacaagcgcccttacgacggcaaacgcgaaagcaatctctccattgcccttgatgcgaatttacggttttaa

SEQ ID NO: 108289 - DNA, 426 bp, Enterobacter aerogenes
gtggttattcgctatgaagggcctaaaggcgggccgggaatgcaggagatgctctatccgaccactttcctgaagtccatggggcttggcaaagcgtgcgcgttgatcaccgatggccgtttctccggcggcacctccgggctttccatcggccacgtatcgccggaagccgcgagcggcggcaacatcgcgatcatcgaagatggcgacatgattgctatcgatattccgaaccgcggtattcagctgcagctcagcgatgccgaaatcgccgcccgtcgcgaagcgcaagaagcgcgtggcgataaggcgtggacgccgaaagaccgcgagcgccaggtctccttcgcgctgcgcgcttacgccagcctcgcgaccagtgccgacaagggcgccgtgcgcgataaatcaaaacttgggggttaa

SEQ ID NO: 108290 - DNA, 1545 bp, Enterobacter aerogenes
atggccgagtcgcaacccctatccgccgcccctgagggggcggagtatctccgggcggtactgcgcgcgccggtttatgaagcggtgcagaaaacgccgctgcaaaaaatggataagctctcttcgcggctggataacgttattctggtgaaacgcgaagaccgccagccggtgcatagctttaagctgcgcggcgcctacgcgatgatgtccggcctgacggcggaacaaaaatcaaatggcgtgatcaccgcttcggcgggtaatcatgcgcagggcgtggcgttctctgcctcccggctgggtgttaaggcgctgatcgtgatgccggtagcgaccgccgatatcaaagtcgatgccgttcgcggctttggcggcgaagtgctactacacggcgccaactttgacgaagcgaaagcccgcgcgattgagctggcgcagcagcaggggtttacctgggtgccgccgttcgatcacccgatggtcatcgccggtcagggaacgctggcgctggagctgctgcagcaggatgcccacattgaccgcgtattcgtcccggttggcggcggcggtctggcggcaggcgtggcggtgcttatcaagcagctgatgccgcagattaaagtgatagcggtcgaagcggaagattcggcgtgtctgaaagcggcgctggatgccggtcacccggtggatctgccgcgcgtcggtttgttcgctgaaggcgtggcggtgaagcgcatcggcgatgaaacgttccgtgtatgccaggagtatctggacgacatcatcaccgtcgatagcgatgctatctgcgcggcgatgaaagatctgttcgaagatgtgcgggcggtagcggagccctccggcgcgctggcgctggcggggatgaaaaagtatatcgcccagcataacatccgcggcgagcgtctggctcacatcctgtccggcgccaacgttaacttccacggactacgctacgtttctgagcgttgcgagctcggggagcagcgcgaagcgctgctggcggtgacgataccggaagagaaaggcagcttccttaagttctgtcagctactgggcggccgttcggttaccgagttcaactaccgttttgccgatgccaaagatgcctgtattttcgttggcgtgcggttgagccgcgggctggatgagcgtaaagagatcctcgatttactgagcgaaggcggctacagcgtggtcgatctttccgatgacgaaatggcgaaactgcacgtgcgctatatggtcggcggacggccgtctaaaccgctgcaggagcgcctgtttagcttcgagttcccggaatcaccaggcgcgctgctcaagtttctgcacacgctcggcacccactggaatatttcgctgttccactatcgtagccacggcaccgattttggccgcgttctggcggcgtttgagcttggcgagcatgagccggacttcgaaacccgtcttaatgaactgggctacgagtgtcatgacgaaacccataacccggcgttccgctttttcctcgcgggctag

SEQ ID NO: 108291 - DNA, 1386 bp, Enterobacter aerogenes
atgactgagaaaaaagcggaactccagcgtggactggaggcccggcatattgagctaatcgcgctaggcgggacgattggcgtagggttattcatgggcgcggcaagtacgctgaagtgggccggtccatccgtcctgctggcgtatattatcgccggtttatttgtcttctttatcatgcgttcgatgggcgaaatgttgttcctcgaaccggtaaccggctcattcgccgtttacgcgcaccgttatatgagcccgttcttcggctatctcacggcctggtcatactggtttatgtggatggcggtgggaatatcagagatcaccgccatcggggtatacgtgcagttctggttcccggagatggcgcagtggatcccggcgctaattgccgttgggttggtagcactagcgaatctggcggcagtgcgtctgtacggcgagatcgagttctggtttgcgatgattaaagtcaccaccattatcgtgatgattgtcattggcctgggcgtcatcttctttggcttcggtaacggcgggcagtcgatcggttttggcaacctgaccgagcacggcggcttcttcgccggcggctggaaaggcttcctgacggcgctgtgtattgtcgtcgcctcttatcagggcgttgaacttatcggtatcaccgccggggaagcgaaaaacccgcaggtcacgttgcgtagcgcggtgggtaaggtgctgtggcgtatcctgattttttacgtgggcgcgattttcgttatcgtgactatcttcccgtggaaccagattggatcgaccggtagcccgttcgtcctgaccttcgccaaaatcggcattaccgcggcggcggggattatcaacttcgtggtgctgaccgcagcgctgtcgggctgtaacagcgggatgtatagctgtgggcgtatgctgtacgcgctggcgcgcaaccgtcagctaccggcagcaatggccaaagtgtcgcgtcagggcgtgccggtggcgggcgtcgcgctgtcgatcgtgattctgctaatcggttcgtgcctgaactacattattcctaacccgcagcgcgtgtttgtctatgtctatagcgccagcgtgttgccggggatggtgccgtggtttgtgatcctgattagccagctgcgttttcgccgcgagcatcagcaggcgatggccagccatccgttccgttcattgttgttcccgtgggcaaactatttgacgatggctttcctcgtttgtgtgctgatcggcatgggaattaacgatgaaacccggatgtcgctctttgtcggaatgattttcctcgccgcggtgacccttatttataaggttttcggcctcggcaagcggggaaatctcgataaaacggcggaataa

SEQ ID NO: 108292 - DNA, 573 bp, Enterobacter aerogenes
atgcgcgtaccctctcgttttctctttcctcttgctgccaaaccgcgtttatcgctaccccgattactgctggcgatcatcatcgttggcgcgcttatcggcggggttatcgccgcactgggctctggcgcatggtgggttctgctggtgctgctcattgttacgatcgtcagcaatcgccgctggcgaatgcggcgggcaaaactagccgaacagcgcgccggccagactatttgccaattcgcgcgtgccttcgatatttctcttgtcgatagctgggtgatccgcgccgtgtggttaacgctggataaccagcttaaccagtcaatgccatcagcacctgcgctggcttttgccgccggggatcggctggatgaggatttggagttggttggcgatgatgatgacctgtatgaattattacaagaggccgcccagcgctgcggccgggatctcagcgggctcgaggataatccctggctgccggtgctgacggtgggcgatatggtgcgagccctcaacgcccaaccgatgacgcccgctcgccaacagcggatcgttatccacccctga

SEQ ID NO: 108293 - DNA, 561 bp, Enterobacter aerogenes
atggcgaaagccaacgtgggggatgaagagcaccgcgccgcgctggaacagctggcgtggattggactgatggataaagcgctggccgacggcggtagcgaagggctacgcgaatggtggcgcaatcagagtcgtaaaacgcgtgcgctgataccgctacaggtggcaatggccgaacgcctgatcgaaagcgacgatcacgataccgcacagcagattattatcgatggtctgaagaaacagtatgatgaccgcctggtcatgccgatcccgcggctgaagaccaataatcctgagcaactggaaaaagtgctgcgccagcagatcaaagccgtcggcgaccgtccgctgctgtggagcaccctgggccagtcgctgatgcgtcacggtgaatggcaggaggccagtatcgccttccgcgccgcgcttaagcaacgcccggatgcctttgattacgcgtggcttgccgatgcgctggaccgcttgcaccagccggaagaagcggcgaccatgcgtcgtgacggcctgctgttgacgctacacaataaccctcagcagtaa

SEQ ID NO: 108294 - DNA, 489 bp, Enterobacter aerogenes
atgtctcaaaactcccttccggcaaccgcgcccaaacgccccttactgatcatcctgctgacgatcgtcgccgtggccgcctgcgcagccgcaggttacagctggtggctgctgcaacagcgcgacggcggcgcgcaaaccgccatcgaaaaggaaaaaccgcccgcgccgccggtatttatgccgctggataccttcaccgtcaatctggtgaccccggacaacgatccggaccgcgtactgtatatcggcctgacgctgcgcctgccggatgaagcaacccgccgccagcttaatgatttcctgccggaggtacgcagccgcctgctgatgctgctctcgcgtcaggaggccggtcatctggccaatgagcagggcaagcagcagctggtcgcgcagatcaaagagacgctgagcgcgccgctggttaagggacaaccgaagcaggtggtcagcgatgtgctgttcaccgccttcatactgcggtaa

SEQ ID NO: 108295 - DNA, 1179 bp, Enterobacter aerogenes
atgaatctcaatgctttgcccgcccttagcctacccggcgacgccagcgccctgccggatctggcgctcgatgacgctcagctgtcatctgcctttgcgcaactgcttggcgcgcgcttcacgcccgcgcaaagcggcacgctgccgccggcggcgctgagcgccgacgatgaaagcgccccgccgctaagccgtaaccagcttaaccagctgctggccgcgcttggcgaacgcggcgcgctgctggtcaatgcgctaccggcatcggcggaaaacgccgtcgacgcaacagcgaaaaaagaggatacgcgcccggatacgccgccgctcagcgaggcgaaaactttagatccggcgacactgcaggcactgtacgccatgctgccggcggcaatcgtcgccccgccgccgcagaccgcgctaccgcaggctcaaccagctgcgaccagcggcgataaaaccgcgctccacatcggcaacgcggcgactcagcatgtcgcgaacctgccggaaggcgaaccggcggcgaagccgcagccgggcacggatccccttagcgggcaaaatctgccttctcctgttgtgcagaccgcgaccacgccgcagcacgatatggccgaacgtccggcggagaataccccatcgcaacctgccgccgtcgctttctccgccgccagccccagccagagcgccacgcccgccagtgcgctggtaaccgcgccgccgacgccgcagcttaatgcccagcttggtagcccggaatggcagcaggcgctgagccagcaggtgctgatgttccaccgcaacggccagcagagcgccgaactgcgcctgcatccgcaggagctgggggcgctgcagatcaccctgcagctcgacgataaacaggcgcagctgcacatcgcttccgcacacggtcaggtacgcgcggcggtcgaggcggctatgccgcagctacgtcacgcgctggctgagagcggaatcaacctcggtcagagcagcgttggcggcgaggcgacgccgcagtggcagcagcaaaacggtaacggtgaaggccgcgccagctacgctgaacgccatggcggcggcagcgatgccgcgccgattgagccagtcagcgccccggcagccctgcagcgaatggccaaccagctcaacggcgtcgatattttcgcctga

SEQ ID NO: 108296 - DNA, 447 bp, Enterobacter aerogenes
atgaaagcacagtcccctttgattaccctgcgcaatctggcccaggaggccgtcgaacaggcggcgcagcgtttgggccaggcgcgccaggcgcaacaggccgccgagcaacagctgacgatgttgcttaactatcaggacgagtaccggcaaaagctcaacagcaccctttctggcggcatggaaagctcgcgctggcagaactaccagcagttcattgccaccctcgaacaggctatcgaacaacagcgccagcagcttctgcagtgggggcaaaaggtggatcacgccgtgaagcagtggcaggaccatcagcagcggctgaacgcctacgataccctgcacacgcgcgcgcaaaacgccgagctgcagttggaaaacaaacgcaatcaaaaattgatggatgagttcgcgcaacgcagtacacaaaggaataccgcttcatga

SEQ ID NO: 108297 - DNA, 1362 bp, Enterobacter aerogenes
atgaccgcccgtctcggccgctggctgaattcgcttgaagcactggagcagcgtatcgcccgtacgccgactgtacgacgctatggccgtctgacccgcgccaccggtctggtgctggaggccaccggcctgcagctgccgctcggcgcaacctgccttatcgagcgcgacggcgggggcggcatgcaggaagtggaaagcgaagtggtcggctttaacgatcagcggctgtatctgatgccgctggaagaggtcgaagggatcgtgccaggggcgagagtttacgcccgcagcgcggcggacggccagcacgctggtaaacaactgccgctgggcccggcgctgctgggacgcgtgctcgacggcggcgccagaccgcttgacggcctgcccgcgccggaaaccggctatcgcgcgccgctgattaccgcgccgtttaacccgctgcagcgtacccctatcgagcaggtgctggacgtcggcgtgcgcaccattaacggcctgctgaccgttgggcgcggccaacgtatgggactgttcgccggctccggcgtcggtaaaagcgtgctgctgggcatgatggcgcgctacacccaggccgacgttatcgtcgtcggcctgatcggcgaacgcggccgggaagtcaaagactttatcgagaatattctcggcgccgaaggccgcgcgcgttcagtggtgatcgccgccccggcggacgtatcgccgctgctgcgcatgcagggcgccgcttacgccacccgcatcgccgaagattttcgcgatcgcggccagcacgtgctgctgatcatggattcgctcacccgctatgcgatggcgcagcgagaaatcgcgctggcgatcggcgaaccgcctgcaaccaaaggctatccgccatcggtattcgccaaactgccggcgctggttgaacgcgcgggcaacggtatcagcggcggcggttcgatcaccgccttctataccgtacttaccgaaggggacgatcagcaggatccgatcgccgattcggcgcgcgcgatcctcgatggtcacgtggtgctgtcccgacgtctggcggaggccggtcactacccggccatcgatattgaagcctcgatcagccgcgcgatgacgtcacttatcgatgacgaacattatcgccgggtacgcacctttaaacagatgctggccagcttccagcgcaaccgcgatttaataagcgtcggcgcctatgccgccggtagcgacccgctgctggataaagccattaccctgtatccgcaaatggagacctatctgcagcagggaattttcgagcgctgcggttatgacgaagcctgtctgcagctacagcagctgattgtttaa

SEQ ID NO: 108298 - DNA, 702 bp, Enterobacter aerogenes
atgtctgatcgcattaattccatgccctggcagccctggtcactcaacgacctcggcgacacggcgccagctttcgaaccaccgctaccgacgttggataacgaagccttgcagcctgacgctcaggcggaactgcagcagcagcttgccgccctgcgcctgcaggccgagcagcaaggtcagcaatccggttatgccgatggccagcaaaaaggctatgaagccggatttcagcagggacttgaggagggccgccagcaggggttgctggaagcacagcagcagcaacagccgctgaccgaccactggcagcagttggtaagcgagtttcagcacacccttgatgcgctcgattcggtcatcgcctcacgcctgatgcagctggcgctaaccgccgcgaaacaggtgcttggccagccgccggtctgtgacggcactgccctgctgacgcaaattcaacagttgatccagcaagaaccgatgttcaacggcaagccgcagctgcgcgtacacccgcaagattatgagcgcgttgagcagcagttaggcaccaccctcagcctgcacggctggcggttgctggcggatagcgatctgcatcccggcggctgtaaggtcagcgccgaggagggcgatctcgacgccagtctcgccacccgctggcacgaattgtgtcgcctcgccgcgccgggagatctgtga

SEQ ID NO: 108299 - DNA, 993 bp, Enterobacter aerogenes
atgagcctgaccggaaccgataaaagcgccattttactgatgacgctgggcgaagaccgcgcggcggaggtgctcaagcacctctcctcccgcgaagtccagcttttgagcggcaccatggccggcatgagccaggtctcgcataaacagctcggcgagatcctgtctgaatttgaagacgatgccgaacagttcgccgccctgagcgtcaacgccagcgactatttgcgttcggtgctggtgaaagcgctgggcgaagagcgtgccgccagcctgctggaggatattctcgaatcccgcgaaaccacctccgggatggaaacgctcaactttatggagccgcagagcgccgccgacctgatccgcgatgaacacccgcagatcatcgccaccatcctggtacacctcaagcgcggccaggcggcggatattctggcgcagttcgatgagcgcctgcgcaacgacgtaatgctgcgtatcgccaccttcggcggcgtgcagccggcggcgctggcggagttgaccgaagtactcaacaacctgctcgacggccagaacctcaagcgcagcaaaatgggcggagtgcgtaccgccgccgagattatcaacctgatgaaaacccagcaggaagaagccgttatcgacgcgatgcgcgaatacgatggcgagctggcgcagaagattatcgacgagatgttcctgttcgaaaacctggtggaggtcgacgatcgcagtatccagcgcctgctgcaggacgtggacaacgaatcgctgctgattgctctgaagggcgccgagcagccgctgcgcgagaagttcctcaaaaacatgtcccagcgcgcggccgatattctgcgcgacgatctcgccaaccgtgggccggtgcgcatgtcgcaggtggaaaacgaacagaaagcgattctgctgatagtcagacggctggcggagagcggcgaaatgattattggcggcggcgaggacacctatgtctga

SEQ ID NO: 108300 - DNA, 1677 bp, Enterobacter aerogenes
atgagtgcctcattatccgccggcgaaagccgcgacaacggcctgcaggccatctggagccgtctgcgcgccaatccaaaaataccactgctggtggccgcctccgccgctatcgccattatcgtcgcactgctgctgtgggcgaaaagcccggattatcgcgtgctgtacagcaacctgaacgatcgcgacggcggcgctatcgtcacccaactgacgcagatgaacatcccctaccgcttcgccgagaatggcgcggcgctgatgatcccggcggagaaagtgcatgaaacccgtctgcgtctggcgcagcaggggctgccgaagggcggcgcagttggcttcgaactgctggatcaggaaaaattcggcatcagccagttcagcgaacagattaactatcagcgcgctcttgaaggcgaactctcacgcactatcgagtcgctggggccggtgcagaatgcgcgggtgcacctggcgctgccgaagccctcgctgttcgtccgcgagcaaaagtccccttctgcttctgtcaccctgacgctgcagccgggccgtgcgctggatgatggccaaatcaacgctatcgtctatatggtatcgagtagcgtcgccggcctgccggctggcaacgtcaccgtggtcgatcaggccggacgcctgctgacgcagtctgacggcaccgggcgcgacctcaacgcctcgcagttgaaatatgccagcgaagtggaaagcggctatcagcgacgcattgaaacgatcctggcgccggtggtcggcagcgccaacgttcgtgctcaggtgaccgcacagatcgatttcgcctcccgcgagcagaccgacgaacagtaccagccgaaccagcagcccgataaagcggcgatccgttcgcagcaaaccagcagcaacgagcaaatcggcggaccgcaggtgggcggtgttcctggggcgttatccaaccagccgagcgcgccggccaccgcgccgattgaaaccgctaaaccggcggccaataacgccagcaacgcgaccaacacccgtagcgccgcggccaacagcggcccgttaagcacccgacgcgacgccaccaccaactacgaactcgatcgcaccatccgccatacccaacaaaaagccgggacggtggagcgtctgtcggtcgccgtggtggtgaactacagcctcaacgccgacggcaaagcgcagccgatgagtaaagaacaactggcgcagattgaagcgctggtgcgcgaagcgatgggctactccagcagccgcggcgatagcctgcaggtggtcaatacgccatttaccgacaatcagatgaccggcggcgagctgccgttctggcagagccaggcgtttatcgatttgctgctcgaactgggacgttatctgctggtgctgctggtcggctgggtattgtggcgcaagctgattaagccacagctgcagcagcgtcaggccgcacagcaagccgcggtcgccgccgccagcgcgccgatcgctaaagcgaacgacagccataaaccaagcaatgaggagctggcgctgcgccgtaaatcgcagcagcgcgtcagcgcagaagtccagagccagcgcatccgcgaactggcggataaagatccgcgggtcgtcgctctggtaatccgccaatggatgagtaacgaactatga

SEQ ID NO: 108301 - DNA, 315 bp, Enterobacter aerogenes
atggcgattcagggtattgaaggcgtactgcaacagatgcaggcgatggcgattcaggcgggaaataacgggcagaatagcgtaccgcagggagtcagttttgccagtgaattgaccgccgcgctgggtaaaatcagcgatacccagcaggccgcgcgtcaacaggcgcaaaacttcgagctgggcgtgccgggtatcagtctgaatgatgtgatggtcgatttacagaaatcttcagtttcgttgcagatgggcgtacaggtgcgcaataagctggtggcggcctatcaggatattatgaatatgccggtttag

SEQ ID NO: 108302 - DNA, 258 bp, Enterobacter aerogenes
atgagcatattgaagaaaattaaagatgccatgtcccctcccgtccccgaggaatgtagggaagagagctataaggcagtacttaaaaaccttgatattttgtccagggaatcgtccgaattgaaatccctgatggcggagtttggggaagggaagattacgcaggaacagtgtattgccacaggcgtagcgataatcaccaaagaattactggaattccgctatgtacaaaacaagattgattctcaggcctggtaa

SEQ ID NO: 108303 - DNA, 339 bp, Enterobacter aerogenes
atgaataaggttattactctacctatgttggtgctgctggtgggatgcgcaaccaaaagcaaatccgtcaatccgaccgcagtgaataagtacactcaaagtgtgcaggatgccgtccgcaaaaattattttgggtttgtgggatatcaagagcatggttgtacgctaaaagtcactcagcctcctggggggaatgttaaacgagtagaggttgtctccgttgacagtttcttgtgtcaacgttcagtagaggcggttaatgacactgtctccgccggcacgttccctgagaaaccctcggggctacctgaatcgattctctttgatttcaagccctaa

SEQ ID NO: 108304 - DNA, 294 bp, Enterobacter aerogenes
atgaacgtagccgagaaaattaaggcgatacgtaaagcagagggtttaactcaagtaaagttttgtgaaatcagcggactagcgctcagtacgctaaaaaattacgagggaggacatgcagagcccggcttgggggtggtgatgaaaatcacaaacaccccgagatttgagaaatacacgctttggctaatgacagataaaactgccccgcaagctggtcagatagcaccagctttcgcgcacattgggcaagaaccaacagaatcagaccactccgagaaacagattggttaa

SEQ ID NO: 108305 - DNA, 273 bp, Enterobacter aerogenes
atggaaccaaacgattatttgttgcagtacccgctcgacgcggttcatgtagaaaagtttgctgagttattaggcaagcccaaaacggctgttgcagaaatggtgaaagctaacaagctaccggtaattgagcttcgggatccatgcaaaccgaatgctcgcgccggtgaaaagtgggttttcatcccggaatttaatcgcgcagttcgtgaggcgttctacaaccgaccggtagaacagcgtgacgcgtggctgctttggatggggctttga

SEQ ID NO: 108306 - DNA, 1557 bp, Enterobacter aerogenes
gtgcaaagaaataaaatagaattttgtgtgattactacgttggttttagccatttgcttgcctactggtttttccgtctggtttgctcataagcagtcggaagataaatttgtgaaaactgttcaaagttatactgcaaacatcattatgagaacagatgccatagtaaaccatgctgaagtggctcttaaaaaatccaatgattggcagggtgcgatatgtagcaaagagcaccaaaaattcatgcaaaatattgcttttgaatataattatatcaaagcagttttatgggtaaacgcaagggagacattgtgttcttcagtcggagtggacattcctactggaaccttcccacctccaatgaggattaccaaaggcggagactatggttggtatttatcagtcaacagtctggatagtaccaaagaaatggttgctcttggtaaaggaaattcaatagttttaattaatcctggtgattttgttgatgtaggtttgcttgataattctcctgtcgacgttgctatgataggattaattaaagatacaatttttgcttccagcaaacctcttgatctaaacctatggaataaaataaagaatgaaaaatctcctgtggtatatataaacaatgctgtatacaatgttcattatattccggagttaaaccttgcagtagttggttggtcttcatcattgccactaaaaaaagcatggcataacaatttatggattatgattccaattggtttgctgataagtataattgcgtcatttttaatgcttcgcgtattacgtcgacttcagtcaccgtattatgctttgcttgatgcaatcgatagtcgagatatatcagttaattaccaacctattgtttgtcttcaaactaataaggttgtcggtgcagaggcgcttgcaagatggcgtttgtcggatggaaagtacctatcccccgaaatttttattcctctagcagagcaaacaggattgatagtaaagcttacggaattagttcttgtaaatatttttcaggatgttgggaaatggttgtcgaaaaattgtagtatgcacatttctttaaacgtgactgttgatgatttatcttcggaaaggtttttagttttacttgaggaatgtatttcaagatggaatgtgagtcctaaacagatagcattggaactcacagaacgtcagttcgctgaacctgaaaaaacgaaattagctttaaataagtttcgagaaaaaggatattcggtatatatagatgattttggtacaggatactccagtcttagttatttgcaggaattaccaattgatgttttgaaaattgataaggcatttatcaatagttgggaaggaattacaattactccacatattattgaaattgcgcataccttgggtataaaaatggtagctgaaggaattgaaacaatgaatcagaaagactggttgcttgaacatggtgttcaatatggacagggatggttattcagtaaagcgctccccaaaactgagttcattttgtggtcagaaaacaattctaatcattaa

SEQ ID NO: 108307 - DNA, 765 bp, Enterobacter aerogenes
atgcggatccatcggcggcaggccccagttctgtcccagcgggccgaggatgtccggcggcgcgccgacggaagccttgaggcaatacagctcgcgatcgcaccacgtctccgatccgccttcggcgacgccgaccgccagatcgcgatacaggccaatcggcatcccatcctgctggctggtgtgccaacaggcggcgaactgcgtatatgccagccactgcagccacagatagaaactcacctcatcggcatgctccgtacagaaggttttcacctgcgggctgctcgtgctctgatacgcttccggccatgccggccagccccagcgcatcggatcctgacggctttgccaggcatgcagcgcatcaaacgccgcctgccagtagagactttcgccctcgcgcagcacgaactgacggaactccgccatttgctcatcttcacgcgtagaaaactcggcccacgccagacgcagcgcggtcagcttcagcgcggtgacagcggtatagtcgacatcagcggtctgccgcgcggcctgcaaggcctgctgggtttccgcaagctgccaccatgcctgcgcggcagggctacgctggaaatcctccaccgcgttaacgtcgatatagatgacgttaagccagcggcgcgaggacggactgtacggactggcgctctccgggttcgccggatagagcgcgtgaatcgggttgaggccgataaacgcgccgccgcgacgggcgatttccggcagcatggcgcgtag

SEQ ID NO: 108308 - DNA, 2217 bp, Enterobacter aerogenes
atggttaatcggatatcgatcctgtcatctgtcgacagttcctcgttattattctggaaattcagcgggcaggagaaactgtccgaacctttccactttcaggtcgatttactcagccaggattttgctatcgaccgtcaggccatgctcggcaaaaacatgacggtggcggttcccggccaatggggacaggtgcgttatctttccggcaaaatcaccgccgttaccgtgcgcgccgaagatcttggcgagacgcgctacgccgtctatcagaccacgctggaacccgatttctggccgatgatgcgcgaccgcaacttccgtattttccagcagcagcgggtgccggatatcgtggccaaactgtttagcgagcataacgttaagtttgaggacaaacttacgcgtagctaccggcagtgggattattgtgtgcagtatgcggaaagcagcttccatttcatcagccgtttgctggagctggaaggtattagctatctgttccgccacgataaagacggccataccctggtgctgatggatgactatcagcaggctgaatccttccccggttatgaaactattccctggcatgcgcagccgggcggcggcgcggtcggcgaagagggcattagccagctgatggcgagccacgtcgtcacgccggggctttacagcaccgatgactatgattttcgcaagccccacgcctggatgctgcaaacgctgcagaatccggtctcgccgacaccgggcaaaatcgacgtttacgactggccggggcgctttatggagcacggcgacggcgaagcctacgcccgtattcgtcagcagtcctggcaggccgaacagcagcaaacgcagggtatcgccaccgcgaccggtatcgtcccgggacacacgtttaccctgacgcatgcgcctaacatggctgataacgctaaatggctggtggtgggcgcccgctatgattttgaagagaatcagtatgcctccggcggcggaaataccgcgcagcaccgcatcgcattcaccgttattcccgccgcgacgccatttgtccccgcgtcaaggaccgactggccgcgcacctacgggccgcaaaccgcccgcgtggtagggccgaaaggagaatcgatctggaccgataaatatggccggattaaggtgaaattccactgggaccgcgaaagccagggcgatgaaaatagctcctgttgggtgcgcgtttccagcgcctgggccggccagggttacggcggggtgcagatcccacgcgtcggtgatgaagtggtggtggactttattaacggtgagccggaccggccgattgtcattggccgcgtctataacgaagccagtatgccgccgtgggcgctaccggcggcagccacgcaaatgggctttatgagccgctcaaaggatggttcgccggacaatgccaacgccctgcgttttgaagataaacccggcgaagagcagctctggctgcacgctgagcgcaacatggatactgaagtcgaaaacgacgagacccatgatgtcggcaataaccgcaccaaaaccgtcggcaaagacgaaaccagccatatcaaacagaaccgcacccgcacggtggatggcaatgaaagcgttaccgtcggcaaagatcgcagcaaaaccatcaatggtaatgaaaccaccaccgttgagcagaaccgtaccgaaagcgtgaaggggaatgagaccctaagcgttgagcagaaccgcgatgaaaccatcagcggcaaccataccaccacggtgaaaagcgaccataccgcgaccgtcgaaggcaagcagtcactgacggtcgtacaggatcgcacccgtcaggtgcagggtaacgaaagcgtcagcgtccagcagaaccgtaacgtgcaggtcaccggcaaccagacgctgggagtgaccggcaatcacgatatttccgtgaccggtaagcaaacgcagaccatcaccagtaagcaagaggtgacgatcggcgccgggcgcaccctgagcatcaccggcggtgatacccgctttacgcaagggagcgtaaccgacagcgctaccgataccgtacatatcaacgtgggcgaaagcggcattctgataagcaacggcagcgtggaaattaccgctggcgggtcgacgatcaccattaacgccgctggtgtgatggtgaatggtaagaagattgagctcaatgcctga

SEQ ID NO: 108309 - DNA, 3384 bp, Enterobacter aerogenes
atgttcaaggaaaaaaatgccgcggtaatgaccgtagcggctaccgcgaccctgtgtcttgccgtctggacaattgtggtcctgctgagcggtctgggatggtggaactggcacgccaaccgcacgctgcagtggacggcgatccgcgagatagtgaccgtctgtggcctgatttgggcgtatggtctctgtctctggatactgggctttattgctttccacctgtttatcaggcaaaaagccgatgggcaacagcgtcagacgcagacttttattagccagcagacaaaaccggcgcagccgtttgcgtccttaaagcactttctccgtcgccgctacggccgattgtggcgcaataaggtccgcctgctgtgggtcgctggcgaggcggcgcagattgccgccatcgctccaggccttgcgcaacagcaatggctggagggccgcggtacggtgctaattcacggcggtagcctgtcggcgacggtggatatcgagcggctcagcgccctgcgtcggctgcgcggccgccggccgctggatggtatcgtgctggcgctggacaatgctcaggccaccgccgcgaccctggacgggtatttgcgaacgctggagctggttgcgcaggttttgcgctaccagccgccggtctatctgtggcaactccacgacagcgactggccgcaggatacgcgcattacccagacgctgggggcgttgttcccgccgcgggccgtcccgcaggatgttgaacggcagcttcgcgccattctgcccgccatgctggcgcaggggacccagcagttgtgcgctgattcgtcccacgattacctgctgcgtgtcgctaaatggctgaaggagggtggtatcagcggctggaagacgctactgacgctgtggcttaccgggcatctgcaacagatcccgctccgtggtctgctgttcagcccctcgttaaaggcggaagaagcggtggacaatgggctctatccccaccgttggccggccccggccgtctggcaggggatcatcgcagactgcggccgcgcgcgcggcgtgccggtggggggggcgtggcgccgctccctcggcgtcggcctgctggcgctgattgctctgtgggcggcgggaagcctgctctcttttatcgtcaaccgccagcaaattgtcagcgccacccagcgggtacagctgctgcggcagcccgtcgttaacgaccagcagctgatcgatttgcaggtgctgcgcaacgatatcggccgtctacagaatcaactcgccaacggcgcgccctggtatcagcgctttggtcttaatcataatgcgccgctttctaccgcgctgctgccgtggtatgggcgggctaaccagcgtctgatccgcgacgccgcggcgcaggcgctgacccggcaactgacggtgttggtcaacctgccgccgcgcagcccgcagcgggcgcagctggcgaaagcgggttatgaccagttaaaggcctatctgatgatggcgcgtccggacaaagccgatgcggcgttttaccgccaggcaatgaccgcggcgcagcagacgcgtcagggagtcgccccggcgctatggcagagcatcgcccccgatttatggggcttctatatggacaacttgccgtcgcagccgacgtggagaatcaccccggacgccgcgctggtgacgcaagcgcgtcaggtgctgctggcgcaaatcgggcggcgcaacgccgaaagcacgctttacgagaacatgctgctgcaggtgcgccgtaactatgccgacatgacgctggaagacatgacgccgcagaccaatgccagccggttgtttaccacggaagaggtggtgccggggatgtttacccgccaggcgtgggagggcggcgtgcgcgaggcgatcgataaggcggtggcggccaggcgcgatgagatcgactgggtgctgagcgatagccgccagaccgtcagcggcgatgtctccccggaggcgttgaaacagcggctgaccgatcgttatttcaccgatttcgccggggcgtggttgggttttctcaatagcatccgcttgaatccggcgcgcaatattgccgatgtgaccgatcagctgacgttggcgggcgacgttcgtcagtcgccgctgattgcgttgatgaatacccttgcctggcaggggcagaccgggcagcagcgtgaggatgtggcggattcgctggtgaagtcggctaaaaatctactcgataaggataagcagccgtttatcgatcagcaggccggcggcgtgcgcggcccgctggagagtacctttgggccgctgctggcgctgatgggcaaaaatccctctcagagcgtggtcgccgcagacagcaccctcagtttacagacctggctgacgcgcctgacccgcgtacgcctgcggctccagcaggtggcaaacgcccccgacccgcaggcgatgatgcagcagctggcgcagaccgtgttccagggcaaaagcgtcgacctgaccgacacccaggagtacggcagcctggtggcggccagcctcggcgaagagtggagcggtttcggccagaccatgttcgtccagccgctgacgcaggcctgggaaacggtgctgcagccatcggcggccagcctgaacgaggcgtggcagcgttctgtggtcgctaactggcattcggctttcgacggtcgctatccgtttgccgcgggcaaaaacgatgtctcgctaccgatgctggcggcattcatccgtcgcgatagcgggcgaatcgaccagtttcttgcccgagagttgggcggcgtgctcaaccgggagggtagccgctgggtggccgatagcgcgcacagtcaggggctgactttcaatccggccttcctgaaggcgattaatcaactgagttccttgtccgacatcctgtttaccgacggcagtcagggaatggggtttgaactacagggggtggcgacgccgggcattgttgaaacgcaactcaccctcgacggccagaatctgcactactttaaccagcttgccgaatggaaaagtttccgctggccggggactatcaacaaacccggcgcgatgctgagctggagctcagtggcggcgggcgctcggctattggcgaacgacagcggcccgtggggcacgctgcgtatgctggagagaatgaagcgccagcagatcggcgatgggctgtttcgcctgacggtcaatacgccggataaccggcaactgcagtggctgctgcgtaccgaactcggcgatggcccgctggcgttgctgaaactgcgaaacttcacgttgccgacacagattttcattgtggaggcctcccgtgcggaaccgtttgccgacggtgacgtagaggaataa

SEQ ID NO: 108310 - DNA, 759 bp, Enterobacter aerogenes
atgtcgttaatgaatcaggaatggatgagcaagctggaacaatttgcgcgcaaactcgcgctgcgcgacgtctatctcattgccgatcaaggcgttttagacaacccgttattggatggcttaaatagactttctcctccggtgcagtggttctcactctatcaggggcaaccggaagagccgctgctggagatggcgcctttattgatgcggcttgagccagcctgctggcagcatcgtcaatggatcgccgatctgatcgccgcattttcctacaagccaggtctgctgatcttcctctcaccactgagtttttcaacgctcgccgcccacctgcgcaatctggccgacggcgcatgggaagaccgttctggcctggtgcgttattacgacacccgtatgttcccgttgctgatgcagcatgtgctcactgaagaacaaaaagcatggtttttagaaccggtttatctctggagctatcgcgatagagacgacaagatctgctggctggaaggcgagtgttcgcctgttcaggcagcgatcccggaggcgatcaagattaatttcagcgatgagcaaatgatgaaactggatgtcgctatcgatgcccagcaatttacggtttctgaaaaattcagcaccttttttaccacccaggaggagaaatttaacaccctttggcagctcggctggcaggcgcatcagcagaattttatcggcgatttagcttcctggttcgaaagccactttaaggaatga

SEQ ID NO: 108311 - DNA, 1161 bp, Enterobacter aerogenes
atgagacagctaaccgactatctgccttacaaaactgccacgccgccccacaacggacggtggttgtccgtcggcgcggggatgacgcttatcagcggaggaggcgcggcgttaatgcctgccgaagcgcgtggcggggcgttaataaccgtcgcaattgttagcgccatgcttttggtcctcatcatctggatgctgcgcctgctttattaccgcctgtcggttcactacacccagtactaccagcggttgatcgatttcgatcatcaaacgtggtgggcccggcatcaatatagcgttgggctggtggaaacggtgctgctggggccggtgggatgtgaacccgagcgctggcagacgctgctgaagcgagaacatcagccgccaaaagagaaactggagtccggtgcgcgggcgctgcgactgatccactcggacatcgtcgatatcgacctgcgtgaacagcagctagcccgaatgctggcgcaacaatggctggcgcaacgtggcgaacatcaacttcccggcctgagcggctgttactggcagggcagcgaagcggcgtggcgagaattttgcgccgagctgcgcaagcgctgtcccaccgctcagttgccgcatatggcggaaccctggcagggcgaggccagcttatcggagattaccgcgcgcattaatgagtccggcgacgaatgtttcattctggtggcggggtgccagtcggtggcggcgacggcggattcggcgagaccggcgggggaatccgccgtgctctggttactggcccgggagggggaggcgcggctgacccgcggcgaggtttatgaaggcgccgcggtggaaaatatccagcaggtctgtcagcgggcaatgcagcaaagcggggctgaacgtccgcccgatccctgtatcgcattcacacaaccgcaaatcccggaactggcgcaaagcggctggaacagcaaccaactgctgcaggatgaaaactggggtgagacggggcagatggagcagctcatcaccatcgcactggcggcgatatttgcccgccactttcatcagtcttgcggctggatcgcccgcgatccgcgtcaccctctctcactaggcatcgtcaccgcagcactcccggcaccgcaacctcaagacaagaaggaatga

SEQ ID NO: 108312 - DNA, 258 bp, Enterobacter aerogenes
ttgaaacccattattcggcagggtgataccttgcgtgagcatggcggtacggtgatcggcggccattatctctgttttggtaaaggcatcgcctgcaaaggcgaccaggtgagctgcaatgaacatggcctgacggtcatagccgaaggaagctcgctgtatgaagtggatggttctccggtggctcttgacgggcatcattgcgcctgcggctgtacgctggtgagttcacgccctgattgcgaagtcgcgctatga

SEQ ID NO: 108313 - DNA, 2379 bp, Enterobacter aerogenes
atgagtgacataaagcctctgttgttcaaccacagccatcatctgttacaggtgcatggttgtaactcgttgctggatgttctgtgctttgaaggcgaggaaaacttaagcgagcctttccgctataccattgaatttaccagcagcgataaagctatcaccccgcagcagatgttgctgcaaaacgcctcgctgaccttgcaggcgccggttgaccagggatttggcattaagatccagcagccggtgcgcgttcttcagggagtgatcacctcttttgaacggctttccaccgcaaaagaggaaacgcgctacgccctaacgttacagccgcgtctggcgctactgtcgaagagccatcagaaccggatttatcaggatatgtcggcgccgcagattgtggagcacattctcagaacccgtcaccagatgcgcggggaagattttgtctttcaactggcgcatgaatatccgcgccgtgaacaggtgatgcagtacggtgaggacgatctgacctttatctcccgcctgttgggtgaagtggggatctggtttcgctttaccgccgatacccggctgaatattgatgtggcggagttctacgatgaccagcaacactacgagacgggactgtcgttgccttcggtcgctccctccgggcagcatgacggcgggaacgaatcggtgtgggacttacagagccgacaccacgtggttgagcgttcggtgtttactcgtgactataactaccgtaacgcgccagaggatatgaatctcaacgtcaatgtcagccgtggcgatagcaccacctatggtgaagcctatcactgggcggacaactacctgacgccgggtaatcgcttccagcatactccggacccggagagcggggccttttatgcccgtattcgtcatgagcgttatctcaaccagcagacgcggctgagtggggaaaccaactgcgcggcgctggctcccggccagcagctaaaagtgagcggcggcgaagaggtgacggacgtctggcgccagggggtggcgatcgctgcgattcactgccgcgcccgtcgcgaccgcagcttcgtcatgacgtttcaggcgattccctgcgtagagacttactgctttcgcccggcggtcatcagcaaacccagaatggccgggacgctgccggcgcgcgtcaccagcaccaaaatcaacgatctctatggccatatcgatcgcgacggacgttatcgggtgaacttattgttcgatcgcgatcgctggcagccgggtgaggaaagcctgtgggtgcgccaggcgcgcccttacgccggtgaaacctttggcctgcatctgccgttgttagcgggcaccgaagtggcgatcgcttttgagcagggggatcccgataggccctatattgtcggcgcgctgcacgactccacgcaccaggaccacgtgacgctctacaactacaagcgtaacgtgctgcgcacgccggcgaacaacaagattcgcctcgatgatactcggggtaaagagcacgttaaggtcagcaccgaatatggcggcaagagccagctcaacctcggtcatctggtggatcatcagaacacgccgcgcggtgagggatttgagttacgcaccgatagctatggcgcgatccgcggcgggaagggaatatttattaccgccgatgaacagctgaaagcgatgggcgcgaccgtggaaatggatcccgccagtcaattgctcggcagtgccgttgttcagctcaacgactggcaggagatagcccgcacccactacaacaccccgccggatgtcagcacgttaaagcagttcgtcggcaaagccgtcaacctggcgagccccgtcctgctgatgagcgcgccgaaaggcatcggcatcgtgacggcggaaacgacgctgctacagagtggtaaagggttgtacctgcaaagcgccagcgatattgcgctggccagcggcaaccggctgtcggtgaataccaaaaacgcaatctcgctgctttcccaccgcgaagggatgcgtatggtatcggtgaaaggaccgctggagatagagtcgcacggcgacacgctggcgctcacttcactgaaggatattaccgtgcagtcaacgcagggacatctgcagcttaccgccaaaaatggcatcaccctgggctgtggcggcggctacattcgcctgacgccgcagggagaaatccatcttcacagcccgagtctgctcagttttaaaggcacgcataagatgcaggggccggccggcgagacgtttccgctccccgatcttcccacatcgatatgtaaagactgcctgattcgtgcgcaagaactggctcaggcttttgtgccacgtgccgcctga

SEQ ID NO: 108314 - DNA, 1683 bp, Enterobacter aerogenes
atgagcgcgggctatccgcgcctgctctggctgtggggcgggctgctggcggtgttgatgatcctgctgtttctgccgttatccaccggcggccgggtgctggctgttgggttgacggcggcgggcgtagcggtcgggctggtctacgtcgggcgccaacaacgtgagcgacctgcggatgccgactggctggttgagctaccgtcggcgccgtatcgactgccgattgtgctggtctgcggcgacacggcggactggccgggagaaggagcggtttaccgtacggctcagggttgctggctgagagtcgccaccgccgcgttgcagcagacggtgcattatgtgcgcaatgagcgcccggcgctcatcgcgcaactggcggtgatgttctgcatgcagccgcaacaacatgatgatgacgcggcgctggcggcgcggctacgcgagttgcgctggcagcttgcccaggtgcggggcgatacccgtcgggagatactgttactgctgaacagctctctatccggcgcatcgctggaaccgttatggcagacagcgcgtgccggagagacgttgcaggtgtggctgcctgacggcgtgccgtgcagcagcgcaagctggttgatgcaggctgatggcgctcatcgcctggcggcacagcttaggataaatgcgcttgcccgctttacgcagcagatggcgttaaacgtactggcggcggcaagcgacgatgttcccccgatcgctccggcggtcgtactgtatcatttcacgccagccggggcgcctgccatggcggataatctatggcagcgttggctgtctgagcatacttccctcaactcactaccgggctggttaccggaaattgctgcagaaacgcggaaactgccggatttcattttgccgatactgccgcagggcggcggcaccacgccgaaaagccgtgctctgcggcgggcattctgtctgttcaccctcgcggccctgattgcgctgtgctgcagcgcatggaacaaccagcaactcctccagcgggttggctttgatgttcagcgctatgaacggacggtgatggacgaccatgccgcaaaagcccgcgccgtacagattttgcgtcaggatgtggcgcaactggacgccttcgcgcgtgatggcgcgccgctggcgctgggccttgggctctatcgcggcgagcgtctgcgtcagccggtactggcagcaattcgttcctacgtccctccgcctccgccgccgaaagcggtagaaaaaatcgtaccgaaaattgtccgtctcgacagtatgtcgctattcgacaccggcaagtggacgcttaaaccggggtccaccaagctgctggtgaactcgctggtggggatcaaagccaggcccggttggctaatcgtcatcgccggacataccgacagcgtaggcgatgataaatccaaccagacactctccctgaagcgtgccgaatcggtgcgtaactggatgcgcgataccggcgatgtgccggaaagctgttttgcggtgcagggttatggcgaaagccgtccggtcgccagcaacgatgcgcagcaaggccgggcgctgaaccgccgggtcgaaattagcctggtgccgcaggccgacgcctgtcaggtttcgacgaactccgcttcaactccggcggatggcgctttctaa

SEQ ID NO: 108315 - DNA, 666 bp, Enterobacter aerogenes
atgacccaggatatcaatattgatgctctgctggcggatagctggctaacggtgacggaactgcgccttggcgccaaactggccgagggggaggggaaacatctctggcagcgttgtgtagacaacattgaacaggtgatggcgcagttggtggccgctgatatcagcgaggcgaaccgtcagcatatcctctatgcgtggtgtgcgctgctggatgaaaccgcgaaagggcgcaatgaggaagatgacgcctgtatcgcctggtacgatcggccgcttgaggttaaatattttggcggcatggaagccggagatgcgctctatgagcgcatccgccaggtgctgcgcgagccggcgccggataacctcgttctgacttgtttccatcgggtgctggcgctggggtttaaggggcggtatggcctcaatgatccggcgcgcgcagcgctcgtcagcgcgcttggcgagcgtgtaccgccgtttgcgggcgatcctcagcagccgattctggcgaatctatccggccgccgcggtctggcagactggctgcgtcgttggccgattagtattggcgtgtcgctggtgctggtggccgcgttgtggttggggttgaactactggctggatgccctggtggcggcgttgcgactgggaggcggacaatga

SEQ ID NO: 108316 - DNA, 279 bp, Enterobacter aerogenes
atgaacgacgcctttccgggtgagcgactcagtgcccgtattcattcacaattggcactgcataacgaaattgaacagagggttgtcgagctgttgcttaaatccctgagcgtgagtcgtttcagtaatattaaaacccatccgctaatcattcaagaaaaaataaatatcaataataataattcaacttttctctttcgaaataccgttcgccaatcatttagcgtggtgaaattaaatatcggattgatgaacaccttattgaagaagcaagagtaa

SEQ ID NO: 108317 - DNA, 996 bp, Enterobacter aerogenes
atgcaacgttttgttctatggacggcgctggcatccgtcgttttatgcggcatgatgatagcgagtctgcagtggggaagtgtggaactctcgtggcgacaggtgctatccgcgttgggcctggcatccgctcccgttgccgaaatagtgaaaactatcgtcattgacttacgcctaccgcgagtcctgctggcggcgctaaccggcgcggggctggcgatcgtcggcttgctcttacagaccacgacacgcaacgaactggccgatccgtttttgtttggcctgtcttcaggcgcttccgctggcgcggtgctggtgatcacccgcttcggcgatgtactggggccactcacgctgccgggctcggctttcgtcggtgggatattatccgcgctggcggtgatgatgttgtttcgcgtcaaccagctaaggcgagcggaacagttaattatctgcggcctggcggtgtcgtttcttttcagcgcgctgaccagctatctggtcttttccggcgaccagcgggcggctggttcgttgctattctggtcattgggcggtctgggactggcgcgatgggacaacctgttcattccgttattgagcctggcgttgttgagcggatttaccctgcgacgctggcgggcgctggatgcgctgttggcgggggaacagacggcctgctcgctgggcgtcgaggttgagcggttgagaagcgaaaccttcctctgctgcgcgttggctaccgctttgctggtttctataaccggggttattggtttcgtcggcctgatggtgccttatctggcgcgtcgggccgttggcgtcaggcatcgaatggccgtgccgatgtgcggtttgcttggcgcgatattgctcactggcggcgatatactcagccgaagcctgatagcgaatcaagaattaccgattggtattatcactgctgggcttggcggcgcgtttattgtcgggttgctgatgcgggcaacaggataa

SEQ ID NO: 108318 - DNA, 957 bp, Enterobacter aerogenes
atgaatagacttttaactattttatggctgctgttaagtagcctgttcgcgttagcgaatccatttcccgttaccgtggacagctgcggtaaacccatcacctttaatcaacccccacagcgtgcggtaattaacgatcttaatatggcggaaatggcctttgcgctcgatctccaggatcggattgtggggctaaccggcatcaccggctggtataaactaacaccacagttcaaagcagcgatgggggccatccccgagctggcgcctaaatacccgtcgctggaaacgctgctggcggtccggccggactttttcttcgccggctggaactacggcatgaaaattggcggcgatgtgacgccgcagacgctggcgccatatggaattaacacgctggtattgagtgaaagttgcgtacaggccggcgggcaggcaaagaaagccgacatgagtttgctttacaacgatgaactcaagttgggtaagatttttggcaagcaacaacaggccgaggcgctggtggaagggtggaaacgtcggctggcgaacctgcctgtcagggcagcgaatacgccgccgcagcgggtctttgtctatgactccggcgaggataaactcttcaccagcggcaagtacgggatgccgacggccattatcgaggcggccgggggacgcaacgtgatggatactctggacgcgaactggaccacgacaagctgggaggcggtggcggccagcgaaccacaggtgattattctgctcgattaccaaaccggcacgggaaccgcggcgctgcagcgtgtactcgaatctcatcccctgatgaaacagacgcccgccgtccggcagcagcgttatcttaagctacagtatgctgaattgactccgggtccggcgaatattgcggcggttgagaagctggcgcacctcttatatgccacggacgtgaaatga

SEQ ID NO: 108319 - DNA, 492 bp, Enterobacter aerogenes
gtggaagagtatgttcaattgggccgtttaccgtatcgcgaatcaccgtcctcggcgcagggacagcgcatcgtggatagcgttattagtgatacgggtctgcagcctttacgccatcgcccgctgggcaacctctccggtggtcagcgtcagcgcgccgcgcttgcccgcgcgctggcgcaatcccccgaattgctattgctggatgagccgaccaatcacctcgatccgctggcgagaagcgagttgcttaccctggtaaagcgcacagaggtggcggtgattgcggtgttacacgatcttgccgcggctgaagcctttgccgaccgaatgctggttatccaccacggcaagcaggtgatttgcgacgtacccgaggctgcgctgcaccccagcgtaagctatccggtttttggcatgaccagttttcgcgtggcgcatcccgtgagcggtaaagcgctgcgcatttttgaagttcctcatcacgcttaa

SEQ ID NO: 108320 - DNA, 300 bp, Enterobacter aerogenes
gtgggtttccgggtgttcgtacatgacccacatgatttttgccgcatccatcggggaaccgccgcccagggcgatgattacgtctggtttgaaggagttggccagatccgcgcctttacgcacgatagtcagcgttgggtcagcttcaacttcaaagaacacttcggtttctacaccagccgctttcagtacggaagtgatctggtccgcgtaaccgttgttgaacaggaagcggtcagtcacaatcagcgcgcgtttgtgaccatcagtaatcacttcatccagtgcgattggcagtga

SEQ ID NO: 108321 - DNA, 1449 bp, Enterobacter aerogenes
atgccacaacatgttttcagctcgcttagcaacggttttcttgttgatcaggtgtttcggaccaacgttttcagagatggagttaccaccccaggaaccacaacccagagtcagggaaggtgcgagtttgaagttatacaggtcgccgataccaccctgggaggccggggtgttgatcaggatacgcgcggttttcatcatctggccgaagtaggccacgcgagccggctggttgtcctggtcggtgtacaggcaagaggtgtgaccgataccgcccatggcgaccagtttttctgctttattgaccgcgtcttcgaaatctttcgcacggtacattgccagcgtcggagacagtttttcgtgagcgaacggttcgctttcgtcaacgtcggtaacttcgccgatcagaatcttagtggtggctggcacggtgaagcctgccagttcagcgatttttgccgctggttgaccaacgatcgccgcattcagcgcgccatttttcaggatgatgtcctgaacggctttcaactctttaccctgcagcaggtagccgccgtggctggcaaaacgctcgcggacggcgtcgtagacggagtcgacaaccaccacggattgttcagaagcacagataacgccgttatcgaaggttttcgacatcagtacggacgccacagcgcgtttgatatcagccgtttcatcaataacaaccggcgtgttgcctgcgccaacgccgatagctggtttaccggaactataagcggccttaaccatacctgggccgccggtggcgaggatcaggttgatgtcaggatgatgcatcagtgcgttagacagttctacggaaggctggtcgatccaaccgatcagatctttcggcgcgcctgcggcaatcgctgcctgcaatacgatgtccgccgctttgttagtcgcgtctttagcacgcgggtgcggagagaagatgatggcgttacgcgtcttcaggctgatcagcgatttgaagatagcagtagaagtcgggttggtagtcgggacgataccgcaaataataccgattggctcagcaatagtgatggtaccgaaagtgtcgtcttcagacaggacgccacaggtcttttcatctttataggcgttgtagatatattcggaagcgaagtggtttttgatcactttatcttcaataatacccatgccggattcggcaacagccattttagcgagagggattcgagcatctgcagcggccagagcggcagcacggaagatcttatcaacttgttcttgagtgaaactggcatattcacgctgggctttttttacgcgctctacaagtgcgttaagttcagcgacattagtaacagccataatgctctcctgataatgttaaacttttttagtaaaacagtagctcgattcgacattatagacaggctgttaacagcttgcatgtaa

SEQ ID NO: 108322 - DNA, 138 bp, Enterobacter aerogenes
atgtttacgcagcagataggcggcctgcgactcctgctcgctgaaaatcgcgaccagtacgttagcgccggtcacttcgctgcgaccggaggattggacgtggaaaaccgcacgctgcagcacgcgctgaaagcttag

SEQ ID NO: 108323 - DNA, 969 bp, Enterobacter aerogenes
atggatcacggtggtagagaggtgatcgaaccagatgatgttgtcgagacggttacggaactccggcgtaaagatctttttgatctcttccatcgcatcggtgctgttatcctgctgaataagaccaatcgatttacgctcggtttcacgcaccccggcgttggtggtcatcaccagcaccacgttgcggaagtccgctttacgaccgttgttatcggtcagcgtaccgttatccatcacctgcagcaggatattgaagacatccggatgcgctttttcgatctcatcaagcagcagcaccgcgtgcggatgtttgataaccgcatcggtcaacagcccgccctgatcgaaaccgacgtatcccggaggggcgccaatcaaacggctgacggtatgacgttccatatactcggacatatcaaaccgcagcagttcaatacccagcgctttcgccagctgcacggtgacttcggttttcccaaccccggtcggcccggcgaacaggaaagagccaaccggtttatgctcatgtccaagcccggcacgcgccattttgatggcttcggtcagcgcttcaatcgctttatcctgaccaaagaccagcattttcaggcggtcgccaaggtttttcagcgtatcgcgatcgctgcgggagacgctcttctccggaatacgcgcgatgcgcgcaaccacggattcgatatccgccacattgaccgttttcttacgcttgctgaccggcatcagccgcgcccgcgcgcccgcttcgtcgatcacgtcaatcgccttatccggcagatgacgatcgttgatgtatttcaccgccagctcgaccgccgcacgcaccgctttggcggtataacgcacatcgtggtgcgcttcatacttcggtttcaggccgttgatgatctgcaccgtctcttcgacagaaggctcggtcacgtcgattttctggaaacgacgcgctaa

SEQ ID NO: 108324 - DNA, 1767 bp, Enterobacter aerogenes
atgaataaaacccgtcaacaagagttaacccgctggttaaaagaaaaaagcattatctcccgtcgctggttgatgatttctcgcctgctgggcgtcgtgagcggtctattgatcgtcgctcaggcgtggttcctggcgcgaatacttcaccgaatgataatggaaaatatcccggcgacggcgctgctgctgccgtttaccttgctggcgctggtgctgatcctgcgcgcctgggtggtgtggctacgcgaacgcgtcggcttccacgccggccagcatatccgttatgaaattcgccgccaggtgcttgaccgtcttcagcaggcgggcccggcctggattcagggaaaacccgccggcagttgggcgacgctcatccttgagcaaatcgacgatatgcatgattactacgcgcgctatctgccgcagatgacgctggccgcctgcgtgccgctgctgattgttatcactatcttccccagcaactgggcagccgcgctaattttactcggcaccgccccgctgatcccgctctttatggcgctggtcggaatgggcgccgccgatgctaaccggcgcaatttccttgcgctcggtcgccttagcggccacttcctcgaccgtctgcgcggcatggaaacgctacgcctgttcaaccgcggcgaggcggaaattaacaatatccgcgatgcgtcgcaggatttccgccagcggacgatggaagtcctgcgtctggcctttctctcctccggcgtgctggaattctttacctcgctctctatcgcgctggtggcggtctatttcggtttttcctacctcggcgagctcgacttcggccactacggcgtcggcgtcacgctgatgtccggttttttaaccctgattctggccccggagtttttccagccgctacgtgatttaggcacattttaccatgccaaggcgcaggccattggcgcggcggatagcctgaagacttttatggaaacgccgctggcgcaggctgaacggggcgagaaaacgctaagcgatcatgaactgattcgcctcgaagcccgcgatctgatggtgaaatcgccggatggcaaaacgctggcaggcccgctgagtttcaccctgaacgctggcgagcgcgtggtcctggtcggccagagcggttccggtaaaagctcgctgctgaatacgctgacaggctttcttccctatgaaggttcgctacaggttaacggcgtggagctgcgcgatctcgacgctgaacgctggcgtcggctaattagctgggtcggtcaaaacccgcaactgcccgccgccacgctgcgtgaaaacgtgctgctagcgtggccagaagccacggaagcgcaactgcagctagccctggataaggcctgggtcagcgaatttatttcccaattgccacaaggtattaataccccgttaggcgatcaggctggcggcctctcggtcggccaggctcagcgtattgccgttgcgcgcgcgctgctggtgccgtgccgcctgttgctgcttgatgaaccagcggccagccttgacgctcacagcgaacagcgtgtgatgcaggcgctatctaacgcttctacccagcagaccacgctgatggttactcaccaactggcaggactggccgagtgggatgctatctgggtaatgcaggatggtcagattgtcgagcaaggcggctatgcgcagctttctgccgctggaggcgcgtttgcctcactgttagcccatcgccaggaggaaatttaa

SEQ ID NO: 108325 - DNA, 969 bp, Enterobacter aerogenes
atgggcacagccaaacacagtaaactgcttattctaggttctggacctgcaggatataccgcggcggtctatgctgcgcgcgccaacctgcagccggtgctgatcaccggcatggaaaaaggcggtcagctgaccaccaccactgaagtggaaaactggccaggcgacccaaacgatctgaccggtccgctgctcatggaacgtatgcacgagcatgccaccaagttcgaaactgaaattattttcgaccatatcagcagcgtcgatctgcagaaccgtccgttccgcctggtcggcgacagcggcgagtacacctgtgacgcgctgattatcgctaccggcgcttccgcccgttatctggggctgccttctgaagaagctttcaaaggacgcggcgtctctgcctgcgccacctgcgacggtttcttctatcgtaaccagaaagtcgcggtcatcggcggcggcaacacggcggttgaagaagcgctgtatctgtccaacatcgctgctgaagtgcatctgatccaccgtcgcgacaccttccgtgcggaaaaaatcctgatcaagcgcctgatggataaagtggaaagcggcaatatcgtgctgcacactgatcgcaccctggaagaagtcaccggcgaccagatgggcgtcagcgggctgcgtctgcgcgatactaaaaatagcgataacgttgaaacgctggacgtcgccggtctgtttgtcgccattggacacagcccgaacaccgctatctttgaaggtcagttagcgctggaaaacggttatatcaaagtacaatccggcatccacggcaacgccacgcaaaccagtatccctggcgtgttcgccgcgggcgacgtgatggaccatatctaccgtcaggcgattacctccgccggcaccggctgtatggcggcgctggacgcggaacgctatctggatggtttagctgacgcttgcaaataa

SEQ ID NO: 108326 - DNA, 495 bp, Enterobacter aerogenes
atggtagatagcaagaaacgccctggcaaagatctcgaccgcatcgatcgtaacattctgaatgaactgcaaaaagacgggcgtatttccaacgtcgagctttccaaacgggtgggactttctccgacgccttgccttgagcgtgtgcgtcgactggaaagacagggttttattcagggctatacggcgctgctcaacccgcattatctggatgcatcacttctggtatttgttgagattactctgaatcgtggtgcgccagatgtgtttgagcaatttaacgccgcagtacaaaaacttgaagaaattcaagagtgtcacttggtatccggtgattttgactatctgttgaaaacccgcgtaccggacatgtcagcgtatcgtaaattgctgggcgaaaccctgctgcgcctgccgggcgtaaacgacacccgtacctacgtggttatggaagaagtcaagcagagtaatcgtctggtaatcaagacgcgctaa

SEQ ID NO: 108327 - DNA, 4080 bp, Enterobacter aerogenes
ttgagccaggaatacaccgaagacaaagaagtcaaactaacgaagctaagcagcgggcgccgcgttcttgaggcgttactcatcctttgctctctttttgccatctggctgatggcggcattactgagctttaatccatccgatcccagttggtcacagaccgcatggcatgagcctatccataatctgggcggcatgcccggcgcgtggctggcggacacgttatttttcatctttggcgtaatggcctacaccatccccgtgatcatcatcggcggctgctggtttgcatggcgtcatcaggaaaatgacgagtatgtcgattacttcgctgtttcgttgcgcctgatcggcgcgctggcgctgatcctcacctcctgcggcctggcggcaattaacgccgatgatatctggtactttgcttccggcggcgtcattggcagcctgcttagcaccaccttacaacccttgctgcacagtagcggcggcactatcgccttgctttgtatctgggccgcgggtttaacgctgtttaccggctggtcatgggtcagcattgccgagaaactcggcggcgcaatcctttctattctgacctttgccagtaatcgtacccgtcgggacgatacctgggttgatgaaggggaatatgaagatgatgaatatgaagatgaagaagacgacgataccgcacagccgcgggaatcgcgtcgcgcccgcatcttacgcagtgcgctagcgcgtcgtaagcgtctggcggaaaagttcgccaacccgatggggcgtaaaaccgatgccgcgctgttctccggtaaacgtatggatgatgcggaagcagtacaatacagcgccagcggcgcgcctgtcgctgcggatgatgtcctgttctcaggcgccagcgccgcgcgtcctggcgatttagacccttacgatccgctactgaatggccatacggtggccgacccgatcggcgccgcctccgccgctgtcgttgcgccgcaggcatgggcggagcaggggacagggcaggcataccaaccggaggccgctcacctgcaaccaccggtgtatcagcctgaatatgcgccgcagcagccgccggtttatcaaccggaagccgcgcatcctcagcagccggcgtatcagcctgagtatgcgccgcagcagccgccggtttaccagccggaagccgcgcatcctcagcagccagtgtatcagccggaatacgcgccgcagcagcagccggtttaccagccggaagccgcgcatccacagcagccggtgtatcagcctgaatacgcgccgcagcagccgccggtttatcagccggaagccgcgcatccacagcagccggcgtatcagcctcagtatgcgccgcagcagccgccggtttaccagccggaagccgcgcatccacaacagcctgtgtatcagcctgagtatgcgccgcagcagccaccggtttaccagccggaagccgcgcatccgcagcagccgatataccagcctgaaccggctgttcaacaacctatttatcatcaggaaccggcgccagccgctgagcctgagactcctcaggaagaaactaaacgcccgccgatgtactacttcgaggaagtcgaagagaagcgcgcgcgcgagcgtgagttgcttgaatcctggtatcagccaatccctgaaccggcgagcccggtggcgaccaaaccgatcaccaccccggctgccccatccaaaccgtcagttgatgccgccgccgtgacggccgtcgccgcaggcgttcatcaggccaccacttctggcagcacagccgcagccgcctcagtggcgtcaaccgccgctgacgcagcgccagttttcagcccggcatccagcggcccgcgggtacaggtaaaagaaggcattggtccgaaattgccgcgtccgaatcgcgtccgtgtgccgacacgtcgggagcttgcttcctatggcattaagctgccgtctcagcgtattgctgaagagcgcgcgcgtcgggccgagcttgaacatcattacgataatgagccgctgagcgacgaagaagccgatgcgctggaacaggacgagctggcgcgtcagtttgccgctacccagcaacagcgctatggcgagtcctgggaatccgaaagcgatgagcaggacgaagacgctgccgctgaagccgaactggcgcgccagtttgccgcgacccagcagcagcgctatgccagcgagcagccgccgggagccaatcccttctcaccggcggactatgagttctcgccgatgaaaacgctggtcaatgatggtccaagcgagccgttgtttacgccgacgccggaagtgcagccccagcaaccggctcagcattatcaacaaccggcagctgcgccacagcagggttatcaacctgcgcagccgcccgtacaccatcagccggtagcgccgcagccgcaggcttatcaacctgcgcagcagccaatgcagcaacaacagccggttgctcagcagccttatcagcagcccgcgccgtcgccgcaggatagccttattcatccgctactgatgcgtaatggcgacagccgtccactgcaaagaccaacaacgccgctgccgtcgctggatctcttgacgccgccgccgagtgaagttgaacctgttgatacctttgcgcttgagcagatggcgcgtctggtcgaagcgcgtctcgccgatttccgcattaaagcggatgtggtgaactactcgccgggtccggtgatcactcgtttcgagctgaacctcgcgccgggggtgaaggccgcgcgtatctctaacctgtcgcgcgaccttgcgcgttcgctgtcgaccgtggcggtgcgtgtggtggaagttattccgggtaaaccttacgttggcctggaattaccgaacaaaaaacgccagaccgtatacctgcgcgaagtgctcgattgtccgaaattccgcgagaacccatcgccgcttaccgtggtgctgggcaaagatatcgccggcgatccggtggtggccgatctggcgaaaatgccgcatctgctggttgccggtaccactggttcgggtaaatcggtcggcgtgaacgccatgatcctcagcatgctctataaggcgcagccggaagacgttcgtttcatcatgatcgacccgaaaatgcttgagctgtcggtgtacgaaggtatcccgcatctgctgacggaagtggtcaccgacatgaaagacgccgccaatgcgctgcgctggagcgtcaatgaaatggagcgccgttataagctgatgtcggcgctgggcgtgcgtaatctggcgggctacaacgagaagatcgctgaggccgcacgcatgggacgcccgatcccggatccttactggaaaccgggcgacagtatggacgccgtgcatccggtgctggaaaaactgccgtacatcgtggtgctggtggatgaattcgccgatctgatgatgaccgtcggtaagaaggtggaagaactgattgcgcgtctggcgcagaaagcgcgcgcggcgggcattcacctggtgctggcgacccagcgtccgtcggttgacgtgattaccggtcttatcaaggccaacattccgacgcgtatcgccttcaccgtatcgagcaagattgactcgcgtaccatccttgaccaggggggcgcagaatcgctgctgggcatgggtgatatgctctattccgggccgaactccacgatgccggttcgcgtccatggcgcgtttgtccgtgaccaggaagtacacgccgtggtgcaggactggaaagcgcgcggtcgtccgcagtatgttgacggtattacctccgatagcgaaagcgaaggcggtggtggcggctttgatggcggggaagagctggatccgctgttcgatcaggcggtcaacttcgtaaccgagaagcgcaaagcctcgatctcgggggtgcagcgtcagttccgtatcggctataaccgcgcggcgcgtatcattgagcagatggaagctcaggggatcgtcagcgagcaaggccataacggtaaccgtgaagtcctggcgccgccgcccttcgagtaa

SEQ ID NO: 108328 - DNA, 612 bp, Enterobacter aerogenes
atgaagaaacttgccatcacctgtgcattattgtctggcttcgtggtaagccaggtttgggcagacgctgccggcgacttaaaaagccgtctggataaagtcagcagcttccatgccagcttcactcagaaagtgaccgacgcaagcggtaatgccgtgcaggacgggcagggcgatttgtgggtgaagcgcccgaatctgttcaactggcatatgacccagccggatgaaagtattctggtatcggatgggaaaacgctgtggttctataatccgtttgtggagcaggcaaccgcaacctggctgaaaaacgcgaccagcaacacgccgttcatgctgatcgcccgcaaccagtcagcggactggcagcaatacaacatcaaacaaaacggcgatgattttgtgctgacgccgaaaagcggtaacggcaacctcaagcagttcacaatcaatgtgggccgtgacggtactatccatcagttcagcgccgttgagcaagacgaccagcgcagcagctatcagctgaagtcgcagcagaatggcgccgtcgacgcatctaagttcacttttacgccgccgcaaggggtgacggtggacgatcaacgtaagtag

SEQ ID NO: 108329 - DNA, 315 bp, Enterobacter aerogenes
gtgcggcagaaaggcatcctgctggcttttattgaaacgatgcacttcatcaacaaacaggatagtgcgtcgaccagcgttgcgattttgccgcgcacgttcgatagcttcgcggatctctttgacgccagatgtaacagccgagatacgctcgacatcagcattggcgtagcgagcgatcacttccgcaagggtagttttacccgtgcccggcggcccccacaggatcatcgagtgcagatgccctgcctcaatcgcccgcggcagcggtttacccggcgccagcaggtgctgctggccaatgtactgcgctaa

SEQ ID NO: 108330 - DNA, 1425 bp, Enterobacter aerogenes
atgcgtatcgggatgcgcctgctgctgggttattttttgattgtcgccattgccgcgtggtttgtgctctcaatatttgtgcaggaagtcaaaccgggcgtgcgtcgggcaacggaaggcacgcttaacgatactgcaacgctactggcggcgctggctcgtgatgacctgctttcggcaaacccgcagcaagggcggttggcgcaggcgtttcagtcgcttaatcagcagcccatcaacgccaatatcagcggtatcaggaaaatgcgcaatgagtatcgcgtctatctgacggatgctcagggaaaggtggtgtttgactccagcgggcaggcggttggccaggattattcgcgctggaacgacgtctggctgaccctacgcggccagtacggcgcgcgcagcacgcgcagcgatcctgatgatgataatagctcagtcatgtacattgccgcaccggtaatggataacggccgtatcatcggcgtggtgagcgtcggcaaacctaatctggccatgacgccggtgattaaacgcagcgagcggcggatcctgtgggctggcggcgcgttgttggggatcgctttactgatcggcggcgggatcgtctggtggattaacttctcaattggcaaactggtgcgttacgccgattcggtgaccgccgagcgtccgctacctctaccgaacgtcggtagtcgcgagctaagcaagctggcgcaggcgctggagagcatgcgcgtgaagcttgaaggcaaaaacgcgattgaaaactatgtctacgatcttacgcatgaactcaaaagccctctggcggccattcgcggcgcggcggagatcctgcgcgaggggccgccgcccgagatcgccgcgcgtttcaccgccaatattcttgcgcagaatacgcgtatgcaactgctggtggaaaaactgctgcagcaggcgcggctggaaaatcgtctggagataacgccgcagttggtttcggttgatgcgcttttccaacgtctggctgaagaccgcgacattgcgcttacggcgaaggccatcaccttacgctggcaggagagcggggtaacggtgaatggcgatagcgaactactggggcaggcgctgggcaatcttatcgacaatgcgattgactttacccctcgcggcggcgaaatttccctggcggtagagatgcgtaatgaagaggcgtggttgagcgtcacggataacggtagcggaattcctgattttgcgctggagcgcatctttgaacgcttttactcgctgccgcgggatgacggccataaaagcagtggtcttggcctggcgttcgttcgtgaagtcgcgcgtctacatcagggcgatattagtttgcacaatcgccccgaaggcggcgtggtcgcgacgctacatcttcaccgtcccttcacatag

SEQ ID NO: 108331 - DNA, 690 bp, Enterobacter aerogenes
atgcaacagccacggatttggttagttgaggatgaacagagtatcgccgatacccttgtttacatgctgcagcaggaaggattcgacgtgaccgttttcgggcgcgggttgcccgcgcttgatgcggcgctgcatcagatcccggatttagcgatcctcgacgttggtttgcccgatattagcggctttgaactatgccgacgactgctggcgcgccatccggcattgccgctattgtttctgaccgcacgcagcgaagaggttgataagctgctgggactggaaattggcgctgatgactacatcgccaaaccattttcgccgcgcgaagtttgcgcgcgggtacgtaccgttctgcgtcggctacagaaattttcagctccttcgccggtggtgcgcgttggcgagttcctgctggatgagcaggcgatggcgataagctggtttggccaaccgttgaatctgacgcgttacgaattcctgctgctgaaaaccctaatcaacgcccccggtcgcgtattctcccgccagcagctgatggaactggtatggagcgatgcctacgagagtatcgatcgcaccgtcgatacccatatcaagaccctgcgcgccaagctgcgggcggtgaatccgaatgttaaccctattaatacgcatcgcggtttgggctatagcctgggaggctgttga

SEQ ID NO: 108332 - DNA, 474 bp, Enterobacter aerogenes
atgaaatacaagaagttagtagcagggttgttcttactggcggcgggccaactggcgcacgccgagcaaattggctccgtagatacggtatttaaatggctggggccggatcacaaaatcgtggtcgaagccttcgacgatcccgatgtacagaacgtcacctgctatatcagtcgggcgaaaaccggcggtattaaaggcgggttggggctggcggaagatacctcagacgccgccatctcctgtcagcaggtcgggccgattgagctgacggacaagatcaaaaacggcaaaagtcagggcgatgtcgtgttccagaaacgtacctcgctggtgttcaaaaaactgcaggtcgtccgcttctttgacgctaaacgtaatgcgctggtgtatctgacctattcggataaagtggtcgacggctcgccgaagaatgccatcagcgccgtgccaatcatgccctggaataaataa

SEQ ID NO: 108333 - DNA, 405 bp, Enterobacter aerogenes
atgcaggtggccgttcgccagctctggcgtcagtgcggtggtgtagaagacctcctgctcgtcatctttttccaggcttggacgcggttcatgcaggccgtacagcgtcggcggaatgctgggcgcgttgccgaggaattcgcgccagaactgaacgcgcatctggttacggaattcagaaatctcttccagcttacaggtatagctttgggtcacgccgaccagttgcgtggtgctcagggtcacgaattcatgcttcggcatggtaaattcaccgaggcgcagcggcggacgcatcccaaacgagctccagtccgcagaacggcgatagagcgcaggggtcaggttaaactgttttttaaaggcgcgggtaaacgtctgctgagaatcgaagcggtactgtag

SEQ ID NO: 108334 - DNA, 219 bp, Enterobacter aerogenes; identical to SEQ ID NO: 89239

SEQ ID NO: 108335 - DNA, 714 bp, Enterobacter aerogenes
atgttatttgcatggataaccgatcctaacgcctggctggcgctcggcacgctgacgctgctggagatcgttctcgggatcgataatattatttttctctctctggttgtcgctaagttgcccaccgcccaacgcgcccatgcgcggcgtatcgggctgatgggtgcaatgctgatgcgtctcggcctgctggcgtctatcgcctgggtcgttaagctcaccaatccactcttcaccgtattcggtcaggagatctcgtttcgcgatctgatcctgctgctcggtggcctgttcctgatctggaaagcgagtaaagagatccacgaatcgattgaaggcgaggaagaaggtcttaaaagcaacgtccactccttctttggcgccatcgtgcagatcatgctgctggatatcatcttcagtcttgattcagtcatcaccgccgtcggcctctccgatcatctgttcattatgatggccgcggtggtgattgcggttggggtgatgatgtttgccgcacgtccgatcggcgacttcgttgaccgtcacccgtcggtcaaaatgttggcgttgtcgtttctgatcctggtcggtttcaccctgatgctggagagcttcgatgtgcatgtgccgaaaggttacatctacttcgcgatgttcttctccattgcggtcgaaactctcaacctgatgcgcaataagaaaaacccgctgtaa

SEQ ID NO: 108336 - DNA, 696 bp, Enterobacter aerogenes
atgccagccattgctccacttaccgctccgccgcaaagtcaggagcaacttcttgctcaggcccagcggctggcgggttattcgctgggggaactggcggcgctggcggggattcccattccccgcgatttgaaacgcgataaaggctggattggcattctgctggaaatttggctgggcgccagcgccgggagcaaaccggagcaggatttcgccgccttaggcgtggagctgaaaaccatccccattgaccgtcagggccgtcctctggagaccacatttgtttgcgtggcgccgctaaccggcaatagcggcgtgacctgggaaagcagccacgtgcggcataagctacagcgcgtattgtggatcccggtagaaggcgaacgcgagatcccgctcgcgcaacgccgcgtcggcgcgccgctattatggacgccagacgaggaagaagatcgccagctgcgcatggactgggaagagttgatggatttgatcgtactcggccaggttgaacgcatcaccgcccgccacggcgaggtattgcaactacgccctaaagcggccaacagcaaggcgctaacggaagcgatcggcgcccacggcgagccaatcctcactttgccgcgcggcttttatctgaaaaagaactttaccgccgcactgctggcgcgtcattttctattagggcatgaataa

SEQ ID NO: 108337 - DNA, 531 bp, Enterobacter aerogenes; identical to SEQ ID NO: 89236

SEQ ID NO: 108338 - DNA, 876 bp, Enterobacter aerogenes
atgaatagtggctacctgcattttccggagttcgatccggtaatattttccattggaccggtctctctccactggtacggcttaatgtacctggttggtttcgtctttgcgatgtggctggccacccgtcgggccaatcgtccgggcagcggctggacgaaaaatgaagtggaaaacctgctctacgcgggcttcctcggcgtattcctcggcggccgtatcggctatgtgatgttctacaacctgccggtcttccttagcgacccgctatatctgttccgcgtctgggatggcggcatgtcgttccacggcggcctgatcggcgtgattctggtgatgattatcttcgccaaacgcaccaaacgcaccttcttccaggtctccgatttcatcgcgccgctgatcccgtttggcctcggcgccgggcgtctgggcaactttatcaacggtgaactgtggggccgcgttgacccgaacttccattacgcgatgattttcccgggctcgcgcgctgaggatctggcgctgctgccgtcgcacccggaatggcaatcattattcgatacctacggcgcgctgccgcgtcacgcctcgcagctttatgagctggcgctggaaggcgtggtgctgttcctgatcctgaacctgtttatccgtaaaccgcgcccgaccggttccgtttccggcctgttcctgattggctacggcctgttccgcattatcgtggaattcttccgtcagccggacgcgcagtttaccggcggctgggtgcagtacatcagtatggggcagattctttcgatcccgatggtgcttgcgggtatcattatgatggtttgggcttatcgccaccgtccgcagcaacaaaactcttga

SEQ ID NO: 108339 - DNA, 795 bp, Enterobacter aerogenes
atgaaacagtatcttgatttgatgcagaaagtgctcgccgagggcacgccaaaaaatgaccgcaccggcactggcaccatctctatcttcggccaccagatgcgttttaacctgcaggaaggcttcccgctggtgaccaccaagcgctgtcatttacgctccatcatccatgaactgctgtggttcctgcagggcgacaccaacattgcctatctgcacgaaaataacgtcacaatctgggacgagtgggcggatgaaaatggcgatctgggaccggtctacggcaaacagtggcgttcctggcccgcgccggatggccgccatatcgaccagatcagcacggtcatggaacagctgaaaaatgacccggactcccgtcgcatcatcgtgtcggcatggaacgtcggcgagctggataaaatggcgctggcgccgtgccacgcgttcttccagttctacgtcgccgacggcaagctctcctgccagctgtatcagcgctcctgcgacgtgttcctcggcctgccgttcaacatcgccagctatgcgctgctggtgcatatggtggcgcagcagtgcgatctggaagtgggcgattttgtctggacaggcggcgacactcacctgtacagcaatcacctggagcagaccaacctgcagctgagccgcgaaccgcgtcctctaccgaagctggtcattaagcgcaaaccggcgtcgattttcgactaccgttttgaagacttcgaaattgaaggttatgacccgcatccgggtattaaagcgcctgtggcgatttaa

SEQ ID NO: 108340 - DNA, 483 bp, Enterobacter aerogenes
atgcgggcgctgcaaagcggtgagattgattttggtatcggcgcgatcgacagttcgctgccagttgagctactggtttatccgctgcgcgaggatcctttcgtggcggtactgcaccgcgacgatccgctcgctgcacagccaaatttaccgtggaagcagttggtaggccgtgatattgccgttttctcaaaggggaatattcagcggctggtggcggcgctggtggaaagccaacgtttgaccttaacgacgcgttaccaggtagactatatcgaaaccctttatgggctggtacgttcgcggctggcggtggccattctcccggcgctgtatacgacctatttgcacgatccggcgttaaaggtggcgcaactgcagcagccggcgctcacgcggacggtggccctgatgcgtgggccgcaggcgcttgcaccgttaatcgaagagtgtttttctctgttacagtccgcattgcgctag

SEQ ID NO: 108341 - DNA, 423 bp, Enterobacter aerogenes; identical to SEQ ID NO: 105065

SEQ ID NO: 108342 - DNA, 1977 bp, Enterobacter aerogenes
atgaaattaaatcagatcgctaaacatctggctctggccggtgttttaacttcgctgtcgctttccgccttcgctgccgcccagcagcaggacgccaccccggcaactcagcaggcaaataacgcgctgtacaacaaactgccgtttgccgataaaactgatttcgataacgcgcataaaggttttatcgccgcgctgccgcagaccatgattaaaggcgagcaaggcaacgttatctggaacccggcaaaatatgacttcgtcaaagaaggtgaaaaagccccggatactgttaacccgagcctgtggcgccagtcacagctgattaatatcggcggcctgtttaaagtcaccgacggtgtttatcagatccgtaatctcgatctctccaacatgaccatcattgaaggcgagaaagggatcaccgttatcgacccgctgctgagcgccgagccggcgaaagaagcgatggatctctactacgccaaccgcggtaaaaagccggttgtcgccgtcctgttcacccacagccatgttgaccactacggcggcatccgcggcgtggttgatgaagccgacgtgaaggctggcaaagtaaaaatctacgccccggccggattcatggaagaagcggtttccgagaacattatggccggtaccgcgatgagtcgtcgcgccagctatatgtacggcaacctgctgaagcctgacgccaaaggccaggtcggcgctggtcttggcaccaccacctctgcgggtaccgtgacgctgctccagccgaccaactacatcactaaaaccggccagcaggaagtgattgatggcctgacctacgacttcatgatggcaccaggttccgaagcaccgtcggaaatgctgtggtatgtcaaagagaagaaaatgattgaagcggcagaggatgttacccataccctgcacaacacttactcgctacgcggcgcgaagatccgcgatccgctggcgtggtcaaaatatattaacgccgcgatcgaccgctggggcaacgatgctgaagtcattatcgctcagcaccactggccaacctggggtaatgacaacattatcaagctgatgaaaggtcagcgcgacatgtatcgctacatcaacgaccagaccctgcgtatggccaacgaaggcctgacccgcgatgaaatcgccgctaacttcaagctaccggaatcgctggaaaaacagtggtcgagccgcggttattacggctccgtcagccacgatgtgaaagcgacgtacgtttactacctcggctggttcgatggcaacccggcgaccctcgacgagctgccgccgcaacaggctgcgaagaagttcgttgaatacatgggcggcgccgatgccatcatgcagaaagccaaagccgactatcagcaggggaactaccgctgggtggcgcaggtgaccagtaaaatcgtcttcgccgacccgcagaatgccgatgcgcgtaacctcgaagcggatgccctggagcagttaggctaccaggcggaagccggtacctggcgcaacttctacctgaccggcgcgcaggaactgcgtaacggcgtacagaagctcccgacgcctaacaccgccagcccggataccgttcgtgcaatgactccggagatgttcttcgactacctgggcgtacatatcaacggccagaaagccggcgcggcaaaagcggtcttcaacatcgatcttggtaaagatggcggtaagtacaagctggaactggaaaatggcgtgcttaaccacaccgctaatgcggtagcagacaacgctgacgccagtattactctgaaccgcgataccctgaacaagatcattttgaaacaggaaacgctgaagcaggctgaagataagggcgacgtcaagattagcggcaatggcgctaagctcgatgaaatgctgagctacatggacaaatttgaattctggttcaacattgtcaccccgtaa

SEQ ID NO: 108343 - DNA, 1977 bp, Enterobacter aerogenes
atgaaattgacccccatagtaaaaggattggccattgctggcttgctgtcatcgatcagcttgtcagcatgggcggaagtcgccgcaaaagaagcgaccgctgccactaaacaagccaacgacgctctctataaccaactccccttctcagataacaccgatttcaccaacgcccataaagggtttattgccgccctgcccaccgagatcattaaaggagaacaaggtaacgtagtatgggatccgcaacagtactctttcatcaaagaaggtgaaaaagccccggataccgtcaacccgagcctgtggcggcagtcgcagctgattaacatcagcggcctgtttgaggtgaccgacggcgtctaccagatccgcaatctggatctttccaacatgaccatcatcgaaggtaaagaaggcattaccgtcgtggatccgctggtgtcggcagaaaccgccaaagtgggcatggatctgtattacaaaaaccgcggtaagaaaccggtcgtcgccgttatctatacccacagccacgttgaccactacggcggggtgcgcggcgtagtagatgaagcggatgtgaaatccggcaaagtgaaaatttacgcgccgtccggctttatggaagcggcggtggctgaaaacatcatggccggtaacgtcatgagccgccgcgccagctacatgtacggcaacctgctgaaaccatcggccaccggacaggtcggcgccggtctgggcaccaccacctcggcgggtaccgttaccctgattgccccaactaatatcattgaaaaagacggtcagaaagaagttattgacggtctgacctatgactttatgctggcgccaggttcagaagctccatcggaaatgctgtggttcatcgaagagaaaaaactgattgaatccgcggaagacgtaacacacaccctgcacaacacctattcgctgcgcggcgcgaaaatccgcgaaccgctgccgtggtcgaagtacatcaacgaagcgattgtacgctggggcgacaaggccgagattattatggctcagcaccactggccgacctggggcaacgaaaacgtggtcaacctacttaagagccagcgtgacctgtaccgttacattaacgatcagaccctgcgtatggctaacgaagggctgactcgcgatgaaattgccgccaaattcaaactgccggatagccttgccaacacctgggccaaccgcggttactacggctctgttagccacgacgtgaaggccacctacgtgctgtatctcggctggttcgacggcaacccggcgaccctcgacgaactgccgccggaagaagcagcgaagaaattcgtcgattacatgggcggcgccgatgccatcatgaagaaagcgaaagaggattacgaccagggtaactatcgttgggtagctcaggtggtcagtaaaatcgtcttcgccgatccgaaaaaccaggatgcgcgtaatctggaagcagatgcccttgaacagttaggctatcaggcggaatccggcccgtggcgtaacttctacctcaccggcgcgcaggagttgcgtaacggcgtggtgaaaggaccaactccgaacaccgccagcccggataccgtgcgcgcaatgacaccagaaatgttcttcgactatttggcggtgcacatcaacggcgagaaagcgggtaacgcgaaatcggtctttaatatcgatctcggcagcgacggcggcaagtataagctggagctggaaaacggcgtactgaaccataccgcaaatgcggaagcgaaagatgccgataccactatcgccctcaaccgcgccaccctgaataagatcatcctcaaagaggagacgctgaagcaggccgttgataacggcgatgcgaaaatcaccggtaacgccgataagctcaatgaaatgctgggctatatggacaagttcgaattctggttcgacatcgttacgccataa

SEQ ID NO: 108344 - DNA, 1359 bp, Enterobacter aerogenes
atggcacacacatctatcaatcacaccatcatccgtaacgggatctactacatcagctttcgcctgtcgggtcataaatatttccgtcggtcgttagagacagatagccacagccacgcgcaactcttgatgtcatttgcatctccagccattccattagtcaaacgtggaaccattcacccggatcagtttggtcaatgtctttctgatttcagcaaccgcttaaagcaacagaatgaacactggctggttcaacaatttctcagtgatgaacggcgcaatcttcagccgatagttgttcaggaataccgcgaggttgttgcgccttcagaagatgaggaagaacaaacagaagtacagtcaaaggatgtgttaacactggctggcgcttggaatatgtacaaaaaggaaaaagcccaaaactggacgaaggctatctcacaagccaatgagcgctttatggaagtgctgttaattgtccttggtacaacaaccgatgtcacgacgatcaccaaacaggacattaagcaggtgatggaagttgttgaaaacttgcctaagcgtgttgttcagccttaccgttcgatgactgtccagcaattgatcgagtgtgatgatgtaccgcctgaagatttggttggcgcagagtcaatccataagcatctgaagatttacaaatcgctgttcaaaaccttcctgaccgataacaaggatattctggagaagtctccgactgatggcgttgttgctgcgccatctaaggcgaggtttggcgcatatagtgcagcagaaatgaaaaaatttgttggttgggcgctcaagcagcctgacggctgggagaagtggatcaccttgttgttggcatacaccggagccagaaggggagagatcgccaaactggagaagtcacagatcaaatatgacgaagacagccagcgacactatctgctgattgcagagggaggacagggaaaaaccgagaacgcaacaagacaggtggcgatccatcccaaactgatcgagtggggattcctcgattttgttaatcggcagtggaaagagaaaatcttctcgccagtgtcgggtaagaacatgcccaagatcggcaaagtgttagctgacgttcgcgatcagcttggtattccgtaccttgatgattatggacagcggcgcttggtgcactcgtttaggcacaccatgatatcaacctgtttaggcggttgggttggcaacttagcgcatctgcaacaggtagtcggtcatgagaaaagcggatcaggaattacccagcgttatctgcatacattccctttaatttcggtctgctatgtgattgatggtcttcgctgggagggatga

SEQ ID NO: 108345 - DNA, 939 bp, Enterobacter aerogenes
atgactagccgcagaatcgcttatgcttattacgatccaaaatgggacaaatcaacaatgcccattgtagcgctaaaccgagtcgaagttgagcctttggaatatgaagcagaaatgaaaggatatcttcactgtccttcatgctatgagcctttgttaagagttccaggagacccagcagtgtctatcatggcgaacggcgctgacgctctttttagacattaccccgatgaagacgcaccgtattgccgtttacgaagtgggatcatggttgggaaaaaatacgataacgaagccgaagcagctcaagccgtcgaagatggtgaacttattatcattagtggtttcaagcaagagcggcctcagaataatgcaagacaacaagatgaagaacatcctgaaccggttgaaacagaatttgaaagtgaagatgggccgccagttaatgttcctgcctctaggcacgaaggccagaccttccacctaccaagtaaggtgacaagtgttcaatcgttgtgcaccaattttcggcaaaactactatcgagatatacacgttgcggtaggggaacatgtatatcattatgttttagcggagtctttgaaggaggccgctgagatcgattctgaagatgatatacccaatttttattttggagaaattgtacgcatagatcgatttgaacataccagtcacgtatttttgaggcaccctaggctcgttggcaatgtcgatttcagaatatctgccagtaatggtgatttggatgccagaggaattactcaggcaaatgcattgagacgaattctgctcttttttggaaaaatagactcatgtggtgcagggtactggtccaaagataaaacgtggggagaaattgccgtacttccagcgaagtatgaggattttcttcgtgcaaactacagacgtgatgaatag

SEQ ID NO: 108346 - DNA, 2139 bp, Enterobacter aerogenes
atgcatatttccagactgactttggtcaactataggaacttcaaaaacacgtctctccagtttcacaagggagtgaacaccattatcggggaaaacggctccggtaaatctaacatcctgagagctattcgcctcctacttgacgacaccatggtgcgtgctgcctatcgcctagatgagtctgatttcagccgctcactgggtcaatggcaggggcactggatcatcatcagcatggagttcgaggaaatcactagcgatgaatcagttcaggcgctctttcttcatggaacagcttctttggatgctgagccgatccataaagccacctataacctgatcttccggcctaaaaaagatattcggctgaagctggctgccttggacatctatgagggtgagcaactcacggagatccttgatgcaatcacaatcgatgattacgaaaccattttcacgggacggagctgggcggacttcagcaatcctttggtgtacaaaaaaatcgttggcgatttcgataactgtatcttctcgtctgagacggaatttccagaaatcggggcaaaggtgcccggtttcctttccgttacgaaagaagtatcgctgaccttcatccaagccttgcgggatgttgtttctgaattccacaacaaccgcactaatccattattgaccctacttaaaagcaagagtggagaaatcaatccagcgacgatggagcctatcaccgagatggtccacgaactcaacgcctcgatcgaagggctaaaagacgttcagtcagttcgcaatcacattcgtgaaaccatcaaggacgccgctggtgaaacctactcgccagcgtcactttcgatcaaatctgatcttccagaagaagccgataagcttttccagtctctcagacttttcgtgggtgaatcagaggaagggtacgaaggggcaattcatgagctgagcctaggcggagccaatctcatctatttgacactcaagctacttgagttcaagtaccagcgcgaaaaactgacaatcgccaatttcctcctaatcgaggagccggaagcgcacatccatacacacattcaaaagaccctgttcgatcgcattgcatatagcgacgcgcagatcatctacacgactcactccactcatatctccgaagtgagtaatgtaagtaatatcaatatattgggacgtcatggggcgttctgcgaggcctatcagccagccagaggtcttgagcctgttcagataaacagtatccagcgttatttggatgccgtgcgtagcaatctgctcttcgctaaaagcgtgatactcgtcgaaggtgatgtggaggaaattctgataccaatcctaattaagcgagtattgggagtaagcgttgatgagttaggcatcagtgttatcaacattcgtagtacaggcttcaagaatgttgcggtactcttccataacatccgcattaagaagcgatgcgccatcatcactgatttggaccaagccttctttgacgtcacccttcagccaactgatactggaggtatggctaaggcaaaggccaaagccgctgggtcccagaaagctggtttagaacgacaggtcgatctaaacgagttcactgcagataatccatggcttgtaactttctacgccaaacatacgttcgaggtcgattttgtcgcagccggtaaccatgaggccgttgtccaaaccattcctacagtctacaaggacgaggaaactaggaaagtggcgaaacagcaactccaatctggagacctgtcacaaatgggtaatcgtacactgacgatggcaaagcaagagggtaaggggtggttcgctctcatgctcgctgagtacattactccccaagtccagatcccagcctatattatgcaggccgttcattttgcacatggcaaatttcctctcccccttcttgcaagaattctccagcatcgcgccgaatgcagatacggttccgatgtattgaattcaccggcgaagcaagcatttcttcaggtagttgagcgttatgcgcaaggagatattggcttgactgacctaaggagatacatcgatctcacgataccgggagacgccattactggattcttagcggagatgccgtga

SEQ ID NO: 108347 - DNA, 210 bp, Enterobacter aerogenes
atgataagaagagtgttggtgatgggatttattcttgctgcgttcagtgccaatgccgggcgtataactatgagcaacccggagcagtcaaccacggcgaacgggcaaaccttgtgtgtctattccaacagtatttacacctttacctatgtcacgaagtcgaaacattgcccatatagcaaaagtttcgatgtctctgaaagtgagtaa

SEQ ID NO: 108348 - DNA, 783 bp, Enterobacter aerogenes
atgacaaaaattattgtattacctctgttgctctgcgctttctcatccgtagctagtggagcggtctcgggcgaaatccagccataccccgatcacctggctgcatatgtcaaaacgcttgttacagccagttgcgaccaggtactttcatatgatggaaagaactccattgatagagccatcaagtccatcagcgctagcgccactaaaggaatgactgccgacacggaaagctactacgccgtttacaattcaatcgtctttggcgctgagatgggggataagctgaaaaatgctaagaaacagaaaatgattctggcaacgaaagacaaaattggaatagatagttgcggtggtgtaggtgcttatgcattgatacagaaggattttagaaagatgactcttgcggggctaatgcctttagccccgcaagctggtgtcgtaaaaccaaaggcgacatcttctgacgaaaacgtgtatcggactacggcgaaagacctggccgaattgtataaagctaacgaggttgcagccgatgacaaaattggtggtcgtaaggtggaagtgaccggaactgttcaggacataacaaaaaatttcgcgaatgatgtcgttcttaaacttgaaagtggtaatcgcttcatgcctgtcagcctgagtatggctgattcagagatggcgcaggtgtcgaaatcgataaagggacagaagatcaccgtgacctgcgaaaagatgcagcttttcatcggtgctccatccggtggtaactgcacctttaactaa

SEQ ID NO: 108349 - DNA, 597 bp, Enterobacter aerogenes
atgagaacaaagaataaaaaaaacttccggacgcggctctatgtagtcgctgttttcctcgtgacaaccatccttacaagcacaagcgatgcggtgatggaagcatatcgtaatgtcatttctcagaatattgtccctgtgatgaactcattctggttccagttttatggcttcgttcatcctctcccggaacatcatgattatcatttttctgtcacgttctatattccaccttcagggggaaacgtaggaggacaagagatgacaggtgtatcaattccaggtgaagagtgcagaaaatcaggaggggtgacatccagtgctccgtctagccttaattatgaatactggaaaaataatgtcattactgaggcttattgctcaagtagcagagtcactgtagcaattatcccacaaactgggggagagaagcagatcatttatgacggtttgttttacgagggaaaacaggtcactttttcaggcgtccctggtcgatacaacgccggggtattacagcttatgtcaacagaccgttcagaacccgttggtgagtgggcaccgataaatcaatgccagaagaatggaacatgttga

SEQ ID NO: 108350 - DNA, 150 bp, Enterobacter aerogenes
atgacagcagaaaccaatctgaccaaggggcaagagtgccccgttaccgttatcgacgaagacgcattgaaacgagccattcagaaagcaaaggagattgcagatgctaacccggaaaaataccgtcgggtacatccaactttacaataa

SEQ ID NO: 108351 - DNA, 492 bp, Enterobacter aerogenes
atgactacaaaaaagaaatcacaggcccagatttctccggaattgaaaacttatctcgacaacatcgcagcgaagtacaaaccagatccgggggccctaaagcgtcaaattgataatgcggaagctcgctacagccgaacgcaacagttttctgacattccagcgcggctggtggttaaactccaaagcctgatcctagacggctggcggttttacccttcagctaattctttagtgctttccaatgccacgatgattgctgttaagttgcaaaaaccggaggccttgatcgaagatgaattgaagacgttacgctccagagtctccaacgcttaccacgatcaactttttacagcgatggagcgtgagattgacgaactgatacaagaagcagcacaggaagcacaacagaaagcaatgcagcaagcagcggccgaagaagctgcaatgcgtgaccagttgagggctgccctcggtatggtgaaagcatga

SEQ ID NO: 108352 - DNA, 633 bp, Enterobacter aerogenes
atggcgaggactaaaggtgctgtaggtaaaggggttgataacaaagctgtgcgtgagtatctattggctcatggaccactcagccaccaaccgcagatagtagatcatagtataagaggagccaaagggcaggagaaggattcacatcggtactcgagcgagaggattctcgcgattttgaggcagttggactacatcgatgtgacagccgtcttcagtcaaatgcagtcctataacatctcaaggggcaacgaaaagactccttctcttcggaatgtacaacgaattaccaaagttcttcgatgcgcgtctgaaggaatccggtttcacgcagaaaaatggtataaaagcgaatatgattcagggacagcttatgtggacgtagttaatttttctgatgaagagagagaaaaatttcggaagtgggccattgctggagatgtggagaaagcaaaggcactcgttgagtcgtgcggaatggtcactaccattcatgaacgtcctaagatgaaaaatccagagggcaatatcattgatattccctccaaaaaatggacgcgggaactggtatcgcttactcaaatcatcaaggacattggcaatcgttacacttcagccctagaagcagcctga

SEQ ID NO: 108353 - DNA, 903 bp, Enterobacter aerogenes
atgccaaactctcctgttttggagttacaagctctatctagtgacccatcagtggacatagtcgcaacattgatgaaagccaaaatgatcgcagtaaagctgggattacctgagataacagaatggattgaacttgaactgaatggttatccaaccaacaatgcagcacctgattacaggaggggccaagggcagcttaaggcattgaatccttttaatggttggattccggttgatttgggtcaaattgactttgagttacaaaaaaaattcaagactttcactattattgagtctatttcatccgtgcaaagaattgcgacgctgggtgagaagaaagcaagcttagttgtacccgttgaaatagcagggatgttgggtatgggtcgtaaacacattcctgaaattaggtggttcttcagtatcggatttgtacatggtttgattaactcagtcagacaaagaactcttgattgggcgttagatcttgagcaaaaaggcatcttaggggaaggattaaggttttctcaaaaagagaaagaggcagcaccaatgactgttcacaacatcacgaatattcacggtaatgttaacaatgctggtgttattggctctggtaacggtgatatcacccagaacaacagcatcacctcaggtgatttcaactcactggaaaagcaactgaaggaatggggtgtatcagacgaggacgtcagaactctacatcaagttgtccaagaatcaccaaccccaactagtgtagatgattttggtattaggatcggcgagtggttaggcaacactatcggtaaagcatatgctggtacacttcgaatcgccggaagtgctgcaccagctttactgacaaatgccatttgtcactactacggcataccagtttaa

SEQ ID NO: 108354 - DNA, 168 bp, Enterobacter aerogenes
atgcgtttactcaccgataaacaaaaatcccggctctgggaacagacccgcaatgccaattttcaggccagccgacgccttgaaggcgcgacggtaccgctcattaccttgacggctgaggaagcgctggcgcgtcttgccgagctgaggaggcctcatgagcgctaa

SEQ ID NO: 108355 - DNA, 603 bp, Enterobacter aerogenes
atgagcgctaaatatggcgacgatcgcgacccctatctctatccgacgctggatgtgttgcgtaatcggctgggtattcgtcaggcgcagcggctggaacaaacggcatgggaattcacttcgctgcgcgcggcgacgatcccgttgggcccacgcggccgcggcttaccgcatctgtgcgccattcaccggcaactttatcaggatctctttgactgggcgggcaaactgcgggaaatcgatatctaccagggcgatacgccgttttgccacttcgcgtggatagagaaagagggcaacgcgctgatgcgcaagctggaagaagaggactatctgtgtgaacaaccccgggagacgttcgtcgagcgactgagctggtactacggcgaaatcaatgtcctgcacccgttccgccttggcaacggcctgacgcaaaggatcttcttcgaacagttggccattcacgccggctacctgctcgactggcggggtattgagccggatgcgtggagccaggctaaccagctgggcgcgatgggcgacccggaaccgctggagcggatctttcgtaaagtggtaagcgaagcgcgggaatctgagtag

SEQ ID NO: 108356 - DNA, 564 bp, Enterobacter aerogenes
atgatcctgctaatcgataactatgactctttcacctggaatctgtaccagtacttttgcgaactgggggcggaggtgctggttaagcgtaacgatgagttaacgctggcagagatagcgtcgctggcgccggagaaaatcgttatttcgccgggcccctgcacgcccgatgagtcaggtatttcgctggacgttatccgccgttatgccggaaaaaccccgctgctcggcgtgtgtctgggtcatcaggctatcgcccaggtcttcggggccgccatcgtacgcgccgctcaggttatgcatggtaaaacgtcgcttattgagcacaacagcgagggcgtttttaaggggttaaacaacccgctcaccgttacgcgttaccattcgttagttatcgacccgccaacccttcccgcggattttatcgttaccgcccgcagcgccagcggtgaaatcatgggtatccgccatcgccagtgggatctcgaaggcgtgcagttccacccggagagtattcttagcgaacagggacaccaactgctggaaaacttccttaaacgctga

SEQ ID NO: 108357 - DNA, 1221 bp, Enterobacter aerogenes
atggcaacagagcaaccggcaatcacccgcgccacattcgatgaagtcattctgccgatttatgcaccggcggagtttattccggtgaaggggaaaggcagccgcgtttgggatcagcagggcaaagagtacgttgattttgccggcgggattgcggtgaccgcgctgggccactgccacccggcgctggtggcggcgctgcacgagcagggcgaaaccctgtggcacaccagcaacgtttttaccaacgagccggcgctgcgcctgggtcgccaactggtagatgccacttttgccgaacgcgtggtgtttatgaactccggtacggaagccaatgaaacggcgttcaagctggcgcgtcattacgcaatcactcgccatagcccgtacaaaaccaaaatcatcgctttccataatgccttccacggacggtcgctgttcaccgtctcggttggtggtcagccgaaatactctgacggtttcgggccgaaaccggcagatatcgtgcatgtcccatttaacgatctcgaggcggtgaaagcggtgatcgatgaccatacctgcgcggtggtggttgagccgattcagggcgagggcggggtaatggcggcgacgccggcgttcctgcaggggctgcgcgaactgtgcgaccagtatcaggcgctgctggtatttgatgaagtgcagtgcggtatgggccgtaccggttcgctgttcgcctatatgcattacggcgtgaccccggatatcctgaccagcgcgaaagcgctcggcggcggtttcccgattagcgcgatgttgaccaccaatgaaattgccagcgccttccatgccggttcccatggctccacctacggcggcaatccgctggcctgcgcggtggcgaccgcggctttcaacctgattaacacgccgcaggtgctggagggcgtgaatgccaaacgggcgctctttgtcgaacacctgcagcagatcgatgcgcagtttgatctgttcagcgacatccgcggcatggggctgttaatcggcgccgcgcttaagccgcagcatcatggacgcgcgcgcgatttcctctatgccgcggcggaggccggggtgatggtgttaaacgccgggccggacgtaatgcgctttgtgccgtcgctggtgattgatgatagcgatatcgccgaagggatggcgcgctttgcgcaggcggttaaaaacgtgcttagcgcctag

SEQ ID NO: 108358 - DNA, 2079 bp, Enterobacter aerogenes
atgtggcgcaggctgatttaccacccggaagtcaactatgcactgcggcaaacgctggtgctgtgtctacctgtggccatcgggcttctgctcggccatctgcagcaagggctgctgttctctttagttcccgcctgttgcaatattgccggtctcgacaccccgcataaacgttttttcaaacgcctgatcgttggcggctgcctgtttgccggcagcagcctgattgtgcaattgcttctggcgcgcgacatcccgttgccgcttatcctcagcgcgctggcgctgattctcggcgtgacggcggaaatcagctcgctacacgctcgcctgttgccggcatcgcttatcgccgccatttttaccttaagcctggccggcaatatgcccatctgggagccgctgcttatctatgcgctgggaaccttgtggtacggactctttaactggttctggttttggctctggcgagagcagccgctgcgcgagtcgttaagcctgctttaccgcgaactggctaactattgcgaggccaaatatagcctcctgacgcagcacactgacccgacgacctccctgccgccgctgcttacccgccagcagaaggtagtcgatttaattacccagtgctatcagcagatgcatatgttagccgccaaccagcgtagcgatcataagcgactgctgcgcgcgttccaggttgggctggatctgcaggaacatatttcagtgagcctgcaccagccggaagaggtgcaaaaactggtggagcgcagccatgcggaagcggtcatccgctggaacgcgcagaccgtcgccgctcgtctgcgggtgctggcggatgatattctctaccaccgctacccgcgccgctttcagatggataagcaaatcggtgcactggaaaaaatcgcctatcagcatcccgataacccggttggccagttctgcgcctggcacttcagtcgtatcgcccgcgtgctacgtactcagcgcccgctgtacgcacgtaacctgatggcggacaaagaacgacgcctgccgctgctaccggcgctgaagaactacctgtcattgaaatccccggcgctgcgcaacgccgcgcgcatcagcgtaatgttgagcatcgccagcctgatgggcagcgccctgcacctgccgaagccttactggatcctgatgaccgtgctgttcgtgacgcaaaacggttacggcgccacccgcgtgcggattgtccaccgggcggcaggcaccctggcgggcctggtgatcgcctggctgaccttacacttccacgtaccggaaagctatacgttaagcggtatgttgttcatcacgctgctgagctatctcatcattcgtaaacactacggctgggcgatggtgggctttaccgtcaccgcggtatataccctgcagttgctaacgcttaacggcgagcagttcatcgtcgcccgctttatcgataccatcattggctgtctgatcgcctttggcgggatggtctggctatggccgcaatggcagagcggcctgctgcgtaaaaacgcccacgatgccctggaggccgatcaggaggctattcggctgatacttagcgccgatccgcaggccccggcgttggcctaccagcgtatgcgcgtcaaccaggcgcacaacgccctgtataactcgcttaaccaggcgatgcaggaaccgggttttaactcgcactatctggaagatatgaagctgtgggtaacccatagccagtttatcgttgagcatatcaacgccatgaccacgctggcgcgcgagcatacgatgctaacgcctgacctggcgcagcggtatctggaatcttgtgaaattgcgctgcagcgctgtcagcagcgtctggattcagacgggccgggcagcgcgggcgatgtcaatattatggaatcccaggacggggaagtgttgcgtgggccgctcagcacccttgagcagcatctgcagcggatcctcggccatctgaacaccatgcacaccatttcgtcggtggcatggcgtcagcgtccgcatcacggcatctggctacgcacgactaggcgctaa

SEQ ID NO: 108359 - DNA, 780 bp, Enterobacter aerogenes
atgacatcgccgatgagggaagagccggtattgagcaccaggctgttatgtttgctgctggcaaacatgacggccgtaccgccgccgccgagtaaaccgctgttgatgatatcggctttcgcgctatcaacaacgttgatcccgttctcgctgccctgcacggtgccgctgttgttgattttgctgttgccgtcgcttaacgcaataccatcgccagcggtaccggtgatggcgccgctgttatctaacccgacgccaatttgcgaactcaggccgtttttgccgctgatcacgccggtatcggtattggtgatattaattgccgatgactcttcgctaacgaaaataccgttgttggcgccagtaatgattccactattattaaggacacccgccattgattgcacgttaacggcattatcagttgcagatgaaataattgcattttcattattattaatttcgactgattgcgcattgatattaatatccagaccgatacccgctccggcaatattaccttcgttggtgactttttcgacgtttatcccgctaacggataccgctggggtgttatctgcggaggagacggtaacgtctctattaataacgtattcgctatcagccgagaagtcttgcggcgtggaggttgactggtcaatggttgccgcgccgacaactattggcgttaacattaataaggcgggaaatatccttgccagcgttttggttgttctgtttagttcaaagtgtttattgctcatgtacacatccatttga

SEQ ID NO: 108360 - DNA, 777 bp, Enterobacter aerogenes
atgttcctgataattttaataaaatcgctcatcatcggcggcctggtcggcgtcggcgtgggcgccggagcggcacgcatgtttcacgcgccaaccacgcaagggatgggggcgtttcgtaccttgggcgagctgaattcctgcgaaggcgatccggcttctcacttctcttttggtctcggcttcttctttaacgcctgggcctcttccgttgcagcaggctccttcacccaggacgttgaccaccgcattatcccgaactggggcgcggcggcgttgatggtgaaaaatcgtaacgttggcgaaacgctacacgatccgaaaaaaatggccattgcctgcggcatcatcggcatgatcgtcgtcgccttccttaacctgaccgcctcttccgtaccggaagcgctgcaggtcaccgccgttaaggtattggttccggcggcaaacctgctggtgaacaccgtgatgccggtgattttctggctggcggctatcgatgccggtaagaaatcaggcttctgggcgacgattttcggcggcgcggcgcagctgattatggggaacgccgtaccgggtctggtactggggatcctgatcggtaaaggcgtagaagagagcggctggaaccgggtaaccaaagtgatgatgatcgccattgtcgcgttgttcgtcctcagcggcttcttccgcggcttcgacatgaagatgctcgaatccttccatctgaccgtgccgaactggctggacatgatccacaactcactcagcggcaagtaa

SEQ ID NO: 108361 - DNA, 300 bp, Enterobacter aerogenes; identical to SEQ ID NO: 90032

SEQ ID NO: 108362 - DNA, 363 bp, Enterobacter aerogenes; identical to SEQ ID NO: 90031

SEQ ID NO: 108363 - DNA, 339 bp, Enterobacter aerogenes; identical to SEQ ID NO: 90030

SEQ ID NO: 108364 - DNA, 387 bp, Enterobacter aerogenes; identical to SEQ ID NO: 90029

SEQ ID NO: 108365 - DNA, 1353 bp, Enterobacter aerogenes
atggcattagcaatgaaagtcatctctcaagttgcacagcagcgtaagacgctggaagaagccgttagtacggcactggaactggcggcaggtaaatccgacggtgcggaagtctccgttagcaagaccaccggcatcggcgtcagcacccgctacggtgaggtggagaatgttgaattcaatagcgacggcgcgctgggcatcaccgtttatcatcaaaaccgtaaaggcagcgcctcgtcgaccgatctgagccctgacgctatcgcccgtaccgtgcaggcggcgctggatatcgcgcgttacacctcgccggacccgtttgccggcgtggcggataaagaactgctggcctttgacgccccggatctggacctgttccatccggcagaggtctctccggatgaagccatcgagctggccgcccgcgccgagcaggccgccttgcaggccgacaaacgcattaccaataccgaaggcggcagcttcaacagccactatggaattaaagtttttggtaatagctacggcatgctccagagctactgctctacccgccactcgctctccagctgcgtgattgccgaagaaaacggcgatatggaacgcgactacgcctacaccattggccgcgcccttggcgatttacagaccccggagtgggtcggcaacgaatgcgcccgtcgcactttgtcgcgcctggcgccgcgtaagctgtcgacgatgaaagcgccggttatcttcgccaacgaagtggccaccgggctgtttggccacctggttggggcgatcgccggcggcgcggtctaccgtaaatcgaccttcctgctcgactccctcggcaaacagatcctgccggagtggctgaccatcgaagaacacccgcatctgctgaaggggctggcctccacgccgttcgacagcgaaggcgtgcgcaccgaacgtcgcgacattatcaaagacggcgtgctgacccagtggctgctgactaactactccgcgcgcaagctgggtatgaaaagcaccggccacgccggcggtatccataactggcgcatcaacggccgcggcctgagttttgcaaagatgcttaaagagatgggcaccgggcttgtggtcaccgaattgatggggcagggtgtcagtggcgtgaccggcgactactcgcgcggcgcatccggtttctgggtagaaaacggcgaaattcagtatccggtcagtgagatcaccatcgccggaaatctgaaagaaatgtggcgtaatattgtcaccgtcggcgacgatatcgaaacgcgcagcaatattcagtgtggttccgtgctgctgccggagatgaaaatcgccggtcaatga

SEQ ID NO: 108366 - DNA, 552 bp, Enterobacter aerogenes
atgacaaagcagcccgaagactggctcgacgacgtgcccggtgatgacgttgaagatgaagatgatgaaattatctgggtcagcaagagtgaaattaagcgcgatgcggaagaactgaagcgtcttggcgcggaaatggtagaccttggtaagaacgcgctggataagctgccgctcgataccgacctgcgcgacgccattgaactcgcccagcgtatcaagaaagaaggccgccgccgccagctgcagctgattggtaaaatgctgcgtaaccgcgacgtcgatccgattcgccaggcgctggataagctgaagaaccgtcacaaccagcaggttgcgctgttccataagctggaacaaatccgcgatcgcctgattgataatggcgatgatgcggtcgcagaagtattgaacctgtggccagacgctgaccgtcagcagctgcgctcactgatccgtaatgccaagaaagagaaagaaggcaacaagccgccgaaatccgcgcgcctgatcttccagtatctgcgcgaactggccgaaaacgaaggctag

SEQ ID NO: 108367 - DNA, 999 bp, Enterobacter aerogenes
atgaaaacgttaggtgaatttattgtcgaaaagcagcacgagttctcccacgctaccggtgagctgactgctttgttgtcggcaataaaattgggcgccaagatcatccaccgcgatatcaataaggccggtctggtcgatatcctgggtgccagcggtgcggaaaacgttcagggtgaagttcagcagaagctggacctgttcgcgaatgaaaaattaaaagctgcactgcgcgcacgtgatatcgtcgccggtatcgcctcggaagaagaagatgaaatcgtggtcttcgaagggtgcgaacacgccaaatacgttgtgctgatggatccgctggatggctcctccaacattgacgttaacgtctccgtggggactatcttctctatctaccgccgcgtcacgccggtcggtacgccggtcaccgaagaagacttcctgcagccgggtaacaaacaggttgccgcaggttatgtggtttacggctcctccaccatgctggtctacaccaccggctgcggcgtgcacgcctttacctacgacccgtcactcggcgtcttctgcctgagccaggagcggatgcgcttcccggagaaaggcaaaacctactccatcaacgaaggtaactacatcaagttcccgatgggcgtgaagaaatacatcaagtactgtcaggaagaagataaagagacccggcgcccgtacacctcgcgctatatcggttctctggtggccgacttccaccgtaacctgctgaaaggcggcatctacctgtatccgagcaccgccagccacccgcaagggaaactgcgtttactgtacgaatgcaacccgatggcgatgctggcggaacaggcgggcggcaaagccagcgatggtaaagagcgtattctcgatatcatcccggaaagcctgcaccagcgccgttcgttcttcgtcggcaacgaccacatggtagaagacgtcgagaacttcattaaagagttcccggacgcttaa

SEQ ID NO: 108368 - DNA, 405 bp, Enterobacter aerogenes
gtggtgtacgcgccggtgatgaaagtgatgtacagcgcgcaaaatggcaaggcgtggaaagaagagtgcggcgtgcgcaagcagattcaggttcgcgatgctcgcccgccgctggtggtgattagccgctcccatggtaacgatccggagctgcaggagtatctggagcaactgggcgagcaccagaccacctcaatcggttcgtcgctgaaattctgcctggtggcggaaggccaggcgcagctctatccgcgcttcgggccgaccagcacctgggacaccgccgccggtcatgcggtcgcggtagccgccggggcgcatgttcacgactggcagggtaaaaccctcgactacacgccgcgtgaatccttcctcaaccccggcttccgcgtctctatttattaa

SEQ ID NO: 108369 - DNA, 384 bp, Enterobacter aerogenes
atgaccctaccaaggcttgcaggtagtgacacgagcagtctgagtgttaatcagtatagatggattaacttctggatggctattttaggtcagaacttcatcgcatttccacatttttttgacatcacccgcattaatggaaaaagcgtggtggaaatttttcctgacaaccccggcaaggcgcgtatttttattttgcattttaccccgcttctcggtataaaacgccgcgcgcggctcattaaaaaagcgcacgaagccccatctcgtgacgccacttccagccgggttaagcactctgttacacagcggcggtttcgccggctgttcgatatgtatagctttggcttgtcgctggcctgtttcggggcagtgtggaggtga

SEQ ID NO: 108370 - DNA, 1155 bp, Enterobacter aerogenes
atggcaaaacacctctttacgtccgagtctgtatcagaagggcatccagacaaaattgctgaccaaatctccgatgccgtgctggacgcgatcctcgaacaggatccgaaagcgcgcgtagcctgcgaaacctacgttaaaaccggcatggttctggttggcggtgaaatcaccaccagcgcatgggttgatatcgaagagatcacccgcaacacggtgcgtgaaattggctacgtgcattccgatatgggctttgacgccaactcttgcgccgtcctgagcgccattggtaaacagtccccggacatcaaccagggtgttgaccgtgccgacccgctggaacagggcgcgggcgaccagggcctgatgtttggttatgccactaacgaaactgacgtgctgatgccggctccggtgacctatgctcaccgtctggtacagcgccaggctgaagtccgcaaaaacggcaccctgccgtggctgcgtccggacgcgaaaagccaggtcactttccagtatgacgacggcaaaatcgtcggcatcgatgcggtagttctgtctactcagcacgctgaagatatcgatcagaaatccctgcaggaagcagtgatggaagagatcatcaagccgattctgccgaccgaatggctgaacgcttcgaccaagttcttcatcaacccgaccggccgtttcgttatcggcggcccgatgggcgactgcggtctgaccggtcgtaagatcatcgttgatacctacggcggcatggctcgtcacggcggcggcgcgttctccggtaaagatccatctaaagttgaccgttccgcagcctacgcggcgcgctatgtagcgaaaaacatcgttgccgcaggtcttgccgatcgttgtgagattcaggtctcctacgccatcggcgtcgctgaaccgacttcgatcatggtagaaactttcggcaccgaaaaagtgccttctgaacagctgaccctgctggtacgcgagttcttcgacctgcgtccatacggcctgattcagatgctggatctgctgcacccgatctacaaagagaccgcggcttacggtcactttggtcgcgaacatttcccatgggaaaaaaccgacaaagcagccctgctgcgcgaagcggctggcctgaaataa

SEQ ID NO: 108371 - DNA, 1395 bp, Enterobacter aerogenes
atgcctgacaataaaaaacaagggcgttcaaacaagacgatgacgttctttgtctgtttcctcgccgcgctggccggcttactgttcggccttgatatcggcgttattgccggcgccttaccgttcattgccaatgaattccaaatcagcgcacacacccaggagtgggtggtcagctccatgatgttcggcgccgccgtcggcgcagtgggcagcggctggctctctttcaaacttgggcgtaaaaaaagcctgatgatcggcgcgatcctgtttgtggctggttcactattttccgccgccgcgccgaacgtcgaaatcctgctgatttcccgcgtattgctggggctggcggttggcgtcgcctcttacaccgcgccgctatacttgtcggaaatcgcgccggagaaaatccgcggcagtatgatttcgatgtaccagttgatgattaccatcggtattctcggcgcctatctttccgataccgccttcagctatagcggcgcgtggcgctggatgctcggcgtgattatcatcccggcagtcctgctgctgatcggcgttatcttcctgccggatagcccgcgctggtttgccgctaaacgccgtttcgtcgatgccgagcgcgtcctgctgcgcctgcgagataccagcgccgaagccaaacgcgagctcgatgaaatccgcgaaagcctgaaagtcaaacagtccggctgggcgctgttcaaagagaacagcaacttccgccgtgcggtattcctcggcgtactgctgcagatcatgcaacagttcaccggaatgaacgtcatcatgtactatgcgccgaagatttttgaactggcgggctatgccaataccactgagcaaatgtggggcaccgtgatcgtcggcctgaccaacgtactggccacctttatcgctatcggcctggtcgaccgctggggccgcaaaccgacgctgatcctcggctttatcgtgatggccgccggtatgggcgtactgggcagcatgatgcatatcggtattcattctgctaccgcacagtacttcgcggtactgatgctgctgatgtttatcgtcggcttcgcgatgagcgccggcccgctgatttgggtactgtgttcggaaatccagccgctgaaaggccgcgatttcggtatcacctgctccaccgcgaccaactggattgccaatatgatcgtcggcgccaccttcctgaccatgctgaactctctcggcagcgccaacaccttctgggtctacggcggtctgaacgtgctgtttatcctgctgactatctggctgattccggaaaccaaaaacgtctcgctggaacatattgaacgcaacctgatgcagggacgtccgctgcgcgaaatcggcgctcgcgattaa

SEQ ID NO: 108372 - DNA, 459 bp, Enterobacter aerogenes
atgcgtagcctgcgggagcaccttgccaccgccaatctcaagctggaacgccgctatgcggaaccgacgctggtttatcagcagcgcggcacctccgcaggcaccgcgtggctggagaaaaacgagatccgccttaatccagtgctattgctggaaaaccagcaggcgtttatcgatgaagtggtaccgcacgaactggcgcatctgctggtgtggaaacactttggccgcgtcgcgccgcacggcaaagagtggaaatggatgatggaggccgtgctgggcgtccccgcccgccgcacccatcgctttgagcttgattcggtacgccagaacaccttcccctatcgctgccagtgccagcagcaccagctcaccgtccgtcgccataaccgcgtggtgcgcggtgaagccacctaccgctgcgttcgctgcggcgatttgctggtggcggaaaagtaa

SEQ ID NO: 108373 - DNA, 708 bp, Enterobacter aerogenes
atgtcccgtatgtatgtttttgccgtcgcgttgttcagcgtggcagccagcggcccgcttgcggcagctggtattcatagtttttcccaggcgaaagccgcaggcgtaaaagtgaatgccgacgtccccggcgacttttattgcggttgtaaaatcgactggcagggtaaaaaaggtgttatcgatctggaatcttgcggctacaaagtgcgtaaaaacgagaaccgcgccagccgggtcgaatgggaacatgtggttccggcgtggcagttcggccaccagcgccagtgctggcaggatggtggacgtaaaaactgcgccaaagatccggaatatcgcaagatggaaagcgatatgcataacctgcagcctgcggtcggcgaggtcaatggcgaccgcggcaactttatgtacagtcagtggaacggcggcgatgggcagtatggtcaatgcgccatgaaggtcgatttcaaagataaagtcgccgaaccgccggtacgcgcccgcggctcgatcgctcgcacctacttctatatgcgcgaccgctatcagctgactctttcccgccagcaaacccagctatttaccgcctgggataagcagtatccggtgacctcctgggagtgcgagcgcgatgagcgaatcgccaaagtacagggcaaccataatccttacgtccagcaggcttgccaggcgcaaaagagctaa

SEQ ID NO: 108374 - DNA, 732 bp, Enterobacter aerogenes
atgcgcattccccgcatccaccacccggaacgcattacccccggcagccacattgccctcagcgaagacgcggcaaaccacgttggccgcgtcctgcgcatgagcaaaggtcaggaaatccagttgtttgacggcagcaatcaggttttcgatgcggtcatcaccgaagcgggtaagaaaaacgtcatggtcgaggttatccgtggccagatcgacgatcgtgaatcaccgctgcacatccatctcggccaggtgatgtcacgcggcgaaaaaatggaattcaccatccagaaatcgatcgaacttggcgtaagcctcataacgccactgttttccgagcgctgcggcgttaaactggatgccgaacgcttgcagaagaagattcagcagtggcagaaaatcgctattgccgcctgcgaacagagcggccgtaacatcgtgccggagattcgcccggcgatgcagctggaagcctggtgcgccgaggaagaaaacggcctcaagctcaacctgcacccgcgcgccagcgccagcatcaatacgctgccgctgccggttgaacgtgttcgcctgctgattggcccggaaggcggtctgtcggcggaagagatagcgatgaccgctcgctatcagtttactgatatcctgttgggaccacgcgttctgcgtactgagaccaccgcgctcaccgccatcaccgcgctgcaggtgcgttttggcgatctgggctaa

SEQ ID NO: 108375 - DNA, 951 bp, Enterobacter aerogenes
atgatcaagctcggcatcgtgatggaccctatcgcatccatcaacatcaaaaaagacaccagcttcgctatgttgctggaagcgcagcgtcgcggctatgaactccattacatggagatgaacgacctgtatctcatcaacggcgaatcccgcgcccgtacgcgcacgctgagcgtcgagcagaattacgacaaatggtatgagttcaccggcgagcaggacctggcgctggcggatctcgacgtcatcctgatgcgtaaagacccgccgttcgataccgagtttatctacgccacctacattctcgaacgcgcggaagagaaaggtacgcttatcgtcaacaagccgcagagcctgcgcgactgtaacgaaaagctgtttaccgcctggttctccgatctaaccccggaaacgctggtcacccgtaataaagcccagttgaaagcgttctgggaaaaacacggcgatatcattctcaaaccgctggatggcatgggcggcgcctcaatcttccgcgtgaaagcgggcgacccgaacctcggcgtcatttccgaaaccctgactgaattgggtagccgctactgcatggcgcagaattatctgccggccatcaaagacggcgacaaacgagtgctggtggtagacggcgagccggtaccatactgcctggcgcgtatcccgcagggcggtgaaacgcgcggcaacctggctgccggtggccgtggcgaagcgcgtccgctgaccgaaagcgactgggaaatcgcccgccgcgttggcccaacgctaaaagccaaaggccttatcttcgtcggcctggacatcatcggcgatcgcctgaccgaaattaacgttaccagcccgacctgcgtgcgcgaaatcgaagccgctttcccggatgtgtcgattaccggcatgctgatggacgccatcgaaaaacgtatcaacaaataa

SEQ ID NO: 108376 - DNA, 564 bp, Enterobacter aerogenes
atgaatttacagcatcactttctgattgccatgcctgcgctacaggaccctcttttccgtcgctccgtcgtctatatctgcgagtacaacgacgatggcgccatgggcattatcatcaataagccgctggaaaatttgcaggtggaagggatcctggaaaaattgaaaatcgcgccgcagccgcgcaacccggatatccgtctggataagccggtgatggtcggcggcccgctggcggaggatcgcggttttattctgcacacgccgccgtctgatttttcctccagcatccgtatctccgacaacacggtgattaccacctcacgcgacgtgctggaaactctcggtaccgataaacaaccgagcaacgtgctggtggcgttgggctacgcgtcgtgggaaaaagggcaactggaacaggaaattctcgataacgcctggcttaccgcaccggccgatcagaatattttgtttaaaacgccgattgccgaccgctggcgcgaagcggccaaacttatcggtatcgatatcgtgacgatgcctgccgacgcggggcatgcataa

SEQ ID NO: 108377 - DNA, 417 bp, Enterobacter aerogenes
atgagcggtacctttctgagttttgattttggcactaaaagcattggcgtcgccgttgggcagcgcattaccggcacggcgcgtccgctcccggcgctgaaagcgcaggacggcaaacctgactggaacatcatcgaaaagctgttgaaagagtggcagccggaagcggtgattgtcggcctgccgctgaacatggacggcaccgaacagccgctaaccgcgcgcgcacgtaacttcgccaataaaattcatggccgcttcggcgtgaaaatcaccctccacgacgagcgtttaagcaccgtcgaagcccgcgcagggctgttcgaacacggaggttttcgcgcgctcaataaaggcagcgttgattccgcctctgccgtggttatcctcgaaagctatttcgaacagggatactaa

SEQ ID NO: 108378 - DNA, 654 bp, Enterobacter aerogenes
gtgattaatttatcggagaatttactgcattcgcgtcaggtgactttcattactcatccgtccattcagagtaatgcatttgcgacgtggttgactgagaagctatccgtaaacgtaactctgcataatatcaacaaaccgctaactcaacgtctggcaaaagactcggtaatattgtttgatattgccgtctctaataagaaattgaatggcgtgtggcgagatattattcgcgtacaggcagataatccgcgtctgttgattatcaatagcgcgcaaaagtatgagctttacgaaatggcgcaatggcctgcgttatatggcgtattccgccatgacgatgaccaatcgcgcttaattgagggcgtcaaagccgtattaaatggcgagcagacggctgaattgagcgtgatgcacccggcgctgtattctgcggatcaggtcacggcgccgacggagaactcaccgttgaccgagcgtgaatgtgagatcctcaacgagctgcgctgcggcgcaacgaatatggatattgcccgcgcgctgttcatcagcgaaaacacggtacgtactcatctgtacaatgtgttccgcaaattgagcgtcaagaaccgtacccaggcggtaagctgggcgaatgaacatctgcgtcactga

SEQ ID NO: 108379 - DNA, 327 bp, Enterobacter aerogenes
atggtcaggataaacagcgtttcggagatctgcgaaatcgacatcaataccgacgcgtgctcgacgataaagctgccggagaacagcgggtttttatcgaagctgtgcaggaaggtgttgccaaacatattagtgatttgcagttcggcgccgagcatcatggagaagataaagaagattgccatacgcttgtttttaaacagcgcaaaggcgttcaggccgagcatctcggtccagctctggttgcgctgggcgttggcgaccggaatatgcggcagcgtcagggtgaacagcgccagcaagaccgacagcgtcgcgccgatataa

SEQ ID NO: 108380 - DNA, 723 bp, Enterobacter aerogenes
atgtgggacgccgctggcgatatgatatttctcaatcagcttgtggtgtttgagataaaattgattcaccgtctgcagccagctctgggcgatttcatcgccaagcggatcgtggccgtacattttgaatccctgtaccgccatccactgcagcggcgcccagccgttgggtttatcccactgttcgccgctttcatattccgtcgccatgatgccgccaggggtgagcagacgcgcgcgtacggcatccgccagccgttcggcctgggcgtgggtcgccatcccgacataaagcgtgacgatgctggcggcggagaacaaggccaactgctcacggcgccaatcgtaatcgcgaaaacagccgcactcttcatcccacaggtagcgggtaaccgcctcccggcgcgcgttggctttacggcgaaattcggcttcagcctcgcgatcgcccttcaggccggaaagattggcgatagtattttccagcttaaacagaaaagcgttgaggtcgatgggaataaactgggtggtgcggatactcgccagcctggtgatatcgcgcagccagcggctggagtagtcccagccggaagccgcgccggcgcgcaggtcgcgatagacctcgtttggcggccggccggaatgcttcgccgtttcgacatcttctcgccaggattcatcgcgcggcgtatcacggtcgtcccagtagcggttaagcagtga

SEQ ID NO: 108381 - DNA, 609 bp, Enterobacter aerogenes
atgccgatcagcgtcgccaaaaaactggtcatcccgaaacttcccgcgtttttacaacagtatcccggtattgaagtcgaactgagcagtagtgaccggctggtcgatgtggtgcgcgaaggtttcgactgcgtgatccgggtgggtacgcttaaagactcgggactcatcgcccgcccgctcggcaaactcacgcaaattaactgcgccagtccgcattatctggcgcgcttcggctacccggaaagcctcgacgatctggcggatcatgccttgatccactacgccagcaacttcggcgcgcggcagtcaggctttgaagtcgtcagcgatggcgccgtgcgctgggtgaaaaccggcggcgtgttgaccgtcaatagcaccgaaacctaccaggccgcctgccaggccgggctcggcattattcaggtcccgcgcattgccgtacgtgaaccgctgcgtaccggcgagctggttgagatcctgccgcagtaccgcgccgaaccgatgccggtgtcgattatctatccacatcggcgcaatctctcccgccgcgtgcatctctttatggagtggctgggcggattgatgaaaggttatgtcgattaa

SEQ ID NO: 108382 - DNA, 636 bp, Enterobacter aerogenes
gtgaagccgcagcgtattgcgattattcatgacaagcagcagtacggcgaagggctggcgcgttccgtacaggacaacctgaagaaagccggcgccaatatcgtcttctttgatggcatcaccgccggcgagaaagacttctccgcgctgctggcgcgcctgaagaaagagaatatcgacttcgtctactacggcggctactacccggaaatggggcagatgctgcgccaggcgcgctccgtcggcctgaaaacgcagtttatggggccggaaggcgtcggtaacgcctcgctgtccaacatcgccggcgcggcggcggaaggtatgctggtgacgatgccaaaacgctatgaccaggatccgtccaacagcgctattgttgatgcgctgaaagcggataaaaaagatccgagtggtccatacgtctggatcacctatgccgccgttcagtcgctggcgcaagcgatggacagaaccggcagccagcagccgctggatttaattaaagatttgaaagctcacggcgcgaagaccgtgattgggccgctgaattgggatgaaaaaggcgatctgaagggatttgaatttggtgtcttccagtggcacgcggatggttcatccaccgtcgctaagtaa

SEQ ID NO: 108383 - DNA, 351 bp, Enterobacter aerogenes
atgttcatcgaggaacatatcgcgggtggcctgttccggggccatctcgcggaaatcgatcgccgtggttttaccgtctttagtacgcagcatcataaacccgccgccgccgatattaccggcctgcggatgcgtgaccgccagcgcgtagccgacagccaccgctgcatcgacggcgttgccgccctgacgcaaaatatccacgccgacgcgggtcgccagcgcatccaccgaggccaccatcccctgctgggcgcgcaccgggtgaaacacatcttcctcaacgccatacgagaccggcggcgggggcggcggattggcggcgacggtaaagctgccccccgccagtaa

SEQ ID NO: 108384 - DNA, 426 bp, Enterobacter aerogenes
atgtttctccgcctccgccatcacctgcatggcgtcggcgctgccaaagccatatttctgcatatcgaagttttcgaggatattgaggatctgcacgatgtggatcccgccagaggacggcggcggcatggagtaaacctcatagccgcgatattcaccgctaatcggcgtacgctccacggccttgtagttggcgaggtcggctttggtgataagcccgccgtgttttttcatctcaccggcaatctggtcggcgatagcccctttatagaaggcgtccgggccgtgctcggcaatcagttccaggcttttccccagattcttttgcaccagccggtcgccttttttcagcggctcgccgttcttccagaaaatcgctttgctgttttcatgctgcgggatcacttcgctgccataggtttttaa

SEQ ID NO: 108385 - DNA, 756 bp, Enterobacter aerogenes
atgaacgagccgccgggaaaccgtctgcgcgttgcgctgaccggcctgaccatggctgagaaattccgtgacgaaggtcgtgacgttctgctgttcgtcgataacatctatcgttacaccctggccggtactgaagtatctgcactgctgggccgtatgccttcagcggtaggttatcagccgactctggcggaagagatgggcgttctgcaggaacgtatcacctccaccaaaaccggttctatcacctccgttcaggcggtatacgtacctgcggatgacttgactgacccatccccagcaaccacctttgcgcaccttgacgcaaccgtggtactgagccgtcagatcgcgtctctgggtatctacccggccgttgacccgctggattccaccagccgtcagctggatccgctggttgttggtcaggaacactacgacaccgcgcgtggcgtacagtccctgctgcagcgttatcaggaactgaaagacatcatcgccatcctgggtatggatgaactgtctgaagaagataaactggtggtagctcgcgctcgtaagatccagcgcttcctgtcccagccgttcttcgtagcagaagtatttaccggctccccgggcaaatacgtttcgctgaaagacaccatccgtggctttaaaggcatcatggaaggcgaatacgatcacctgccggagcaggcgttctacatggtcggttccatcgaagaagccgtggaaaaagccaaaaaactttaa

SEQ ID NO: 108386 - DNA, 420 bp, Enterobacter aerogenes
atggcaatgacttaccacctggatgtcgtcagcgcagagaaacagatgttctctggcctggtcgagaaaatccaggtaacgggtagcgaaggtgagctgggtattttcccgggtcacgcgccgctgctcaccgccattaagcctggtatgattcgcatcgttaaacagttcggtcacgaagagtttatctatctgtccggcggcattcttgaagtgcaaccgggcaacgtgatcgttctggccgatacggcaattcgtggtcaggacctcgacgaagcgcgagccctggaagcgaaacgtaaagcggaagagcacatcaagagctctcacggcgacgtggattacgctcaggcgtccgcggaactggccaaagcgatcgctaaactgcgcgttatcgaattgaccaaaaaagcgatgtaa

SEQ ID NO: 108387 - DNA, 1371 bp, Enterobacter aerogenes
atgtcaaacagtgcgatgagcgtggttatccttgccgcaggcaaagggacccgcatgtattccgatcttcctaaggtgctgcatactctggccgggaagccaatggttcagcacgtcattgatgcggctaaagatttaggcgctgccgcggtacacctggtgtacggccacggcggcgatctgctgcgtcaaacgctgcatgaagataacctcaactgggtgctgcaagcagagcagctcggtaccggccatgcgatgcagcaggcggcgccgttcttcaatgatgatgaagatatcttgatgctctatggcgatgtgccgctgatttcggttgaaacgctacagcgcctgcgcgccgcaaaaccgcagggcggcattggcctgttgacggtgaagctggatgatccaaccggttatgggcgcatcacgcgtgaaaatggccaggtgacaggtatcgttgagcataaagacgccagcgaagctcagcgccagattcaggaaatcaataccgggattctggttgctaacggcgcggacctgaaacgctggctggcgaagctcactaacaataacgcccagggcgaatactacatcaccgatattatcgcgatggcccatcaggaaggtcatgagatcgttgcggtgcatcctcagcgcctgagcgaagttgaaggggtgaacaatcgcctgcaacttgcgcgtctggaacgagtgtatcagtcagagcaggcggaaaaactgctgttggcgggcgtgatgctgcgcgatccggcgcgtttcgatctgcgcggcgtgctgaaacacgggcgcgatgtcgaaattgatactaacgttattctgcaagggcatgtcgtgctgggcgatcgtgtgaagatcggcgccggctgcgtcatcaaagacagcgtcatcggtgatgactgcgaaatcagcccgtatagcgtggttgaagatgcgcagctgcaggccgcctgcaccatcggcccgtttgcgcgtctgcgtccgggggctgagctgctggaaggcgctcacgtcggcaactttgtcgaaatgaagaaagcgcgtctgggcaaaggttcgaaggcaggtcatctctcctacctcggtgatgctgaaattggcgacaacgttaatatcggcgcgggtactatcacctgtaactatgatggagcaaataagcataaaacgatcatcggcgatgatgtgtttgtcggttctgatacgcaactggtcgcgccggtcagcgtcggtaatggcgtgacgattgccgcgggcaccaccgtcacgcgtaatatagctgacaacgaactggtgctaagtcgcgtgccgcaggtccacaaacagggctggcagcgaccggtgaagaaaaagtag

SEQ ID NO: 108388 - DNA, 1830 bp, Enterobacter aerogenes
atgtgtggaattgttggcgcagtcgcgcagcgtgatattgctgaaatccttctcgaaggtttacgtcgtctggaataccgtggctatgactctgccggtctggcagtggtcgataacgaaggtcatatgacccgcgttcgtcgtctcggtaaagttcagatgctggctcaggcggtagaagagcaaccgttacacggcggtaccgggattgcccatacccgctgggcgacgcacggcgagccgtctgagagcaatgcgcatccgcatgtttctgaacatattgcggtggtccataacgggatcatcgagaaccatgagccgctgcgcgccctgctgcagtctcgcggctatgtcttcgtctctgagaccgataccgaagttatcgcgcatctggtgcactgggagctggaacagggcggcactttacgtgaagccgtactgcgcgcaatcccgcagctgcgcggcgcctatggtacggtgatcatggatacccgcgatccgggaacgctgctggcggcacgctcaggcagcccgctggtcattggcctgggcatgggcgaaaactttatcgcttctgaccagctggcgctgctgccggtgacccgccgctttatcttcctcgaagagggtgatattgccgaagttacccgtcgtacggtggtgattttcgataaatccggcgcggaagtgaatcgccaggagatcgaatctaatctgcagtatgacgccggtgataaggggatttatcgccactatatgcagaaagagatttacgagcagccgaacgcgattaagaacaccctgaccgggcgcatcagccatggcgaggtcgatctcagcgaactggggccgaatgccaacgcgctgctgtcgcaggttgagcatatccagattgttgcctgcggaacctcgtataactccgggatggtctcccgttactggttcgaagcgttagccggcgtgccgtgcgatgtcgagattgcttcggaattccgctaccgcaaatccgcggtgcgccgcaacagcctgatgatcaccctctcccagtccggtgagacggcggataccctggcggcgctgcgcctctctaaagagcttggctatctgggttcgttggccatctgcaacgttccgggctcttcgctggtgcgcgagtctgacctggcgttgatgaccaaagccggtaccgaaatcggcgtggcatcgaccaaagcctttaccactcagctgaccgtgctgttgatgctggtggcgaagctggcgcgtctcaagggccaggatgcggctatcgagcaggatatcgtgcatggcctgcaggcgctgccgaaccgtatcgagcagatgctgtcgcaggataagcgcatcgaacagctggcggaacgtttctccgataagcatcacgcgctgttccttggccgcggcgatcagtacccgatcgcgctggaaggggcgctgaagctgaaagagatctcctacattcatgctgaagcttatgcggcgggcgagctgaaacacggcccgctggcgctgattgatgccgaaatgccggtcatcgttgtggcgccgaacaacgaactgttggaaaaactaaaatccaatattgaagaagttcgcgcccgcggcggtgaactgtacgtcttcgccgatggagacgccggtttcagcggcagcgacaacatgcacatcatcgagatgccacatgtcgaagaggtgattgcgccgatcttctacaccgtgccgctgcagctgctggcttatcacgttgcgctgatcaaaggcaccgacgttgaccagccgcgtaacctggcgaaatcggtgaccgtagagtaa

SEQ ID NO: 108389 - DNA, 579 bp, Enterobacter aerogenes
atgaaaaacttatgtggtaataatttcttagcgcttctcaagcatggtgtggaaatcgatcaacttatcaagcgaagagatagagatgagatcgcgcagcatacaacaacagatatgatgagtttgtctcatgggcaacgcttatcaccttctccgctagttcctgcttgtatttatttgatattaattattattttttcagttaatgcggcttttatattgcagagtctccaacttactccgccccgttttctggctttctactttccgctgctattaggggttattgttataaccagcttagctgcagggttagtaggtcgaggtcatgctgttggattacgtatttttatgtacctatatctcgccaatttgtttgttttttgtctagtcctggcgcttgccgtcatcgaagatgaagctattgctgccaataaggtcattctttttatgtgtgagatagccgtactctggttaggccgtagattgatgaatggaacggcttttacactgtttacgctttatcgccgtacgatcaggcttgctatggttgcccaacatctcaacgttgccagatga

SEQ ID NO: 108390 - DNA, 1041 bp, Enterobacter aerogenes
atgaacgttatgcgtaccaccgtcgcaacagttgtcgccgcgaccttatcgatgagcgctttctctgctttcgcagcagcaagcctgactggcgcaggtgcaactttccctgctccggtgtatgccaaatgggctgatacctatcagaaagaaacgggcaataaagttaactaccagggtatcggttcctctggcggcgttaaacagattattgccaacaccgtggatttcggtgcttctgatgctcctctggctgatgacaaactggcgcaggaaggcctgttccagttcccgaccgttatcggcggcgtggtgctggcggttaacctgccgggcgttaaatccggcgagctggtgctcgatggtaaaactctcggcgacatctatctgggcaaaatcaaaaaatgggatgacgaagcgatcgctaaactcaaccctggcctgaagctgccggctcagaacatcgccgtggttcgccgtgcggatggttccggtacttccttcgtcttcaccagctatctggcgaaagtgaacgaagagtggaaatctaaaattggcgcaggctctaccgtaaactggccaaccggcctgggcggtaaaggcaacgacggtatcgcagccttcgttcagcgtctgccgggcgctatcggctacgtcgagtatgcttacgctaagcagaataacctggcctacaccaaactgctgtccgctgacggcaaaccggtcagcccgacggaagataacttcgctaatgcggcgaaaggtatcgactggagcaagtccttcgctcaggacctgactaaccagaaaggtgaaaatgcatggccgatcacctcaaccactttcatcctcgtccacaaggcttccaataagccggagaataccgcggaagtgctgaagttcttcgactgggcatacaaaaacggcggcaaagaagcgaatgcgctggattacgccagtctgccggacagcgtggttgagcaggttcgcgccgcatggaaaaccaacgtgaaagacagcagcggtaaagcgctgtactaa

SEQ ID NO: 108391 - DNA, 474 bp, Enterobacter aerogenes
ttgattggcggcgacatagcgcccgctgaccatcagcgaggctttgtcccacagcggaatatctttgtaacgcacatccagggtattggtattaatttgctgcttattagtcaaagagcggtcgtaatcatcaatatcttcgcgcaccagcgcgatatcaaatttaccggcgcccactttccagttttcaagccctacgccagctgccgcatcggttctttgtgttttccagtccagcatctggatctcgattttcggcgcaccgtgcttaccgacccaaaaatccgcttccggggcaaacggcaaaaagcctttggtgttgacgtacatatccgagaactgaaggtagttttcgccgccggcgttgtcgccaaaccagccggcagaatattgctgacccacgttgccatcgagcatcacgatggcgtccacacgtttgtcgccttcctgaaaaacgcactgtttaagctgtaa

SEQ ID NO: 108392 - DNA, 666 bp, Enterobacter aerogenes
atgacccaaccacaagcagtatttttcgattgtgacggcacgctggtcgatagcgaggtgatttgctcacgcgcctatgttcacatgtttcaggaattcggtattacgctggatttagccgaaatttttaagcgcttcaagggcgttaagctgtacgagattatcgacaccatcaacgctgaatatggcgttaacctgcagaaagagactctggagccggtgtatcgcgccgaagtcgcccgtctgttcgatagcgagctggagatcatccccggcgccgctgcgctgctggacgcggtgaaaatccccatgtgcgtggtgtcgaatggcccggtcagtaaaatgcagcattcgctcggtagaacgcagatgctgcaccacttcccagaccggctgtacagcggttacgacattcagcgctggaaacccgacccggcgctgatgttccatgcggcagaggccatgcaggtacaagtcgaaaactgtattctggtcgatgattccagcgcgggagcccaatcaggaattgccgcgggtatggaagtcttttacttctgcgccgacccgcacaaccaaccgatcgatcatccgaaagtaacgacctttaccgatttagctgagctgccggcattgtggagagcgcgtggctgggatattactcgttaa

SEQ ID NO: 108393 - DNA, 1338 bp, Enterobacter aerogenes
atgagtcaacaaccaaccagccagtcttctggccagggtctgctggagcgcgtatttaaactgcgcgagcacggcaccacggtgcgcactgaagcgatcgccggtttcaccacgttcctgacgatggtctacatcgtcttcgtgaacccacaaattcttggcgtggcgggtatggataccagcgctgtctttgtgactacctgtctgatcgcggccttcggtagcatcctgatgggtctgttcgcgaatctgccggtggcgctggcgccagcgatgggtctgaatgccttctttgccttcgtggtagttcaggcgatgggcctgccgtggcaggtgggtatgggcgcgattttctggggcgccgttggcctgctgctgctgaccctcttccgcgtacgctactggatgattgccaatatcccggtgagcctgcgcgtgggtatcaccagcggtatcgggctgtttatcggcatgatgggcctgaagaacgccggcgttatcgtggcgaaccaggacacgttggtcagcatcggcaacctgacttcccacagcgtgctgctgggcgtgctcgggttctttattatcgctatcctggcatcgcgtaatattcatgccgccgtgctggtctccatcgttgtcaccaccctgttgggctggatgctcggcgatgtgcactataccggcatcgtctccgcgccgccgagcgtaacctcggttgtgggtcaggtcgatctggccggttcgctgaaccttggcctggcgggcgtgatcttctcgttcatgctggttaacctgttcgactcctccggcaccctgattggcgtcaccgataaagccgggctggcagatgcgcagggtaaattcccacgcatgaagcaggcgttgttcgtcgatagcgtgtcgtctgttgccggctcctttattggcacctcttcggttacggcctatatcgaatcctcctccggcgtttcggttggcgggcgtactggcctgaccgccgttgtcgtaggtatcctgttcctgctggtcatcttcctgtcgccgctggcggggatggttccggcctatgccgccgctggggcgctgatttacgttggcgtgctgatgacctcaagcctggcgcgcgtgaagtgggatgacctgacggaagcggtaccggcgtttatcaccgcggtgatgatgccgttcagcttctcgatcaccgaaggtatcgccctgggctttatttcctactgcgtgatgaagattggtaccggccgtctgcgcgaactcagcccgtgcgtgatcatcgtttcgctgctgttcgtgctgaaaattgtctttatcgatgcgcattga

SEQ ID NO: 108394 - DNA, 567 bp, Enterobacter aerogenes
atgtctgatacgttgaaagttgttacgttactcggaagtctacgcaaaggttcttttaatgccatggttgcgcgcacgctgccgggcattgcgcctgcgggcatggaaatctccgcgctgccgtcgatcggcgatatcccgctgtacgatgccgatatccaacaggaagaggggttcccgcagagcgtgcaggcgatcgcgaaacaaatccgcgaagcggacggcgtggtgatcgttactccggaatataactactcggtacccggcggtctgaagaacgctatcgactggctctcgcgtctgccggaacagccgctggccggtaagccggtgctgatccagaccagctccatgggcgctatcggcggggcgcgctgccagtatcatctgcgccagattctggtcttccttgatgcgatggtcatgaacaagccggaatttatgggcggcgtgattcagaacaaagtcgatccgcaggcgggtgaagtggtcgatcagagcacgctggaccatctgcgcggccagttgaccgcctttggcgattatattcagcgggttaaagcataa

SEQ ID NO: 108395 - DNA, 738 bp, Enterobacter aerogenes
atggcaacgcattttgcaagagggatactcaacaccagggagccgctatcgacgcgtttgtcggcggcatgtcatcaatccgcacgtaacctaccagaataccgacagagccgctatcgcgcctcgcgttcgctgctcgctgaactgcttttcatgctttatggtatcggcgagctgccggaaatcatcagcgaacccaatggacggcccgtatttcgcgatccccaccttccccgcttttccatctcttatgccgggaatatcgtcggcgtagcgctgacgaccgaaggtgactgcggtctcgatatggaactacagcatgcctcgcgtggcgtccatccgctacatgcagccgatcgctatgtcttcaatagcaatgagaatttatggattaacatccagcacgatccggatgaggcccgcgcccaactggtggcgctgcgccgcagcgtgctgaagctcaccggtgaagcccccgtgcgagtacaactgctgccggggtctggtcgcctgcgtaccgctggcacccaatcgattgaagccatctgtgatgctgaaacgttgctggtgtggtcaatcgccgtcaccccgaatatcgggccgctgaaggtctgggaatttgatagtaaagagggctggcgctgcctgcctgatgcgcaaacgcgcgccaaagagactgacgcgcgcctgatgcgctttaccagcttaccggtagaaaaagtattctccctcaactga

SEQ ID NO: 108396 - DNA, 1185 bp, Enterobacter aerogenes
atggcacgctttcttatctgcagtttcgcattggtactgctctatccatccggcattgatatgtatctggtcggtctaccgcgcatcgcccaggatcttggcgccagcgaggcacagctgcatatcgccttttcggtctatttagccggcatggctaccgcgatgctttttgccgggcgagcggcggataaatccgggcgtaaaccggtcgcgattttcggcgccatcaccttcatactggcctcgttgctgtgctcgcaggcgcataacagcacgcatttcctgatcggccgctttatccaggggatcggcgcgggaagctgctacgtcgtcgcctttgccgttctgcgcgatacgctggacgagcgccgccgcgccaaggtactgtcgctgcttaatggcattacctgcattattcccgtcctcgcgccagtacttggccatctgatcatgttgaaatatccgtggcagagcctgttctacaccatgacaggcatgggggtgatggtggggttattgtcggtgtttatcctgcgtgagacgcgcccgacaacgcatccgcaggcagacgcacagcacaatggcgccgctgagtcgctgctaaaccgttttttcctcagccgcatagtcattacgactctcagcgtcaccgcaattttgacctacgtaaacgtctcaccggtactgatgatggaagagatgggtttcgaccgcggaacttattcaatggcgatggcgctgatggctatggtcagcatggccgtgtcgttctccacgccgttcgctctgacgctgtttaaaccacgtaccctgatgctgacctcgcagacgttgttccttatcgctggcgtggtattgagcctcgccgccagccagcccatcaccatgctgggattaggtatgatctgcgcgggtttctcggttggctttggcgtcgcgatgagccaggcgttggggcctttcacgctgcgggcgggcgtcgccagctccgccctcggcatcgcccaggtctgtggttcttcgctgtggatttggctggcggctatcatcgggcttagcgccatgaatatgctgatcgggatactcattgcctgtagcatagtcagtattgttctgatactggtcgtctcgccggcgcgcgcgacgcaatatgatgaagaaatccctgtcgagtctcgatcttaa

SEQ ID NO: 108397 - DNA, 1365 bp, Enterobacter aerogenes
atgagccataacgacactatcgtcgcccaggcaacccctccgggacgcgggggtgtgggcatcctgcgtatctccggccttaaggcgcgcgacgtcgcgcaggcggtactcggcaagctgccgaagccgcgctatgccgactatctgccgtttaaagacgccgacggtacgccgctggatcaggggattgcgctgtggttcccgggacccaactcctttaccggcgaagatgtcctcgaactacagggccacggcggcccgatcattctggatctgctgctcaaacgtattctgacgttgcccggcgtacgcatcgctaacccgggcgagttttccgagcgcgcgttcctcaacgacaagctcgacctggcgcaggcagaggccatcgccgaccttatcgacgccagctcagagcaggcggcccgttcggcgttgaactccttgcaaggggccttctccgcgcgtgtgaaccatcttgtggaagcgctcactcacctgcgcatctacgtggaagcggcgattgatttcccggatgaagaaattgatttcctctccgatggtaaaattgaagcccaactgaacgacgtgatcgccgatctcgatgccgtccgcgccgaagcccgtcagggcagcctgttgcgtgaagggatgaaagtggtgatcgccgggcggcctaacgccggtaaatccagcctgctaaacgcgctggccggacgcgaagcggcgatcgtcaccgatatcgccggcaccactcgcgacgtactgcgcgaacatattcacatcgacggtatgccgctgcatatcatcgataccgcaggcctgcgtgacgccagtgatgaagtggagcgaatcggcattgaacgcgcctggcaggaaattgaacaggcggatcgggtgctgtttatggtcgacggtaccaccaccagcgccgttgacccggcggagatctggccggactttatcgagcgcctgcccgctaagctgccgattaccgtggtgcgtaataaagccgacgtcaccggcgaagcgctggggctcagcgaagtaaatggccactcactaatccgcctgtcggcgcgtaccggtgaaggggtcgaggtgctgcgcaaccaccttaagcagagcatgggcttcgataccaacatggaaggcggcttcctcgcccgtcgtcgccacctgcaagcgctggaaacggctgcggaccatctgcagcagggcaaagcgcagttgctgggcgcctgggccggtgaattactggcggaagagctacgtctgtcgcaacaggcattaagcgaaatcaccggcgaatttacctctgacgatctgctgggccgcatcttctccagtttctgtatcggtaagtaa

SEQ ID NO: 108398 - DNA, 747 bp, Enterobacter aerogenes
gtgactaaaatcaaacttctggcactgggtgtgttcatcgcgacgtcagctagcgcagcgcacgctgacgggaagttaacgctgggggccggcgtgggcgtcgtcgagcatccttataaacaatatgatgcagatgtttacccggtacctgtcattagttatgaaagcgataacttctggttccacggtttgggtggtggctactacctgtggaatgataccaacgacaaactgtccgtgaccgcttactggtcgccgatgtatttcaagccgggcgacagcgacaattcgcagatgcgcaagctggaccgccgcaaatccaccatgatggcggggttgagctacgttcataacactcagtacggattcctgcgtacgacgctggccggcgatacgctggacaacagcaatggcattacatgggatctggcctggctgtaccgttataccaacggcaacctgaccctgacgccgggtattggcgtggagtggaacagcgacaatcagaacgaatactactacggcgtctcgaagcatgagtcgaatcgcagcggcatgcgcagctacgatcctgacagcagctggaacccgtatctggagctggcggcgaactatcgtttcctcggcgactggagcgtttacggtatcgcccgttacactcgtctgtctgacgaaatcaccgatagtccgatggtggacaaatcctggagcggcctgatttcgaccgggatcacctataccttctga

SEQ ID NO: 108399 - DNA, 1935 bp, Enterobacter aerogenes
atgaatatattcgatcactatcgccagcgctatgaagctgccaaggacgaagagttcacactgcaggagtttcttaccatctgccggcaagatcgcagtgcttatgccaacgcggcagagcggctattgacggccattggtgaaccagtcatggtcgatacggccctggagccgcggctgtcccgcctcttttcaaaccgggttgttgcacgctatccggcgtttgaagagttctatggtatggaagatgccatcgagcagattgtttcctatctgaaacatgctgcgcagggtctggaagagaaaaaacagattctgtatctgctggggccggttggcggcggtaaatcctcgctggcggaacgcctgaaatcgctgatgcaaagggtgccaatctacgtgctgagcgcgaatggcgaacgcagcccggtcaacgatcaccctctgtgcctgtttaacccgcaggaggacgcgcagatcctcaataaagaatacggcattcctaaccgttatctcggcacaattatgtcgccgtgggcggctaaacgcctgcacgagttcggcggtgatatcactaaattccgcgtcgtgaaagtgtggccgtcaatcctcgaacagattgccatcgccaaaacggaacccggtgatgaaaataaccaggacatttcggcgctggtggggaaagtggatatccgtaaactggaacactatgcgcaaaacgacccggatgcctatggttactccggcgcgctatgccgcgccaaccaggggatcatggaattcgtcgagatgtttaaagcgccgattaaagtattgcacccactgctgacggcgacccaggaaggcaactataacggtaccgagggtatctccgccctgccgttcaacggcattatcctcgcgcactccaacgaatccgagtgggtgaccttccgtaataacaaaaacaacgaggcgttccttgaccgtgtctatatcgtcaaagtgccttattgcctgcgcatctcggaagagatccgtatttatgaaaaactgttgaataacagtgagctgacccatgcgccatgcgccccaggaacgcttgaaacgctgtcgcgcttctctattctgtcgcgcctgaaagagccggaaaactcgagcatctactcgaagatgcgcgtctatgacggcgaaagcttgaaagataccgacccgaaagcgaaatcctaccaggagtatcgtgattacgccggcgtcgacgaagggatgaacggtctctctacccgttttgcctttaaaattctctcaagggtgtttaacttcgatcatgccgaagtggcggccaacccggtccatctgttctacgtactggaacagcaaatcgaacgcgaacagttcccgcaagagcaggccgaacgttatctggaattcctcaaaggctatctgatcccgaaatacgccgaatttatcggcaaagagatccaaacggcgtatcttgagtcttattccgaatatggacagaacatttttgacagatatgtcacttatgcggatttctggattcaggatcaggagtaccgcgatccggataccgggcaactgttcgaccgtgaatcgctgaattcggaactggagaaaatcgagaagcccgccgggatcagcaacccgaaagatttccgtaatgaaatcgtcaacttcgtgctgcgcgccagagcgaataacagcggacgtaatccgaactggaccagttatgaaaaactgcgcacggttattgagaagaaaatgttctccaataccgaggagctgttgccggtcatttcgttcaatgccaaaacgtctaccgacgagcagaaaaaacacgacgacttcgtcgatcgcatgatggaaaaaggctatacccgtaaacaggtgcgcctgctgtgtgaatggtacctgcgggtacgtaaatcgtcctga

SEQ ID NO: 108400 - DNA, 1284 bp, Enterobacter aerogenes
atgacctggttcatagaccgacgcctgaacgggaagaacaaaagcgctgtcaatcgtcagcgctttctgcgccgttacaaggcgcagataaagcagtcgatctccgaagccatcaataaacgttcggtgaccgatatcgacagcggtgaatccgtctccattccgacggacgatattaacgagccgatgtttcatcaggggcgcggcgggcttcgtaatcgcgtccatcccggcaacgatcactttgtgcagaacgaccgtattgaacgccctcagggcggcggcggcggaggcggcggtggtcaggggcaagccagcgccgatggcgagggccaggatgaattcgtctttcagatttcgaaagatgaatatcttgacctgctgtttgaagatctggcccttcccaacctgaagaaaaaccagcaacgccagttgaacgagttcaaaacccatcgtgcgggttttaccgccaacggcgtgccggccaatatcagcgtggtgcgttcattgcagaattcgctggcgcggcgaaccgcgatgaccgccggtaaacggcgcgaactgcgggcgctggaagacgatctcgataccattgccaaaagcgaaccagcgcagttgctggaagaggagcggctacgtaaagagattgcggaactacgggctaaaattgagcgcgtgccgtttatcgacacctttgatttacgctataaaaactatgagaaacgaccggagccttcaagtcaggcggtgatgttctgcctgatggatgtttctggttcaatggaccagtccaccaaagacatggcgaaacgtttttacattctgctgtatttgttcctcagccggacctataaaaacgttgaagtagtctatattcgccaccacacccaggcgaaagaggtggatgaacatgagtttttctactcccaggaaaccggcggtacgattgtttcaagcgccttgaagttgatggatgaggttgttaaagcccgctatgacccggcgcagtggaatatttacgccgcacaggcgtcggatggcgataactgggcagacgactcgccgctgtgtcatgaactgctggcgaagaaaatattgccggtggttcgttactacagctatatcgaaatcacccgccgcgctcaccagactctgtggcgcgaatatgaacatctgcaggcgacgtttgagaattttgctatgcagcatattcgcgatcaggaagatatttatccggtgttccgcgaactgtttcataaacaaggcgctaccagtaatacttag

SEQ ID NO: 108401 - DNA, 216 bp, Enterobacter aerogenes; identical to SEQ ID NO: 88453

SEQ ID NO: 108402 - DNA, 1491 bp, Enterobacter aerogenes
atgaaattacagaataaattactgcgacatgttatttccgcaggcgttgtggtgttgacgtcttcttttcttgtatacgaattaatcgctacccaccgcgatatgtcaggctatatgcgatacatcatagaaaaaggagaatcgacctttctctatgataagtatcagaatcaactcatcatctctcagtttctgcgtaagctggatactcccccaaaccaaacagaggtagaacaggtctgcaatagcgtacaacacaacggggatgtcagtggtttgaatatcgccggatatacctatccccagttgcatggcacgctaagcgccgcgcatgccgactgcggcaagtggcgtggcgatattcctgcactccaggcattcgatcgcgcggttgccaaaaatgatagctggcagccagaggttcccgcgacgctcaaatcagaaaaacgctttcgctattacatagacctggtaaataaatacatctacttttatgcgcccgtcagaattaaaagtaatccgatacagaactggaattttcttcaggacagtaaactgggtattagccaggccagccttgatggtttagaacagggtcgttcgctcatctcgaccgtgtatgttgatgcgatgacgggaaagaatattttatcgtttttaacgccagtgtatttcaaggataagctgaaaggcgtagtgatggtcgatgtgaccgcgcaagagattgaggccttgttatacaccagcgaccgacctttggtgtggcgctatctggatattaccttgaaggattccgataccggcgcgctcattgaggtacatcatagtaaaacgcacctgttgaattacgcccattacacccatcaggtagcagaaaacttacggataactctgtctctggatgttatgtattttctgcttagttcatggaaactcttcctgttttatttactctctaccgccgcattactgcatctggtgcgggttcatttccgcctttataactcggtatcgaaagagaatatcagcgataccatgaccggcctttataatcgtaaaatccttaccccgatgctggagtcgcgcctgcaacgacttaccgcgcaaggggttaacgtggtaacgatggcccttgactgcgatggactgaaaaagatcaacgatacctgggggcataacgccggcgacgaagcgattattctactggcgcaggctatttccgcatccattcgtagcagcgattatggcgtgcgcttaggaggcgatgagttctttctaattctgatcgattatccggaagctgaagcggaaaatatcccggcgaggatccggcaatatctggcgattcatgaccatcaacagcgcgtcgatttctcctggggcgcagcaagtcttgcgccagaacagtcgctcagcgaagcaatgaaagctgccgatgcgcgcctgtatatgaacaaaaagcagaaaaaaagccccggcattcgcagataa

SEQ ID NO: 108403 - DNA, 501 bp, Enterobacter aerogenes
atgcaatcgccagagaccgccgacatacaccagcaattatgccgcctccttgatgagcaacaggcccgctatcgggtcatggaacatgaagccgttggtaaatgtgaagccgtatctgcaatccgcggtaccgcgctgggacagggcgccaaagcgctggtctgtaaagtgaaaggtaatggggtaaaccagcacgtgctggctatccttgccgccgatcagcaggccgatttatctcgcctggcgcagcatatcggcggcaataaagcctcactcgccagcccggcagaagtcgatgcccttaccgcctgcgtattcggcgccattccgccttttagcttccaccctaagctaaaactggtcgccgacccgttgctgttcgaacgttttacagagatagcctttaatgccggcctgctggaaaaatcgatcattatgaataccgaggattatctgcgtatcgcccgccctgagctggtcgcgttccgtcgcgtcatttag

SEQ ID NO: 108404 - DNA, 447 bp, Enterobacter aerogenes
atgttcgatacaaccctgtttattttgctggggctggcggcactcggctttatcagccataacaccactgtcgctatctcaatactggtgctcatcatcgtacgggtgacgccgcttaacgttttcttcccctggattgaaaagcaggggctgagcatcggtatcatcattctgaccatcggcgtgatggctcccatcgccagcggaacgttaccgccctcgacgctgattcactctttcgtcaactggaagtcactgctggcgattgccgtgggcgtgttcgtctcgtggcttggcggacgcggagtcgcgctcatgggttcgcagcctcaactggtcgccgggctgctggtgggtaccgtgctgggcgtggcgctatttcgcggcgtcccggtcgggccgcttatcgccgccggtattatttcgctttttatcggaaaggcttag

SEQ ID NO: 108405 - DNA, 792 bp, Enterobacter aerogenes
atgattggactgggtttagacggctatgaaccagacagcggacatgaagcggcgctggcgtttcgcattcaggtggtggacgacgagcagttcattccgcgccatcagcaccgcaaaggtcaactgatcctcgcgttgcacggcgctttaacctgcgaagtggataacgccatgtggatggtgccgccgctgtatgcggtgtgggttcctggcctgcttccacacagcaatcgcgcaacgccaggggcacaggtgtgctttttgttcatagaaccgggggcggcgccgatgcctgagcattgctgcacgttaaaaatctctcccctggtgagagagttgattatgacccttgcggaacgcggcagggaggcgcttgacgcgccgcctacgcagcgcctggtgcaggtattatttgatgagctaccgcaacaaccgcaagaacatctgcaattgccggtttcaggacatccgaagatccgccggatggccgacaccatggcccgcgatccggcacactggcagacgctctcgcagtgggcggcggcgttcgctatgagcgaacgcaacctggcgcggctggtggtgcgggagaccgggcttagctttcgccgctggcggcaccaacttcagctgatcctggcgctgcagatgttggtgcgcggacagacggtacagcaaaccgcccagacgctcggttatgattcaacaaccgcctttatcaccatgttcaaaaaagggttagggcaaacgccgggccgctaccacgccagtttggctaagcctttccgataa

SEQ ID NO: 108406 - DNA, 1182 bp, Enterobacter aerogenes
atgagtcctgtttcttcctctgccaacggcaacaaactgctgctgattgtcggaattttatttatcgccgccacgctacgggtaactttcaccggtatcgccccactgctggatgcgatacgcgctgaataccaactgacgacggcgcaaaccgggctgctcacgaccctgccgctgctggccttcgggctggtctctccgctggcggccggcgtcgcccgccgattcggcatagagcgtagcctgctgctggcgatggtgattatttgcctcgggatcggattacgttcgctcccctcagcagcctggctgtatattggtacggcgctcattggctgcggaatcgcgctgggcaacgtgctgctgccagggttaattaagcgtgatttttccggccatgtcgcccgtatgaccggcgcctactccattaccatgggcgcagcggcggcggcaggttccgcgatggtggtgccgctggcgctggcgggttttggctggcgcggcgcactgctgctactgatggttttcccgctgttggcgctattactctggctgccgcaggcgcgccgccaggctaccacgccgatgaccggatcgggtgccgcgcacaatcgggggatctggcgttcagcgctggcgtggcaggtcacgctgttccttgggattaactcactggtctattacgttatcgtcggttggctgcccgcaatcctgcagagtatgggctacagcgaagcgcaggctggctctctgcatggcctgttgcagttggcaaccgccgcaccgggcctggccatcccgctggtactccatcgcctgaaagatcagcgcggcatcgccgttctggtagccttaatgtgcgtagtaagcacgctgggattatggttactgcccggtcaggcggtgatctggacattgatttttggcttcggatccggcgccaccatgatccttggcctgacgtttattggtctacgcgccagctcagcgcatcaggccgcggccctctccggcatggcgcagactattggttatctgctggctgcctgcggaccgccgctcatcggtaaaatccatgatgcttacggcgactggcatataccgttaatcatcgtcgcactcatcgcagtggtcatggcgctgttcggcgcccttgccggaagggcgcgcgaaattcattaa

SEQ ID NO: 108407 - DNA, 693 bp, Enterobacter aerogenes
atgaacacccctttgcgcattgcccttgttggcgattataaccctgatgtgattgcccataaggcgattccgctggctatcgatgacgctgccgcggttctggaacaaccggtgagttatgactggatagccaccagcgagattaccagcgcagactggctcaccgattatgacgccatctgggtggttcccgccagcccgtataaaaacgccgagggcgcatttatcgccattcgctacgcccgcgaaaatagcattccgttcctcggtacctgcggcggcttccagcacgcgattatcgaatacgcccgtaatgttatgggatggcaggatgcggcgcacgccgaaaccgatagcgaagggcgaatggtcattgcgccattaagctgttcgctggtggaaaaatcagacgctatcgagctgcgcgcgaacacgctgattgcccgcgcttatggccgtgacagcattgaagagggatatcattgtaactacggcattgccgaaagctttgcccatgaactggagcagggcgcgctgcgggtgaccggttgggatgagaacggcgagatccgcgccgtggagttaactacccatccgttcttcgtcgccacgctgttccagcacgagcgcaacgcgctggaagggcgtccggcgccgctggtacaggctttactgcacgcggcccggcaataa

SEQ ID NO: 108408 - DNA, 351 bp, Enterobacter aerogenes
atgatgattcaatgtaaacgcgtttatgaccctacagaggccagcgatggttaccgcgtgctggtcgatcgcctgtggccacgcggaataaaaaaagaggatttgcattatgacgaatggtgtaaaaccctgacgccttccagcgatttacgcaaggctcttcacggagaagcgattgacttctctcacttccgccagcagtaccgcgaagagcttgaaacccatcgcgatgaagggctacggctcgccaaattggccaatcagcaacccttaacgctgctctacgcggccaaagatacgcaacaaaaccatgcgctggtgctggcggagtggctgaaaagcttaatctaa

SEQ ID NO: 108409 - DNA, 126 bp, Enterobacter aerogenes
atgatcgatttgcgtttgcacacgctccaactcctgctcataaggcttaccgtaaacctgcaaaatagcctctttctcttcgccgcgagcgacgcgatcgatagcggtctgctgttcatcttgtaa

SEQ ID NO: 108410 - DNA, 195 bp, Enterobacter aerogenes
atggccgtaattatcgttaaccgccttaaagtgatcgatatcgatcatcaggcagctcagcgggctgttgttgcgcaccgccagattcatctgcgtatgcagcgcttcctcaagatgatggcggtttcgcaacccggtcagagaatcaaacaacgctttttccagcagagcattgcgcagacgctggttggatag

SEQ ID NO: 108411 - DNA, 1239 bp, Enterobacter aerogenes
atgggcttaaagcacctgattgagaaacttgagccgcatttcacgcacggcggcaagttagcaaaatattacccgctgtatgaagcggcggcgacgatcttctacaccccgggtttagtcacccgcggcgcggcgcacgtacgtgacgccatcgacctcaagcggatgatgatcctcgtctggtttgcggtgttcccggcgatgttctggggcatgtataacgtcggcttgcagacgattccggcgttgcacaagctatacggcgccgaacagttacagcaggtaatagccaacaactggcactatagcgttgcccagtggttaggggtgagcttcaacgccgatgccgggtggctcagcatgatgacgctgggggcggtatttttcctgcctatctacctgaccgtattcatcgtcggcggtttttgggaagtgctgttcgcgattgtgcgcaaacatgagatcaacgaaggctttttcgttacctcgattctcttcgcgctgattgtgccgccaacgatgccgctatggcaggcggcgctgggaatctccttcggcgtggtgattgccaaagaaattttcggcggcaccgggcgcaatttcctcaacccggcgctggcggggcgcgcgtttctgttctttgcctacccggcgcagatttctggcgacctggtatggacggcggcggacggtttttccggcgcgacgccgctctcccagtgggccagcggcggcggtgaagcgctggttaacgtcgccaccggcatcccggtgagctggatggacgccttcctcggcaacattcccggctcgattggcgaagtgtcgacgctgatgatcctcatcggcggcgcgttcattatctttgcccgtatcgcttcctggcgcatcgtcgccggggtgatggtcggtatgatcgctaccgctacgctgtttaatttcatcggttctgataccaaccccatgttctcgatgccgtggtactggcatctggtgctcggcggtttcgccttcggcatgatgtttatggcgactgacccggtatcggcttcctttaccgataaaggtaaatggagctacggcctgctgattggcgtgatgtgcgtgctgattcgcgtcgtcaacccggcctatccggaagggatgatgctggcgattctgttcgccaacctctttgcgccgctgttcgattacctggtggtgcaggccaatatcaagcggaggaagtcgcgtggctga

SEQ ID NO: 108412 - DNA, 795 bp, Enterobacter aerogenes
gtggctgagaagaaaagtaacgatagcatcggcaaaacgctgctggtggtgctggtgctttgtctggtgtgctccattgtggtcgccggttccgccgtgggcctcaagtcgcgtcagcaggaacaacgcgcgctggataaacagcgcaatatcctggccgtcgccggcctgatgcagcaggggatggatgctgacgcggtggcggaaaccttcgccgcgcgcattacccctcggctggtcaatctggcgaccggcgaactgctggataaagacccgggcaaatttaatcaggctcaggcgctgaaagatccgcagcagagcatcgcgctcgacgccagccaggatccggccgggattaaacgccgcagcaacctggcggaaatttacctggtgcgtgacgcgcagcagcagattcaggaagtcgtgctgcctatctatggcaatggcctgtggtcaatgatgtacgccttcgtggcgctggacgtcgatgggcgtacggtgaaaggcattacttactacgatcagggcgaaacgccggggttgggcggcgaggtggaaaacccgaactggcgtcagcagtttgtcggtaagcaggtgctggatgacaacggcatgccgtcgttgaaggtggtaaaaggcggcgcgcgcgcaggcgatctccacgcggttgacggtttatccggcgccacgctgacgtcaaacggcgtgcagcatagctttgatttctggatgggcgaactgggctttggtccgttcctgaaaaaggttcgtgagggagagctgaataatggctga

SEQ ID NO: 108413 - DNA, 639 bp, Enterobacter aerogenes
atggctgaacagagcgatatgaaagaggtgaagcgcgtgctggtggggccgcttatcgccaataaccccatcgccctgcaggtgctcggcgtctgctccgcgctggcggtgaccaccaaactggaaaccgccttcgtgatgaccattgcggtgacgctggtaacggcgttctccagcatgtttatctctatgattcgccaccatattcccaatagcgtgcgcatcatcgtgcagatggcgatcatcgcctcgttggttatcgtggtggatcagctgctgcgggctttcgcctatgagacctctaagcagctgtcggtgttcgtcggacttatcatcacgaactgtatcgtgatggggcgtgccgaagcttatgccatgaaatcgccgccgctggccagctttatggatggtatcggtaacggtctcggttacggcgcgatcctgattatcgtcggtttcctgcgcgagcttatcggcagcgggaagctgttcggtatcaccgtactggaaacggtgcagaacggcggctggtatcagccgaacggcctgttcctgctggcgccgagcgcgttcttcattatcggtttgctgatttgggccctgcgtagctggaagcctgaacagcaggaaaaggagtaa

SEQ ID NO: 108414 - DNA, 258 bp, Enterobacter aerogenes
atgcagccgctgcatcccttttgcaccgccgagcgtatcgaggcagccctgctgtccgcagccgcaggccagccgcggcaactcaattccccgcagatgagtgcgcgtaatgggtccgtgcccccactcggcgccgatcccctgattgccgtagaggatgttaccattgatggcaatccccccgccgatcccgctgccgaggatcacgcccaacaccaccggcagatcttttgccgcgccgaaacgcgcctcggctaa

SEQ ID NO: 108415 - DNA, 1014 bp, Enterobacter aerogenes
atgtcactcaaattaggtgtcatcggcgcaggcgccatcggtaaagaacatatccgtcgctgcacccaggtcctacagggggcgaccgtggtcgccgtttccgatatcaacgccgataacgcccgtgcggcagtagcgctgccgggcgtgcaggcggaagtctacgccgacggtcatgatgtgattaaagccagcgacgttgatgccgtgctggtgacctcctgggatccaacccatgaagagtacaccctggcggctattgaggccggtaagcccgtattttgcgaaaaaccgctggcgatgagcgcagaaggctgccgccgtattgtggatgctgaaatgaaagccgggcgtcgcctcgttcaggttggctttatgcgtccatacgatgaaggttatctggcgttgaagaaagtcattgatgacggcgatatcggcgcgccgttgatgctgcgctgtgcccaccgtaaccagtcggtcggtgagaactacaccaccgatatggcgatcaccaacaccctgatccacgaactggacgtgctgcgttggctgctaaatgacgactaccgctccgtacaggtgcgcttcccgcgctcgacctcccatacccatgcgcggctgaaagaccctcagatagtctcgtttgaaacgaaaaagggcaccctgatcgacgtcgaagtcttcgtaaattgccagtacggctacgacattcagtgtgaggtggttggcgaaacgggcattgcgcgcctgccggaaccgtcggcggtggagatgcgtaaagccgccagcctgtcgacagccatcctcaccgactggaaagaccgtttcatcaaagcctacgacgtcgaactgcaggcatttatcaatgatgtgaaagccggcaagctgcagggcccctccgcctgggacggctatgcggcatcggttgccgccgacgcctgtctgaaggcgcaagagtgcaacgaaccggtagcagtatcgctacctgagtgcccggcattctaccaacgctaa

SEQ ID NO: 108416 - DNA, 1941 bp, Enterobacter aerogenes
atgggcaaactgagactgacaatggcgcaggcgctggtgaagttccttgataaccagtatctggaggtggacggcgaagcgcagaaattcgtgaaagggattttcgctatttttggtcacggcaacgtgttgggcttaggccaggcgctggaagagaacagcggcgaactgcgggtttaccaggggcgtaatgaacaaggcatggcccatgcggccaccggctttgcccgtcaatcactgcgccggcagatcattgcctgcacttcttccatcggtccgggggcggccaacatgatcaccgccgcggcgacggctacggccaaccgtatcccgctgttattactgccgggcgatgtatttgccacccgccaacctgacccggtgctgcagcaaatcgaacagagctacgatctgagtatcacgactaacgacgcatttcgcgcggtgagtaagtactgggatcgtatcacccgcccggaacagctcatgagcgcctgcattaatgccatgcgcgtgctgacggatccggcggaaaccggcgccgtcaccttgtgtctgccgcaggacgtgcagggtgaagcctgggattatcccgagtccttttttgcccgccgcgtccaccgtctggatcgccgtccgccaagcgcggcgcagttggcggatgcggtagcggcaattaaagccagccgtaaaccgctcatcgtctgcggcggcggcgtgaaatattccgcggcaggcgaagcgctggtgagcttcgccgaacgttacgacatcccgtttgcggaaacgcaggccggaaagggcacggtggtttcatcgcatccgctgaacgtcggcggcgttggcgaaacgggctgtctggctgccaacctgttagcgaaagaggccgatctggtcatcggtatcggcacgcgctttagcgattttaccacctcctcgaaatggatattccaatccccgggcgtgcgcttccttaacgttaacgtcagtaattttgatgcctggaagctggacggtatcccaatgctggcggacgcccgcgaggcgctaagcgcgctcagcgctgcgctggagaacgagtcctggcaggcaggatggggcgcgcagattacaagcgtgcagagccggcagatgaaagagacccagcgcgtctatcaggcggtctggcaggaaaaggatttcgtaccagaaattgacgaccatattgaccgtgaatcggtttatcgcgaattccgtcaaatcacggattccaccctgacgcaaagcagcgttcttggcctgctgaacgagtcgctggcggcggatgcggtcattgtggcggcggcgggcagcctgccgggggatttacaacgcgtctggcgcaaccgcgcgccgaatacctatcacgtcgagtacggctactcgtgcatgggctatgaggtcaacgccgccctcggcgttaagctggcgcagccgcagagcgaagtctattcgctggtcggcgatggctccttcatgatgctgcactctgagctggtcacctccctgcaggagcgggcgaagatcaacgtcattctgctcgacaacatggcgaacggctgcatcaacaacctgcagctggaacacggtatggatagcttcggcaccgagtttcgctaccgctcggcggaaaacggccagctgcagggcgggctggtaccggtggatttcgccacgattgcttccggctacggctgcaagacctggcgggtcaccaccctcgatgagcttcgccacgcgctggatgccgctcgccgtgaaaccgtcagcacgcttatcgacattaaagtactgccgaaaaccatggtccacaaatacggtagctggtggaacgttggcgtggcgcagacggcgctgtcggaacgtatccgtaaagtcgctgaaatgattaatgaaaaacgcgcccaggcgcgggattactaa

SEQ ID NO: 108417 - DNA, 1914 bp, Enterobacter aerogenes
atgaatgcagcagttaagcggctcgacgtcatctgtattggccgggtggccgtcgatctctacgcccagcagataggggcaaggttggaagatgtggccagtttcgccaagtatctcggcggttcctcgggcaacgtcgcctttggtaccgcgattcagggattaaaatcggcgatgctggcgcgggtgggcgatgagcacaacggccggtttctgcgtgaaaccctccgccgcgcaggtgtcgataccgaatatctgatcacggataaagaacggctgaccgcgttggtgatgctgggcattaaggatcaggataccttcccgctgattttctaccgcgacaactgcgccgatatggcgctgacgcctgacgatatcaatgaggagtacatcgcctcttcacgcgctctggcggtgaccggcacccacctttcacacgccaatacccgcgatgcggtactgaaggcgctggaatacgcccgccgccacggcctgcgtaccgcgctggatatcgattaccgtccggtgctgtgggggcttacttcgctgggcgacggtgaaacgcgtttcattgagtcgggtccggtaacccgtcagttgcaggaagttctacacctcttcgatttagttgtcggcactgaagaggagtttcatatcgccggcggcagtaccgataccctcaccgcgctgaaaaacgttcgccatgccaccaaagcgacgctggtctgcaagcgcgggccgatgggctgcgtggtgctggagggcgccatcccggacagctgggacgaagtgccgttgcagcaaggcgttcgcgtcgaagtactcaacgttctcggtgccggcgatgctttcatgtccgggctactgcgcggctggcttaacgatgagggctgggagcaggcctgccgctacgccaacgcctgcggcgcgttagtggtttcgcgccacggctgcgcgccggcgatgccgacaaaagtagagcttgatgattatttatcgcgggccgatgccgttccgcgcccggatatcgacgcgcggttaaatcatttgcaccgggtgaccagtcggcgccagccgtggccggaacagtgtatcttcgcctttgaccatcgtaaacagctggcggatctggcattagaaaccgggcgtgacccggcctgtattcccgaactcaaactgctactgttggccgccgccgaggcggccgccacagaggccgggctggatcggcgcagcggcatcctcgccgatggtacctatggtcaacgttcacttaacgccattaccggtaaaggctggtggatcggtcggccgattgagctccccagctcgcgtccgctacgtcttgaacatggtaatattggctcacagctgatcgactggccgcttgagcacgtcgtcaaatgcctggtcttttaccacccggatgacccggcggcgctgcgcgccgagcaggatgcgctgctgctggaagtttggcaggcctgcaataagtccgggcacgagctgctattggaagtgatcctgccggagaacggaccggacaaagatgaacgccactaccacactatgctggagcacttctatcagttgggcatccagccggactggtggaagctgccgccgctggccagcgcccagtgggagcggatctcagcgcttatcgagcgcgaagatccgtggtgccggggcatcctgctcctggggctggatgcgccatcggatcgcctgcgttcaggtttcgccgaagcggccgggcacccgatgatcaagggttttgccgtcggccgaaccatctttggtcaaccttcgcgccgctggatgcagggcgaactggatgactcagcgctaatcgatgaagtgaaacgcaactatctacggctcatcggctactggcgcgaagcgcgcggctaa

SEQ ID NO: 108418 - DNA, 855 bp, Enterobacter aerogenes
atggctaataatccgacccaactgaccatcctgcaggatgaaatcagacggcgctacgacacgctcagcaaacgtctgaagcaggtggcgcgctatatactggataacagtaatagcgttgctttcgatactgtagcctccattgcgcaacaggctgacgttccgccctcaacgctgattcgcttcgctaacgcctttggcttcagcggctttaacgaaatgaagcagatgttcaggcagcatctgatggaagagaccgccaactacaccgagcgcgcgcgtctgttccgccagactactaacgacgaaacaaccccgccggaaacgccgacggaaatcctcaacatgttcagcatggtcaatacccaggcgctgcagcaactggcaatgcagacctccggcgaagacctcaaccgggcggtagatttactggcggatgcggaaaatatctatgttatcggtctgcgtcgctcgttcagcgtcgcctcttacctgacctacgcactgcgccatctggatcgcaaagccttcctgatcgacggcctcggcgggatgttcaccgagcagctcagtctggtggggccgaaggatgtggtcgtggcggtgagcttctcgccttatgcccgtgaagtggtggaactggttgagcttggcgcccagcgcaaggcgcgacaaatcgccattaccgatagccaggtaagcccgcttgccgccttcagtgatgtgtgctttgtggtgcgtgaagcgcaggtcgatggtttccgttcacaggtggcctcgctgtgcctggcgcagacgctggcggtatcgctggcattgaatagcagcaaagagccgcagcagcaccgcgcctga

SEQ ID NO: 108419 - DNA, 801 bp, Enterobacter aerogenes
atgtcgttattggctaaagcgcaaaaagagggacatatccagcacatcaccccgcagagcgcggggtggcattatattggctttgatgtctggatgttaaaacaggggcaaaccgtgaccctggagagcggtgatcgtgagctatgtctggttctggtctccgggctggcctcgatcaaaactcagcacgccgattttcccgaccttggtaaacgcatgtcgccattcgagcgtacgccgccgtggtcggtctatgtgccgccgcaagataaggtcgaggtcactgcagattccgatcttgagctggcggtttgcagcgcgccgggcaaaggcagcttcccggcgcgagtgatacggcctgaggatgttggcgtagaacatcgcggtaaagggcgtaaccagcggctggtacataatattctgccggataatgcgcaggcggattgcctgctggtagtggaagtctacaccgaagaaggggcgaccagttcctggccatcgcacaagcacgataccgcgctgccggggcaggaaacccagctggaagaaacctactaccaccgtttcgatccgccgcaaggttttgcctttcagcgagtgtacaccgatgaccgcagcctggatgcctgtatggcgccctataaccatgatgtggtgatggtgccgcgcggctaccatccggtagcggcgatcgccggttacaacagctattatctgaacgtgatggcggggccggatcgtaagtggctatttacctgggaagacgatcacgcctggatcaacagcgatcgctattcatag

SEQ ID NO: 108420 - DNA, 273 bp, Enterobacter aerogenes
gtggcgctcggcaacctgcagaatatcatcgaccatcgatttaaagccgacatgctgttcgtcctgcaaacgcactacgcttgcgctatcgaccggctgcacgtcttcggttccctgcagcagacgttccggctgcagcttttcacagcccagaccaatcaccatcacctcaccgccaaagttggggttcagcgcgatattgtggatggtgcgaatcggtacgatcgccgccggggcgttaatcgccacgccgcagccgtacagatggtttag

SEQ ID NO: 108421 - DNA, 258 bp, Enterobacter aerogenes
atgctcgcaggcgtagcggtgcatcagctcggcaaaaaaggttttacccacgccggaggggccggtcagcaggacgtgcaggccgtggggatacagcaccgcggctttccctttttccacggcatcgtgcaggctgcgatcgtggccgatcagcatggcgaacgggtcgacagcctcattgttatcttgtggctgcggcaggagatcggcgagtgttgccggctcgcgttcgctttccgtcagcgtacggtcgagtag

SEQ ID NO: 108422 - DNA, 420 bp, Enterobacter aerogenes
atgttgagcggattaaatcatctgaccctggcggtcagccagctggcgccgagcgtggcgttttatcatcagctactcggcatgacgctgcacgcgcgctgggatagcggcgcgtatctttcctgcggcgatctgtggctgtgcctgtcgctggatccgcagcggcgcgtcactccgccggaggagagcgactacacccattatgcgtttagcatcagcgaggcggatttcgccagctttgccgcccgtcttgaggtcgctggcgtagcggtatggaagctaaaccgtagcgaaggcgaatcgcactatttcctcgaccccgacggccacaagctggagctacatgttggcaacctcgcccagcgcctggccgcctgccgcgagcagccgtataaggggatggtgttttttggcgagtga

SEQ ID NO: 108423 - DNA, 1344 bp, Enterobacter aerogenes
atgagcgttgaacagttcggctataaacaggagctccatcgagcgctgaccttccgcgatctgctggtttacggcatgatttttatggtacccatcgctcctttcggcgtcttcggctacgtctgggatggcgcgcagggcatggtggcgctggcttatctgatcggcatggtggcaatgtttttcaccgccatgagttactggtcgatgtcgcgcgcattcccggtttccggttcggtatacgcttacgctcagcgcggaatacaccctatcgtcggcttttttgccggctggctgattttgctggactacattctggtgccatcgctgctgtatatcgtcagcgcggcggcgctggggccgatgctgccgggcgttccgggctgggtctggattatcggctttatcgcgattaacagcctgattaacttacgaggcattacctttaccgcgcgggcgaataataccattttggttgctgaaatcgtggtcctcgcgatttttgtggtgctgggattgattgcgctttattccggagccggggcaggccacctgacgctcgaccccttgtataatgccgataaattcagcctgccgctggtgatgggcgcagtctcgattgccgtactctctttcctcggcttcgatggtatatcgacgctgtcggaagaaaccaaaggcggcgtcgataccgtcggcaaggcctcgttaggcgccctgatgctggtgggtacgctgttcattgcccagacctggattgccgcggatctggcgcagggtatgaaatttggcagcctcgataccgcgttctacgacaccgccaatctggccggcggccaatggctgaaatacgtcaccatgtggtccacggtgatttcctgggggatcgccaacgcgctggttgctcaggcggcggtttcacgcatcctgtttgcgatggctcgcgataagcagctcccgcagctgctggcgaaggtgcatccacgactgaaaaccccgtatgtcagtaccttatttgtcgcgctgatttcactggtttccggtctctggttctacggcgatatcgacaacctcagtcggctggtgaacttcggcgcgctgatgggcttcctggtgctgcacgtggcggtgatcaaccactatctgatccgccaaaagtcgcgcaatctggtgatgcacctgctcttcccggtgattgggctgtgcattatcggctttgtcatttatgagatggatgttgaagccaaagtgctcggcctgagctggctggccgtcggcgtggtgtattacgccattatgcgtctggtgcttaagcgcaacgtggagctgaatctggaagggtaa

SEQ ID NO: 108424 - DNA, 918 bp, Enterobacter aerogenes
atgaaaataaccaaagatcgggtggtttacgccatgtcgcgcgataacgttcctgtcgccaccgtcaacagtggaagtgaagtgttattcgaaacctgcgactgcttctccgaccaaattacctcagccgatgccgtctttaatgaactggactggcagcgcattaacccggcgaccggccccgtctttattgaaggcgcagagccgggcgattgcttaaaagtcagcatcaaacgcatcaccctgacggctcaacaggcggtgatggtgaccgcgccgcagctcggtgtcattggcgatgaactacatgagcccacggtcaccatcgtcccaatcgtcgaggatcatgcggtcctcccggggaacgtgcgcgtgccattgaagccgatgatcggcgtcattggcgttgctccagcaggagaacccatatcctgcggcacgccggatagtcacggcggcaatatggactgcaaaatgatcgccgccggcagcacgctgtggttgccggtcaacgtgcccggcgcgttattcgggctgggcgatttacacgccgcgatgggggatggcgaagtgtctgtctgcggtctggaagtgccgggcgaagtcctcgtcgagttaaccgttgttaaaaaccgtcagctccccttaccgatgctggaaaacaacgaaacgattttcaccctcgcctccgccgttaccctcgacgatgcggcagcccttgcggcacgtaatatggcccatttcatcgccgacaataccgcattaacgctggctgaggcgatcaacgtgctgagcatcgccggagacctacaaatttgccaggtcgttgatccgctgaaaacctgccgctacgcgctgccgaaaacggtcgccaaacagctttctctgtcgattgatgggggcaagcatgagcgttga

SEQ ID NO: 108425 - DNA, 1257 bp, Enterobacter aerogenes
atgacattttcacttttcggcgacaaattcacccgtcattcaggcatcacccgcctgatggaagacctcaatgacggcctgcgcacaccgggcgcgatcatgctgggcggcggcaaccccgcgcaaatcccggagatgaatgaatacttcaatagcctgctggccgatatgctggataacggcaaagcccttgatgcgctttgcaattatgatggtccgcaagggaaaagcgagcttctgaccctgcttgcgcaaatgctgcgtgaagaattaggttgggagatcgagccgcagaatattgctctaacaaatggcagtcagagcgcgtttttctacttatttaacctgtttgccggccgccgtgccgacggcaccacccgcaaggtgctgttcccgctgacgccagaatatatcggctacgccgattccgggctggaagaggatctgtttgtcgccacccgtcccaacattgagctgctgccggaaggccagtttaagtatcacgtggacttcgaacatctgcaggtcaccgaagagacggggatgatctgcgtctcccggccaaccaacccgaccggcaacgtcattaccgacgaagagcttattaagctggatgccctcgccaatcagcacggcgtcccgctggttattgataacgcctatggcgtgcctttcccgggtattatttttagcgaagcgcgcccgctgtggaatccgaacatcgtgctgtgcatgagcttatccaagctcggcctgccgggcacgcgctgcggcattatcatcgccaacgagaaaatcattaccgccatcagcaatatgaacggcattatcagcctcgctccgggcggcattggtccggcaatgatgtgcgaaatgatcaagcgtaaggacctgctgcggctatcggagacggtgattaaaccgttctattatcagcgtgttcaggaaactatcgctaccattcgccgctatttgccggaagaacgctgcctgattcataaaccggaaggggcgattttcctctggctgtggtttaaggatctaccgatctctaccgagctgctgtatcagcgcctgaaacaacgcggcgtgctgatggtgccgggcgattacttcttcccggggctggacaagccgtggccgcatacgcatcagtgcatgcgcatgaactatgtgccggatccggagaaaatcgaggcgggagtgaaaattcttgccgaagagattgagcgcgcctggcaggagcaggacgcctga

SEQ ID NO: 108426 - DNA, 489 bp, Enterobacter aerogenes
atgaaccggtttattatcgccgatgcgcaaaagtgtatcggctgccgaacctgcgaggtggcctgcgtggtgtcgcatcagcaggggcaggattgttctaccgtttcggcgaaacgctttacaccgcggatccgagtagtgaagagcgatgagctatcaacggcgacgctgtgccgtcagtgcgaggatgcgccctgcgcgaacgtctgcccggaaggggcaatacgccatgaaggcgacgtctggcgagtcgatcaacgcctgtgcattggttgtaaaagctgtatggtggcgtgcccttatggggcgatgacggtgatgttgactgacgaaggcgtgcaggcgctgaagtgcgacctgtgcgcgcaccggcaaacggggccggcgtgcgtagcggcctgcccgactcaggcgctgcgctgtattgagcccgccgagctggaaagattaagcgccgagcgccgccgttgggcggcgcaggcaatgtaa

SEQ ID NO: 108427 - DNA, 477 bp, Enterobacter aerogenes
atgaaacccggcaagctattgctctgcgcctcactggcgctgttttctattaccgctcaggcgcaatgtccggatatgacgggaagttatcgttttaccggtgctgaacatcccttctatctggtgaaaatcccaggacaatcacgctataacgcttttttccccaacgaagcgggccagtttacccgggtgcaaacggtcgatatctccgcggaagagatgaagacgcagcagataccggagtgcgcattaattatccagcgtgttggtatgatgatgaaaaccaacaaaggggaaaaggtggatgtgatgacgcagtcacagaactacactaccgagaaaaccattaccaccgaatatggcttaatgatatatgctgggttcgcttccgattttattggcatcgataaaatcagcgctcaggtaccgaaagaagcgcaaaacgacaccttgccgttgattacagaggcgcaataa

SEQ ID NO: 108428 - DNA, 219 bp, Enterobacter aerogenes; identical to SEQ ID NO: 88903

SEQ ID NO: 108429 - DNA, 705 bp, Enterobacter aerogenes; identical to SEQ ID NO: 88902

SEQ ID NO: 108430 - DNA, 1722 bp, Enterobacter aerogenes; identical to SEQ ID NO: 88901

SEQ ID NO: 108431 - DNA, 255 bp, Enterobacter aerogenes
ttgcacctggtcgatgataatcgcctgatgatcgcttttatccagcaccgccaggttgaccgtttcgccggaatcttccatcagctggcgcagaataggatggacaatggccagcagattgcggctttgcaggaagctgctgccgacgacaaacgcatgcgcgccaatcgcccagtggcccagctcgccgacctggcggacaaaaccgagctgctgcatggtggtgagcagacgatgggtcgtggagttaggtag

SEQ ID NO: 108432 - DNA, 213 bp, Enterobacter aerogenes
atggggcgtgtttttccggctgaaatggttacaatgaagtattcgtactatctggagccaaccatgttagagctgttgaaaagtctggtatttgctgtcgtcatggtacctgtggtgatggcgatcatcctcggtctgatttacggtctcggcgaagtgttcaacattttctccggcgtcggtcataaagacagcagccagcaaaatcactga

SEQ ID NO: 108433 - DNA, 777 bp, Enterobacter aerogenes
atggcaggtcaatggtcgcgttttctgaccggagcggctttaacgctctgcgtttctggtcatgcgctggcgcaggacggcaaaattaccgtttttgccgcggcgtcgttaaccaacgctatgcaggatattgcgcaagcctataaaaatgagcaccacgttgaagtggtctcttcctttgcttcttcctccacgctggcgcgccagattgaagccggcgcccccgccgatctgtttatttctgcggaccagaaatggatggactatgccgtagacaaaaaatcaatcgatacggcaacccgcaccacgctgctgggcaatagcctggtggtggtcgcgccgaaagccagcgatcgcggcgatatcaccattaatgataaaaccgactgggccagcttgctgcaaggcgggcgtctggcggtcggcgatccggatcacgtgccggcggggatctacgcgaaagaagcgctacagaaactgggggcctgggagacgctgtcgccgaagctcgcgccggcagaagacgtgcgcggcgcgctggcgctggtggagcgcaacgaagcgccgttgggcatcgtctacggctctgatgccgtcgccagcaagggggtcaaagtggtgggcaccttcccggaggattcgcacaaaaaagtcgagtatccgctggctatcgttgatgggcataaaaatgctaccgtaaccgcgttttatgactacctcaaaggcccggaagcctcggctatctttaaacgttacggattcaccacacagcaatga

SEQ ID NO: 108434 - DNA, 690 bp, Enterobacter aerogenes
atgattttaagcgatcccgaatggcaggcggtactgctgagcctgaaagtttcatccctggcggtggtttgcagcttaccttttgggatctttttcgcctggctgctggtgcgccgccattttcccggcaaagcgttactcgatagcattatacatttaccgctggtgctgccgccggtggtggtcggctatctgttgctgatttccatggggcgacgcggctttatcggcagttggttatacgactggtttggtctgaccttcgccttcagctggcggggggcggtgctggcggcggcggtgatgtcatttccgctgatggtgcgggcgatacgcctcgcgcttgaaggggtggacgtgaagcttgaacaggcggcgcgcaccctgggggctaatcgctggcgggtatttttcaccattacgctgccgttgaccctgccgggcattattgtcggtacggtgctggctttcgcccgttcgctgggagagtttggcgcgacgatcacctttgtctcaaacattcctggcgaaacgcgcaccattccttccgcgatgtataccctgattcaaacgcccggcagcgaaggcgccgccgcgcggttatgcatcatctctattgttctggcgctggtatcgttgctggtgtctgaatggctggcgcgccttagccgtaagcggatgggaaaataa

SEQ ID NO: 108435 - DNA, 1059 bp, Enterobacter aerogenes
atgctggagctcgattttagccagacgttgggcaaccactgcctcgaagtgcatgaaaccctgcccgccagcggcattaccgctattttcggcgtctcaggcgcgggaaaaacctcattgattaatgctatcagcgggctgacgcagccgcagcaggggcgcattgtgctcaatggccgggtgctcaatgacgcgcgacagcgcatctgcctggcgccggagaagcggcgtatcggttatgtgtttcaggacgcgcggctgtttccgcactataaagtgcgcggtaacctgaaatatgggatggctaaaagcatggccgcgcaatttgataagctggtggcgttattgggcattgagcacctgctcgaacggctgcccggtagtttgtccggcggggaaaaacagcgggtggcgattggccgcgccctgttgaccgcgccggaattgctgctgctggatgagccgctggcctcgctggatattccgcgaaagcgcgaattactcccctatttacagcggctggcgcgcgagatccatatcccgatgctgtatgtcagccactcgctggatgaaattcagcacctggccgataacgtgctggtgctggaagcgggaaaagtgaaggcgtttggcgatctcgaaacggtgtggagcagcagcgtgatgcatccgtggctgccgcaggagcagcagagcacgattcttaacgtctcggtgatcgcgcagcatccgcaatatgcaatgactgcgctggcgctgggcgatcagcaactatgggttaatcagctggcgcgggagccgggcgaagcggcgcgtgttcgtattcaggcgtcggatgtgtcgctggtgctggagcacccgcgacagaccagtatccgtaatatcctgcgcgcgcaggtcgttggctgcgtggaaaccaacggccagatcgaggtacagcttacggtcagcggcagaacgctatgggcgcgaattagcccatgggcgcgggatgacttgggcatcaccccaggtcagtggctgtatgcgcaaattaagagcgtatcgatcgcggcctga

SEQ ID NO: 108436 - DNA, 996 bp, Enterobacter aerogenes
atgaaacaaaccgtatataccgccagcccggagagccatcagattcacgtctggagcctcaatgctgagggaaatctgacattggttcaggttgttgatgccccgggccaggtgcagccgatggtggtaagcccgaacaaagagtatctctatgtcggcgtgcgtccggagtttcgcgtcctggcttaccgcattgcgccagataatggcgcgctgactttcgccggcgaagccgcgctgccggggagcccgacgcatatctccaccgaccatcagggccgttttgttttcagcgcatcctacaatcagggctgcgtgagcgtgacgccattgattgacggcctgccgggcgaaacggtcaccgtcgtcgaggggctggagggctgccactcggccaatatttcaccggacaaccgcacgctatgggtaccggcgctgaagcaggatcgtatttgcctgtttaatctgagcgatgacggctatctggccgcgcaggagccggcggaagttactaccgtggaaggcgccggtccgcggcatatggtgttccatccgaaccagcagtatggctactgcgtgaacgagctgaacagctccgttgacgtgtgggagcttaaagatccgcacgggaaaattgagtgcgtacagacgctggatatgatgccgccagattttaccggcgtgcgttgggctgcggatatccatattacgccggatggccgtcatctttatgcctgcgatcgtaccgccagcattatcaccatctttagcgtttctgaagacggtagcgtactgtctattgaaggctaccagccgaccgaagcgcagccgcgcggctttaatctcgatcacagcggtaagtatctgattgccgccgggcagaaatcgcatcatatcgcggtttatgaaattgccggcgagcaggggctgttaaaagagaaagggcgttatgccgttggtcagggccctatgtgggtagtggttaacgcgcattaa

SEQ ID NO: 108437 - DNA, 279 bp, Enterobacter aerogenes
atgagacagactatgcatcagcaatcagatatttacgcaggactgcaggatacagcgctctcagaatatttccgcagcgccggagataaattagtcgatgaatctgcggtaatgtcgctggcaatcgacagtatcctcagctcagatgggcatctgagcaataaggcgcttattttatggttgatcaatgcgctggaaaccaccgataacgtggttaccgcggatgtgattcgcaagacgctggaaattgtcgtcggctatacgatggatgatatttaa

SEQ ID NO: 108438 - DNA, 303 bp, Enterobacter aerogenes
atgaaaagcagtcaatcagatcgggttagcgatgagattattggcgaagcagttttatctcttcttaaaacaaaccggccaattaatattccgacgctgctagtcaaacttcggttaatgcaggcagcggaaacgaaccgccagcgaaggaatgcaattattgccgttatcgatgaaattagcgtcagactcacgacgcgcggtaatcacgcgccggtcattaaaaagattaacggccagtgggaaaacagagccgttgttgtggatagtaacgtcgaaccgacgggcaaaaaaatacactga

SEQ ID NO: 108439 - DNA, 246 bp, Enterobacter aerogenes; identical to SEQ ID NO: 89040

SEQ ID NO: 108440 - DNA, 423 bp, Enterobacter aerogenes
atgccctactctcatctgttagtcgccgtcgccccaacgccggaaagccgcatgttggttaataaagcggtgtctatcgcacgtccgtccaatgcgcaggtcagcctgattacgctggcgacagatccggaaatgtataatcagttcgccgcgccgatgatggaaaatttgcgagagataatgcaggaggagacccgtagttttcttaatgaactcgcctcccaggcggactaccctatcagcaaaatgaccatcgccagcggcgaactttgccaccacgtgaaggatttttgccttcagcatcacgtcgacctggtcatctgcggcaaccataaccagagcctgttttcccgcgctacctgttcagcgaagaatatcgtcggcagcagcggcgtcgatgttctgttggtatccctggaataa

SEQ ID NO: 108441 - DNA, 1416 bp, Enterobacter aerogenes
atgagtcgtttagtcgtagtatctaaccgtattgcaacgccaaatgataaaaaggctagcgcaggcggcctggcggtgggtattttaggtgcgctgaaagcgagcggcggcacgtggtttggttggagtggggaaatcggtgatgatagccagccgttgaagaaggtgagtaaaggggatatttcgtgggcctcattcaaccttagcgaagaagatcacgagctctactacaatcagttttccaatgcggtgctatggcccgcatttcactatcgtctcgacttagtcaattttcagcgtccggcgtgggaggggtatctgcgggttaacgccgctgtggcgcaaaagctgctgccgctgctagccgatgacgatatggtatgggttcatgattatcatctgttgccatttgccagcgaattacgcaaaaacggtgtgaagaaccgcattggtttcttcttacatattccgtttccaacgcctgaaatattcaatgcgttgcccccgcatgccgaactacttgagcagctgtgtgattatgaccttttgggctttcaaaccgaaaacgaccggcaggcgtttgttgattgcgtcgcccaacaaactaccttgtgcgaagtgggtcaccagcaataccgtgcctggggtaagacgttccgtactgcggtctatccaataagcatcgaacctcaggaagtcgcgcgcagcgccagcgggccgctgccgccgaagctggctcagttgaaagctgaactgaaaggggtgaagaatattttttccgttgagcgcctggattactccaaggggctgccggagcgttttcaggcttacgaagcgctgctggaaaactacccccagcatcgtgggaaaattcgctatacccagatagctcccacttcgcggggtgatgtacaggcttatcaggatatccgccaccaactggaaaccgccgcgggacgcatcaacggccactatggtcaattggggtggacgccgctgtattatctgaatcagcacttcgatcgcaaactgctcatgaaggtatttcgttattccgacgtgggcctggtcacaccgctacgcgacggcatgaacctcgtggccaaggagtttgtcgccgcgcaggaccctgaaaaccctggggtgttggtgctatcgcagttcgctggcgcggctaatgaactgacttccgcgctcatcgtcaacccctacgatcgcgatgaagtggcggcggcgctggatcgcgcgctaacgatgccgcttgccgagcgaattattcgccatggcaaaatgctcaaggcgatcgagagtaatgatattgataactggcaggcacagttcgttgccgatctaaagcgggtaaagtcgcctgaagatagctgccagcagccaaccgtagttactccctccgcgtag

SEQ ID NO: 108442 - DNA, 804 bp, Enterobacter aerogenes
gtggctgaccagatatctgtaccgcctgagctaaccggaaaccacgcattttttctggatcttgacggcacgcttgccgatatcaaacctcatcccgatcaggttgttatccccgaagacgtccttcagatgttgcgattactggcacagcgacaacatgatgctgtggcattgatttcagggcgctcactaacagagcttgatgaactaacccgtcactggcgactgccgcttgccggcgtccacggggctgaacgccgcgatatcaatggaaaaaggcacgatgtatcactgccgccggcattgagccgtgaggtcggcgaagcattaacttcggcgctacaggcgctgcctggcagtgaactggaggataaaggcatcgcttttgcgctgcattaccgtcaggcaccacagcaccagagcgccatcctggcgctggcgcaggatatcgtgcagcgttatccgattctggccattcagcaagggaagtgtgtcgttgagatcaaaccacgtggcattaacaaaggtgaagcaatcgccgcgtttatgcgggaagcgccttttgcgggacgaaagccggtatttatcggcgatgacctgactgatgaggcgggttttactatggttaatcaattaggcggagtatcgattaaagttggacaaggcgacacacaggcgcgctggcggctggcgaatgttgccgccgtacatcagtggttacgccatgttgtcggcaatatgcaaagcctggatgtattcactaacgggagggatgaccatgagtcgtttagtcgtagtatctaa

SEQ ID NO: 108443 - DNA, 183 bp, Enterobacter aerogenes
gtgatccaccagccgcatgtcgtcaaaggtccgcacgtagcggccatctttaaacacggtaatggcatcgctgagggcgaaaatttcctccatacggtgcgagacgtaaataatcactcgcccttcttcacgcagctcgcgaatcacgcgaaaaaggttgtcgatttcgcgcgcagagagtga

SEQ ID NO: 108444 - DNA, 264 bp, Enterobacter aerogenes
gtgcgctttatcttcgaaaaggcgttcaccggccgtaatggcgaggggtatccgccggaacgtaaagagccgcaggtccgcaatgccgggatcctgaataaagtgaaagcggcggtggtgaaagaaaattatcttgataccttacgagctatcgatccggaactggtaaaaaccgccgtttccgggccgcggttccagcaatgcttcttcgaaaactgccaggataaagaaatcgaagctttcgtacgccagattataggctaa

SEQ ID NO: 108445 - DNA, 912 bp, Enterobacter aerogenes
atggaaaccgatgagctgatcggcgggcgcggcgcgtccgaccaggaaggcgggatggcgtcgatggtctacgctgggaaaatcatcaaggacctcggtctggaagatgaatataccctgctggtgaccggtaccgttcaggaggaagattgtgacggtctgtgctggcagtacatcatcgaacagtccggcattcgcccggaattcgtggtcagtaccgagccgacggattgccaaatctatcgcggccagcgcgggcgtatggagattcgcgttgatgtccaaggagtgagctgccacggctcggcgccggagcgcggcgataatgccatcttcaaaatgggtccaattcttaacgaactgcaggagctctcccataacctgggcaacgatgagttcctgggtaaaggcaccctcaccgtctcagaaattttcttcacctcgccaagccgctgcgcggttgccgacagctgcgcggtctctatcgaccgccgtctgacctggggcgaaacctgggaaggcgcgctggatgagatccgcgccctgcctgccgtacagaaggccggcgccgtggtctcaatgtacaactatgaacgcccgtcatggaccgggctggtttatccaacggaatgctacttcccgacctggaaagtagaagaggatcatttcaccgtacgcgcgctcagcaacgcttatgaagggctgttcggtaaagcgccggtggtcgataaatggaccttctccaccaacggcgtttccatcatgggccgtcacggcatcccggttatcggtttcgggccaggtaaagagccggaagcccatgcgccaaatgaaaaaacctggaaacagcatctggtgacctgtgccgcgatgtacgccgcaatcccgctgagctggctggccacagagtaa

SEQ ID NO: 108446 - DNA, 168 bp, Enterobacter aerogenes; identical to SEQ ID NO: 108354

SEQ ID NO: 108447 - DNA, 603 bp, Enterobacter aerogenes; identical to SEQ ID NO: 108355

SEQ ID NO: 108448 - DNA, 564 bp, Enterobacter aerogenes; identical to SEQ ID NO: 108356

SEQ ID NO: 108449 - DNA, 1221 bp, Enterobacter aerogenes; identical to SEQ ID NO: 108357

SEQ ID NO: 108450 - DNA, 2079 bp, Enterobacter aerogenes; identical to SEQ ID NO: 108358

SEQ ID NO: 108451 - DNA, 633 bp, Enterobacter aerogenes
atggtgcttggcaaaccgcaaacagaccctacccttgaatggttcttgtctcattgccacattcataagtacccatcaaagagcacgctgattcaccagggtgagaaagcggaaacgctttactacatcgtaaaaggctccgtggctgtactcatcaaggatgaagaaggtaaagagatgatcctctcttacctcaaccagggcgatttcatcggtgaattaggcctgtttgaagaaggtcaggaacgtagtgcctgggtacgtgcgaaaaccgcatgtgaagtggccgagatctcttacaaaaaattccgtcagttaatccaggtgaacccggacatcctgatgcgcctctcctcgcagatggcgcgtcgtctgcaggtcacttccgagaaagtcggtaaccttgctttcctcgacgtgacgggccgtatcgctcagaccttactgaatctggcgaaacagcctgatgccatgactcacccggacgggatgcagatcaaaatcacccgccaggaaattggccagatcgtcggttgctctcgtgaaaccgtcggccgtattctgaagatgctggaagatcaaaacctgatctctgcacacggtaaaactatcgtcgtctacggtacccgttaa

SEQ ID NO: 108452 - DNA, 405 bp, Enterobacter aerogenes; identical to SEQ ID NO: 87817

SEQ ID NO: 108453 - DNA, 870 bp, Enterobacter aerogenes
atgtctgccaaacatccagtgatcgcagtcacgggctccagcggcgcgggcaccaccaccaccagcctcgcgtttcgcaaaattttctcgcaactgaacctgcatgccgcggaggtcgaaggggatagcttccatcgctatactcgcccggaaatggacatggcgatccgcaaagcgcgcgatcagggcaaacacatcagctacttcggcccggaagccaacgacttcagcctacttgaacgcacctttttagagtacggcgaattcggcaagggccagtcgcgaaaatatctccatacctatgatgaagcggttccctggaatcaggttcccggcacctttaccccgtggcagccgctgcctgaaccgaccgacgtgctgttttatgaggggctgcacggcggcgtggtgacgccgcagcatgacgtggcgaaacatgtcgacctgctggtcggcgtggtgccgatcgtcaacctcgaatggattcagaagctcattcgcgataccagcgaacgaggccattcgcgcgaagcggtgatggactcagtggtgcgttcgatggaggactacatcaatttcatcaccccccagttctcacgtacccatatcaacttccagcgcgtgccgacggtcgatacctcgaatccgtttgccgccaaaggtattccatcgctcgacgaaagcttcgtggtgattcacttccgcaatttgcaggggattgattatccctggctgttggcgatgttacaggggtcgtttatctcgcatatgaacaccctggtggtgccgggcggtaagatggggctggcgatggagctcattatggcgccgctggtcgagcgcttgatggaaggcaaaaccattagttaa

SEQ ID NO: 108454 - DNA, 219 bp, Enterobacter aerogenes; identical to SEQ ID NO: 87819

SEQ ID NO: 108455 - DNA, 1023 bp, Enterobacter aerogenes
atggttgaaataaccccgacagcagtgacgccccccgataacgattcgcgcgaattccatccgatgcgcggcgtgggcaatcgtcatctgcaaaccatgctgccgcggatcatccgccgcaagctccgatttacgccgcactggcagcgtcttgagctgccggatggcgatttcgtcgatctggcctggagcgaagaccctgctggcgcgcgccacaaaccgcggctggtggtttttcacggtctggaaggcagcctgcatagcccttacgcccacggtttaattcacgccgccatgcagcgcggctggctcggggtggtgatgcattttcgcggctgcagcggcgagccgaatcgcaacagtcgtatttatcactctggcgaaacggaagacggcacctggttcctgcactggttgcggcgtgaattcggcgccgcgccgacggcggcggtaggctattcgcttggcggcaacatgctgggctgtctgctggcgaaagaaggcgacaatattccgctcgatgcggccgtgattgtctcggcgccctttatgctggaagcctgcagctaccatatggataaaggattttcgcgcgtctatcagcgttacctgctcaacctgctgaaagccaacgcctcgcgcaagctgaaagcctatccaggctcgctgccggtggatcttcgccagctcaaaagcatgcgccgcatccgcgaattcgacgacatgatcaccgccaaaatccacggtttcgccgatgcgctagactattaccgacagtgcagcgcgatgccgcgcttaagcgatatcaccaagccgacgctgatcattcacgcaaaagacgatccatttatggaccatcattcaataccgccgcaggaacagctgccggctaacgtcgaatatcagctcacggaacaaggcggccacgttggctttgtcggcggtacgctgcgaaaaccgcaaatgtggctggagcaacgtattccggattggttaacccgctggctgggaggacaagcatga

SEQ ID NO: 108456 - DNA, 720 bp, Enterobacter aerogenes
atgaccaccgacgccgattacctcaaccactacgacgccagccgttttccttcaccgctggtgaccgtcgacagcgtgctgtttacccttcatcagggagcgctgtgcgtactgttggttgaacgcgcgaatcctccacagcaaggcgcatgggggctgcccggcggatttatcgatatggcccacgatgagtccacccgcactacggcgctgcggaagctgacggaaaaaaccggcatttccccgtcatggctggagcagttcggtaccttttccggaccggaccgcgatccgcgcggttggagcctgaccgttgcctggttcgcgctaatcgcctgggtcgattgtcagccgcatatcgccagcgtcagcgacgcccgctgggtgccggtccagcagcttgatgagtatcaccttgccttcgatcatcggcagatagtcagcgccgcgctggagcgcctgcgccagaaaacgatgtattcgttattgcctgtttactgtttgggggatacctttacccacggccagttgcaggaagcgaccgaaatcatcctcggccagccgattcagcgtaaaagcctaatccgccgttttgaggcctccggcatgttcgaagaaaccggagaaacgctggcgacaggggcgcgaaaggcgcgattgtggcggctcaagcccggtgcggatatccacctcttctcgcgcaatctgcttgccgattag

SEQ ID NO: 108457 - DNA, 870 bp, Enterobacter aerogenes
atgagcgaaaaattcacacttttgctggacgatacagcggtaacccttgccagcggcgtcttccctgatggcgcaggctggctgaaagtgaccggtgagctgccggcctccgccgcgttaatgcgcattcgggcggtcgcgctacgtgatatgaatgattttatgctgctggcccagttggtggaggccgttcgccatgtgaccgatgtcgccttcagccatctggagctgccatggctgccgtgggcgcgccaggatcgccatatggtgccaggcgacagctttgcgctgaaagtttttgcacagcagctgaatacactgggattcgacaaaattgtagtcctcgacccgcatagtgaggccgcggcggcggcggtaaacaacctggtcgcgattagccaacaacagtgcctgctgcagaactcccatctgcgacgtgccatcgccgccggggagttaatgctggtggcgccggatgctggagcgttaaagaaaattcagtatgtcgctaaagcctgtggcgccagcgagtttgcgatcctcagtaaggagcgagatgtcgctagcggcgcgttaacaggcttttcgctgctggccggagaggtggcgggtaaagcggtactgatcgttgatgatctttgcgatgccggtggaacgtttatcggctcggcgcaggtcctgcgtgacgccggcgcgcgtagcgttagcctgtacgtgacgcatggcgtcttttctaaaggcattacgcatctattgaataatggcatcgatgctatttactccaccacctcttatgcctctgcggctttagtccatccacagctggaactgattgatattgataccatttaccgcgcttattggggataa

SEQ ID NO: 108458 - DNA, 1491 bp, Enterobacter aerogenes; identical to SEQ ID NO: 108144

SEQ ID NO: 108459 - DNA, 1905 bp, Enterobacter aerogenes; identical to SEQ ID NO: 108145

SEQ ID NO: 108460 - DNA, 561 bp, Enterobacter aerogenes; identical to SEQ ID NO: 108146

SEQ ID NO: 108461 - DNA, 363 bp, Enterobacter aerogenes
atgggtacgcagcgccatatcaacggccatgccggtgcccatgttgtcgcccagcacttcaactattttgccgaccgctttggtacggcgggttggacgctgggtcagctcgaccactaccacgtagcccatacgcgcgcccatgatctcttcaggcgggatcaggatatcgaagctcagacggctgtcgtccggcaccacgaagcctacaccggcatcggtgaaataacggccgacgatctggctggttttcggcaccagaacgcgaacgatgcgcgcttcgcgacgccccttacgatcggcgcccaacggctgggccagcacctgatcgccatgaatacacattttcatctgctcagatga

SEQ ID NO: 108462 - DNA, 435 bp, Enterobacter aerogenes
gtgcagttaacgagtttcaccgattacggattacgcgcgctgatttatatggcgtcgttgccggatgaccgaatgaccagtatttccgaggtgacggatgtctatggcgtttcccgtaatcatatggtcaaaataatcaatcagttaagccgtgttggctacgtgacggccgtgcggggaaagaatggggggattcgccttggcaagccggctaaaatgattcgcgtgggtgatgtcgtgcgcgatcttgagccgctatcgctggtgaattgcagcagcgaattttgccacattactcccgcttgccgcctgaaacaggcacttgccgaagccgcgcaaagtttcctgaaggaactggataactacacgctggccgatttggttgaaaagaatcaaccgctatataaattattactggtggaagaaaagcgctga

SEQ ID NO: 108463 - DNA, 1299 bp, Enterobacter aerogenes
atgggtaacaacgtcgtcgtactgggcacccaatggggtgacgaaggtaaagggaagatcgtcgatctcctgactgaacgggctaaatatgttgtgcgctaccagggtggccataacgcaggccatactctcgtaatcaacggtgaaaaaaccgtcctccatcttattccatcaggtattctccgtgagaatgtaaccagcatcatcggtaacggtgttgtgctgtctccggctgcgctgatgaaagagatgaaaggtctggaagaccgtggtatccctgttcgtgagcgtctgctgctgtccgaagcctgtccgcttattcttgattatcacgttgcgctggatgttgcgcgtgagaaagcacgcggtgcgaaagctatcggtacaaccggtcgcggtatcggcccggcttacgaagataaagtcgctcgtcgcggcctgcgcgttggcgacctgtttgataaagccaccttcgccgacaaactgaaagaagtgatggaatatcacaacttccagttggtgaacttctataaagcagaagcggttgactaccaaaaagtgctggacgatgtgatggcgattgccgacatcctgaccagcatggtcgttgacgtctccgatctgctggatcaggcgcgtcagcgcggcgacttcgtgatgttcgaaggcgcgcaaggcacgctgctggatatcgaccacggtacctatccgtacgtaacttcctccaacaccactgctggtggcgtggcgaccggctccggcctgggcccgcgttatgtggattacgttctgggtatcatcaaagcttactctactcgtgtaggcgcgggtccgttcccgaccgagctgtttgatgaaactggcgagttcctgtgcaagcagggtaacgaattcggcgccactaccggccgtcgtcgtcgtaccggctggctggacgctgtcgcggtacgccgcgcggtgcagattaactccctgtccggcttctgcctgaccaaactggacgtcctggacggcctgaaagaagtaaaaatctgcgtcggctaccgtatgccggacggccgtgaagtgaccaccactccgctggccgccgacaactgggaaggtatcgagcctatctacgaaaccatgccgggttggtccgaaaccactttcggcgtgaaagagcgcagcggtctgccgcaggcagcgctgaactacatccagcgtattgaagagctgaccggcgtgccggttgatatcatctctaccggtcctgaccgtactgagactatgattctgcgcgacccgttcgacgcataa

SEQ ID NO: 108464 - DNA, 489 bp, Enterobacter aerogenes; identical to SEQ ID NO: 108294

SEQ ID NO: 108465 - DNA, 1179 bp, Enterobacter aerogenes; identical to SEQ ID NO: 108295

SEQ ID NO: 108466 - DNA, 447 bp, Enterobacter aerogenes; identical to SEQ ID NO: 108296

SEQ ID NO: 108467 - DNA, 1362 bp, Enterobacter aerogenes; identical to SEQ ID NO: 108297

SEQ ID NO: 108468 - DNA, 702 bp, Enterobacter aerogenes; identical to SEQ ID NO: 108298

SEQ ID NO: 108469 - DNA, 993 bp, Enterobacter aerogenes; identical to SEQ ID NO: 108299

SEQ ID NO: 108470 - DNA, 1677 bp, Enterobacter aerogenes; identical to SEQ ID NO: 108300

SEQ ID NO: 108471 - DNA, 315 bp, Enterobacter aerogenes; identical to SEQ ID NO: 108301

SEQ ID NO: 108472 - DNA, 258 bp, Enterobacter aerogenes; identical to SEQ ID NO: 108302

SEQ ID NO: 108473 - DNA, 339 bp, Enterobacter aerogenes; identical to SEQ ID NO: 108303

SEQ ID NO: 108474 - DNA, 327 bp, Enterobacter aerogenes
gtgggaaagcagctaacagaagatgatcttcgtgaacatggcttcaccgataaagagattgcccgcttacgtgaaatcctgacgcggcaagaaagccaaaacaaaagctattttgatttaatcgatgaacttcgcaaaagactttgggctggagtcttaggtttttttattgtttttatagtgctcattcattggtgttataattatgagtcaattaatcattttgcctattttttcattttattattcggtttctcggtagtttacaaactaactccgtttccaatggcgctcaaagcatacaaattgtatctaaaaataagatag

SEQ ID NO: 108475 - DNA, 786 bp, Enterobacter aerogenes; identical to SEQ ID NO: 108105

SEQ ID NO: 108476 - DNA, 408 bp, Enterobacter aerogenes; identical to SEQ ID NO: 108106

SEQ ID NO: 108477 - DNA, 411 bp, Enterobacter aerogenes; identical to SEQ ID NO: 108107

SEQ ID NO: 108478 - DNA, 1404 bp, Enterobacter aerogenes; identical to SEQ ID NO: 108108

SEQ ID NO: 108479 - DNA, 1254 bp, Enterobacter aerogenes
atgcgcatgtttgcccgagtcattacattgttcctttttctggcatctgccagcgtttccgccagtctgctcagccagcagggcgttcccgcacgctatatgcaagtcacggaagatgccgatatctgggcgcaggtcggcaaccatgtggtgagcgtcggcaacgttcgcgccgggcagatccttgccgtggtgccgaccacggcagactattatgaattcaatttcggcttcggtaccggctttattgataaaggacatctgggggcggtgcaaggcgcaaaacgggttgaggatagcctgggcgatttacgccagccattgagcaaccagaacctgctgacctggaaagatacgccggtatacgatgcgccatcagtgggcagtccgccgtttggtacattagcgaataacctgcgctatcccattatcagcaagctgaaagatcgccttaatcagacctggtatcagattcgaatcggcaaccggctggcgtgggtgagtagtctggatgcgcaggaggataacggcattccgctactgacttatcaccatattctgcgtgatgaagaaaatagccgttttcgccatacctccaccaccacttcggtgcgcgctttcagtaaccagatgacctggttgcgtgaccagggttataccaccctgacaatgtatcaactggaagggtatctgcgtaacaaggtgaatctgcctgcacgctcggtggtgattacctttgatgatggcctcaagtcagtgaatcgctacgcttatccgatcctcaagcagtacggcttccacgcgacggcgtttattatctcgtcgcggatcaaacgtcatccgcaaaagtgggatccgaaatcgctgcagtttatgagtatctctgagctcaggcagattcaggacgtgtttgatgtgcagtcgcatacccattttctgcaccgggtcgatgccgcccgtcacccgatattgctcagccggaattatcacaacattctctttgatttcgagcgttcccggcgggcgctgagtcagtttaatccgcacgtgctgtatctttcgtatccgttcggcggctataacgccacggcggtcaaggcggcgaacgatgccggttttcatctggcggtaacgacggtgagagggaaggtgaaaccgggggataatccgttcctgctgaagcggttgtatatcttacgtaccgattcgctggagacgatgtcgcggcttatcagcaatcagccgcaagggtaa

SEQ ID NO: 108480 - DNA, 381 bp, Enterobacter aerogenes
atgatgcgtaatatgctgcagggcaagctccatcgcgttaaagtcacgcaggctgacctgcattacgaaggttcctgcgccattgaccaggatttcctcgaagcggccggtattctggaaaatgaagccattcatctgtggaacgtgaccaacggtaaccgtttctcgacttatgcgatcgccgccgagcgtggttcgaagattatctccgtcaacggcgctgcggcgcactgcgcaagcgtcggcgatatcctcattatcgccagcttcgtgaccatgtctgacgaagaagcccgcacctggcagccgaaagtcgcctatttcgaaggcgataacgaaatgaagcgccaggcgaaagctattccggtgcaggtcgcctga

SEQ ID NO: 108481 - DNA, 855 bp, Enterobacter aerogenes
gtgctgataattgaaaccctgccgctgctgcgccagcatatccgtcgtttacgccaggaaggcaagcgcattgcgctggttcccaccatgggcaacctgcacgatggccatatgaagctggtcgatgaagccaaagcctgcgcggatgtcgtggtggtcagtatcttcgtgaatccgatgcaatttgaccgcccggacgatctggcgcgctatccgcgcaccctgcaggaggattgcgaaaagctgaacaagcgcaaggtcgactttgtctttgctccggcgccggcggaaatttatccgcagggtactgaaggacagactttcgttgacgttcctggcctgtctaccatgctggaaggcgccagccgccctggccacttccgcggcgtctcgaccattgtcagcaaactgttcaacctggtgcagccggatgtcgcctgcttcggcgagaaagatttccagcagctggcgctgatccgcaaaatggtcgccgatatgggctacgacattgagatcgtcggcgtgccgatcatccgcgctaaagacggcctggcgctgagctcacgtaacggttatctgaccgccgagcagcgtaaaatcgcccccggtctgtacaaagtgctgagtacggtagcgggcaaacttgccgcaggcgagcgtaaccttgaggaaatcattgccatcgccgagcaggagctcaatgaatcaggttttcgtgccgacgatatccagatccgcgatgccgacactctgctggagctaacggaagccagcaaacgcgcggtgatcctgatggcggcatggctgggccaggcgcgcctgattgataacaaaatcgtcgagctgggccagtag

SEQ ID NO: 108482 - DNA, 792 bp, Enterobacter aerogenes
atgaaaccgaccaccattgccctgctgcagaaatgcaaacaggagaaaaagcgcttcgccactatcaccgcctacgactacagtttcgctaagctttttgccgacgaaggcattaacgtcctgctggtgggcgattcgctggggatgacggtacagggacacgattccacgctgccggtgaccgttgacgatatcgcttaccatacccgtgctgtgcgccgcggcgcgccgaacagcctgctgctcgccgacctgccgttcatggcctacgccacgccggagcaaaccttcgaaaatgccgccgtcgtgatgcgtgccggcgccaatatggtcaaacttgaaggcggcgcctggctggctgataccgtcaggatgctggcggagcgcgcgataccggtttgcggccacctcggcctgacgccgcagtcggtcaacgtgttcggcggctataaagttcagggccgcggcgatgcggcgcaggcgctgtttgatgacgcattagccctggaagcggccggcgcgcagctgctggtgctggagtgcgtgccggtagagctggcaaaacgcatcaccgaagcgctgacgatcccggttatcggcatcggcgcaggcaacgtgaccgacgggcaaattctggtgatgcatgacgctttcgggatcaccggcggccatattcctaaattcgccaagaatttcctcgcagaagcgggcgacatccgcgccgcggtacggcagtatattgccgaagttgaatccggggcctatccgggcgaagaacatagtttccattaa

SEQ ID NO: 108483 - DNA, 345 bp, Enterobacter aerogenes
atggccgcggaaggtggcgacctcaatgatttccggcccgaacatgacgtgcgccaggcggaaacgacggccaaccaggcggcagttgcggaacagtttacgtacctggtccggggtcgcgctggtggtgacgtcaaaatcttttggtttcttgcccagcagcaggtcgcgaacgccgccgccgaccaggtaagcttcgtagcccgccttgttcagtcgatagagcaccttgagcgcgttttcactgatatctttgcgggaaattgcatgctgttcacgcgggatcaccgtcatatgcgtttgttcgacggcggcagcctctgcctcgcgctcttcacggcttag

SEQ ID NO: 108484 - DNA, 933 bp, Enterobacter aerogenes; identical to SEQ ID NO: 92153

SEQ ID NO: 108485 - DNA, 285 bp, Enterobacter aerogenes
atgagcaacgatattaccgcgcacgtgatcaccgttaagttccaggaacaagcgctgactgagattaacgagctcagcaatcatttcattcgcgcaggcttcgtcctgacgctcaacgacgatgatggcaaaacccatgatttaggtaccaacacatttggcctgctgagcgcgcaaagccccgaagacgttcgggcattaagcgcaggtctcgcggaagccgctttaggcaggccggcagagatcgccatcaccacatttagcgaatggttaaaagctcaataa

SEQ ID NO: 108486 - DNA, 861 bp, Enterobacter aerogenes
atgtggcaagctattagcaatttgttaagcgagcagcacactgacggcgctgaaatcgaactgcgcaacgagctacccggcggagagatccatgccgcctggcatttacgttttggcggaaaagattatttcgtcaaatgcgatgaacgcgaactgctccccatttttaccgcggaggcggaccagctggagctgctctcgcgctgtaaaaccgtcagcgttccgcaggtttttgccgtcggcaacgaccgggattacagttttctggtgatggaatatttgccgccgcgaccgctggacgcgcataacgcttttctgcttggtcagcaaatcgcccatttacatcagtggagcgaccagccgcagtttggccttgattttgacaacgatctgtcgacgaccccgcagccgaatgcctggcagcgccgctggtcaacgtttttcgctgaacaacgcattggctggcagctggagctagcggcggaaaaaggactgcacttcggcgatatcgacaacattgtcgaaagtgtacagcagcggctcagcagccatcagccgcagccttctttattacatggcgacttgtggtccgggaactgcgcgctagggcccaatgggccgtatattttcgatccggcatgttattggggcgatcgcgaatgcgatctggcaatgctgcctctgcatccggaacaaccgccgcagatttacgatggctatcagtcggtctcgccgctgcccgctggtttccttgaacggcaaccgatttaccagctatacactttacttaatcgggcaattctgttcggcggtcagcacctggtcaccgcgcaaaaagcgctcgatgaagccctgcaatag

SEQ ID NO: 108487 - DNA, 741 bp, Enterobacter aerogenes
atgagcgcaatgacccttgatttacctcgccgctttccgtggccaacgctgctgtccgtggctatccacggtgccgttgtggcggggttgctttatacctcggtacatcaggttattgaaaagccttcgccttcacagccaatcgaaatcacgatggtggcgccggcggatttagagcctccgcaggcggcgcagccggtcgttgaacccgttgttgaaccggagccggaaccggagcctgaagtggtgcctgagccgccaaaagaggcaccagtggttatccacaaaccggagccgaagcccaaacccaagccgaaaccaaagcctaagccggagaaaaaagtcgagccgaaacgcgaggtgaagcccgctgagccgcgcccggtctcgccgtttgagaataacaatacggcgcctgcgcgtactgccccgagtaccacggcggcaacggcaaaaccgatgaccaccgcgccgagcggtcctaaagcgttgaaacgcggcgacccgtcttacccgcaacgtgcgcaggcgctgcgtattgaaggtgacgtgcgcgtgaaatttgatgtcaccgccgatggtcgggtggagaatatccagatactctctgcgaagccggccaatatgtttgagcgtgatgtcaaaaccgcgatgcgcaaatggcgctacgaggcaggcaggccgggcactggtttgacgatgaatatcaaattccgcttaaacggcgtaaaaatggattaa

SEQ ID NO: 108488 - DNA, 297 bp, Enterobacter aerogenes
gtgctttacgtcatctacgcagaagatatcgccgattctctggaaaaacgccaggcggtgcgccctgcccatctggcgcgcctacaactattacatgatgaaggccgtttactgaccgcaggcccgatgcccgcggtggatagcaatgaacctggcgcggcaggatttagcggctcaacggttatcgcagaatttgaatcgctggaagcggcgcagtcctgggccaacgatgacccctatatcgccgcgggcgtctatcagcacgtctcggtgaaaccttacaagaaagtattttag

SEQ ID NO: 108489 - DNA, 642 bp, Enterobacter aerogenes
atgtgcggacgcttctcccagtcaatgacccgtgaagattatctttcctgtcttgccgatgaagccgatcgtgacatcgcatatgacccggagccgattggtcgatacaacgtcgcacccggtaccaaagttttgcttctgagcgaacgcgatgaacaattgcatatcgatcctgtctactggggttatgcgccaggatggtgggataaaccacctctgattaacgcacgcgtcgaaacggcggccaccagcaggatgtttaagccgctatggcaacatgacctggcgatctgctttgctgatggttggttcgaatggaagaaagaaggcgacaagaagcagccctactttatccatcgtgccgatggccagccgatattcatggcagcaatcggaagcacaccatttgaacgcggagatgaagcagaaggctttctgattgtcaccgcggctgcagataaagggctggtagatattcacgaccgccggccgcttgtactttcaccagaagcagccagggaatggataagacaggatacaggagggaaagaagccgaagaaatagctgcagacggttccgtgtcagttgaccattttacatggtaccctgtttcccgggccgtgggtaacggccagaattaa

SEQ ID NO: 108490 - DNA, 1182 bp, Enterobacter aerogenes
atggctaagggttcaacgattcagttacattttcaccatttcagtgacccgcataccggggctcggataacgcgtctgacaccaccagatgtgatatgtcatcgcaactatttctatcaaaaaagctttacacgtgacggcagtaaactcctgtttgctgctgaatttgacggtcatcgcaactattacctgctggaccggcaaaaacagaccgccgttcaacttacacacggtcgtggtgacaatactttcggtggctttttgtcgcccgacgatcgcagcctttattacgtgaaaaacgaacgggaattacgtcgtgtcagtctggatgattacagcgaacatacgatctatacggtaccggaggaatgggttggctatggcacctgggtagcaaacagcgaatgtacgcgtctggtcggtatcgaaattgcccgtgatgactggacaccgctcaccgactggcaaaaattccggacgttttacctgcgtcgtccgcattgtcgcctgttgcaggtggatctgcataacggttccacgcgggtgatccatgaagcgaacgaatggcttggacatcccctctatcgaccttacgacgacagtacggtggcattctgtcatgagggacctcacgatcttgtggatgcacgcatgtggctggtcaacgaagacgggagtaacgtacgcaaagtgaaaactcatgcgccggaagaaagctgtacccatgagttctgggtaccggatggttccgcactcctctacgtttcataccttaaaggtcattccgagcgttacattcgccgcttctcaccacaaaccggagaagacagcagcctgatgacaatgccggcctgctcacatctgatgagcaatgccgatggcacgctgctagtgggtgatggctcgggtaccccagtggacgtcgaggatacctcagggcatgtcatcgaaaacgatccctttctctatctctttgacacgcgaacccgccgctatgcgccactggcgacacatcagagttcctggctggtgctcgacggcgaccgacaggttacccatccgcatccctctttttcacccgacgaccgggacgtgttatttacatctgatttcgaaggcctgccggccctttatcttgcacaaataccggatactctggtcagttcacttggtaaggagtaa

SEQ ID NO: 108491 - DNA, 321 bp, Enterobacter aerogenes
atgtttatttttagggacgagacttcggaggaagatctcggtaacggagtacgcaggcggattctggcgcacagtggttcgctgatggcggtcgaagtacattttgaaaagggtgctatcggggcactccaccggcatattcacgaacaactgacctatgtgctttccgggcgctttgtgttcgccattggcgatgagactcgtgaggtgaaagccggtgacacactctacaaacaaccgaatatcatacacggttgcgagtgtctggaggccggtatattgctggatacttttacgccacagagagaggattttctataa

SEQ ID NO: 108492 - DNA, 1488 bp, Enterobacter aerogenes
gtggggtttgcggggattttgctcagttttttactgatcgcaatctttgttaccgcgacgcagaagaaaaactttcttgaagattatcaccatattaaccgcaactttacccataaccttgcggtgaactacaccgaatcgctgctgcgcgaaaatgactacattctggcgcgcgcgacgaaatactttgcccgcgacgatgcgctcaatagcgccgtaaatctcaatccgcaaaagggtctggacgatttgatgcgtctgcaggagctgatgccgacggtctcctccatttcgcttgccgatactcttggtcattatctgcgcgcccccgaagtgatggaaggcgatgagagccgcacgtttgatccaaaaacgcgcccctggtttattcgccaggcggaagccagtaccttcagcctctataccactccttaccttgactacttcacccaccaccctaccgttaccgtctaccggcctgtcatttcaccgcagggaaggctcaaaggtagtctggcatttcatatggatctgacctcaatgggctacgcgttacggcagattgtctcgccggtacagggcgagttttttgtcgtgcaacgcgacggcaaagtggttatccatcccgataccggcgcgctatttaaaacctacgttagcgcggaactgatggacaaaatgaccagcgcggaaggccaactttatgatgaggaacataaggcctggtactactactattcctttaccaaccctgactggttcgttattttccgcgtcaccgatgccacccttgatgacctgacgcgctatgaaaccgatattgtcgcctgggggttcgccctcgccgccattgtcatcgtcctgttcgggctgtatctgcgccacgcttcgcgtaccgtactgatgaacatcattaacgccattaagaccggcgacgtcaaacgcgcgccgcggctggaagccatgctcagcaaagcgatcgagagcaataaacagcgtgagctcacctatgtccgccaggccaccatcgatgcgctaaccggctgcaaaaatcgccgcgccttcgacagcgatatcgccgccctgatgaacgatcaccagcctttcgccctcgcgttggtcgatatcgacaactttaaatcaattaatgatacctggggccacctcaatggcgacatcgtgctgcgcaacgtcgcgcgtgaagggatacagatcctgcagccgcaggagatctcgctttaccgctacggcggcgaagagtttgccgttatcttccctgccgaacatatcgacaacgcgctcaccattctggagagctggcgccttaacgttgccagccgaacctggcgcgaagaaggattaaccgtcacctttagcgccggcctcggggaatggaatatggagccgctggaaaaactggtcgttagcgtggatgaagcgttgtataaggccaaacagcagggcaagaatcgaatcgtgcgcgcctga

SEQ ID NO: 108493 - DNA, 306 bp, Enterobacter aerogenes
atgaagaatatcgttttatgctgtgccgcaggaatgtccaccagcatgctggtgcaacgcatgaaagaggccgcgcaaaagaaaggcatcgaagtctcgatcaaagctgtgccggtagcggagttcaaagataacctggctgaggcggatattatcctgctcggcccacaggtgaagtatgagcaggcgaaactacaggcgctagccgacccggtcggtaaaaaggtcgccgttattgacatgatggattacggcatgatgaaaggcgatgccgttctggataaagccctgaagctgatggagtaa

SEQ ID NO: 108494 - DNA, 318 bp, Enterobacter aerogenes
atggaagatttagagacgattatcatggagctgctggtcaacgccggctccgcacgcagttctgccctcaccgccctgcagcaggcgcgtaaaggcgattttgccgccgccgaacaggctatggccgactcccacgaattcgtgaagcatgcgcataaaatccagacccagcttattggcctggacgaaggcagcggcaagctgccggtgaacctgattaccgtgcattcccaggatcatctaatgaacgcgatggtgattcaggatttagcaaccgatatgatcgaactgtatcgccgcctgccgcccgcacaataa

SEQ ID NO: 108495 - DNA, 1341 bp, Enterobacter aerogenes
atggaatttgctatacagctcatcattatcttaatttgtttgttctacggcgcgaaaaagggtggcattgcgctcggccttttaggcggcattggcttagttatcttagtttttgtctttcatcttaaaccaggaaaaccgccggttgatgtcatgctggtgattatcgcggtggtggccgcctcggcgacgctacaggcatccggcggtttagacgtgatgctgcagattgccgagaagctcctgcggcgcaatcccaaatacgtttctatcgtcgcgccattcgtcacctgtacgctgacgatcctgtgcggtaccggccacgtggtgtatacgatcctgccaattatttacgacgtagctatcaaaaataatattcgcccggagcggccgatggcggcgagctcgattggcgctcagatggggatcattgccagtccggtttcggtggcggtggtctcgctggtggcgatgctcgggaattttacctttaacggtaagcaccttgagtttctcgatctactggcgataaccattccgtcaacgctactggggattttggcgattggcatcttcagctggttccgcggtaaggaccttgataaagacgagaccttccaggcgtttattgcagtaccggaaaaccgtcattatgtttatggcgatacggccacgctattggataaaaagctgccgaccagcaactggatcgcgatgtggatcttccttgcctcaatcgccgtagtggcgctgcttggcgcattttccgaactgcgcccggcgttcgatggtaagcctctctcaatggtactggtgatccagatgttcatgctgctctccggggcgcttatcatcatcattaccaaaactaacccggcgtcgatttcaaaaaatgaggttttccgctcggggatgatcgctatcgtcgcggtgtatggtatcgcgtggatggcggaaaccatgtttggcgcacacatgaccgagattaaaggcgtgctcggagagatggtgaaggagtacccgtgggcctacgctatcgtgctgttattggtatcgaagttcgtcaactctcaggcggcggcgctggcggcgattgtcccggtagcgctggcgatcggcgttgacccggcctatatcgtggcttccgcgcccgcctgctacggctattacatcctgccgacttacccaagcgatctggcggcgattcagtttgaccgttcaggcacgacccatattggccgcttcgtcataaaccatagctttatcctaccgggattaattggcgtgagcgtttcttgcgtctttggctgggtgttcgcggcgatgtacggttttctgtaa

SEQ ID NO: 108496 - DNA, 4224 bp, Enterobacter aerogenes
gtgaaagacttattaaagtttctgaaagcgcaaactaaaaccgaagagtttgatgcgatcaaaattgctctggcatcgccagacatgatccgttcatggtctttcggtgaagttaaaaagccggaaaccattaactaccgtacgttcaagccagaacgtgacggtctgttctgcgctcgtattttcgggccagtaaaagactatgagtgcctgtgcggtaagtacaagcgcctgaaacaccgtggtgttatctgtgagaagtgcggcgttgaagtgacccagaccaaagtgcgtcgtgagcgcatgggccacatcgagctggcgtctccgactgcccacatctggttcctgaagtctctgccgtcccgtatcggcctgctgctggatatgccgctgcgtgatatcgaacgcgtactgtactttgaatcttatgttgttatcgaaggtggcatgaccaacctcgaacgcaaccagattctgactgaagagcagtacctggacgcgctggaagagttcggtgacgaattcgacgcgaagatgggcgccgaagctattcaggccctgctgaaaagcatggacctggagcaagagtgcgagcagctgcgtgaagagctgaacgaaaccaactccgaaaccaagcgtaaaaagctgaccaagcgcattaagctgctggaagccttcgttcagtctggcaacaagccggagtggatgatcctgaccgttctgccggttctgccgccagatctgcgtccgctggttccgctggatggcggtcgttttgcgacttctgacctgaacgatctgtatcgtcgcgtcattaaccgtaacaaccgtctgaaacgtctgctggatctggctgcgccggacatcatcgtacgcaacgaaaaacgtatgctgcaggaagcggtcgacgccctgctggataacggtcgtcgcggtcgtgcgatcaccggttccaacaaacgtcctctgaaatctttggccgatatgatcaaaggtaaacagggtcgtttccgtcagaacctgctcggtaagcgtgttgactactccggtcgttctgtaatcaccgtaggtccatacctgcgtctgcatcagtgcggtctgccgaagaaaatggcgctggagctgttcaaaccgttcatctacggcaagctggaactgcgtggcctggccaccaccatcaaagccgctaagaaaatggttgagcgcgaagaagctgtcgtttgggatatcctggacgaagttatccgcgaacacccggtactgctgaaccgtgcgccaacactgcaccgtttgggtatccaggcgtttgaaccggttctgatcgaaggtaaagccattcagctgcacccgctggtttgtgcggcatataacgccgacttcgatggtgaccagatggctgttcacgtaccgctgacgctggaagcccagctggaagcgcgtgcgctgatgatgtctaccaacaacatcctgtccccggcgaacggcgaaccaatcatcgttccgtctcaggacgttgtactgggtctgtactacatgacccgtgactgtgttaacgccaaaggcgaaggcatggtgctgactggcccgaaagaagcggagcgtatttatcgcgccggtctggcctctctgcatgcgcgcgttaaagtgcgtatcaccgaatacgaaaaagacgacaatggtgaattcgtcgcgaagaccagcctgaaagacacgaccatcggccgtgccattctgtggatgatcgtgccgaaaggtctgccgttctctatcgtgaaccaggcgctcggtaagaaagcgatctctaagatgctgaacacctgttaccgtattctgggtctgaaaccgaccgttatttttgcggaccagacgatgtacaccggctttgcttatgcagcgcgttcaggtgcatccgttggtatcgatgacatggtcatcccggagaaaaaatacgaaatcatcagcgaagcggaagcggaagttgctgagattcaggaacagttccagtctggtctggttactgcgggcgaacgctacaacaaagttatcgatatctgggctgcggcgaacgatcgtgtatccaaagcgatgatggataacctgcaaaccgaaaccgttattaaccgtgacggtcaggaagaacagcaggtttccttcaacagcatctacatgatggccgactccggtgcgcgtggttctgcggcacagattcgtcagctggctggtatgcgtggtctgatggcgaagccggatggctccatcatcgaaacgccgatcaccgcgaacttccgtgaaggtctgaacgtactccagtacttcatctccacccacggtgctcgtaaaggtctggcggataccgcactgaagactgcgaactccggttacctgactcgtcgtctggttgacgttgcgcaggacctggttgtcactgaagacgactgtggcaccctggaaggcatcaccatgacgccggttatcgaaggtggcgacgttaaagagccgctgcgcgatcgcgtattgggtcgtgtgactgctgaagacgttctgaagccgggtaccgcggacattctggttccacgtaacacgctgctgcacgagcactggtgtgacctgctggaagagaactccgttgactccgtcaaagttcgttccgttgtatcctgtgacaccgactttggtgtatgtgcgcactgctacggtcgtgacctggcgcgtggccacctcatcaacaaaggtgaggctatcggcgttatcgcggcacagtccatcggtgagccgggtacacagctgacgatgcgtacgttccacatcggtggtgcggcatctcgtgcggctgctgaatccagcatccaggtgaaaaacaaaggtagcatccgtctgagcaatgcgaagtcggttgtgaactccagcggtaaactggttatcacctcgcgtaacaccgaactgaagctgatcgacgaattcggtcgtaccaaagaaagctataaagtgccttacggctccgttatggctaaaggcgacggcgagcaggttgctggcggtgaaaccgttgcaaactgggatccgcataccatgccggttatcaccgaagtgagtggtttcgtccgcttcactgacatgatcgacggccagaccattactcgtcagaccgacgagctgaccggtctgtcttcgctggtggttctggattccgcggaacgtacctccggtggtaaagatctgcgtccggcgctgaaaattgttgatgctcagggcaacgacgttctgatcccaggcaccgatatgcctgctcagtacttcctgccgggtaaagcgattgttcagctggaagatggcgtacagatcagctctggtgacaccctggcgcgtgttccgcaggaatctggcggtaccaaggatatcaccggtggtctgccgcgcgttgcggacctgttcgaagcacgtcgtccgaaagagccggcaatcctggctgaaatcagcggcatcatttccttcggtaaagaaaccaaagggaaacgtcgtctggttatcaccccggtagacggtagcgaaccgtacgaagagatgattccgaaatggcgtcagctgaacgtgttcgaaggtgaacgtgtagaacgtggtgacgtggtttccgacggtccggaagcgccgcacgacattctgcgtcttcgtggcgtacacgcggtaacgcgttacatcaccaacgaggtgcaggacgtttatcgtctgcaaggcgttaagattaacgataagcacattgaagttatcgttcgtcagatgctgcgtaaagcgaccatcgaaagtgctggtagctccgacttcctcgaaggtgagcaggttgaatactcccgcgttaagatcgctaaccgcgagcttgaagcgaatggcaaagttgcggcaacctattcccgcgacctgctgggtatcaccaaagcgtctctggcaaccgagtccttcatctccgcggcatcgttccaggagaccactcgcgtgctgaccgaagcagccgttgcgggcaaacgcgacgaactgcgcggtctgaaagagaacgtcatcgtgggtcgtctgatcccggcaggtaccggttatgcgtaccaccaggatcgtatgcgccgtcgcgcagcgggcgaacagccagctgcgccgcaggtgagcgtagaagaagcctctgccaacctggcagaactgctgaacgcaggcctgggcggttctgacaacgattaa

SEQ ID NO: 108497 - DNA, 4029 bp, Enterobacter aerogenes
atggtttactcctataccgagaaaaaacgtattcgtaaggattttggtaaacgtccacaagttctggatgtgccttatctcctttctatccagcttgactcgttccagaagtttatcgagcaagatcctgaagggcagtatggtctggaagcagccttccgttccgtattcccgattcagagctacagcggtaattcagagctgcagtacgtcagctaccgtctgggcgaacctgtttttgatgttaaagaatgtcagatccgtggcgtgacgtattccgcaccgctgcgcgtaaaactgcgtctggtgatctacgagcgcgaagcgccggaaggcaccgttaaagacattaaagaacaagaagtctacatgggcgaaatcccgctcatgaccgacaacggtaccttcgttatcaacggtaccgagcgtgttatcgtttctcagctgcaccgtagcccgggcgtcttctttgacagtgacaaaggtaagactcactcttccggtaaggtcctgtataacgcacgtatcatcccttaccgtggttcctggctggacttcgaattcgacccgaaagacaacctgttcgttcgtatcgaccgtcgtcgtaaactgcctgcaaccatcattctgcgcgcgctgaattacaccactgagcagatccttgacctgttcttcgagaaagtggtctttgaaattcgcgacaacaagctgcagatggagctggtgccggagcgtctgcgcggtgaaaccgcctccttcgatatcgaagccaacggtaaagtgtacgttgagaaaggccgtcgtattaccgcgcgccatattcgccagctggaaaaagacgatatcaaacatatcgaagttccggttgagtacatcgcgggtaaagttgcttctaaagactacatcgacgaagcgaccggcgaactgatctgcccggcgaacatggagctgagcctggatctgctggctaaactgagccagtccggccacaagcgtatcgaaacgctgttcaccaacgatctggaccacggtccgtacatttctgaaactgtacgcgtcgacccgaccaacgatcgtctgagcgcgctggtagaaatctaccgcatgatgcgcccgggtgagccgccgactcgtgaagcggctgaaagcctgtttgagaacctgttcttctccgaagaccgctacgatctgtccgcggttggtcgtatgaagttcaaccgttctctgctgcgcgacgaaatcgaaggttccggtatcctgagcaaagacgacatcatcgaagtgatgaagaagctcatcgatatccgtaacggtaaaggcgaagtcgatgatatcgaccacctcggcaaccgtcgtatccgttccgttggcgaaatggcggaaaaccagttccgcgttggcctggtgcgtgtagagcgtgcggttaaagagcgtttgtctctgggcgatctggataccctgatgcctcaggatatgatcaacgccaagccgatttccgcagcagtgaaagagttctttggttccagccagttgtcccagtttatggaccagaacaacccgctgtctgagattacgcacaaacgtcgtatctccgcactcggcccaggcggtctgacccgtgaacgcgcaggcttcgaagttcgagacgtacacccgactcactacggtcgcgtatgtccaatcgaaacgcctgaaggtccgaacatcggtctgatcaactccctgtccgtgtacgcacagactaacgaatacggtttccttgagaccccgtatcgtaaagtgaccgacggtgttgttaccgacgaaattcattacctgtctgctatcgaagaaggtaactacgtcattgctcaggcgaactccaacctggatgacgaaggccactttgttgaagatctggttacctgccgtagtaaaggcgaatccagcttgttcagccgcgaccaggttgactacatggacgtatccacccagcaggtggtatccgtcggtgcgtccctgatcccgttcctggaacacgatgacgccaaccgtgcattgatgggtgcgaacatgcaacgtcaggcggttccgactctgcgcgctgataagccgctggttggtaccggtatggaacgtgctgttgccgttgactccggtgttactgcggtagctaaacgtggcggtaccgttcagtacgtggatgcttcccgtatcgttatcaaagttaacgaagacgagatgtacccgggcgaagcaggtatcgacatctataacctgaccaagtacacccgttctaaccagaacacctgcatcaaccagatgccttgcgtgtccctgggcgaaccaattgaacgcggcgacgtcctggccgacggcccgtccaccgaccttggtgaactggcgctgggtcagaacatgcgcgtagcgttcatgccgtggaacggctacaacttcgaagactccatcctcgtatccgagcgtgtcgtccaggaagaccgtttcaccaccatccacattcaggaactggcgtgcgtgtcccgtgacaccaagctggggccggaagagatcaccgctgacatcccgaacgtgggtgaagctgcgctctccaaactggatgaatccggtatcgtttatatcggtgcggaagtgaccggcggcgacattctggttggtaaggtaacgccgaaaggtgaaacccagctgactccggaagagaaactgctgcgcgcgatcttcggtgagaaagcgtctgacgttaaagactcttctctgcgcgtaccgaacggtgtctctggtaccgttatcgacgttcaggtctttacccgtgacggcgtagaaaaagacaagcgtgcgcttgaaatcgaagagatgcagctgaagcaggctaaaaaagacctgtctgaagaactgcagatcctcgaagctggtctgttcagccgtatttacgctgtgctggttgccggtggcgttgaagctgacaagctcgacaaactgcctcgcgatcgctggctggaactgggcctgaccgacgaagagaaacaaaatcagctggagcaactggctgagcagtatgacgaactgaaacacgagttcgagaaaaaactcgaagcgaaacgccgtaaaatcacccaaggcgacgatctggcaccgggcgtgctgaagattgttaaggtatacctggccgttaaacgccgtatccagcctggtgataagatggcaggtcgtcacggtaacaagggtgttatctctaagatcaacccgatcgaagatatgccgcacgatgctaacggtacgccggtagatatcgtactgaacccgctgggcgtaccgtctcgtatgaacatcggtcagatcctggaaactcacctgggtatggctgcgaaaggcatcggcgataagatcaacgccatgctgaaacagcagcaagaagtcgcgaaactgcgcgaattcatccagcgtgcttacgatctgggcgctgacgttcgccagaaagttgacctgaataccttcagcgatgaagaagttctgcgtctggctgaaaacctgcgtaaaggcatgccgatcgcaacgccggtattcgacggtgcgaaagaagctgaaatcaaagagctgctgcagctgggcgatctgccgacttccggtcagatcactctgtttgacggccgcaccggtgaacagttcgaacgtccggtaaccgtaggttacatgtacatgctgaaactgaaccacctggtcgacgacaaaatgcacgctcgttccaccggttcttacagcctggttactcagcagccgctgggtggtaaggcgcagttcggtggtcagcgcttcggtgagatggaagtgtgggcgctggaagcatacggcgcggcctacaccctgcaggaaatgctcaccgttaagtctgatgacgtgaacggtcgtaccaagatgtataaaaacatcgtggacggcaaccaccagatggaaccgggcatgccggaatccttcaacgtactgttgaaagaaatccgctcgctgggcatcaacatcgaactggaagacgagtaa

SEQ ID NO: 108498 - DNA, 366 bp, Enterobacter aerogenes; identical to SEQ ID NO: 91680

SEQ ID NO: 108499 - DNA, 498 bp, Enterobacter aerogenes; identical to SEQ ID NO: 91681

SEQ ID NO: 108500 - DNA, 264 bp, Enterobacter aerogenes
atggttctcgccagcgctgatttcaccttcctgacggttatccagcttcgccgcatagagattgagcgcccggccggcgctgataaccccctgattaatcagtcccagtccggagagattccactgcaggttgccgttggcgatgatcctcccggcgttatgaaacgcctgacgcaacgtgagcgacatatcgccctgagagagcacctcgccatcgccgctgagggaatcggcatcgaggctaagtttgctcgcggcaagtaa

SEQ ID NO: 108501 - DNA, 201 bp, Enterobacter aerogenes
gtgaatggtgatgttgagattaccgccggactgcagttctccctgccggttatcaacggtggcgctctgaatacccagggcatcaaaggcggtaattgtgccctgctggttatccagcaaaccgctcgtcgtcaggttgacgctgccccgctgcgccgtgcctatctgcccgtgacgattattaagattttcagcctgtag

SEQ ID NO: 108502 - DNA, 957 bp, Enterobacter aerogenes
atggcaccgattgcagtcaccctattaaccggttttctcggcgcaggaaaaaccaccctgttgcgccacatccttaatgagcagcacggtttcaaaatcgccgtgattgaaaatgaatttggcgaagtttccgttgacgatcaattgatcggcgaccgcgccacgcagattaaaaccctgaccaacggctgtatttgctgcacgcgctccaacgaactggaagatgccctgctcgatctgctcgacagccgcgatcgcggcgagattgccttcgaccgactggtgattgagtgcaccggcatggccgacccagggccgattattcagacctttttctcccatgaggtgctttgcgaacgctatctgctggacggcgtgattgccctggttgacgccgtccatgccgaccagcagatggatcagtttaccattgcccagtcgcaggtcggctacgcggaccggattctgttaaccaaaaccgatgtcgccggcgacaccgaaaagttgcgcgaacggctggcgcgcatcaacgcgcgggcgccaatttataccgtcatccacggcgatatcgatttaagcctgctctttaataccagcggttttatgctggaagagaaggttgtcagcgccacaccgcgctttcattttgtggcagaaaaacagaacgacgtctcgtcgattgtggtcgagctcgactatccggtggatatcagtgaagtttcgcgggtgatggaaaatctgctgctctcctacgccgagcaactgatgcgctataaaggcatgctgtggatcgacggcgagccaaatcgcctgctgttccagggcgtgcagcgcctctacagcgccgactgggatcgcccgtggggcgatgaaacgccgcacagcacgctggtgtttatcggcattcaactgccggaagaagaaatccgcgccgcgtttgccgggctccgtaaatag

SEQ ID NO: 108503 - DNA, 1371 bp, Enterobacter aerogenes
atggcttatcagacagtgaatcctgcgaataaccagcttattaaaagctatcccgcacacagcgatgctgacgtggaggcggcgctgcggcaggccgatgcgctttatcattctgcgtgggcgaaaggcgatattgcgcagcgtctgccggtgctgcataagcttgccgaccttatcgacagccgggcggaggagctggcgaaaatcgccagccaggagatgggcaagctcattaaacagagccgcggcgaggtcaaactctgcgcgcagatcgcccgctattatgccgacaacgccgaacggttcctggcgccggtgaagtatccctccgaccttggcgaagcctgggttgagcaccatcccatcggcgtcttaatggcggtggagccgtggaacttcccctattaccagttaatgcgcgtgctggcgccaaatctggcggccggtaatccggttattgctaaacatgccagcatcgttccgcaatgcgccgagaccttcgcgcatctggtgcgcgaggctggcgcgccggaaggggcgtggaccaacctgtttatctctcaggagcaggtggcgaaaatcatcgctgacgatcgggtgcagggggtggcgctgaccggctcggaaaaagcgggcggcatcgtggcgtcgcaggcggcgaagcatatcaagaaagcgacgctggagctgggcggcaatgatgtgtttgtggtactcgacgatgccgacctggaacgcgcggtgaaaataggcgtacaggcgcggctgaacaacgccgggcaggtttgcaccgccgctaaacgcttcattctgcatgaaaaaatcgccgagtcgttcctgagcaagtttagcgatgccttccgccaggtgaagatcggcgatccgctcgatgaaagcaccacccttggcccgctctcgtcgaaagaggcgctggaaaccttaagtaaacaggtcgacgaggcggtgaagcatggcgccaaattacacctcggcggcaagccggtttccggcgaaggtaatttctacgaacccactattctgacgggaattacccgtgagaacccggcgtacttcgaagagttctttggcccggtggcgcagatatacgtggtgaaagacgatgatgaggcgattgagctcgccaacgactctcactacggcctgggcggcgcggtgtttagtcaggacattgagcgggcgaagcgtatggcctcggggattgaaaccggcatggtctatatcaactggttaacggataccgcgccggagctgccttttggcggcgtgaagcgctccggctttggccgtgagctttccgacctcggtatcaaagaatttgtgaatcagaagctggtggtcgttcgccgctaa

SEQ ID NO: 108504 - DNA, 816 bp, Enterobacter aerogenes
atggaaagatatcgcccacatggtcgtaccgtaaccactttagaagcagatgtacttaaacttcgagcgctagaaatggtgttagtgcttttctatgtagaaaaccttaaaggttttattatcagttctgtgaaagttacaaaacgcctaagaaaaattattgataacacgcaatccacaacaaataacgtagagcaaattacttttaaaaaagcacatgccttactcatttcagagggtgtcataacacaagaagaaagctcacaactgagagaactgattgactaccgtaatactataggccatgagatccatagaataaccatagatattggtgcatactcaaatctggcggagtatgacctccctaacggacacaaaatagcaaaatataattactcggcagtccagcgcatacaaaatcttagaaagaagatagaaagaaaaatgatggaaaagtcattttcctttgagttgtcttttaacacactggcatttgatgccgcagaacaagcataccttaaagagattaagcggttaaagaaaaaggttaatgctgggattgataagttgaatattacaatagaaactacaaataaaataatccgcaacattcctcctgaagttatggatacggtacaacccggccatccgaaaaacactaagagtaatggtacatttagtcaagaaggtgcgaaagcaatgttcatgctgtatgatgcaaaagcaaccccattagcggtttcttacataatgaggataacctaccgtaccgctgctaaatggcacaagaaatggctgtcacaacataaataa

SEQ ID NO: 108505 - DNA, 441 bp, Enterobacter aerogenes
atgtctggtgttttatcaagtgcggcggcagcagttgggattattgataaagctgtaaatattgctaagaaactatcgaatgaaagtaatgaaattgatacggcgacacttaaattggaattggcaaatattatgagtgagctggcaaatgcgaaaatagaaatcataacaacgcaagcattgttgttccactcagagcaaaagaataaacagcttgaggaacaattggaagagaagcgaaaattcagttttattgatggtgtgtactggattgatggggactctacggcgttttgtccgaaatgttttgagaatgagcataaaaaaatacatatgcagtcccgtgaaagaatgtacgcgggtttgggggcgacgatagaaaaacctaactggtattgccgcgtgtgtaaaagtacgttcgaccgcatagttaacagctaa

SEQ ID NO: 108506 - DNA, 534 bp, Enterobacter aerogenes
atggatgctagttatgtaagatcaattgaaaatacaatgatgtgcttggccacattctcacggtctattaattctttctatgcgctgagcgataacttgcagtatttggactatgggactggaaacttagttccttatcagaacatctgcaacgcattgataagtgatgcggctataaactggtgcaaagtttttggttctaataatgagagtacccactggaaatatattattgatgatcatgaagattttcgtagtattctctttgatgaaattgggctaactaatgctgagtttacagtctactggaaaaagatgactgattttagaagtaatattattgcccatttcaattatgattttttcttagaaggagctactcctgaatttgatacggcaatagcagtggcttgctctgcacataaatatttgcgggaacatttacctgctggtgttaattatacaggaccaactgatttgaaagtttacggtcaggatgttggcagggctgttttgaataagataatactgtga

SEQ ID NO: 108507 - DNA, 384 bp, Enterobacter aerogenes; identical to SEQ ID NO: 108369

SEQ ID NO: 108508 - DNA, 1155 bp, Enterobacter aerogenes; identical to SEQ ID NO: 108370

SEQ ID NO: 108509 - DNA, 1395 bp, Enterobacter aerogenes; identical to SEQ ID NO: 108371

SEQ ID NO: 108510 - DNA, 459 bp, Enterobacter aerogenes; identical to SEQ ID NO: 108372

SEQ ID NO: 108511 - DNA, 708 bp, Enterobacter aerogenes; identical to SEQ ID NO: 108373

SEQ ID NO: 108512 - DNA, 732 bp, Enterobacter aerogenes; identical to SEQ ID NO: 108374

SEQ ID NO: 108513 - DNA, 951 bp, Enterobacter aerogenes; identical to SEQ ID NO: 108375

SEQ ID NO: 108514 - DNA, 564 bp, Enterobacter aerogenes; identical to SEQ ID NO: 108376

SEQ ID NO: 108515 - DNA, 417 bp, Enterobacter aerogenes; identical to SEQ ID NO: 108377

SEQ ID NO: 108516 - DNA, 654 bp, Enterobacter aerogenes; identical to SEQ ID NO: 108378

SEQ ID NO: 108517 - DNA, 981 bp, Enterobacter aerogenes; identical to SEQ ID NO: 108224

SEQ ID NO: 108518 - DNA, 705 bp, Enterobacter aerogenes; identical to SEQ ID NO: 108225

SEQ ID NO: 108519 - DNA, 567 bp, Enterobacter aerogenes; identical to SEQ ID NO: 108226

SEQ ID NO: 108520 - DNA, 291 bp, Enterobacter aerogenes; identical to SEQ ID NO: 108227

SEQ ID NO: 108521 - DNA, 594 bp, Enterobacter aerogenes; identical to SEQ ID NO: 108228

SEQ ID NO: 108522 - DNA, 735 bp, Enterobacter aerogenes
atggctgagatgaaaaaactgaaaattgaagtggtgcgctacaacccggaagtcgacaccgcgccgcacagcgccttctatgaagtcccttacgacgaacaaacctcgctgctcgacgcgctgggctatatcaaagataacctcgcgccggacttaagctaccgctggtcgtgccgcatggcgatctgcggctcctgcggcatgatggtcaataaggtgccaaaactggcctgtaaaaccttcctgcgcgattacagcaagggtctgaaggttgaagcgctggctaatttcccgattgagcgcgatctggtggtcgatatgacccactttatcgaaagtctggaagcgattaagccgtacatcatcggtaatgcgcgcacgccggatcaggggccgaataaacagaccccggcgcagatggcgaaataccatcagttctccggctgcatcaactgcggtctgtgctatgccgcctgtccgcagtttggtctgaacccggagttcattggcccggcggcgatcaccctcgcccatcgctacaacgaagacagccgcgaccacggcaaaaaggaacgtatggcgcagctcaatggccagaacggcgtgtggagttgtactttcgtcggcttctgctccgaagtttgtccgaagcatgtcgacccggcggccgccattcagcagggcaaggtagaaagttcgaaagacttcctgatcgccaccctgaaaccacgctaa

SEQ ID NO: 108523 - DNA, 930 bp, Enterobacter aerogenes; identical to SEQ ID NO: 90815

SEQ ID NO: 108524 - DNA, 891 bp, Enterobacter aerogenes
atggatttacgcgatctgaaaacctttctgcatctggcggaaagccgccattttggccgcagcgcgcgggctatgcacgtcagtccctccacgctttcgcggcagattcaacgcctggaagaggacctcggccagccgctgttcgttcgcgataatcgcaccgtaaccctaaccgaggccggcgaagaactccgcacctttgcccagcagactttattgcagtatcagcaactgcgccacgccatcgaccagcagggaccgtcgctctccggcgagctacatattttctgctccgtgaccgccgcttacagtcacttgccgccgattctcgatcgctttcgcgccgcgcatccttcggtagagataaagttatcgaccggcgacgccgctgatgcgatggaaaaagtggtcactggagaagccgatctggccattgccggtaagccggagacgctgccgggctcggtggcgttttcgatgctggaaaatcttgcggtggtgctgattgccccggcgttgccctgcccggtgcgcaatcaggtcacggtcgagcatcccgactgggcaacggtgccgtttatcatggccgatcagggcccggtgcgccgccgcatcgagctgtggttccgtcgccataaaatcagcaatccatccatttacgccaccgtcggcggccatgaagccatggtatctatggtcgccctcggctgcggcgtggcgctactgccggaagtggtgctggaaaacagccccgagccggtccgcaatcgcgtgatgatcctcgatcgcagcgatgagaagacgccatttgagctgggcgtctgcgcacaaaaaaagcggctgtacgagccgcttattgatgcgttctggaaaatcctgcctaaccactag

SEQ ID NO: 108525 - DNA, 1476 bp, Enterobacter aerogenes
atggctaactacttcaacacactgaatctgcgccagcagctggctcagctgggcaaatgccgctttatggggcgcgatgaatttgccgatggcgcaagctatcttcagggtaaaaaagtagtcatcgtcggctgtggcgcgcagggcctgaaccaggggctgaacatgcgtgactccggcctggatatctcctatgcgctgcgtaaagaagcgatcgccgagaagcgcgcatcctggcgtaaagcgaccgaaaacggcttcaaagtgggtacctatgaagagctgatcccgcaggctgacctggtcgtcaacctgactccggacaaacagcactctgacgttgtgcgttccgtacagccgctgatgaaagacggcgcggcgctgggttactcccacggcttcaacattgttgaagtgggcgagcagatccgcaaagacatcaccgtggtgatggtggcgccgaagtgcccgggtaccgaagttcgtgaagagtacaaacgcggtttcggcgtgccgacgcttatcgccgtacacccggaaaacgatccgaaaggcgaaggtatggccattgctaaagcgtgggcagcggcgaccggcggccatcgtgcgggtgttctggaatcctccttcgtggcggaagtgaaatctgacctgatgggtgagcagactatcctctgcggcatgctgcaggcgggttctctgctgtgcttcgataagctggtggctgaaggtaccgatccggcgtatgcggaaaaactgattcagttcggttgggaaaccatcaccgaagcgctgaagcaaggcggcatcaccctgatgatggatcgcctgtctaatccggcgaaactgcgtgcttacgcgctgtcagaacagctgaaagagatcatggcgccgctgttccagaaacatatggatgacatcatctccggcgaattctcttccggcatgatggctgactgggcgaacgacgacaaaaaactgctgacctggcgtgaagagaccggtaaaaccgcgttcgaaaccgcgccacagtatgaaggtaaaatcggcgagcaggagtacttcgataaaggcgttctgatgattgcaatggtgaaagcgggcgttgaactggccttcgaaaccatggttgattccggcatcatcgaagagtccgcttactacgaatcgctgcacgagctgccgcttatcgccaacacaatcgcccgtaagcgcctgtatgaaatgaacgtggttatctccgataccgcggagtacggtaactacctgttctcttatgcttgcgtaccgctgctgaaagagttcatgaccactctgcagaccggcgacctgggcaaagcgattgccgaaggtgcggtggataacgctcagctgcgtgacgtgaacgaagcgattcgcagccacgctatcgaagcggtgggtaaaaaactgcgcggttatatgaccgatatgaagcgtatcgcggttgccggctga

SEQ ID NO: 108526 - DNA, 411 bp, Enterobacter aerogenes
atggccttcgcgccagcacgtgttgcgcctttcgtgatgcaacgtcttcaggtaccggttcaggtactgttctatgccgggttgtttgtctgcgctgaatatctggttaattggctacatctcccgcttcctgccaatcttgtcggcatgttgatgctgctgatgcttatcgtctgccgggtgataccgctaaactgggtgcgtgcaggcgcgcgctggctactggcggagatgctgctgtttttcgtcccggcggtggttgccgtcgttaactatgcgcaactgctgatgatagacggctggcgcatcttcctcgtcatcgggctaagtaccaccatggtactgggcgccacggcctgggtagtggataaggtctatcgctacgaagtgagcaggttgaaagatgagtga

SEQ ID NO: 108527 - DNA, 882 bp, Enterobacter aerogenes
atggatatacgtacgttgcggtattttgtcgaagtcgtccgccagcaaagctttacccgcgcggcggagaagctcttcgtcacgcagcccaccatcagcaagatgctcaaaaatctggaagatgagctcaattgcaccctgcttatccgtgatggccgtaagctgttgttaaccgataccggccgggtagtgttcgaacgcgggcaggcgatactcggcgaattcagccagttaaaagccgagctcagcgacatcaaccatctaaataaaggcgtgctgcgcctggggatcccgccgatggtcggcatgttgatggccgagcccatcagccgctttcgcctgcgttatcccggcgtggagctgaaaatctccgagttcggcgggttgacggtgcagcaggcggttagcaacggcgaactcgatctggcgatgaccgcgctaccggtcgatgaggccagcgctctgaccacgctgtcgctcttcagccatccgctctgcgtcctcgtaccgaagacggcgcagtggcagggtatcacctcgatctcgccgcaaaagctggcgcagcatccgttggttatctacaacgaagatttcgccctcagccagcaactgatgcgcctgtttgccgagcatgacgtgaagccgcgtatcgccgtgcgcagcggccagtgggattttctggcggcgatggtgcaggcgggcattggcgtagcgattttgccggagccgatttgccagcggctggatgccgaggatttttactggatcccgctggagagcgaattacgttgggaattagggatgatctggcgggaaggagtgtatatgtcgcgcagcgcccaggcgtggctggagtgcagtaagtcgttttggctggagtaa

SEQ ID NO: 108528 - DNA, 1647 bp, Enterobacter aerogenes
atggaaatattcttcaccatactcatcatgacccttgtggtctcactctccggggtggttacacgcgtactgccctttcaggttccactaccgttaatgcaaatcgccatcggcgcgctgttagcctggccaacctttggtttgcacgtcgagttcgaccctgaactcttcctcgttctgtttattccgccgctgctatttgccgatggctggaaaacgccgacccgcgaatttatcgagcacgggcgggaaatcttcggcctggcgctggcgctggtggtggttaccgtggttggtatcggcttcctgatttactggattgtgccggggatcccgctggttccggcgttcgccctggcggcggtgctgtcgccgaccgatgccgtggcgctgtccggtattgttggcgaagggcggataccgaagaaaatcatgggcatcctgcagggcgaagcgctgatgaacgacgcctctggcctggtgtcgttaaaatttgccgttgccgtggcgatggggacgatggtgttcaccattggcggcgcaaccgttgagttcttgaaggtggcgattggcggcatcctggcaggttttgtggtcagctggttgtatggccgctcaatgcgtttcctcagccgctggggcggcgatgaaccggcaacgcaaattgtgctgctgttcctgctgccgttcgcttcctacctgattgccgaacatatcggtttctcggggatcctggcggcggtggccgcgggtatgactatcacccgttccggggtgatgcgtaccgcgccgctggctatgcgcctacgcgccaacagtacctgggccatgctggagtttgtgtttaacggcatggtgttcctgctgttgggcctgcagctgccggatatcctgtcgagctcgctggtggcggcggaagccgatccgaacgttgaaacctggatgctgttcaccgatatcgtgctgatttacgccgcgctgatgctggtgcgtttcggctggctgtggacgatgcgtaagcttagccagcgcttcctgaagaagaaaccgatggagtttggctcctggaccactcgcgagctgctgatctcctccgtcgccggggtgcgcggggcgattaccctcgccggtgtgctatcgattccgctactgctgccggacggcaacgtcttcccggcgcgttacgagcttattttccttgccgccggggtgattcttttctccctgttcgtcggggtgatcgcgttgccgattctgttgcggcgtattgagtccaccgaccacgtacagcagcgcaaagaagagcgtctggcgcgcgccgcgacggcggatgtggcgattgtcgcgattcagaaaatggaagaacgcctggcggcggataccaaagagaatatcgacaaccagctgctgaccgaggtgagttcgcgtgtcatcggtaatttgcgtcgccgcgtagatgggcgtaacgatgtcgaaacctcgatgctggaagagagccttgagcgccgtttccgtctggcggcgctgcgttcggaacgcggcgagctgtaccacctgcgcgcgacgcggcaaatcagcaacgagacgttgcagaaactgctgcacgatctcgacctgttagaagcgctgttaatcgaagatcagtaa

SEQ ID NO: 108529 - DNA, 1350 bp, Enterobacter aerogenes
atgtctacgccttcagcgcgtaccggcggttctttagacgcctggtttaaaatttcagctcgcggcagttccgtacgtcaggaaatcgttgccgggttaacgaccttcctggcgatggtgtactcggtcattgtggtgccgggaatgctggggaaagcgggttttccgccggcagcggtgttcgtgtcgacctgcctggtggcgggcgtcggttcattagtcatgggcctgtgggccaacctgccgctggctatcgggtgcgcgatttcgctgaccgcatttaccgcttttagcctggtgctggggcagcacatcagcattccagtagcattaggcgccgttttcctgatgggggtgttgttcaccattatctccgctaccggtattcgtagctggatcctgcgcaacctgccgcagggcgtggcgcacggcaccggcatcggtatcggcctgttcctgcttctgattgccgccaacggcgtcggcctggtgattaaaaacccgctggacggcctgccggttgcgctgggcaacttcgacagtttcccggtgatgatgtcgctgattggcctggcggtcattatcgggctggaaaaactgaaagtgccgggcggcattctgctgaccatcatcggggtatcaattatcgggctgattttcgatccgaacgtccacttctccgggattttcgccatgccgtcgctgagcgatgacaaaggcaattcgctgattggcagccttgatatcatcggcgcgctgaatccggtggtgctgccaagcgtgctggcgctggtcatgaccgcggtattcgatgctaccggtaccattcgcgcggtggccggccaggctaacctgctggataaagacgggcagatcatcaacggcggcaaagcgctgactaccgactccctgagcagcgtgttctccggcgtggtgggcgcggctcctgcggcggtgtatatcgaatcggcggccggtacggcggcgggcggtaaaaccggcctgacggccgtcaccgttggcgtgctgttcctgctgatcctgttcctttctccgctctcctatctggtgccggcctacgcgaccgcgccagcgctgatgtacgttggcctgctgatgctgagcaacgtggcgaaaatcgacttcaatgacttcgttgatgcgatggcggggctgattaccgcggtgttcatcgtgctgacctgcaacatcgtgaccggtattatgatcggtttcgcatcgttggtgattggccgcgtggtatccggcgagtggcgtaagctcaatgcgggcaccgtgatcatcgcggcggcgctggttatcttctatgccggcggctgggcgatttaa
